United States Patent Application Publication US 2014/0325702 A1 - sequence listing, part 44

SEQ ID NO: 104914 - DNA, 223 bp, Heterodera glycines
aagatttttagcacatctaaatcccctctctaataatggtcagattagcatgatgaaacaaattctttgcttcattcatttcaataaaaactatcacacgtgccaaaaattaatgtagaataaaaattaaaaaatatattattaaggccaaaattattaatgttaaaaggtttaaaaactattttggatatgtaaaaaacaaaaaataattatctgcaggatg

SEQ ID NO: 104915 - DNA, 1003 bp, Heterodera glycines
ctaattcggggaattggggactccgagctttgcaaaaatttaaaaagttaattcaaaacgaaggggggaaaggttgaaaatttatgaaattttgaagaatctccttaatattaattaattaaaaattccgaaaaacttttcggcgaagcttatggcaccgccggcccccaaaaactcaaatttttttttgcaaagaattgtcccaaaattgcaaaaattggtattttttaggaaatgtaacaaattgcaaattttcaaaaaaaaatttcctcgcggctcctaacaccaccgccgctcatcccctctttgttccccaaattttttatttgaaaaagagcgccgcaaaaaatggtggtcaaattccgtgctgggacatttcgtaaaattcgccaccttgggcgtttcgtaaaattcgacatttttgcaatttttacaattaaaaaatctaatctgttcacatttattccgattgatttattcaattaataaaattattttcactttaaaaataacaagaaatatcttattaaaaatgttgccaagaagatcaatcccgattcggtcgtcaattacttatgtagtaatttgagttaattttgttaattttatagatatgaactatggccctgaacaccaaaatttaatatattaatttgattttttagttattgattaaaaaattctctacttttttaaaaacttatttaattctggtcagcactttggaacaaaagaataaatatctaaatccgccatcaaaggtatattaaaattaaaagatgattaaaattataaatttttttaatttgagcaaatatgttagtcgagatttctctagttgtttgtcaagaaaattaattgggcgtttcgtaaaatccgccattttagcgaatttattttacattcttggtaccattcgatagccaagctttttctctattagcctgccaaattcaaactcatgtaattggagtcgttcgctgccgcaacaattttgaaaatg

SEQ ID NO: 104916 - DNA, 1003 bp, Heterodera glycines
  unsure (1)..(1003): unsure at all n locations
ccaacccctaccaccagcaaacagcagaggatgcttattcctcggtccagttcttttaatgagagtgtacatcgatttatttatttgcaacccaaaccagcgaatcaaagttttgtaagcctgcaaaattcataaaaagggcaaggtcaaataaatttatggcctggaaggtgtaaaaacgagtttcatattcttttggtcataacttttttatctggctaattatttgaaattttgcaggcccatagaatttgttacatactgaaccaactcgtactgccccgtttcacctttttcagtaaaaaaattctcaacttttgtcaaaatcaaccaaattaaatataaacattttcttggtgtcattcaataggccttaagattcaatttactagcaaaattcaagaaaagcttcacatatttgaaaaataaattagaccaacaatcctaaaaaaaagtcgttcatcattttttttttaaatatgatcaaattttttgaaaattttcaaggaaattgagaacctcaagggctaattgtaagagtgaagcgaaactatttgatttgtttgactttgacagtacgagtcgaggcggtacgagttgggtttcatccatatacctatcttaataggcaatcgagcccggaattttgaaaagggtccagtttttatcccgatcccggctcttttttcaaaaaagccggaatcggaatcccggaaaaatccggcgggaccctctcgagatctaatcggtatgtcctatttctagcaaaaatgtcaaaattgtgtccccttttgcatcggatggagttgttgttgcgcaccggaaagggagcggatgtacactttttggttggccgggaagatcaaaaagaggcgagttgctaggggaaaaggctctaatgcactttatgagtccaattaattgacaatcccgcggtttttatacaataactnttgttcatattcataacaaaccctatctttgtggtttgctacgaaagatg

SEQ ID NO: 104917 - DNA, 127 bp, Heterodera glycines
  unsure (1)..(127): unsure at all n locations
tttttaatattacaatgccncaggtcaaggccnaacttaattgatggctcattttatgaatgaattaattgtctaattaattatctatntaaatcaaacttcagtttcaactggtgtgttaacaatg

SEQ ID NO: 104918 - DNA, 875 bp, Heterodera glycines
tgcatgaaattcacaaataaattatttattttaaaggataaattaaaaaggcagctgatttgctcgttttatcctgattctcattttttaaccgttttattaataaatgttttcatctccctgcttcttttggaaaaagttatagaattaagtccacaaaaaaccacacaaaaattattcaaaggagtctctaatgacgagcttttctcagcaaatatattcatcattcatagctaattagaataaatttatacaataaaaggaatggagacaatttgaaaaagtagcaaaaaaaaaaaaacaaaatgaaaaaagaggttgggaaaatatacaacacaaaaagtgcggcgctatttaaaaagagtacccttttgaaattatcaaaaagcaaaaacaaaaggggggacccttttgtttgcaaaattttttaatatttagtcatgaaaaattattccctggggttctttgggtccaagacctcgaattagatgtcagattcgtgatcagcgacctctaaaaccctcggataacaaattttcatggatttttatctcaaaaaaattttgcaaaacaaaagggtccccccttttgtttttgatagaattcaaaaaggccctctttgcaagtagcgccaataacttggtattttctaatcaaatttttgagaattttttaaaattttctagtataataaagaccgaataaataacaaaattattattttttaaaattttatctttatcttccaaccaaatttgggatttttccaattaaatttttgagaattttcacaaaattttccagcaaaacacttttccattccatcccaatcacttctaattgatcaaacaaatataatttaaacaatcaaaatg

SEQ ID NO: 104919 - DNA, 288 bp, Heterodera glycines
  unsure (1)..(288): unsure at all n locations
ttgactcgatggatgatgatgcgcccacgcnnncagattgacttgnntcagtccataaattcatggctgttgttgacactcgtnncccacttgtgcagattggggtttgtgtgtgtacacaatgatgtgttgtgctctcaatatttctgtgcttttgttcatatagtcttcatttacaggtacaactccgagccaatttttttcaacaaaaatttcaacgggccctacaacaacaccaaggcgggtggcacgaatgtacggacaaagtcagtttaattgttcaaaatg

SEQ ID NO: 104920 - DNA, 399 bp, Heterodera glycines
taatttatgtgccgttgggaggagaaaaattcggcattttcagattttttttgccttagaaaatgggccaagtttgagcggttttttaaacccaaaattcgttttatttttaaattttcaaaattcggagttttatcgtcagagaaatttattcgccttcgattacgacttatttttggcataacttttgaatgcgcgcacttttttttactctgaagaatgttcggttaattaaaaaaaaaattgacggaatttttttttttttttaattgacagaatttcaaaaaatgccctttttttgtccatccccgtgcctaattcattctctgtctgtcacagttcattgtgatcaccaacgacaaattcctgttgcgcaagggcacctaccgtgtggtgatg

SEQ ID NO: 104921 - DNA, 561 bp, Heterodera glycines
tgttcgaactcattgcgctttttcgtcgtctcgttgagaatggactcgccaatttaaacaatgaaacgaattgtgaaagtgagccgaaggcgaaaaaacggaaaaaattggcgaatgattcgaatttggaagtgcggcggaccttgctaaatgcaaaactgcgcataaatgcgaataaggcagcattttcattataccaattttttatagaattgggtccctttttcagattgttgcgcatctccgttctgaccaacgaattgccgttgacagcgatttacaaaaacgagacgaacacattaattggctaaaaggcgaattttgtttttcattagaaacattttgaatttgtttcactttgctatctcatttttcttgtttttttgttgttgttgttgttgttgttattgttacatttgtttttgttatcgtttttatttggaaagcaacaaatatctttcggtttattctgtctttaccattttggacattccatccgttaaaatacttatttcatttgctctgaatttgtcctttaatctcctccagttgtttaaaatg

SEQ ID NO: 104922 - DNA, 1003 bp, Heterodera glycines
atcagaaatcacaaagatgcacgatcattggtaccaaaaaacagaaagaacgctcgagtatcctgtaaaaggcatcaaaaaagtcgctccagtttttttgaggttttatggagcaaaacacctacaaaatagccaaataacctcattttcgtcatttacatgcttatcaaatgcaatatagtgaggttctccaccaaatttggatcaccaaagaattcataccaagatataagtatgaaattttggcgatcatttttcaagaaaatattttagttattagggagttaatcttcatatattgtagtcagattgagtgctagtggatgtactttggatcagttcatccatactgtattgaaagtcatcgaaaatatacaccaatgagtccgcacggccccagtttttgggccgggaccgggacttttttcaaaaatttttgaaattttgattaaaaattcggaagaaatttcatagtcttcattttagcttagaaatatatcaagccatgtagatcatcgaccttttttgcttttcaaactccttttttagggccaattttttcaaaaaaattcgtcgtacaagggggagggggggtccggcggtgctgataggcgccgccggggaaaattttttgaaaatttgtttgtttttgttaacagagttgtccaaaaattgtccaaattttggaatattaatctttttttaacacggcgatgctgaggaaaaatttgaattttaataaatttattaaggaaatttgttgagtttttcatcaaatttggaaatgttttttggtaaaaaaaaagttgtgaaaatgttactcaatttcgtatggattttggggtctttttaacagttaaaattgcccaaattttcaagaaatccaaagttctatcttgaaaatttcgaattaaagacattttgccaaaatagttattaaatattttcaaatctgagttattttcactgatgaaatttagtcccgttagtcccggcccaaatg

SEQ ID NO: 104923 - DNA, 649 bp, Heterodera glycines
ttttgtctaatcttcctgtcggggcacctagcaattcagaataaactagggtgggtcgggaccggtaattttgaggtaaaccgggaccgggactttttgggttgaaaacccgggactttttggctgcgaaaaccgggaaaaaacgggaattttccggtcccgctcaaaagtggtaaaacttcggtactcagttgtccgtgttttggtcccggtcccgacctaccctagaataaacacatgtaatttcgtaacaatacaaaatttgattgggagacgttcggccgcggaggtaaatgattcaccgatgaaaaagcatcagcaaaagcagcccattgtggatgagaaattgcgaattggaataaaaaaaaacaacaacaaaaaagatgggaagtctataggatggagaaatgtgatgaagaattgaataaaacgaaaattgttcatcatcatattcatccttttctccatttccttccctcaattcattggccacaaacatttctcggaagatttttatttgtttttaaattatctcttacattttgtaaccaattggacaaaaaaatggatcagggttggtacagtatctctatcataaagtaaaataaattttaaaattttcggttaataattaagtttttcagctatg

SEQ ID NO: 104924 - DNA, 397 bp, Heterodera glycines
  unsure (1)..(397): unsure at all n locations
aaagtcaaagaaatatannatttaagcgagtccacttattnnntatcacaaatcccatttttattgcttactatccttaatatttctttttattacctacaaatacggttttccatatgaaaattcgtcgttatttaggtaatttaattgaaattgttcatatttggcctatttttgctaactaaaacttcaaaaaaaaaaattaattcacttatttctgagttttaattattaataatttagtttaatatagttaaaaaataattaatataataatgaatttttttttatagttttacctatacaaaaaacaacaacggagaattatcatcagaaaaatgcttcggtgaaaatgtatttaatttaataattttcaaacaattaaattattaagatg

SEQ ID NO: 104925 - DNA, 935 bp, Heterodera glycines
  unsure (1)..(935): unsure at all n locations
tctttaacaaaaaaaaaaactttgaatattcaaaaataactaaaaagtcaccaaaattgaataaatgtgacgaatgaattttgaaaaaatctcatttagggatacattccacagtgttaagcaaaattttctggtaatcccggagtgaattcacttaaaaaatgacaaaattccaaaaaatcacaaaaacccaaaattacgaaaaagtaaaaaaaaagtcagtgatgccgataattgcgccgtcgacacttgcaaagctgacacttgcggctcaaaacgatatttgcattgcataattaaacgacgccaaaattattgcaacaatttactaaaacaaaatgcttatttgaataattattccaatttaagcgtgcttaatttaacattaattcaatgatcagctgatgagacttttcaaggttcattctcatggcccggttttcgttaaataaacattttcaagtactgaccttattttgattcttttatgactcattaattccttaagttacaaaataactgttcaattagtgaaattaatttttgagttangcctcccaatttcctttcatttatacccgtaaatacattaatgaagttcgttgcgatccccaccccatatcttttgaggctaatcctgcaagcacttatgggtgtgcatttacaaatttttaaaaaatcactttgacaactaattgacaatatcattgacaactaattgacaatatcatttcataataaaaaatatatattttcccttttgcaaaaaatgattatcgccatgccattagcaatataattaatacctttcaaacatcgtctttttcatttctaccaattagttttgtagaaaaattggtctacctaatggctatgtgcagaatgaggatttatgaaaacaattaggtcactctggcgccgcaaatgttgctatg

SEQ ID NO: 104926 - DNA, 153 bp, Heterodera glycines
gcgaaaagactgcgagaaaaaggctacaacagggaagtggtgtagcattaggggcaatattagtgcctattcttggcgcactagctcaacacctggtcgagaaaattacgacctaacaggcgggagctaccaatgaaatatacaaaaaagatg

SEQ ID NO: 104927 - DNA, 1003 bp, Heterodera glycines
tgccaaaaccgtgcggtttttatcacctctcccctccctccccgcccgtccggcgacgcgatgccgccgccgcgaaaaaaaaatcgataacggaatttggaagaagtgtgaattaattgatattagcagcaaataattttgattatgaattgcacaataaaattgattatttaaaaataaaaatcgaaaattgaataaataaattaaaaaactttttcaaaagtaggtcacctgtcaaccaaaattgattaatggatttttatttctcttccattatttcgcaatctgcagtgactttttgttcaaattatttcgcaatatctcccctaaattaggtcaactgtcaataaaatgtgattgattggtttcttatttaatgtctccattatttttgggtccaactatttcgcaatatggcccgtaattttgcaaacctgtcaagaaaaatgattgatgacattcgaaataaagaatatccagacgatttttttttgcagttttgaataaaatgtgacagttgtctacggaaatgattgattaccctcaaaattaaggcaaacccagacagtcacgtgactagacccctccccctttttgcctatttcgcacacccggcccaaatcgcaaatcattcaactaaatagttggatttcattaaactctcttcacgctctaattttatttctctccgctctatttttatttgcattaattaaatctattactatttacctacgtctttttcttttcaaatctctgctctctttaattcttctgtttcaatttttctttttaaaatgtcttttaaacgcgtgaactcctgccaacccgccgtgccaatggccaaaaaatgggatttccgatcaatcgggcaagtgatttttaataaattaaataaaaaaataatttcttaaacaattataaatacaattataagataataccctttaagaattatttcaaaaaaaattttttgttcagaaataattttgctgaagaaatg

SEQ ID NO: 104928 - DNA, 1003 bp, Heterodera glycines
taaagaatttattgaataaattgataaattgaaattatttgtcgaaaatggctggagaaatttaaaaaaatgtcgatagggtttttgtgaaatgttttgaaaattaaaattagcaaaaaaaaaagaaaaagtttttagcaattataatcattttgaattttttataagaaaaaaatgtaaatgagtaaaaatatttcttttttaatatttctttttttgggaaaccaaattgggttgctaaatatcctttggcatattttcgtgtcactatgccgaaatgaaaaaaacgaatcaacacactaagaatcatttcaaaaaagctgtgttgattttaggcttaatccgctgcaaaagtttttcggcatttcattctttgtgattctttccggaagtgctttcccaaatgactaaacatgcttcgccattttcttcggtaatatttatatgttaataattgagcacttgactaagcatgaaacgaaaaacccgagcagattaattaataattaattctgatttattaatggttttttccattcatttagatttcattggcacaaattcatgcaaaattttcaagtagttttcgaccaaaaaatggcgcttttaaaaaaataataatttcaatttttagctaatatattatttatttgcatgtacaaaaaatcttttaaattatttaaatcattattaaagcgattgagtcattcgtttgtaaaatatttaaacaaacaaataatcattttcacgatttggaccgtcttcgttttgtttgattattttttctaagcataaataattaaataattattccaataaataacattcataaaatccttttcgagcagttttatgttttcacaattcattataatggcgaaattaatgagactaattaattgagcagcaatataaaaagcggaagaagtccgcagaattcaacaatttattcaatcattttaattataaattattaaattaaaaaacctttaggagaagaatg

SEQ ID NO: 104929 - DNA, 307 bp, Heterodera glycines
cttctcattcttgcgccaaacccggaattgctaacaaattaaatgtttattttacattaatgtggcttagaaacaaatcaaaagcatttattgttgctttgtttttggtaaattttgcgcggttcagactttgaagaaataaacatgaaattcagaatcggttttcttatttccctagaaaaatttctaatttaaactgatgccctttgacatgggagattaaattcattttccattttttttttttgtaatgacaagtttattgggactgtaatacatattttttagttggatttgacctgcaatg

SEQ ID NO: 104930 - DNA, 346 bp, Heterodera glycines
tttaaaagatttttaacaaaaatattcaactttaaaataaatcaatcatttttttcgccggaattgcactgcttctatttagttaaatgttttcattaacgggtgatatttactcttattttttaattattttttaaatgtttgccaacaatacactcaatcctatgatttcccgctataatatcttagccgtcaatgcatatttttttatttaaaatattaattgagtgaattttccattatagttaaaagctgaatttttttattattcatattatttttttatattaacattataatatataaaataataattcaattattatttatttaggaaaacaaaatg

SEQ ID NO: 104931 - DNA, 294 bp, Heterodera glycines
tcttagtgcataaggggccaactccgtctcagacaaaaaaaaatatttaaaaatttttttcgacgaatttttcaaaaaatatacccctaagaaattaaaaattttctcaaaaattcatctgcaaatctatttatttattttcatgttctgatttttaaaattattcatcaaaatatcgctttggcttaattttgttacttttaaaaataaatttaccgttatcatttattagtatatacttacctaacagtttaaagtaccattaattttttagccttgcgaaaatggaaaatg

SEQ ID NO: 104932 - DNA, 65 bp, Heterodera glycines
ggtttgttggttgttatgtttactcataaaacaaaaaactatttttaggaaactgttgcaccatg

SEQ ID NO: 104933 - DNA, 64 bp, Heterodera glycines
cggccaaagcgccgccggcgcatcggaaattgcggaccaagttgagcaaaaacacaatgctatg

SEQ ID NO: 104934 - DNA, 435 bp, Heterodera glycines
aattttgtttgagtcgattgaattcgataaaaaaaacattggtaaattcaataaattgttacgaaaggatgtatgggagggataaagtgatcaccaaattgtcaaaatgagcatattaaaatgccaccctgttgaataaaatgatcatccttaattatgactcatttgtcacaattactgtatttgagaaattttgtatttttaatatttcaaatccataagaaaaatttgggaaatttttgatgatttgttcacaaatcgtgtacgcctgctgctctttgcacccaaattaagaaattgagataattatacaaatcactgcaaatggtggatgatccctcgaaaactgatttttataccaaaaatgtgtagcgataaacagttagttacctgaatagaaatcgaaaaaatatgagtaaattaatttcaggaatg

SEQ ID NO: 104935 - DNA, 744 bp, Heterodera glycines
ttcaatccaattttaataactccctttaaataggcagtgtgatttgctatatttttcattttaaataatttacttttactcaatttgacaaaaacccttaaaatgaaacaaaattgtattcattattttatacgggttgttcaggcttgcttcaagttagaaaattaattttctcattaatttaaaaaaatgtttctaacaaatatttttattccaatgttctgtaaaatattgattaaaaattatagttaattgaatttaaaaagttgtgaatgttatctaaaatccttaataaaaatgcgcgaaaaatttttagtaaaaaacagggatttacttctgtttcagctatctttgttaattttattgaaaattaaatttagaatttaatgattgggatttttcgcttctccattagaaactcactccccagtttaccagtgatggaattagtccctaagcatatcgtaagttggaattctgggttaggagcttggtttgaaatttttaaaaaattctaaatttatttattaatttgtatttaatattttaaataatgatgctgaactgatttaaagaaaattataaatttaaaaatataaaattaaatatattttggatttcgaatattatttcttccaaaaaagaattttcttaattttttatatttataaaataagactttttaggtgtaaaaataatcaaaaaccatattttaatatttcgtaattcataattccaaaaatg

SEQ ID NO: 104936 - DNA, 1003 bp, Heterodera glycines
tcgaaaactaaagggacattaaaaacgaagagaaaagaggtgagaacatttgtccgggctagtgaaaagctaaagggattttaaaaatgcaaaaaaaagaagaacgaaatttgcccgggctagtctaaatgctaaaggggctgactgcatcgaaaattgacaaatttgacaattatttgtaggagagagagagaataagaaaagagagtgaaagaagccaaaaataaccaaaaaaaagtcctggtagcaaacgaataaggaccaatttataaaaatatcaacgattgagaagcaaaaaaaagagagagagagagaagaagtgagacaaaaaaaatagaacaatttttttttgaggagagcaaaaaggcccgggctgataaccaatcaaagggacattattttagctaattaaaaagagggaccaattaaaaaatgaaaattaggccctatcattttgcttacagtatgagttacagtttttacaagttccaaagttcattttatctctttgttttctctcggttttcacgccataagaatattcacgtaatcacgtgccgccgcatttttcattgggcgagatcattacaagttccaaagttcattttatctctttgttttctctcgttttcacgccataagaatattcacgtaatcacgtgccgccgcatttttcattgggcgagatcatccactttacacatttttgcggcgcctgagaattgttaattgttcttgttaggcgaagtttaaacggagatggagcagataagcccattcctggaaggcgttcgcatccattcgattacccgctatcattcattaatttttttttctctctcaattaatgcataatgggattaccaaataattttttttttttttagcaaaataaaacaaaatcttattacgaactgaacgacttcgaatgtctacatcagggggctcatcaaatgagttcccctttggtacatcccaagccttcgggcaggaaacaaagatg

SEQ ID NO: 104937 - DNA, 420 bp, Heterodera glycines
acagatgaggctaaaactaagattcggaccccaaaaataagattttttctaaaactgatagtagcgcgaaggaaacgcaataaaaacatgaaaaaacgacttaaaacaactttttattagcataaaaacgaaggcctgtcaactgaaaattttgtaaatcagcattttgaaaaattttattcaaaatttaaaaattaataatgtttttgcggcgtgctttttccaaaaaacgtgccaaaataaggacaaatcttacaaataaggacacttggccgccctgttaaaacactattttggcgttttgtcactattttttcactatttcgacattttttggaaaattccttaacaaaaatgcaataagaacaactaaatatcgcaataattgttttttattcttaaatttagacttaaaatatg

SEQ ID NO: 104938 - DNA, 291 bp, Heterodera glycines
taccaataagtgaaagaaaatttaaagtgcgaaattcctgagaaacttaaaataaaggatggagatggtattaaatgggaggatttattagaaatcgatttaaaaaatttattcaacccgtttaataattttaaaaatatgacatttttcattttaatgctattattagcaatgggtgccatttacattttcttacgatttctgccctattttatgggttaccgatttgtcataggaattttattgtacaaatttgtaagcatttcttgttctttgtccacgggagggatg

SEQ ID NO: 104939 - DNA, 856 bp, Heterodera glycines
tagagagagagagagagagcgagagaaagtgagagagagagatagagaaagagagagagagagaaaaagagagagagagcgagagaaagtgagagagagagatagagaaagcgagagagagagagaaagcgagagagagagaaaaagagagagagcgagagaaagtgagagagagagatagagaaagcgagagaaagtgagagagagagagcgagagagaaagcgagagaaagagataaagcgagagagagagaaaaagagagagagagcgagagaaagtgagagagagagagagagagaaagcgagagagagagagcgagagtaagtatgcctttatgttccgtttttcatcgctttaaagaaagataattaggaattgattgatgtgtttgttatgatgttaaacagcaaacattggccaagtgaatcgttccttttactttgccagtaaattatgtatacctagttagttaatcattcgaattaattgtgtcttaattaaaaaccaaaatttaaattttctaacactcaagaggacaagacttattggtcatattgtaatattttttttttaatctatcgatggctctaaatgttatccaatagaattaataatttaaaaaaatttatgttgaaatagccaataaacaggcgaaaaaatgaacgtcatcaaatttataatattaaccaatttaataatatatttgacattaaacaaattctgtcagattgagcatattgatttggaaaatttgtaatattttttgctaaaattattataattcaaaaataagtcatttaattgtgtaaagtttgaaaatattttaaaatcttttagactgtcatataaaaatg

SEQ ID NO: 104940 - DNA, 103 bp, Heterodera glycines
ggggatcctctacgagttaacataaaaaacgacccctttcatccaaaaaatatgttatcagaacaactcaaaaataccaatcataacaaaagcgatcaaaatg

SEQ ID NO: 104941 - DNA, 1003 bp, Heterodera glycines
  unsure (1)..(1003): unsure at all n locations
cattttttactagtcaaaaactcattaagtttttttgaaaattcgagattttatttgaaactctaaaaagtttttttgtttttgtctacgagttgcctattattagctttgctttttgtatgagttgtcatgacatcgggccaaacgatattttcgtataatgtgttgttcattttccatctcctttcttggcaacgcattgacgtattaatgttaactgtttggggtttgtacctatttgttatccatgccgaagttactaatttgctaatatttattttatttttatgggaatttaaaatttttgagaaaattctttcaaaaaaatattaaaaaattaaagattttttattaattatacagaaaatttaaaacttgttattaaataatacagcttttacctcgttcgatgacattataataaatgtatggtaaattattttaaataatttatatatatttttgattgttntaaatgaagaattcacaaaagaaaagctgactttatgaaatcgccagagaataagccgccattattattaattttttctgtgcattgtgaataacctaattcaccaataattaagttaattgacacctttgcttttatcaaataaaaaaaatacagcatgtaaacaaaaagtgcaagaatattatttagcttccaatcaaatgcaagcccgtagccagaacaaaatttcggaggcggaaatccgaagaccttgttgttttttttgctcgccgggccaaaaaaattttgggactaaaatttcaaaaaataagatataataaggatggggggggggtggggggatctggcggttaaaaatccngattcctgtttttatcagtgatccaccaatcaatcacatattctatatttttgaacaaaaatccgtgtgtttttaaaatttgtaaaatttcacataaacattttcttcgaaagaaatgcaaatttaaaaaaaaatctacgttatcgcgaatttttaacttttacagaatg

SEQ ID NO: 104942 - DNA, 632 bp, Heterodera glycines
aaaaatatcagcgaaataaatcattaagcatcaaaaatttaaaaagttagtggaagcctgaaaataagaaaaatcttagaaataaggacattattgatctcgaagatctggcccctccaaataaggacaaattttagaaataaggacacttgggaacctggtgataaatagattggttatttggcggtttttagaaattcccagatgtcgactccccaagttacaaatccctataatcaattcttaaaagtgcaaagggatttttaaaaaattataaaagaagaatttttcttttctgagaaggtgaaacaatcaatttgtataagaaggcgagaataggaaaagcagaagaacaaatgttgcaaaacgaagaaaaataaagcaaaaaatgtgggatcaaaaaaaaatttaaaatgccaattttgtataaaaatcttagccatatgattcattttcgggcgttcaaaaaaatcaaatcttcagtttaattcgtcttgtccttcccggttgatgggctgatgatgttgtgcattgttggagcaacaacagcacagcaaacgcataagccgagcacgcaattctttttttttcaaaatataaaattttttctaaaattttataggcaatgaatg

SEQ ID NO: 104943 - DNA, 453 bp, Heterodera glycines
tcgtccatgctccgttttcaaggacgggtatggcgatttgcaaggacaaagtggaaatccaaggacatttaaaattttattctatgcaatgaaaaattgttaatatttatttaaatggcttgtatttttcaccggaatggattttttcaaacatttttttgttttcactgatttttcctcatttcaccgcatatgctcttttacggcgcgctttttccaaaaaatttccggggaacagggggggggccggcggtgccgttttaccaaatgctcattttcaaggacgtccttgcatccaaggacattttttattttcaagaaagagggcgcgatttcaaggacgtccttgccattcaaggacggatgacagccctgacttacatacctatttcaatttatttctgacgaaacattaacgattaattcttgatgcttttagaatttcatgtgatg

SEQ ID NO: 104944 - DNA, 1003 bp, Heterodera glycines
caattttttgttataattttatttttatgcatcattttgtgatatgttaagggttgtatttgtcaaaaaaaagattttttctcattggaataattcattttattttaaattaaattaaacaaccgagtcaataaatactgaattgtataaagcattgtttttcataaattaaatttttcgtctttttttttaaattaatagttttaaaattattcaacaatttttaagaagtattatccattttcgttcatacaatattttgtgtttttgcttacgtttcgagaccgagactgaaaaatatgaaatcgagcccaaaaaaaaaacccgagacttttctcgagtgagaccgagaggcacgagcatcacaactaagttatatattcataaaaaaatgataatcaaaatttcttgcatattttcaaaaaatgaacatttttttgtgtaaatcttatgcctaattatctttctgttcattatttttcactttttaaataaatttgttaaacataaattaattaacaataataaaaaaatttcatatgtttctttctcttatgcctaattatcttttctgttcattaattttcacttaatatagtttatacaataattatttaaatacatttattaaaacataaattaattagcactaataaaaaaaattacaaatttttatttccgtatttttttagtttccgtttaaacgcgtgacataaagcaggctaatattttaatgtgacaaaggtcaattaaaaataaaattcacttccgatatcatttcacgatatgatcaaatgattgttgttattaatttctacaatatataaataaatctcggaaatgaatgaatcacctttataaattcataaaaattctgcaatttatatttatattagagttaaagtcattagaatgacagtatttccatttttgtgtatttcttaacataatttatttaataaatttgtttttttaaggaaatattccacaaatctttcaaatg

SEQ ID NO: 104945 - DNA, 55 bp, Heterodera glycines
agtgacggaaattttattgttttttcatttttggattttcatttccaggaagatg

SEQ ID NO: 104946 - DNA, 134 bp, Heterodera glycines
tttgtggcttaaatgaaaattgaaatgctttgtctgttaaatctttggaagtcacgttttggctttagccgtgcacactggaattgggcggcaaaagcgcgtgtattgtgtttgaagacacggacgtggagatg

SEQ ID NO: 104947 - DNA, 693 bp, Heterodera glycines
agaaaacaacagaatgaggagatttttgatggtttgttgggaaagtctgtcataataattgtaagatgagctatatcggagaaattcaggtgcattactttttcccccgagaaagttttaaaaaaaatttactatcttagtttctcaaggaaaaaatctttttcaaaaatttttcttatataaaactataagattttgtccttgagaaattttcaatttagtaagtttaaaaatttaactggggaaacggaaacccatttcataccgcactctgaaattattttcaaagaaagtcttgctaaatttttgattggaaataacggaaaactaaaaaagtttgtcttctcagccgactttgtgatcgagtcagacttaatgatcccgaaagtttttcgcctttaagtacatgcacaatttaaaaatataagactaaaatttttaattttgacacgagaaatatatttcacagaaaattaaccccccaaatcattagacgcaatcaccacctatcatcagcaacaacaacaggaatcttcgaaaccaccagacgaccccatcccaccggttgaccaccacctccctccacaccatcgatttagcgaccaaaatcagcagcatcgtcaccaccagcaatatgagtccagcattgattccgccattgattccgttgtccgtggtgacgcgttggtaatg

SEQ ID NO: 104948 - DNA, 265 bp, Heterodera glycines
tgatgtttatgatgatcatttggcgacaattggaagcagatcccccgggggagaaaggccagaaaaacaaaaaaaaattccaattcaaattagccgcggtggcgagaggaaaaccgatcgctaatagcgataaaagcccagcacgggatggatgatttggatgtacaattcctttttatttgtgcaaatatttgtagacaaattataattaaaatagtaatatatttttttttggacttgaaattcatttgattgaagtaaaatg

SEQ ID NO: 104949 - DNA, 135 bp, Heterodera glycines
aattcggagccatcgactagcgcatccctttgaccaataaaaaaaaatatatatttgttgtgcttttttttgagtgtttaataaattttttattgttacctttattcaatcttttctcccattaagaattaaatg

SEQ ID NO: 104950 - DNA, 169 bp, Heterodera glycines
tttttctataaaaaaaattaatgggaaataaatttatgaaaatgatttaatgcaaattatcaagaaaaattgtaatcctataattcgcgttttgtataatactaaaataatcatttttcatttttcataaattatattattcatacaaattttttattaatataatatg

SEQ ID NO: 104951 - DNA, 183 bp, Heterodera glycines
ccccccccgaaatgaaaattttaaatgggtacatttttgaattttacagtcaattttcgtaacaaataacactaaaattttcaaaaattttcccggcggcgcctatcggcaccgccggacctccattttacactattttttgctttaaaacggccaaaattgggttgtttttagtgaaaaatg

SEQ ID NO: 104952 - DNA, 611 bp, Heterodera glycines
ttttctacattaatacttattttgacctgacatgtttcttttgtgcgccgattatatcctgtaaaatataaaattggctcttaaccataaaatggtcattttaggtaaatctgattctgatacttttagtccatataaattcatatttgggaatttttgggaatacatttttctatatgttggcactttttaattcatattatgatccataattgaccatttttgagctttttaatccatcgggcttttttagtccatttttatgtccatatttggcgatttttagtccatataatttacaaccctactgataacaaattcaagctaaaatccccaaaaattgtctcggcggtgtctgtaggcaccgaaggaggcaagtttaggctttataagcccgtgctttaaaaaaatgcttatttaattggaaaattttcgtgccatctcactgttaaataatccgggcaaaatgccatgaaaattacaatttatatgcttacagtgttcgtctccgaaacgcaacgtccgcgctggcaaatgccattgtagcacacttcttcgccgttgttaaagcctctgcaattgccgccctggcgcactttggccgcgcaatg

SEQ ID NO: 104953 - DNA, 552 bp, Heterodera glycines
tcagatccagcaaaattaatagagcttcctattatccgatagccctacgtgtcctctattagcttgcaaattttcaaaaaattttatagagtttaaaaaaagttatggccaaaaatctgtgaaaacatgttaccttgcgtacttttggccatagctttgctcaaacttgaccaaattttttgaaatttaaatgacttgtagagaaatgttagggctatcgaatgataccaagaatgtctaatttggttgacattgacaaaagttttgagcagttttttgttgaaaatttccatttgatggttttttatattgcgtgttgtgtgcgtggtaacgctcgtaatatgcagtcggccacacgccaattggataaggacaggcaatttttttcatttgtttttgaatggttccgtgttcccttttaagtttccagtgttgttgccattttttaaatttggttattcaagatgcgctcaaaaatcaatgcctttctgaaattatcttgaaggcaaaagagtggactaaagaatgccgaaaaccctaaattaagaaatg

SEQ ID NO: 104954 - DNA, 1003 bp, Heterodera glycines
tcttatgtcgctgtgcccaagcagattctgttagttttagtgccaccgttttcggaccaaattttcgagtttcgcacttttggctcaaaagcgatttaaacacaaggaaacgcctgaaagctaccaattttgcaataaaagataatttaggtaaaccgtttttagacggaatgaaagcttttgtttgtatttcttggttgcttaaataatacatacattaaaggattttttacaaatatgcttttttcccacaagaaaaaataatgaaatgatccaaaacagcgggggaaaattgtgtgtgaaggaggggacggtgaacagaaggaacatcattagtactgtaattagcgcaagattaaattcattatgaataacttcttctcaaacggattcacacccctaaaaatcgaatttttgaattcaccccccggggccgaagcaaagggttggtacgcccttgagagagaatcgaaaaaagaaaaattgctgaacatctttcaatttggacactttgcttatacataattttgacactccaacaacttcaagggctcaaaagacattcaaacaaaagcaaagttttttaatcattaaaaaaatattcggaataaattttccgtaggaatttaattaaagttaacaatttttcatatcaaatttcacaaatttgttaattgcctgacggcgcctttggtcccccggaccaacctccatccatttatcaactttttttaaaaatttacgcaaaaaagtgacatacatatgatcatttttggacaaaatctgataagaaacgaccaaacattttcaaaaatttatcgaatagcaatttgaaaaaatgatgcgcattatgaaaaattgtccttttatattagagttgtgagcaatctcctaaaacaaaatttcatcaccatttcctggctataaaagagccaattttctgtttttttttattattctcacatatcttatttggcgacactattgcctattctttactatg

SEQ ID NO: 104955 - DNA, 392 bp, Heterodera glycines
tttttgatttttcgaattcttcctccaatttaatgaatttctcttccagaacaaaatcattaatttcttcgctagcacttagctcatccatcgatctctccaaatgtccaaattgggaactcgtacttgtagcatttacgttcaattcatttccgacttgccgaaattggctgcaaacagcagcttcaaacgatcgcagtcgtttcagcaaattccgaaataatttattttcctccgttgtgaaaaattcctcggcaaaatccgatcctttgtcctttcgtattttcggtcctattcgcagctgaaccaaacgaacaaaagcagtcgacaagcaattcggcacaagcacttcatcaacacaaagtacatcagcagcaacgttcagcaacatg

SEQ ID NO: 104956 - DNA, 152 bp, Heterodera glycines
ggtgaacagtaaaaaaaattagatgaaatataatgaatttaaggagtttttttagatatttttcgatttttagagtaaattatcaatttttttaaattttatattgcaaatattatttaaagtaaaattttaaaaaacaggtaatttcaatg

SEQ ID NO: 104957 - DNA, 178 bp, Heterodera glycines
accgaccgaccctcttgtccggtctctattgtttagaatcaaaaatttagtatcatctaccacgtgttggtgagccaaggatttgagcgcatggaaaacatttggtttgattgtgagccgatctgttgccaccgtgttaggcaattccatggcattaattttataatttttcgacatg

SEQ ID NO: 104958 - DNA, 633 bp, Heterodera glycines
tttgccgaatttgacatcgatttacgcgccgggaatggctggtgtggatggacatggcagcgcatttgtataattttccaacaaaaaaaaaacttgggaaacttttctatagttttgggcagatttgcatcaaaaaattgctaatttgtgaatttttggaaaaattgaactaaattttttggaaaatttaggcgaagtagatttcggaggtggtaccaacaagcaaaatcaaaaattttaaataagaaactatttttgaaaaagtcggaccgcctagccctaaaaaagcttcaaaattattttaagcaaaagaaaataactgcaaaattacctcaccctcttcgattttttctttttctaaaaaatcacttgaaaaattttaagcgactttttctgaagtttttcctagaaaaaaattattaatgtttttataaggttttggatttttgtgctactttaaattaatacggtttatgaaatacagtgttttgtaacttgcagaaaaatttgaggtatacgaaaaaaatgtgattctcctcgctaataaaatattctctttttttgcattagtgcccaaaactcaaactttcctttgcaattttcgcattttattttttggcacttttgtctatg

SEQ ID NO: 104959 - DNA, 88 bp, Heterodera glycines
tttcaacaaattttgttccagttttttaattggccaattaaaaacaataattttgacttaggacaaagagaattccctcggcgtaatg

SEQ ID NO: 104960 - DNA, 383 bp, Heterodera glycines
aaagaaattgaaaaaattttatggaattcttattgaataattcgataaaattaatgacaacaaattcaaaagctgaaaaatgagtttatggttttaattggtattttattcaaaaatttaattaagctacttcggatcaactctcaaaaatagaaaatgatcagaagactctatttgaaaaagtcagtgaattggagaagcagcaaaaacagcagcacgaaaacacgaccaaaggcgggggaattttaagcgaagaataccaaaattatcaattattaaaaagttctttttatagaaggaatttatttgaattaagaatattaatttatgcccattatattttaaaattaattttagcaacttcggaccaattctcaaaaatg

SEQ ID NO: 104961 - DNA, 103 bp, Heterodera glycines
tttttcaccaccgccccatttcagtccccacagtggctgctgcgaatttcttccgcctgccttgcgcgccgagcgcacggagcgtctacagcgcgagccgatg

SEQ ID NO: 104962 - DNA, 1003 bp, Heterodera glycines
tatattctacaattctattaaattattcaagagatttgatgtctgattaaatgtaatcaaaaagaaaaaattatagtttttgaattgaatcagtgccaatctctgttgtcgtgagtggaagtgtcgcacgagagaatgtcttctttccaatctctgtctgtacagctgatcagcatcagatcgttagtaaccttgatcaattaggaaaatgtcaaatatgtaattctcagtgtgaccaattctgcttctttttttgttgcttttttggcagttttagcaaatgctttatattttcacgttaatttgtcaattttcgtaattttactgataccgtatcctaaaaatacagttgaaaattctcaattaatttttaattatttttttttaccaaatcgtaaagtagacaaaaattatttttgtgcaatcgtttttaatttattccattttttgccacttccgttcatctctgggaaagcaaatttttctgatcactgttttgatggacaaattatccacaaatgggcaaaatgatgatgaatcaccgccacttttagctttgggaaaagcagaaaattccgatgctaatttgtgcttatgtgggcaaattggacagattgtgaggctatcagcagcagttggggatgggcataaaagtgattcatcacttttggcattggaattccaatgccaatttttgtgtaaaaagcggcggacaaatcgctgggaaattggggcggagccgccgctaacgtacggacgcgactgacggccatcgacggatcggtcggctttaagcccaaactccgcccaaaatgagctgcataaatagccgctgataggcccagcaaaatcataactgacttcaaatccctttaggaagatcactaaccgatttcaaatcccttatcaaaatcattaatagatttcaaatccctttaggaatatcaattaacctcttcaactcccttttaatccccaaagccgaccatcaaaactccaaatg

SEQ ID NO: 104963 - DNA, 436 bp, Heterodera glycines
ttttctgaaggaaaattgcatttataagttattttcttcctctttatttatgcaataaaataacaaaactcaaataattgccgatggcctccagctgattttactgggttatgcactttggtacttgcttttcattttacgttgttacaattaacggaattgcaccctaaaaaacaacctcatattctgtcaaaaaaagatgtataaataattcagcgtctgacccgaaaactttattttgtcatcaaatgcagtcccgtttttggggcctaaaaaacaataattgaataaactccaacaattttctcattacatacaattctctttctcacaatcagaattttacagtaaaaaaaatacggcaatcgatcggtgtgttgcttctgctaattagtcatttacttatcattatcattcacaacgttcatttttaatg

SEQ ID NO: 104964 - DNA, 1003 bp, Heterodera glycines
tttgaatttatataaaaggatttgcatcccaccttaacattttagaattccgttttgttcttatttagatttagtccgaaaatgagcattttgtttttgggtgtgaccaacagcaaaagcaattcgattgggtagcctaaagaatcgggggcgcaataaccagaaaatatttcggcggaggaatccccccaagccctgcggcaattttgccttttacattatgctaaaaaaatttgttagccaaattatgacctaattaaatttctgggctttgtggcgggctcagaggctctcactcctccaaatggaaccatacaaaaaataaacaattttatttaaaaggtcatttggaattaatttatgttagatgtaaattggtgtttatttagttattgggatttttttatttcaaataatttctttttaaaggttttaatgcatagctttcctaattcatactaatcgggtcacacacaacgaaaaatgcggcctgcggccacacacacacacaacagatgttggccggtcacactttcatttctcaatgattatgtaatcataaatatggccacaaaatgttgctgtgctttcatttatgttgatcattctcattggagcattaaaatattttttattggcactaaaattcagcaaaaaatcctcatgagcttcaataatttcccgtttttaacttcgtattttgcgaacaaaagcaattttgtatgtatagttttaaatacgcaaatattctcattaaacttataaaaaccacaaaataagacaatttttataaatccgaaccctttaaatatgctaattcttttttaaaatcacttcgggtcagatcacaaaatcactttcatgttcatattttgcattgattaaaaccaatttgcaaaataatcaaaaatagctacctacgaaaatttttaactaattttgcgtttcatagtttcgtcaaattagtaacaaaatgacgattatttatatgtttcagaaaatg

SEQ ID NO: 104965 - DNA, 407 bp, Heterodera glycines
ttaaaaattcggaccaaaacggtgcaaaatatggtgaaaaaggtgtcttagtaattagaaatggaaaatttcaaatttttaatttactttcatcccttactatggttcaaactaaagtgccacgggaccgggaattttgggcaaacccgggaccttttcggtttgaaaacccgggaatttttggctgggaaaaacccgggactggtcccagtcaaaaccgggaccttggtactcagttgtccgcttccaggtcctggtcccgtggcactctagttcaaaccccaaaaaatttttaagtggatggacgcataatgaataacgagcataatgagtaatagagaatttatgtctttatgcttagaaccaatatatttatttaaaacaatgtgaatcaatgagaaaaaatg

SEQ ID NO: 104966 - DNA, 236 bp, Heterodera glycines
attttggcaatcgttgaaatttgtgcaaatatattgagttttagttttaaactaacgaacaaacaaaaaagaaggttggcacaatacgccgatttttatagagaaattgccaaatctcgttcagagaaaacggcaagaaaaaggatacaacaggggagtggtatagccctgggagctgtcttggtcccggtactgagtgttttagctcaacatttattagaaaaaataacatcatg

SEQ ID NO: 104967 - DNA, 213 bp, Heterodera glycines
  unsure (1)..(213): unsure at all n locations
ggtaatttctgaaaaattttggctaatttctatcaaaattcataaaaattcttaaaattttcnccgtcggcgtttatcggcaccgccggcccccaaaaaacctattattttcttaaaaaattacccaaaaatccctaaattttggttatttttagacaaaatctgtgtaaatttatgtcaaaataaatagaatctaggcgatcaacgaatatg

SEQ ID NO: 104968 - DNA, 304 bp, Heterodera glycines
ggtcaattttgggcgcaatgtgcttctttaagtcctgtgaaaatttaatagattttcttgttagaatacccgatgaaagggttcaattttccgaggtgtcagagtttcaaggccatagcctgacccttggatttgggggggggggggtaaataaaaaatttgattatttagggggaggagggtgtattttcttttttagaaatcccgaatagcaagaattttgcataaattgaagccgtttttcgccaaaaaatgactatttttgtcattttggtccacattttttcaaaaatatggtaaaatg

SEQ ID NO: 104969 - DNA, 282 bp, Heterodera glycines
aaaaacgccgtcaaacaaaaaaaaaaaaaattttttttgttaaggggggtaccctttaagtttaaaaaaaaaatttttttttatcatgtttagtcatgaaatttgacccttggagttttggggattgctgattacaaatctatcatcttaaaaaaagttttggcaaactaaaagtggcccatgtggtttttaaaactgacattttctaaatagcggcaaaaattgctttttcaaaattctctatcgcataaatttttttattttttttttgcaacagtcatg

SEQ ID NO: 104970 - DNA, 776 bp, Heterodera glycines
attaaatgaaaatttttttgaattatctggaactccttgcaatttccccccccccccccattcagtcttcccaaatttgtatgcatcggaattttaattaattttttatataagaaaaaataaaaaaagtgtaaaaaatggtttaaaaaataggaaaaaaatgcgcgaccgcgatccgcgattcgcggtaatttttttgcgcgatccgcgatccgcgaccgcggcaaattgaatccgcgacgcgcgatccgcgaccgcggcaatttgaatccgcgacgcgcgatccgcgaccgtgggatttttctgtgcgcgctccacccctgatgtagactctttcagaaaagaatttaatatttaaagcaaaaaatatttgtcgtttggatattttatttaatattgcaataattttttttaaatttcattaaaatagtatctatttcattcaaatattcatttattaattattacctataattatgaattagtatcaattaattcaaaataaacatttggaaccatgaaataaataatttataattatggaaaaaaatttatgttaaaaattcattggttatttatttcttattaaaaattaatagaaaaactagcttaatcaaaaatattatttatatttccaattaagcaatattttttattttacaggaaatcaattgaaaggcgattttaacatcaataactagccaaaataataatcaaaaattatattttacaagaaaaaataaaatttattatttttttaatttgtgaagaagatg

SEQ ID NO: 104971 - DNA, 57 bp, Heterodera glycines
ttaaatttcaactggtgaatcatttaggaattaaatcatttacattcttttaaaatg

SEQ ID NO: 104972 - DNA, 738 bp, Heterodera glycines
agtaagaatgggggggggggagaaaggggtctgagagaaaaataagttttaaagaaaaataattttattgttctttttaggcgcaaaattgtttaacaaatttagcctaaattcctcaaatctctccaaaatctgccaaatttttaaaatttggtccataaatccacaaaaagggttattttttggacatattctgttaacaaatgcttatcggcaccgcggcttcctccaaccactagaaaattttgaaaaaacatgtgacagaaaaattatgtttgaaaacaaaaaataagggagaaaaactttaaaatttaaagtaaatgaaattccaatttaatttatgataaaaattgattatttttaattgatggatttttattcttttttgctttttacaaacaatttgggttttctttcttttcaccttaaaaataattaaattaaattatttgatttttttcttttggaaaaaattgaaataaagttccggcctcgatcactttttcgtaaaaaaaagtgccaaaaaaaatttgaatagttcttcagcaaaaaatctcctgtctcgtgttttaccccctcaaaaggtgggttttattttagggtgaggctctaattaatggggggggggctgtattttaggaaatacggtaaattaataaatgcattttgatagacaaaaaacaatttcgaagagagagcaaagacacaaattatgctgcgattgattgtgccaaaatg

SEQ ID NO: 104973 - DNA, 1003 bp, Heterodera glycines
atccgttttgttagacgtcagacgcacaaaaagcagtgcaaaaatttgggttttctgctcccatttgtgacgtttaattcaataatttggatccatttttttattttccatttttaaatttcaaatttgtgcaaaaactttctaaaaatcataatttccattgatgaaaaattattaataaatttttatttctttatttttttaaaaccccgaaaaatctgaacaataaaaagtataagctaaattctctttttcgtcaaattcattatttgatgggttttcccataattttacctttaaattatttaaaggtttttttcaaaaaaaaacccttcaatttttaaaccgttttcgtaaattaaagtttattttaagtcttacacataaataaaatttgttgaattttttttagaaagttttaataaaaataaaaaataaataaaaaactcctttttaattaatattttaacatttatttatttaaaaatttacaaaatttaaatttattaatttcatatttcaaatacaaacatcttcctgcaaatttaatgccttttttacttttgccaattaatttgttccttttttggccctcattcttcggcctttcccatcccctaaaatcccctgggagaatttgcagtgaattccgccggcgccaagagcaaagaattggtatcttccccatttttgtgtgaccataagctaaaaaaagccgcaaaaaataccctaaaacttccattaagcgagtgccaaagttaggagaacgtgccatcctcatcgccgcattgcaaatgtgccaatgggagacaatggcattttattttcaattttttacatattttgaccccgaaaaattctttaaaataaatgattttcattttatttctttattgtattaaaaattagtgtaaaaataaatcatatttttacttaagatttaaattaatttatctattttttattatttgaatatttttgatttttgtccaatttctccatg

SEQ ID NO: 104974 - DNA, 184 bp, Heterodera glycines
ggggagaagcatgcaaaacagacggagagagaagagaaaatgagacgatcagaaatggaagttatacacaaagcaatgaggacggagaaattggggtgatggtcgaacgaggacaatcactttgtataaattactgtatagtcactctgtattactgtaaatttgtagatagaagagaaaaatg

SEQ ID NO: 104975 - DNA, 908 bp, Heterodera glycines
  unsure (1)..(908): unsure at all n locations
ttttggaaacaaaattttttttcgnactcaatgcatttttntggccaaattcntctcgggaatttttnggacataatttcattttttaaataattttaatntattntaggaattaaaaggngaatttattatatttttatataaatattcattaaaaataaaaaatgtcctcaattttaataaaataattcatttggctttgtttaaatgacaaatttctttaatcatttttatttaattttttggaaattctttttaattttcaatgaaatattttcaatcttttttcaatataatttttaatttaatttagcgttttcaattagctttaattttcgaaatatttttctttttatattattatatttaacccaaaattttatgattttgtttttttaacatttttttgctccatccaaatttatttttggcattttccgttttttttaaaatttcatgtttggcattatgtccattccttttttttaaatatttcctcaattagctgcccattcccaattttcatgccattctttcttcccccaccccacttttaaagtctttatatttccctggcgacctaaaagcatttaagtacccaggtaaattagccgtgccgtgccgtcttacagccgacggcacgaccattgattttgcgtttggcacaaatatttttttttgtgccatgccaaaatatggtgcttcaaattttccagatttatttatttttataaaaaattcaatccgaattcttcagagacaaaaaaaaaatgtcggaaaattataaaaattaaaaaaattaattttaaaaatgacacaaactttcacgccaatatttttcaaaaatcatcatggatattttgattattaattaatttttaattagataaatagattttgtggaaatg

SEQ ID NO: 104976 - DNA, 89 bp, Heterodera glycines
catcacacctgcccccctcacggggaaaaggttttggcgttattgggggggggggggtacgatcatacggcgaggaagcttttaatatg

SEQ ID NO: 104977 - DNA, 1003 bp, Heterodera glycines
tccgtcgccaatgccgaaatatttactactgctagtgcagctgcggctgccaaatgaatggagaaatgccgatctctattttttagcgccttttaggcaattaaaaaaattctttggcgtttttgaaaatttagatacaccaaaaaatttctgataattttgaaaatcaatgattttcgaaatcaaagatccaagttctgatataagatcagctattttttgcccttgaaaaaatgtaaagaaaatttttatctttttttccgtcgggacctcgggacaccaatcaattccgaaggattaccgaaaatgaatgatgtcaactcgaagctacgggatttgaactcaatttttttgcggacgcggtcctgcgggattaatcccgcatttaattgaaagatatgtatggatttgtttactgcttcatatgtcatatcatcaacttgaccaaaagtacccacgacaaaatgttatttttctctaaaactttcctttaccccaatttctgtctctaatttttcacccattaatcagttcctcattctggccctgtgtgtttttgttgttcgctataatcttatggcttttctttcttttagcttatattttacgtaaatattcttaaacaatccttaaacaatcaccaaatgtcaacttggattcattgtatgaaccaaaacaaatttctgacttaaacatcacattacaacttaggcaaccaatgcttctcggtgccgacaaaaaactataacaaaacgcgactttggtttacttcgtgcggacatttgctttgtgcgaagtgtctgaaaacgaattgtacgatttttttatgaagaatatttcggcgctaaaaaagcgtttttgaaactaaaaaaagggggacaaaattttcggtaatgatgaaaaattgcggtttttccatgtgttttgaagggcatctactaattccgaaccttgcgctcttcttaaactagcgccaatattgctctgttacactttttcgatg

SEQ ID NO: 104978 - DNA, 1003 bp, Heterodera glycines
tctttattatcatcgtttttattaacgcaatcttatcatagtaaatagtgtttgcttttgaattcttttttttttgacgtgtcttggactttctttagatatgtgtgacaaaaatttgttacaaggttaaggaaaatggccagttatcattaaattataaaatcaaatttgactgaaaattctctaaaattttgcttttaaataccggtagaaggggtgaaatcccaacataggggtttggaaatgcatggtcaacaagattagcgtttatgaaaaaaattttaaattattcctagtaaaacaatgtatttttttaaaaaaattttaattttttaaaacttttcatattttcaactatatccccatttttagttgaaaaatataatattcatttaaaatacactgggttattatttagtgttaactcgagagagaagggcccctgcggggattttgcggccgctcacccgtatttttggccaaaatagcaggaattggacccccgtaaacggcagtttttgcgtggccaagtcgctcctactaatcgccaacctccgcccccgtcctttatgttcaaactaaatgtaaacgcatttttccattttgttggctttttcttttattgaaataaataaataagtccgctctcaaatcataaatctttttttaagtattgattgctaaaattttgaaaagcaatttgtgtgaaaattaatttttataaaaattaaccaataactattttatcctttttaactaattcaataaaccaaattttcgaatagctttatttcctgtttttcatatttttttttactcccttctatttttgagaaagctgtgcactttcctatttgaaatccacaaaaaatgaattttgttttcaatggattttgtgatgcataatgaatcgtccatccattcttcgtcacaaatgtgggaacatttttggccaaaaagataataataataatgagaggtgccgaagcatttgaaaaagatg

SEQ ID NO: 104979 - DNA, 594 bp, Heterodera glycines
gaagagaacgaaggttcttctctcgaaacgtccaccattagagcacttcaggtgatcggaagaagaaaaatggaatttactgatcaaaacccaatttgcctgatcatcgaaggcttttgaacaaattttcggttaatttggccattttaattggtttaaaaccggtttttttttgtttccattttatacctcgggactaaaagttatgggcattataaattaattagtaattaattacagattgattgggaatgactgattttgggggactatttgcggaccaacaaaaactttttcaaaatttttcctcaatttttaagttaattttctgggcagattttatagattatataactttttaaattaattttattttacctaatttatttatgattacactgaatttagctgctgatttggacaattaaatttacttaaaattctttaggacgccaaaatggagacatttatgatcgcggtaaggaaaattttcattatctttactaaaagataagtttaatttttggaccaatgaaaatgaaatattttttttataatttttccatttattttttacttaaatttaaacagatg

SEQ ID NO: 104980 - DNA, 314 bp, Heterodera glycines
tttatggtatttggtacgctgaacgcgaatttgacctttttgctcaattctgaacgaaccccgaatttttgtaagacgaatagaacatgtgtaaggcttttgaatgataccaaaattgttagatttggttgataatgcaaaaaattatagctcaaaaactcgggccctgggaaaaaggcttgtccacaataatttttattaattactatatatttgatacataacaagtgtttaccaaatatcatcaaattaactagaaaattgaagtttaaaaaattttgacaaattttttttgaggttttgacagccatatg

SEQ ID NO: 104981 - DNA, 1003 bp, Heterodera glycines
gttgataatgaaggacgaagaagcaccacggatttccattggatggaaatgtgcctgattttgacacgtcatatttttgctgtgaatggggcaattttctgacatttaaaaaaatttcaaatacacccctaaaaaccaacttcttgcattttcaaaaattttttttatttattaaaaatgccgaaagcatacaaactgaattcttcattaaattctgctggaatttattcaattgacagcttccaatttcaaaaaaattatcaaaaaaaggactatttcccccgaacacctcgaaatgtatttgatttgcaattgtgcgggcgaaaataataaaaaatgagatttttctgggatttgtatgcataaatacaacggatttttccaattttgagcacatattttattacatatttcagaatttttagcatataaaaatccggtctctattcatcaagtcctgggctttatcttgaaaaattcttaaattatttaccagtgaatatttaatcggccttttcaagatgtttggaataaaatttacaggaattcttaattgatgatagcattctcatcttctactcggcattgcttcaacgaggcggaacagaaattcaaatgttaaaagaaaattcttcgttggtgctaatatggtaaaatgatctcaccacaatttctggctaattattaattacataattaacccccagggcaattctgttgcaaaagatgtgttcaaaaatggcaaaaaatggccacaaaaatggcacaatcttttggcgtggcctcaaattgcgcacagtgccaatgcaaaaggaccaaaacaatgaaaatattattatttttgagtcatcaattgcctcaaagaaatagttagtttttttattaatgttaagcaaaagtgctaaactgctgagccattcactcgcttttctttggaagaaaatggtgagaatattattattttatatattttaaattgactttctcggcttttccaaaaatg

SEQ ID NO: 104982 - DNA, 146 bp, Heterodera glycines
tattaaatttttcagaaatacttttggcattgctcagaagtaaaaaagattacaaaaaaattaataaaatcctgagttttaatgttggagtttaattaatactgaaattgtttttatttatattattattattgtattattaaatg

SEQ ID NO: 104983 - DNA, 232 bp, Heterodera glycines
  unsure (1)..(232): unsure at all n locations
gagcattcattgcttgtcatgaaacttatggaacaaatttacggaaaaattggcacaaattggcattactgagaaaaagttagtgcaaatttgtcagttttaggggtatgatgacaaaatatttgatatacaaccaatcgacagtgatgtgaactntgggcttccggattggaaagaattttgcccaaaattaatggccaataaaattccaaaaaattcagtggttgtaatg

SEQ ID NO: 104984 - DNA, 395 bp, Heterodera glycines
cgctcagtgctgcacgtgtgaaagcctgtgtatggctcgctgcgtggcaatgtgtcggtggcgggccgcctcgcttggctggttcgctgcgccaatgtgggatgcacgctcgtggggcgacctaacggctgtgctggcgtctgtgcgtcgttgagcggttgttgtggcaggcacataacacactgactggggatggtggtttcgttcccggtcttacgtgccgtaactagcggtgtgtttgtgcttgctgctacgtccgtggccgtgatgagacgacgcggtagtgcccgtgcttggcctagcacgtggcttaagactcaatgagtgtcagctcgggcaccgccagctttttctttttttttcattatttttttttacacttctgttgaagaatg

SEQ ID NO: 104985 - DNA, 472 bp, Heterodera glycines
tggcgtgattacggtgataaaaaataagatgaaaaatggtcgatggaatgccttttataaagaaaaatgtgtcacaaaatgtcaaaaatttgggagaaaaacaatgagaaaaattgaaattatagcattataaaagaaaggaaatgaatgaagaaaatgcatagactgaaaatcatttattccaattaccatcatttacctattctaagcagaattttttttttctttaatttgaatgaattttcattcagccctcttaattcattctcattatttaatctttgtccatttgtaatttcaaaaaatttattttaagcgttaccgaacacatatacacatattatacaataatccatctctgcaaacacattgtttcaatggcccgcagatcgaatgccaccggcacgaggaagccgcaccgttaccgtccaggtacagtaacactgcactcatcatctgctgaccccaaatg

SEQ ID NO: 104986 - DNA, 223 bp, Heterodera glycines
tttgaaaaaattagactatttctaaatttattcaaattttcaatgcttttcgtctttcttttcttccacgacaaacccttcaatttggaattttaaatagcactctatacactttgttttctttgttttaatgccattttttaaacaatgatatgattttttgaagaaaagtgacacggaattgcttgaccaagtggaggcctatgtgttcccgttcaaaatg

SEQ ID NO: 104987 - DNA, 160 bp, Heterodera glycines
ttcaaatcattcatcctcattccatcatcggatcggactgccaatcaaaacatttcaaaccaaaagttgtggctgaaagtgcattttcatttggcatttattcattcatcattcggtcacttcttttcactctcatttcaattccatcatcataaaaatg

SEQ ID NO: 104988 - DNA, 52 bp, Heterodera glycines
ttaagcacttttcaaaattattttctaaaatcaaaaagtcaattttcagatg

SEQ ID NO: 104989 - DNA, 389 bp, Heterodera glycines
ttaatacaggtaaaaacataaataagcgaagtgcttttttaaatttaattaaaatttgtaaaatgacttttgtcaaagtgatctttggcgaataatttttatttaaattttttaaattacctaatttttttattcattaaaattatttattttttttaacaattaattattagattaacgcatatatgtaattgcctatttatgatgtgcctaatcagctgaattcgttttcccttcctttgcttttacccttttccattagttcatatacaaaaacacaaaactaaatttatcagcattaactaaaataattttcttattatgaatctcggacggtgtagcatttgcactttaagctttgacttaaacgatgtttcagctctaagatg

SEQ ID NO: 104990 - DNA, 788 bp, Heterodera glycines
ttctgattttgtctatatttccatattgtacattcatattacggcatttttacaaatctcaaagacaccactcaatattttttgtttttgtaaaatacgaccttaaaatagaaaaattttggaaaaccatcataaatgtaaattttttttctctctcactctaaaattcattttttaaatgaaaatgattttttaatttttgtaattttttgtaaattttttttctcttctttttctttttcctttttcttctctctctacgcataataattatagattttaattatggcattctataattcatgtattaaataattcatctttcttgacaattttttttttatgggttatgtattctttttccgaaaatgaaaaggaaacgaaaagaattgcagaaataaatcattgtagagaaatgattagaaaacaatggcagctttggcaataaaatgtgatactgaaaaaacatctgaactgagagatactaaaaaaagtgatgaaaagaatccaacagaacctattaataacatagactgcagggctgggacgcgaccgcgatccgcgaccgcggcaaattgaatccgcgatgcgcgatccgcgaccgcgggatttttctgtgcgcgccccacccctgatagactgtccttctagttctggaataggtttaagatgtactgatactattgcatgggcaatggttaaaccagaaagcgatgaataccaaataagacaaaaaaaaggataaaaacagagatgatcagctaaggatgattatttttcagagaatg

SEQ ID NO: 104991 - DNA, 662 bp, Heterodera glycines
ttattgagatattctttttataatgcgcaaaaatataagctaaaaacaaaatatttgccttaagttttctcgaaccaaactacatttattttgcactcaaaaaaatattaaaatttcaaaaaaaagagcaaaaaatcccagtataaaaataaaaaataaagaagcgtttttcaaattaattaaaataatattttatacaaaaaatgtaatttatttattattccacaaaaataatttattcgtttttttccttttctttcggctgacattgggaaaagtcaaatcattttttcacaatttggatggtcatatttttttattcattccgatgctaataatattatttacataaaaatgaataacagaagggatagaaaaattatgtgtacagcgaatgaattttatttgtgtaatttatcattcataaggccaaacaaattattttattggaactaaaaaatttattatttcaacaaaacgaaatatttaattcattttagtcataattatttaaaaaactgaaactataaaaaatgaaaattattccggcattttttattgtgtttttctgtgctcttctgttgattgtcctttttgacggtctttaaaattaataattacactaatacaaaaattaaatgtttttgtttcctttagaaatg

SEQ ID NO: 104992 - DNA, 51 bp, Heterodera glycines
gattcggtcggcactcaattcgatgctttcggtaagcttcgccaatggatg

SEQ ID NO: 104993 - DNA, 62 bp, Heterodera glycines
tggcagtgttgttcggctttccgaacacaacgtaaattctctccaatatatggaagaaaatg

SEQ ID NO: 104994 - DNA, 211 bp, Heterodera glycines
  unsure (1)..(211): unsure at all n locations
catttaatntcgtggtaataaaaaacaaataacaaacctgtctttctcaggaatcgcttcaactttattaaaaagtggaagaacaatacacaatcgatttaaatttccgctaaatttaaatgctcagactgtttccggtgttgtccaaggcacaaaggctgccgaagaaataataaacagtgatttttttgtgattgatgaagctcctatg

SEQ ID NO: 104995 - DNA, 661 bp, Heterodera glycines
ttgcaggaagaacagaaaaaacgaatgtggatggaattttttttaaatggacgaatgatttttatgtagaaaaactgtgattaaatagcaaaaaaaaatggggcgggacaaaagaaactaaaaggaaaaaaggcggagtcaacttcttagcaaagcaaacaaaaatcaatgggcgtgaccaacaagaaaaggggcggagtctttttactttccatgatgacgtcattttttttacaatttaatgaattgaatcttgctttgccaaaggcataaaatggccaattggttagtgcagcaatttgatatgggttcgagtccagccgggtgcaaaggttttttgctaatttatttaaagttttggatacgatacttgcaaaatgcatgggtatagcgattatttgggtacattcatacccttactgggagaacctttaataaaaatatcgattgataaatcaaaattaaattaaaattaaaatccatttcatttgccagagaaaacatagaatgtactctctccctaagagaccatccaataggtttgggtttgtggaagaggatgtcagaaaaaaaagtggaacccaatcaaataatcgatcaaaaatcaatcgataatttgattgggaatattatctactttcagcatcaaaacaagccaatg

SEQ ID NO: 104996 - DNA, 189 bp, Heterodera glycines
ccgacaaaaccggcattcaatccctataacatatccctgcgattccggtctcgaatcctgaatctcggccccatactttttcaaaattccgggcttcaagagttataacgatttcaaacttcaatttttatttgtttatttataagtttgttggaattatgaaatgctttggcattttgtgtcttcatg

SEQ ID NO: 104997 - DNA, 1003 bp, Heterodera glycines
tttatttttctttctctctctctttctctctcccagctcccaccctctctcgttttctctctctctctctctttcttttcctgtctctatatctctcccccccccctctctctcccagctcccatcctctcttattttctctctctcttcctctctttatttttctttctctctctctttctctctcccagctcccaccctctctcgttttctctctctctctctctttcttttcctgtctctatatctctccccccccctctctctcccagctcccatcctctcttattttctctctctcttcctctctttattttgttttctctctcccagctcccaccctctctcgttttctctctctctctttctttttctttgtctctcctctctctttctctgctgtgttcatgtctcctcctaaaaaagtactcgcatctcattataggtatatcatctggtttatctatgtgctgccctttttgcatttgcctcccttcctcaaagtttagtctctcccaacaattcttttatccaatcgttatcccccataacgcatatccatcgtttttctttgtaaaattgaaccctgtagatttttcgtgtctgctcgactcgagactcttgagcagggctgggatttagcagattaaaaagaattcacaagatggctggaattttttttagtcattctgacaatatttaagagagtatacacaaatccgactgatggtttgtgtactaaaaatcacgttttctcagaaatacacgaaatgtttaaattaatttcgtttccaatttaaatatcacccaaaaataaagttgtagttttttatacctaaaaagtctaaaaaaaaaatttgtttttttgcctaaaaatgccattcccattttaatcaagcatattttgtaatccataaaaaatagaaaaaataatttgctgttaatttattttccgccgctacacaaattctccagtattagccgaaaaaacgacctcaaaatg

SEQ ID NO: 104998 - DNA, 1003 bp, Heterodera glycines
  unsure (1)..(1003): unsure at all n locations
cggtttttgagaggccgggcccggaaaccggtcattttgaaaatgccaaaccggtccggtccggcacttttggaccggtttttaccggtttatgatatagccaaaaattcttcatttttatacaatttctgttaataaattgcatcgaaattttcaaaaaatttctcggcggcgcctatcggcatcgccggaccctaaaaatccttaattttctttaaaaatttgctcaaaatcgcaaatttttttttatttccaaacagaaattattgaagaggtcattattgacgcctgaagtgaagtagagccgaaattttacatctgggacgatttatggtcaattttgggtgaaatacatgtgaaaattaaaatttttaccaaaccagaaaccggttccgggcccggcaatttgaaaatcctgtttcaccggttttccggtttgaccggtttttgagaggccgggcccggaaaccggttgcttctgaaaatatcagaccggtccggtccggcacttttggaaaatccggtctctactaattatcaataaaacaattattgaatggaggcttgagattcactttgagcacacaaaaaaataatgaatgttacaggacagcgggggaaaattatgtgtgaaggaagggggggatggtgaacaaatgaacatcatcaatactgtacacagcggcccaattttgggctcccagtacaattatgcttattttttatttagtaatcagaacgccaaaactttgcaatgcttaaaaatttccggggattttcccttgtaaaaatagaagagccgatctcgagatagaaaagaaactttcagaaaacaaaagagaattcgatagagagggccaaaaaactagcctaggtaaaatttcaagaaaagttacccacaggaaaaaattttttcncatggcaacaaattnacaaaatcacctactttttaaggcaaaaaatggtacttacacgtaaaaaaattgataaattaaaaagaatg

SEQ ID NO: 104999 - DNA, 472 bp, Heterodera glycines
atttcaatcgattcatttggtctgttgcccgctgtaattggtgatggttttgatgtgccaaattcaacaatttctgctggccaagcattgtccaaatggttgcattctccgagaaaagatggccaacccaagctattgcattgcaaagacattaaagaacaagcgaacttcgattggatcaacaatttcaaggaggtgtgtggtccggggggggggagcttcaagttttttattttctgaaatcggaattccgaccccaaaaacgtcgtaagtcggaaatttttgaaaatttccgaattttatcaaaatttcggaaatccgaattctgtgccatccctgctggtgtggctccacatttttggcaaatgactgatttttgttttccaatcaaattgcttagcattttctccgtgccaatgccatttcttccgtcagttaccaaattcatttttatgttcgtgcgccgtcaatg

SEQ ID NO: 105000 - DNA, 73 bp, Heterodera glycines
ccgtttctttcacccgtttaaacaggtcattcataatattccatttcccctgttgtcttcctcagttgccatg

SEQ ID NO: 105001 - DNA, 120 bp, Heterodera glycines
tattctttttatatatttattttttaatttatatacttcaagggccatttgtttgttcttttcgtgatgaatgttcttttttgtcctttaggtgcccaggaatgcgctcgttgcataatg

SEQ ID NO: 105002 - DNA, 136 bp, Heterodera glycines
ttttggtggtctgagcgccgaactcaccgaagggggacggaatttgtcctttggggagaggcaactgatttcgctgcttcggttggctttgtccaacccgcgaattattctcatcgacgaggccaccgcgcacatg

SEQ ID NO: 105003 - DNA, 1003 bp, Heterodera glycines
tttatttctctttaaattcagatttgtttttgtataatgagcctgttgggcgtatcaattttgttgcaattttgctatttgcactataaatgtttttttgctaaatgaagtactgaattaaaattctaatacaattaaaggtagatcaataagcagaactggatcccgcgagagttttgcggtaaccaggccacaattataaatttcccgggattaatcccgctggatcccgtctggtaacattttgagtctcaatcccgcagaaggacacgcaaatttgctttttgtgcgtgaacccagcgggaccagtattgaatttttttttgttgagaaattcaaaggacattatgccaaatattttctattacaataaatcaaaattttgataaatgttaatattgaattatagaaataaatttatcataataattagggatgtcaaaaatatgtacaaaagatggtcaaaatatgtacataatatgtaaaaaaaatcccgaaatatgtaagaaaaacccaaaatatgtaccaaatatgtaaataaaatttttaaaatggttatttttttggaaaaaaaattcttcggaaagggtgaaataggcacaaaatgccatcccgaaatatgtaaaatatgtataaaaccccgaaatatgtaaataaaagtccaaacttttgtttgcaaacacaaaaaagaaaatgtttttcctactaattagagcatgtagaatccaggaaaaaaaatatgtatttacataaaattgacatccctaataataatatttctaaacgatggtcgaaaataaataaatatgccaacttccattctttaaattcataatcattatcaataaatttatttttaacaatattttatttaaaagtgtcttgtttcttttacattttttattattttaatgtaaacatgtaatttgtagtgtatacaaaaattttaggcataattttaatttcgtttatagatttttttaggattaaataaattattatg

SEQ ID NO: 105004 - DNA, 428 bp, Heterodera glycines
tccaaaattagcccctcagggggtttttaattggactaattgttccctttggctaattagttgtgtttcgaaagaatatttattgccccttgtttacttcatggcgtaaaggttgcataacaaccagtgaccaaactctgtttgtatttaagcaaagtgaattgcctcaatcagcaacagttttcgcaacatttaaataattagtcaattgtcttgtccaactaataacagcaatttgccattttctttttaccattaagcttaaataatttaaattgattatttgcaaatgctaacaaattggcaattttgtttggttttgctcattagtaaaccaattaaatgttgtccattttaatgattattttattagaattttagcatcaaatatccataataatatatctcttctcccaatcaacaaaatg

SEQ ID NO: 105005 - DNA, 361 bp, Heterodera glycines
taaaaaaaaataatgaaaaaaaagaaaaagctggcggtcctcgagctgacactcattgagtcttaagccacgtgctaggccaagcacgggccctaccacgtcgtctcatcacggccacggacgtagcagcaagcacaaacacaccgctagttacggcacgtaagaccgggaacgaaaccaccatccccagtcagtgtgttatgtgcctgccacaacaaccgctcaacgacgcacagacgccaacacagccgttaggtcgccccacgagcgtgcaccccacattggcgcagcgaaccaaccaagcgaggcagcccgccaccgacacattgccacgcagcagccatacacaggctttaacatg

SEQ ID NO: 105006 - DNA, 337 bp, Heterodera glycines
ttaccccccccccctgaaaaaaaaatttttttttttttagttttttttgttgaattttctcccccctccccttaaaattttagttcgttttatagtttttttcgctccaatttccaacctttttttccgtcgctgattaattattggcgggccggtggaactacttctaactaaccacccccccccccccttcaattttagtgccatttttaattcggcaccgctcgtcccccccccccatttttaactcgctttactggcactaaaaatattcgaatttcatttttgcttcattttttttttaaatttttgttttcagttcccaagccttttcatg

SEQ ID NO: 105007 - DNA, 480 bp, Heterodera glycines
ttttcccgtcgtaattgcatactaaaatattaatgaatattgaactaattatttaatataaattataccggacagaagagaagtgtcatcattaataataaaatgtcagtcacacatatttgcaatagaatcttattaattaatattagaacaattaaatttaaaaatgcaattatttaaggtttttttagaaaataaaaattcaatatttggcgtattttagcaaatataaatacgggccctgttttttaatataagaattaataaattaaaaaattacataaattaaattttaaatttactttgctgtaaatgcgcaattgctttggagtgtgtcgaacaatcaaatgaatcaaaatgacatttaacaaaagtataaatcataatgaattgatgaaatctatagagataaaataatctaagcgtgcgaatgaaattttttgataataataatactgtaattttaagtgtataaatatg

SEQ ID NO: 105008 - DNA, 343 bp, Heterodera glycines
  unsure (1)..(343): unsure at all n locations
gtttatttgcaaaatttaattatataaattttataaatgatattctattttgtataaatntaaaaatataaaattttaaatataaaaatttttaaaatttataatgtgtataaatttcaaattattagtgcatttttatcgcataacaagcttgaatacagtctttttgcacaagttcaactcaattanagcgaagattcatgattattttgcatatttttaattacaaatttcgcgttttttttagcattttntaactgatttntattaatttttcattaaatatttataattataatntaacaatgtttatattttaataaatanattttaaataaaaatg

SEQ ID NO: 105009 - DNA, 1003 bp, Heterodera glycines
taatgtaaatatttatttctaacttttttgtaacctcatccctacaaaaatataaaaattaattttacttcatctttactttgtcaaccaaatctaacattattcacagatttttgttccattccagttgcacaaattggttgaattttttgggtcagatttttgcggccaccagccacaaaacaaatcgaatagttgatagagattggaccggtcggttttcgttatttttcgattttcggtttttgatcgaaaaaaaatcgaccgagaaatttttgagttttttgctttcggttttttgaccgaaaccgttcgaccgaatttatcaaaaaaccgaaacaaccgaccgacttatcaaaaatcgaaaaaaacaaacaaatggcgaattggagcgacataacctgttaataacaatattttagtgcttttttgtgctcatttaaatttttcttcgattttatcgattccgcttttttaaccaaaatcgttcgaccgaccctcttgtccgttctctacaaatcaagcattttatttaactttaaatgaaattatcccataactcacaaaaatttggaaaatttttccaacttaataaatcatatattagcatttattcgttttaatgtgcacaaataagcatcgcaactaaaattaatgtcaatcatggccttgacattttttgcgaactgatcagtcatttaccaatcgctgattaatcatccaaacacaccaattccttcccgcccggccccgctctatcatttctgcgagaataatatataatagaataaatatcttattatatgaaacgaagttgacgggactttagtaccaatctaaaataattagcttgtataaaaataaagaattattaataatttatttataaatttggcgtttgattgccattattttctggtttcctagggcctgattttctatatcacttaatggatttttgctaactcaacgataaattttgatacattgatttagaattatg

SEQ ID NO: 105010 - DNA, 1003 bp, Heterodera glycines
ttttgccatttatttatgtgccagattggcattattatgccaccgtttttttgtgccattttgcctcaattttttggcattgttctgccccctttttttcattttcatttgccaattgtcgcaccttttcgtgccaaaactcctcaattatttcttgccagtttttggcattgttctgccccctttttttcattttcatttgccaattgtcgcaccttttcgtgccaaaactcctcaattatttcttgccagtttttggcattgttttgcccccttttttcacattttcatttgccaattgtcgcaccttttcgtgccaaaactcctcaattatttcttgccagtttttggcattctcttttttaaattttaataaattattcaatccttggcattctgttttttcaaatttaaaaattatttttcttttatttcaattcttggcattctgttttctcaaatttaaaaattattttaattcttggcattctgttttttcaaatttaaaaattattttcacatcttggtattctgttttctcaaattaaaaaattattttcacatcttggcattctgtttttctcaaatttaaaaattattttttattaattttccgcttttttcttccaaattttaattatttttgcttccccctttaaaatatgtttcgtttccactctttttttccttttttattcattttccccttgtttttttcatttttcattgatcgaaagtactttgtactgtcctttctcacctcattttgttattttgttggtttactcggtactaaaccctttaggatatttgttaagccttttcaaatatcctgggggccatccttaaaccgaggagtcctgccccggtactgggttacttcccagaggggtgggcacgggcgttcactgtccacggggcttattccgctggtatccagggctgcggcagtgactgaccgaaacccagtttccgtcatagcccgccgggtgtcacagcgatg

SEQ ID NO: 105011 - DNA, 241 bp, Heterodera glycines
aaagcttcgaaccaaaactctcgagggtttgcagcaaagatcgtgttgtggcacgctattttttcattttatatttctaaagattttattgtggttttgtttagtttgacaatatttttcttaacaaatgttgaaggttgtattgaacataaataaatttcaaattttggttttcgttatggtattttttatttaaaaaatagtgtaccaatgacaaatacatatcagagataaattaatg

SEQ ID NO: 105012 - DNA, 492 bp, Heterodera glycines
  unsure (1)..(492): unsure at all n locations
tgaatatagaaaaaaaaactaaaaatgtatcaattagtcctacgttaggggaaaatacagatttcttaaaanagcttgcggccaccaggtctgataacgaaaaaacgatctattgcagggacatccgcagaacaaatacttgcccttgtggaaatttgcgcaaatattttaaaatttaattttcgtctaaatccgagccagaggcgacggttgtcacaatacgcggactattacagggccatagcacgcgctcgcagtgagaactcagctcggcaaaaacttcaacaagggagcggaattgcccttggtgctattcttgtgcctgttctcagtgtcttagcccaaatattatttaaattatttaatttacattattctcataataaaattagggctttttggggttcgcttctcaattaaatcaatttatcgaattgaaaaattgatcatttaattaagcggctcatcaaaatccaacagttgacaataatg

SEQ ID NO: 105013 - DNA, 267 bp, Heterodera glycines
ggagaacgtttggacgcacaaggaaatctcactgtcatttgccggaaaggcgcaaaaaatcaaggactgcggtcggacactcgtcacgacagaccagggatttgcagtggatgccggcaatgttcctcaacatgatcaacaatcgatggtcccagcggagtgcccaaaaaaggccaattaccgggaggcgctcaaaagcggtgctactaccggtggaccaattcagcatcgacactaacatgagactggagatgatgaagtaaaatg

SEQ ID NO: 105014 - DNA, 973 bp, Heterodera glycines
tgaattgggcaggagatgaagaaacattggcaaatgccttttacataaagggattatatgagcaacttaaacaatttgggcttggttagcaacagggacacgttttattaaaccgtaattaaaaatgacgcaattaaaatggtgctcaggaagagctccaaaatgctaggcttgtttgaccaggaaaacgaggggggggggcatttagcgggtcgggagcagggatggacgaaatttcgtttcgttttcgttttgtcctacattttcggcactttttgagtttcgttttcgtgtttcgttttcgtctaccaaagttttttcgtttcgttttcggtttcgtcagagcaaaattggatgaaaaaagtacgaaaaagcactggtaagaataggccccagtagtataaggccccgggggcgggggtccagacccctgcccctgcttaaaaaaacacccatttttgttcttcaggattttgtcccaggtgccggggtccaaatccatgagaggattaattaaattaattcatccagaggcagagggactcgaacccaagaggtctaatccaaagcactaccactgggtcagcgatacaactatccgaaaaaggataattagcaattatatatatataatttaaaatcgattaaataattcaccaacgggagggggattcgaacccaaaaggccaaatccaacgcacaaccaattgaccgaggaacatagtcatccgaaaaaggatatttgtcagttatgtagtaaaaaaaaagtgccgcaagagtcaaaaatggacgggagaggggatgcaggcgacattctcccttttgcctatataaagggatatttgtaagcaaaaaaagcacaaataaaaaaattttttaaatgttcaacgcaccgtttacattaattttatctggcgctacgggaagtggaaaaactcaatggctattgaaacttttaaaacattacagtatg

SEQ ID NO: 105015 - DNA, 99 bp, Heterodera glycines
tttttcgccgatgcggtgccaccccccgccgctgtgcgatctgcgcgaccggccgcgcgacaagcggtggcagcgcaacggcaaccgcccgcggggatg

SEQ ID NO: 105016 - DNA, 210 bp, Heterodera glycines
tttcaaaattcatttttaggattcgaattttgggagtcacttttttctgttgcaatttgtcttctgtttttgcccctttcagttggcttcgactttcgcccgattgaccagcgatgggtcggccatgtgctcactgagctgttggacaattgcaaaaaatacattttcgatgtggacagactgcacacttttcgcaacgcgtaccaaatg

SEQ ID NO: 105017 - DNA, 152 bp, Heterodera glycines
tctagagtctcattttcggggaactatgaaaagagttatgttcaaaaatatcgggctggcgctcattcgaccccaaccgtaaaatggttccttttttatatggaaaaaaaaaattttttttttacttacagtagaggtacaatgaacgaatg

SEQ ID NO: 105018 - DNA, 216 bp, Heterodera glycines
tttgccatcgccgcgaattgcgccattcacgtgacccaaactgaattttaactaatcaaagattgtaagttcctaacaaaaatttaattttttatttatgtttaaaatgcgtttttcgcaggcctttccgacctcacccaacggctcgtgtatgtcgacgacaagcggagcctggaatcgatctgcatactcttcaatcggatcatcgaaaacatg

SEQ ID NO: 105019 - DNA, 283 bp, Heterodera glycines
  unsure (1)..(283): unsure at all n locations
gagctaaaattgttttgacaacagctttcggcacttgttctgctcncaaatcgtttattgtcaagtggtcttggtctgggtgacttctttactcctggtaaatggaagccgacaacagatttgccatcctggcttcaaacgtcacggagatgacaaaggagaggaaactttggatcaatacaaattcctcaattttggcggtccaagcgaccgtaattgacatcaaaagtaaatatctaagtctaagattctgaaaatttatatatattttaccatagaaatg

SEQ ID NO: 105020 - DNA, 68 bp, Heterodera glycines
ttgcaaattgatcttccacaaagaatgtgccacatttcgctgccaaaattccatgcacatccccaatg

SEQ ID NO: 105021 - DNA, 98 bp, Heterodera glycines
cgtgagaaaaaacaattaattagcacgcaataattaacccagctaatgattaattaagcgggatcacaactccgtatggagagcgcatcataataatg

SEQ ID NO: 105022 - DNA, 1003 bp, Heterodera glycines
tcccctttctgaggaggtttaaaaataatcccccaaggaggataaaaagaggatgtacggtaattacaaaaaaagcaaaatgttttaaattggtaatgatgaacaagagcatttattgttttgcttttctaaaatttttattaaataattatttaataaatttaaaattattttacaaattattttataaagcgaaagtaatttatgtaattatatttttttcaattttaattttatacaattttaatttattttgtcgaattttatacaatgttttaatatcatttaatgcatttttgagcatatccaatgggttgcttaatgttgattatcatcaatttgtccaaatataggttaaatgacccgtaaaattcacaataacttcagctaattaatgtattaaaaatgtgaataattaattaagccgagattcgcccttccctgatcggaatggataaagaatgatgcaattccatttactttatatgtttccaattttttggcatttttctgttttttagcaacgattttttctcgctttttagcacctaaaaattcgttcaaataaatatttcttgctatttattatttttacaaaggttgttgatacataaaacgttgccctcacacaaatgaataaaaaatttaatagtgacaacacaaatgacccgtaaattgcaatagcatcagcaaaatgcatacataattaatgtattaattaattgttttgaaatgatgtcacaaagatgagattaataataattttttagctaattaattaattgtcattataattaattaatagctaattttttcataaaaattcaaagcagctttgtgacaaaaaacgaggaggagcgaaaaaggacaaatgggaataattaagcgacatatcaattaaaaaggcatgccataatgggaggaaacaaaacgccaaagacttagaaacatcgtgatcaaagcaatgaaataaatttccgatcaaaagcactcaatccaaatg

SEQ ID NO: 105023 - DNA, 100 bp, Heterodera glycines
aaagaatcatttaaaaaattgtacacgtttatggaaattttttaaattgtaaataaaatttttaatgccatttttaattgaaggtgtgccctcctcaatg

SEQ ID NO: 105024 - DNA, 337 bp, Heterodera glycines
ggtacgcgaatttgtgttggactgtgaagttttgtgtgggaccaacgacagcaaagttttggtgggatagaatttcatggaaacatttttaataataaattacgcggcaaaatttagtgggaaaaggaaaacgagcatcggacggcaaagtgtacgacataaaacacatcgacgacgattatatcaaaaatcactcatacctccaaagaagccttggcaattacttacaattagcattttcctctgattattgcgttaattttcagctgttttcgacattttatacttggatggtgtgtctttaatagagctgcccttaacggaacggttgaaaatg

SEQ ID NO: 105025 - DNA, 158 bp, Heterodera glycines
  unsure (1)..(158): unsure at all n locations
ctccccccncccccccccccaatctcccgtccctcatttgtcagatcactcatcggttttcgctgtatttgctcggccttttcgacctgatcactttgttcatgtctttctgcctcttctatggcatttattcttttaaaagaatatttgttaaaatg

SEQ ID NO: 105026 - DNA, 503 bp, Heterodera glycines
tgcttatgtgtggacgggacaaaaagaacagacacaaaggaaaagcattgacccaaattcgaattcgatttgaatttttcaaaatctccgctgcccatttgtccctgttggcattgcgctctcttccgccatttgtccacccctttgccccgagctcccctttcattcctaattgattgattgaatcaatcaattcttttcctttgatgttttccgccctttgatgcttccgccatcgtttggccaaagggacggcgaagggaaaaacaacaacaaaatattatttatggagaaaagaggcgagaaaagtcgagaacacacacaagcacatttagcaaattgatcgactgcgccgctcactttcgaaatctttcgaatgatttcgccccaatgttttttttgatttttttttgtgtggatttacaaatggaaaatcaaaggattaattgccttgggattttctgttttgtctttccatttgctggctgatgcgcaacggaatg

SEQ ID NO: 105027 - DNA, 240 bp, Heterodera glycines
  unsure (1)..(240): unsure at all n locations
atcaatgattttntgtgtgataacaaaattatttgaaaaacctcccttaattaattatttaattaattcattaatgattttgtttattttttaatcgcatatttccacatacaaattaaacataattaaatcaatttcattatgacaaagcaacaatatttggcaccaattctcttgaatattgtctttgttcatgcacggcattttgtgccatgagtgaaatcgctgctgaattcaatg

SEQ ID NO: 105028 - DNA, 115 bp, Heterodera glycines
aatttagtcattttattgctctgttcaacgggctcccattccgtgttgaatagtctaagaaattgcaataaaaatttccatcgacaaattcttccgcaagtgtcaaaaaattatg

SEQ ID NO: 105029 - DNA, 51 bp, Heterodera glycines
gctgaaaaagcgggagaaaatgggggagggattggcatttttaaaagaatg

SEQ ID NO: 105030 - DNA, 390 bp, Heterodera glycines
cattaatattcattctcaattattttccattcgttcttttcgcggaatgattcatttcgatggaaaagcaaattttactttacagactgatgaattaatggaaagaaaacatattcatttattcgtttgcactgtccatttagcatttattactttattttggtttagttttggtggataggactaatttttaaaattatttttttaattagttttttagaataataaagacaatgctttttctcgtttcgtttgtcctttgttcgcccttttttgcttccgtaaatttggccaattttcaaccgtaaatttccataatcattcataaaatagcaaatgttatcattgtgttggctttcaggctttacctgattaactcagcctctcatg

SEQ ID NO: 105031 - DNA, 298 bp, Heterodera glycines
actagggaagcaacttttagtgaaaaaactttttttttgctcatttgttttgaagaaaggagctcaaaaaacgcatttctgcgttaaaattttttcatttggacgtcacttttcgtcactggaaatcactattttggggttttgtcactaaaatagttaaaaatcactattttggcgttttgtcactattttttcactatttcgacattttttggaaaattctttaacaaaaatgcaataagaacaactaaatatcgcaataattgttttttattcttaaatttagacttaaaatatg

SEQ ID NO: 105032 - DNA, 101 bp, Heterodera glycines
gcgacaattgtacaggtcggcggcccaaccatttgatgccaaaagtgctaattatttcaatttaaagagcgttggcttatgcactgacgggcaccgaaatg

SEQ ID NO: 105033 - DNA, 1003 bp, Heterodera glycines
aaatttttgaatgttcatttttatttgttgagttttcatttaaattttcttttgctaattattcgaaactgtaaaaataattaaattagattacttatacatagttagcgagcgattaatgtgacccaaaactgaatttcctaatttgaaattttgattttgacattatgatgcaaaaacaaaagaatttcagtatttgttccggcggtgccgaatgcgagaatatttttaaaagttgaatgaatttattaaaggatttagtcaaaaaatgcggttttataagcaaggtttttgttattttttttagtaaatttcttattaaagattaggttctaactgggtccaggcttttcctgctggactcccgaggtgtatagatacaggtgttatttttcagcaacttgtattttttcaatgtacttgtatttcaattatggaatccagataacaaacattcccaaaatatcgacgaactatatttcttatcattcatttggagttttttctggggtatttttagtcgcgcgggtcgagcaaattgtcaggtctgaattcgggtcgggagatcgatgtccaaattagaattatggtcgatgggaggatgatcaatcagtagaattatgaccaatgagtgtgggttagaatgataggtgatgggagaagataatcagtacaattatagccaagtgggagaggatgatcagtaggattatgaccggtgggtgaggatgatcagtaggattatggccaaatccaactgaaatggccaagaggcaaaaacccaatttttgcccctttctctggcttttacattattttcaactctgcttcttcttctctaatggtgcccttcataaattgagtagagtttttttaatgcatataaaagcctatccaattatagcaatttacatattcatctgcagttattgcttattcattttcatttctttacattttaaaaaatatatttccaattctctaaactcattctgataaaatg

SEQ ID NO: 105034 - DNA, 67 bp, Heterodera glycines
ggttggtgacccaactaaatgcccctccccttttttctaattaatttcgccattagatggctcaatg

SEQ ID NO: 105035 - DNA, 63 bp, Heterodera glycines
agcaaaattgctgccgtttcgtgtgctaattgtttaattgaaaaggcaaacaatgagaaaatg

SEQ ID NO: 105036 - DNA, 391 bp, Heterodera glycines
gtggtgaaaataagtgatagacaataggaaataggtgaaatgtctaggcttaggtggtgaaaagcaaacagtgagacattcatgataagtgatgaaaaccaaaaaaataattaagtgttagtacatattgcttagaatgcattttcgtcgcctgtaaatacaatgtgatatagagtgcgcggtataaacaattcgctgaattttggctgggtagcccaaagtcattagaaagttaaacccaaatgttatttggaatgatccgggagatataccatatgatggacttttgaaagttaaagtcataccgccgaaaaggttgcggtaccctttattgccttttcatgccataggttatttatttttatgccaaatcgatttaatgtttaggatg

SEQ ID NO: 105037 - DNA, 376 bp, Heterodera glycines
cctgcaaatttttgaaaatttctttatgctttaaaaaagttatggccagaaaatttcaaaaaacatggttttcttaacatttttggtcataactttttttttaaacaaaacgaaatgtttagcaattttgcaggctaatagaagacatttagggctatcgagtgataccaaaaatgttttgatttggttggcaaagaaaaaggttatacccaaaaaacatgtgttcagactaaaacgaccccaaccgaattttgcatggtcgtcgagtctatgatcattttcaggcggctttatttgatggaatgggcccaattaaaaaaacaatataaaagttaatgaccaattcgtatttcaatttagggaaagtctcggcatg

SEQ ID NO: 105038 - DNA, 792 bp, Heterodera glycines
cctgaaaattattttgatattttaatagtgccatttgaaaacttccaaacttttaaaattaatggggcaatgtgctgcatttccaatgaaaatcaaccaaaaaaaaaaaaaattttttttaaacagaaattcaaggactgtactggaaaatgaaaggaaggcatttttgaaagcgttttttcaaaaaaaaaaagtcgtcgacttgcaaaaaaatcgcaaaatttggcagtttttgggtcaaaatctgttaacaaaccgcactcaaattttcaaaattttttcccgacggcgcctaccggcaccgtcggccccccccggttcaccaaaaatttttggaaaaagtgcgccgcaaaaaaatgggggtttgaaaagcaaaaaaaaaaggtcgtcgatttacatggccgggaccatttcgcaaaattggccgctgaccccccccccccccctccagaccatttcgcaaaaattttggttgacctccccccctttttaatgtatgaattggcataagatagccatacggggagctataagtcaatttctcgccaaaaactttcttgatttatcaaaaataaaaacaattcacttgtgccgattgtgcggacgggaaccggttggcattgtgcacagtgccggcaccaattagtcgagtgtgtgccaccgttgccaacgctgccgcaggcgttgtgccgccgctgaggagccgttggttgcgcaacagttgttgctgttgctgtttgagctgtggcgttttggtaatgggggaacattgtaagacagggttcccaaatg

SEQ ID NO: 105039 - DNA, 188 bp, Heterodera glycines
ggtttttttgtgttgtcaaagaaattgaagaaagggtgagagaaatattgttaaaaaaatgagtgacagataggagagtttagggagaacgcaaacaaggtggtagagagagaaagggaaagagagagagagagagaaattcgaaagtgatagagaaattgaagaaaacgagaataagaaaggagatg

SEQ ID NO: 105040 - DNA, 171 bp, Heterodera glycines
gcaattaatctaaaatatataacaatttttaatgaattaaaaaaaaaagaaatttcttcgattaaaatttaaaaattcgaattcatttaaaaaatatatatttatttgcgtcatttacatgcctgcccacaaaatatttccatctataatgccaggtttctgtggtcaatg

SEQ ID NO: 105041 - DNA, 800 bp, Heterodera glycines
gctctctctttttgtcagtatctctctgaatttggatttctattcacattttcattttaataaaattttattgcttttacgcatttttgtgaccatttttctccttggcatacgtcgcaatttgtccgtcttcaactattttagcttacaattagtccgattttcactaatttatttacctatacatatacacaagttttgttggtgggtcagaattgtggaaatgtttggcatgacttcgtcctcctcttcgatggctttggtctgtcaccactttttaacatattccttagattgtttttttgggcattgccttttctatgccattggtccacaaaaaccactacaaatctggcatgacaccggttcactatgggtcaagcccagcgtttatgattcgctttttcaaattaaaaaatggtctatttataccacaatctagtcatatacatacctaaacggtaatagtttagatggtgccacacctttttgacaaaaatttcttgaactttttaaaagttgtgcaaacagttatgtggggttttcggtgatgctgatcctgaaaatgacacccgttttggccaattccgacccccggacttggattcgaacaaaaatttgaaaattcaaaattcatttttatgttcgtatcattacaatgaccattctttgatgttgcaatgtttgcgaataaacttagattgtttttaatcgatttttgaatagaagtgagaatttcgaaagttttgaatttcaactttgttcgaattcgggtccgggattcgaatttgatcaaaatg

SEQ ID NO: 105042 - DNA, 52 bp, Heterodera glycines
tccattatggcattaattacattaattttggagccctttcctaaatgacatg

SEQ ID NO: 105043 - DNA, 149 bp, Heterodera glycines
atctggtgcacaaggagatgttgacagcagtcctttgccgaaaaaaccccaaaaaggttttgtttagtgggtcgccttttgtggggcacaatttttctttgaaattcaattcagaagagaacgcaaaacgtgcaggcaatagggtcatg

SEQ ID NO: 105044 - DNA, 340 bp, Heterodera glycines
ggttgctggacctaacccttcgggggattgtggttagcaccaaaagtcgtcgctggacctatccttaagggggattgtggttcgcaccaaaaattgtggctggtcctgcccttttgggttatggaccggacatttttgcatctgcattcttaatgggatgtgtgagccctgactgatggatttcagcacaggacgactacactccacagcgaaaatgatgtctttgacctttatttgtgcattttttgttaataaatttttaacatatgtgtacatttatggttaattacctcatatttttgccgcatttgtaatactttctgatttgttgttttagatg

SEQ ID NO: 105045 - DNA, 1003 bp, Heterodera glycines
ttctaccaatatactttaaaaataatatatcaaaacgaataaattattaaacaaatatcttatttaataaaattataaatttcatcaaaaagcgggtgaaaacgcatcgttgataagagaaaataaaggcattaatttacaaaattcatttgttctctattctcaggtgcttatggcagctcaatcgaactcacaatatatatatttcatctcttttagcataattaattaaagcaaataaagtaccaatattcaaaattattaaatttttccatacctatataaacccaagaaaaattcagcagaggcatgcttcattccaaaccgattcagtcaaaggaagaaaggtgaataattcgtattttaatcatttgtttgaatttataaaaaattttatttattaatttaaaaatgaattttgtatacaaatttatcaaaaattagtagtgtgctaagaaaggcaaaattacaaattaattatgtttttaatataataatggaaaggaaaattatgatgtttatgttagggttgggacccaattggccggtacccattttgaccctttgctttattgtatttcccttttcccttggtatgttacgcccctttttccgctcataaatacccgcgatgttgaccctcccagttcagttcatttatttgtgttattttccttcttttgttatttaaatattcctccccaaatttgtgtcttcgtttcctttctgctccaaataaatattgaacttaggactcttgattggatggagaggtcaacagcaatcgaatttgctgagtcatcgctgctggactgcatttgtttattatctaggcgataataaacaacatttttgttggacctgctaacagttaggcactgttagtagtaaaaaatttgcgctgctgattttgtgtattggcgacacttttcagttcatccacgcgcacccactgttaacaagctaggcgctgttagcaatagagtggtgaacgacaaaaatg

SEQ ID NO: 105046 - DNA, 96 bp, Heterodera glycines
aacgtggctgctcgagcagttcagcaacaatattgatgcaactcgcccagaacagaatccagcaaattcttggcaaaaatttactttgacaaaatg

SEQ ID NO: 105047 - DNA, 1003 bp, Heterodera glycines
tgtttggcgcttggcatggacccggacggtcgcattttacattttaaaagcttaattaatatttttttttagctgtccaacgacaccgtgaccaaattgggccccgacaaaataaaacgaaattggaaaatgaaaagcgacggacggaggacggcggacgaaagtgccaacgccattcgccaccaacaacagattcaatgtgtgtgggacacacagaaatcgggcaagcgaaatacgggaaaaagaacgagggggggggggggtttggctcggtcctggtgccgaacagtcaaaacccaaaaaagggaaggaaaatggatccaaagcagtaggtgctgactttggggaccgaaatgggtacaagcggctgaaggagccgccggacaagaaattggaaagcccaaggggagggccaaatgtgaagcaaacgtgaaatgtgacaaaaattggaaaatgaatgaacgcaaagtattttttttgttggttttatttggttttttttgtggaaaaaaattgccaaaagaaatgaaatggtgagatttcgtcggatttcgagaatttggctgcgaatggccggagaaaaagcgataatgagttgaggcctcatttctttttatatgcgcgtctgggtgggcaagatgggcgggattagagcaagggccaatgagcgagcaacgaattggggcgggtggaatggcgagcagcgaagtggcgaggcggggatgggccattggcattgtgatgatggaattggcgtcggggtgacggagaacggatggcgaacatcaacaaatccgtccgagattgtgcgatagcattgagatggcgaatttcctgggggattactggggaaaaagggagggaaagtgggccaagcccgaagattagcacgaaatgtttatggtgaaatttccccccaatttctacggattaacattaataatatttttttttttgtgattttttattattttaatttttaaatagtttgtcggagacaatg

SEQ ID NO: 105048 - DNA, 1003 bp, Heterodera glycines
tttttttccaacaacaaattgcaatccaccgattttactctccgtttttcatataaatgccgaggaaatgtgtgccgtatctgtcgtccaaaaagcagatattgtgcccgagggagggccctttaattaggcaatgaatggcacagacccacattttgtgcctcgaggggctgacattattcggcacctcgcaaggcaagccaggccaggaggccactcacatgcgtatcgttgacatctcgcgcatattctattcagcagttcgtcgctcgtgaataggggcaggccattgttgttggttgagtggccaagtgagggggggggggcgggcgacaaggcttatgtaaagaataaagcggcacccaaaaatgagagcccccgggggaccaataattttaaatgtcgtttaattacacaaattaaccacttactatgcccttggtttggtagcgtataaatttaaaaaatatatggcatataaaagcattaactagagatgatatacggtaattaaacccagtactttcttataatttttgaaataattttcaatttttggagaaaaatttatttcattagcctaatgtttaagagatgtttttcgttgcttttaaagctatttaggttttttaaaattgaaaaatttaccgatttaagcataagtcaattgtcagcgtcgcagttttgaccacttaattttttaataaaattaaatttttcttttcaggatttaactaaccgaaaagtattttttaatgaaaaatggctacaattccatgcttggaactcatttttcctattgtttggctttttgtttcaacattcgtcaaccccagcaagttcaaccaacgaattcacctttcagtgaagttcgtaaaatttattaaaaattacaaagtttttaattaattttctttcctttttcatggccatccattacgttgatccgacaaaaaatggctttcgtgttgtgctgcgggatgaatttttgcgctcacatatg

SEQ ID NO: 105049 - DNA, 124 bp, Heterodera glycines
ttttggttaactgctgtttttcaatttttttttcatataatataatttccaatttatcgtttgcttactcaatcgatgtgttttggataaagcaaaattcgttgccatatgaatttttaatatg

SEQ ID NO: 105050 - DNA, 953 bp, Heterodera glycines
atttcaaaaaagatgcaaaacatttttaatgggttggaaggctgaatgaattatcgggggaaactcgttttgttgcttgtttgctttctccgcgtccatattattatgttttgggacgactgtcttctgctccaatcgaaaatcgccgatgggcctaatggcccccaaaaaatttaaaacaattttcattggatggaacgccaaaacaaaaacaaaaaaattagtttaaactttcaatacattgccaattggccaacaaaaacaaattttgatggtttatgagagcaattttgggccgctggttaataataattcgaccggaaaatgattttacgaagattgaactctgttacagcattttttggaattttgtttaacagcatttttttatacaaatttgtggaattatgagggctaaaaaaggcgcaaaataattattcatttttttacgcaaatttggaaaataaaatttttaatcaaaaaaatgttgaaggagaatgcagactgaaattaatcagaattgttaaaatttattagcaaattaaaatattaattaaaattttatcatttaaatataaaaaaatgcatttaattaaatgataaaaaaaattctgaggtgattgtaaaaatagtgtttttgattaggattaggattaattacattattcgcacattcttttaaaaaaataaatttgaattgtgaaatataattttaaaaatatatatttttatctatctgggttgaaagtttgaaagtagaataaaataaatttgccaaaaatttattagtccaaattttcttttctccttttttaattatttaaaaaataaggttccaatttttgaaaataaaattaaaaattaaacaagattactttttatttaggcaacatcactagaagacttggaagctcttagacagttagctgagaagcaatttcaatttcaaaatg

SEQ ID NO: 105051 - DNA, 135 bp, Heterodera glycines
tgtgagtgatgcttcaaaatattagtttcattaaatacttttatagtttggtcttgttttcaattttaccaaaatttaatatattgtatggcattttagtgcataattttatgtttgccaattttcaggtcaatg

SEQ ID NO: 105052 - DNA, 947 bp, Heterodera glycines
acattaatcgctgataaataaatttttcgttgagttggaacaatggggaagaggaggggagggttggaataagttggtaaatgttttttcacagaattttgggaacacattaaaatataataaatgctcacgaataatattggtccacatagtgcatcgactaacattataccagcgtcaatccccctcccgtgccggcaacataagccacacaaaatagccaccaatccatccccatcccctgccggatgttggcaactaaagccatgcacccggcctatcaatccacagtggtggcaacttaagccaccaatccctcagcccctgcccggtgttggcagttaaagccatacacccggcctatctatctgcgggtgggaagcaacgtaagcctcccaatccctcctaagccgctgcctggtgttggcaggtaacgccatacacccggcctacccctcccgagggtgacgacaacttaagccacgaatcggatcctcaagctcatgggtttgggactttaaagggaagaaagcaaaaaaaaaggaaattgaaaaatattttgaaaagattcgttaaaagacaattaaatgccaaaataaatgacaagcaaaaaataatgtgcattttgcgcgacgtcggcccgcgggcgatgtgcaaaaaacgggtgtgactggttcctctacccacgacaatctctgcctttgtacattttgtcgtgggtatgtgacaaaaacttctgtgttcaaaaaacatgagcagtgtacaagcgcctgggggtgtttcggacaaaaacgagcgacggagagcaaaaaactgttgctcttttcatatgagaacgttgcgctaggtgccctgagagacgaataatgtttgtgatcggacaaaaaactcctatgagttgctcctatttaagtagctctctctacccttcccattatcaaaaaatg

SEQ ID NO: 105053 - DNA, 506 bp, Heterodera glycines
tgccatttccgtcatttgtgctattttgtgccaatacctacccccttttttcagcattataaaattattactgctatacataacctatttattaaaaaaataatatttttattttcgcaatattattgcttaatataataaatcgatgaataaaaataaaataataaatttatttttattttcttttattgttgcttttttatttttccatgtaataataaaataattttatacatttatatttttatgaaaattaaaatttttgattttttttatacaaaaatacattagaaaacgttgcttaatcataaaagtttttcctccatccacttttaaatttttgaaaaattccaaaataattagacttattaaaataattattatttacatttggaattggtgagaaaaataaataaattttttaaattaagaggatttaaatcatgaaaaaggtcgtgaccaaaattttgggtatttttaaaattgcattatgccttggcataatg

SEQ ID NO: 105054 - DNA, 90 bp, Heterodera glycines
tctgcaaaagtgccgaataatcaacatctaacttaattgctttgattaaatgtaaattaaactctaattagaacaaaatacagtaaaatg

SEQ ID NO: 105055 - DNA, 340 bp, Heterodera glycines
gcagcagcaattttgaattaatgaggacggaaggaagcacacaaatgatctaacggaatccctacactatcattctttcgattattaatttaccaaaaaaaaagttttcctttttaaatttatttttcaaccaaacgatctgtagtatcaacaacaaactcatttcctatgttttgttgtttttttattttgtttgttttctatttatttattttttggaagagaattggctttcaatactttttttatttttgttttatgcctattttaaatggatttacatttctgttcacttttttattatattttctatatttttaactttgtcttcctaaaaatg

SEQ ID NO: 105056 - DNA, 1003 bp, Heterodera glycines
ttttgtgactaattttagcttgttttaatcaattttagagcaaaagtgtaaacttaaaaaattttgaattttcgactttgttcggattcgggtccggggattttggtaattagtcaaaataaattgtcagattcgtggatcagcgccccagaaaaccccaaggaaaagcgttttacacaacttttttttaaattttttatttttttcgaaaaatgggggggataaactgcactattacccgaaaatcttgtgaaatttttaatttgaaattgcaaaaacaacctataaaatttatggggaataaaattttttaaattaatttgcacccctaattttcaagtttttttggtgcatattttgcggtttttgtgcatatttcacgattttattagcatatttatgcgcatattttggccattttcgtgcatatttttgacagccctgataattaggtatgtttgtcaagatttatcgctttctctttttgtatacaaatatctactactggactgtagtcaaaaaaacaaacaaaaatttcttatataagattctcgaatcgtgtgagaaaatcttttttaaacaaagtttactatcgaaaccaacactgtcgagatcactactatcgaaaactaacagcaccgtgctacacacatgaaaaaatttgaaccatgttcatgtcaaaaattcatttttttcaaattttggcgaattatttttcattaaatttttacgggctttttggcttgaaatacccaacagtaaaaccggcattgaaacttgaaaagaaacttaattacagcaccttaattggttttgatacatttaaatcaagcgtaactcaatgttagaaaaaataaataaaaattaaaaatataaatcaaacatttctataccaaatagtattttttcttctcatttctcacctgccccgccccctcccaagtttcacaaaaacgcattgtcggaacttgcacaaacttctcacttgtcagatgttcccatg

SEQ ID NO: 105057 - DNA, 945 bp, Heterodera glycines
ttatggttcgggttaaagaattcagaattggtcaaaattggtgtcagattcgtgatcactgatcactgatcagatacctctaaaaatcaccagtcttatttttaagtagcgccggcaactgtcacaaattttccgagttacgctcatcgctggggactcaaatacaatttaaataaattcttttttgacaaatgaaacctcaaaaaaaaatttctcccaccctcttcctccctcttccttctctctctctctttctttctctctctctctccctctctctcaatctcgctctctcatttcctttctctccctctcttaatctctctcttttcatactctctaaagactttcactctctccccctctctctcaatctcgctctctcattccctttctctccctctcttaatctctctctttgcatactctctaaatactttcactctctctctttctctctccctctctctctcatttcctttctctccttctcatctctctcataatcttttcacactctctaaatactttcactctctctctctttctttctcgctcaaatttctctgtctctctctattttttctttcactctctttttatctcttttccttacctctctctttcctccccctcctttctatcaagctctctatcgttcactttccctctctctcttaatttctgtcaaatccctctctctctctctcacttcattcttcctttccctttctcttaatctctctctcatttcctttttctccctctctcctttcttcgttctctcgctttttaaccttcactcgcatttattttttaaacaaacataatgacaaaacaatgccaattcaatcaatgaaaaatgcaaaaggtctcgcttagtatatagttaagggatttccgattttcatcttacaaaatttagttttctttatttgaacaatg

SEQ ID NO: 105058 - DNA, 291 bp, Heterodera glycines
  unsure (1)..(291): unsure at all n locations
cgtactaaaccgaccccganccggggatttcgcttcaaaaaaaaattatgacgaaattaatattttaaattgaaaaaaatcatattntgaaattttcattagtatctgcatgaaaaaagctcgcactagtcagggcttcccttttttggtgnatttgattatgtgacccataatgataaatttctnttatttctttgagccacttcaaaatcatcgtcttattataaataatcgtaattaaaatttcctaaaatagtatcgggattccttcnagcatatcttcaaaaaatg

SEQ ID NO: 105059 - DNA, 295 bp, Heterodera glycines
gagagggttcaaaggaccctacttacgggttatgtcgcccctataccccaaaaatgtcaggatccctatagttttacggattgatcaataataaaaaagtctagatcttttggaaatacaaaatagagaggatttcgcaaaattcagatttttctttttcacagcttcagaaaattacaccttctggggctgtaccgtggaaaacgattgtgacgcagtcagtaaattccttgcatttgaaaaatgcgaatgtttatttggtattaatggtttcaatctttcaaacttggaaatg

SEQ ID NO: 105060 - DNA, 261 bp, Heterodera glycines
ttcagattctctattaacatgtaaaatttcaaaaaatttcgtcagtttacaaaaaagttatggccaaaaaacctcaaaaattaactttttcttggctttttcggcgccgcgtggcataacttttttatttttgaatcattcatttctatttttacatgtaaatatagagcacacatagagctttcaaatgatgccagattggctaaagctaactgacaaataaaaaagttatagcatttcaaaatttgcggctccgaaatg

SEQ ID NO: 105061 - DNA, 87 bp, Heterodera glycines
gcttctcgagatgaatcgattgatatataatttgcgccattttttcaagggcttcactatgatatatccaaaattaagcaattgatg

SEQ ID NO: 105062 - DNA, 642 bp, Heterodera glycines
  unsure (1)..(642): unsure at all n locations
aattatantggactaaaaaaggctaaatactggacataacctatgagaggaaaaaagcccgaaatatggactaaaaagctcaacttggctaaatatggatcaaaatatggactaaaaactgccaaaatatatgctttaaaccataaaaaattacgaatttggtgtttatattcaatatttgcttaaataaacttaaaaaatacaataaacaaacaaaaatagacttaaaatttaaaaatggaaattttttttattatcgtaccatcacctccaagtttgccaattcaaaaaaattcgcattaaataaaaaggaaaagttcgcaaaaaaaatagtgaaaatattaattaaaaatgtcaaaaggtcgatgaaaaaccaaaatttttcatatttttgggggtctaattttaaaaatttccaaaaagtcaaactttaggggtgtatttttcgcttttttctcatttttcttgtgaaaatttgccaaaaatggccaaaatatggactaaaaacacaaaaatggcgaaatatggatttattcccgaaaacccctaaaatatggatttatatggactaaaaaccttcaccaaatcgtaaaattttaatgcagaaatgctatttttgagcccctttcttcatagcatatg

SEQ ID NO: 105063 - DNA, 94 bp, Heterodera glycines
ggcaaaaatattcgccgaattgggacaaaagttagaaaaagcccgaaaaacgaatgctcaatgggcgggacgagtggcagcagtgagcggaatg

SEQ ID NO: 105064 - DNA, 840 bp, Heterodera glycines
ttttctgaaatttttttcatttcgggggcgggggggggggggggaatttccccgctggttacgtgggcctactgtacaaaaaacagcagaaataatttagtaataagttatgggcacaaaaacggtttttagaagagggcgaaatgaagtgcaaccgattctcgtgaatacgacccaattttttcaaatccccaaccatttatgggggctgtcacgggcttttttacctggcaattgcgcgttcctcctccatttaagcaactttatttcaaattcaaaatgtgaacaagtttttcaatcacttttttattaaacaagcaaaaaacacaaaaaataagatcaaaattaaggcaaaaatgaaattacacaatgattaaattaattgttagtgaaattggtaagggcgtcattatattcagaccgcatatttgcatcaaaaattacagggttaaatccctttcgggccaatacaaaattcgataaaagtcgagcacagcgcccgttgccgtcgaaaaaggggtgaatgtatgtctaaatattgattgggtgagtaaaggatcaataaaaacaatatttcctatgtattatgcattgtttgaacagataattttgtttgtgtatgaatttcactaaattagcttttcagaacaagaattttgtcttttaattacatattttgcttttaaaattactgctaattctataagtaaactgcattactaggcggtaatggacttccgcggttagtgaatggatggtagtagtatgttgttgtaaattaaaccactcgacgaattccgacatcttcgccgtcacttcttcccaaggcacggcgacatg

SEQ ID NO: 105065 - DNA, 262 bp, Heterodera glycines
taagcctaaactttttggcctgtttaaaaaggaattaaaaatttttaaaaattttattcatctcccttttgatagaaaaagcatcagagagccttatttaacttttaattaacatttggtgcgtttcagagcactttctgaaaaaatacttatgaattaattttgcaaaaaataaataattaatgaaaaagtcagaatttcgaaaaattttaaaaacaacaagcgttggcattttttcaggttaagttagtcctttacaatg

SEQ ID NO: 105066 - DNA, 1003 bp, Heterodera glycines
aaatgattaattcatttggttataaggccattaatgctaacacttataataataatttaaatttgccgtaattatttgtcacttatttaataatgccaattctttttcactttataaaaagtttcccaagaaattaacttatttgagtcacattatttttcattcgttttttctgaattttcatttagccattgtctttttcgtattggcatttttcacttttaatttattttttttcacctatcttatcggtgccaaatgctttcgttgcctttttacttggaatgaaataaataaatgcctttgcgcttttataaatattaaatgccaaataagcatttttatttgaaatatatataatattgatgatcatgcattactagagcttggatttttatgtgctaaattcctgaaatataataaaattttgctaaaaatgctgaaatatgtgctaaaaaccaaaaaaaatgccaaattatgtgcgaaaatatgattgaataaaatcgtctgccaatttttcggatgaaaatgttctgggtgtacagacattttattattaaaaaacttggctttacgtggctgcttatttctttaaaatgtcatttgtcttctgtttgtgtcccctccccggcggaaaatcaaaaacatttttattattcaaaatggcattaaataaatgccaaaacattcattcaaacgcattgaaactccaaagtactcagaatttgccacatttgttctgtttgtgttgtatgaacatcgacatttcaaattcatttctttaatttaatgtcgacaatttttcttcccttttctcagcccgaggggacgatgaataataataattagtgacaaattaattggggcagcacaatttgttggcaaaatcaccagccaaatgtgcgtataaaagtggtgatcaaatggctgtcaaatcaccaaaaacattcattttatttattattttattgcgccttttcctaaaattcaatttccaaaaatg

SEQ ID NO: 105067 - DNA, 499 bp, Heterodera glycines
tcttccgccgattgaattggctcgacgccaaatgcctggtccattcgtccaacggccttttccccactcggcacgtgtcccctcaactgatcgttctgcacagcgtgggccaatgtcggctggccatctgcgcactgatctgtccccacgggcgccccgtggacgaagtcgtcttccgtttcgcgggcagcaaaccgattacggtattggcaattatcgtaatcatagaaaaaataattaggcaatataattgattaaatacaattccaataattcaaatgcaaattttacaaaagacccaacacggtccgacccccacgccccacggtggtctatcccctctctccaccttttgacgaacgagggggggggggaggagaaggaggagggggtcgactgtttgtcaattaattacccctaatttcacccactaattgtaagtatgttgttgatcatttagttccccgtctctgtgcctgacccattgccaaatacaatg

SEQ ID NO: 105068 - DNA, 298 bp, Heterodera glycines
tttgataagccaataaaaatgaagaatataaaataagatataaaattgcaaaaaagtttgataaaagcttttctcaaaaacagtgagatttttaaaggaggaaagtttcagcttttttaaatatttttttaacttggcaaaacgtctttttattttttttaacttctgacattttgatttgtcaaaaattcaaaaacgtatttacctagtttttttttgatttacttttcccttacttttcaaaggcttttacctgataaaataacataattttttttaaacttttagagtgaggatg

SEQ ID NO: 105069 - DNA, 120 bp, Heterodera glycines
aaaaataataattaggttaatgagggataattcaattatttgctcatttttagtgcggaaatattctggttttttatttccaatcgctgttccattacattccgcacatttggcgttatg

SEQ ID NO: 105070 - DNA, 159 bp, Heterodera glycines
aaatttttaaattttatggtaaatatgttcatagggcccagattcaaaattaaacaaattatatatcaatcgatagctctcggtctgtaatggaagaatccgaaagaattttttggcggcaaccaatccctgaagagttacagacccgggactgaaatg

SEQ ID NO: 105071 - DNA, 807 bp, Heterodera glycines
ataggccatgtgatgaccaatggacagaagatacatttgataggattaaatccaagcctaagcttttcttcattttgtatgcgtatctttagtctttgtttgtacatacacacacttgttaataggaataataataataaaaaaatgtttaggtttttgctgaatcccttgtttcaccgcctaattcaaattatccaaaaacctccgctattttgcttccgttaaatttggggtggaggtacggtctctccccgacatttatgaccctacgggctaaactacttgccctcagttatggcttttgatccgaaaagaatgacttcgatggagtccattttgtattgttttgtttgttgtttttgttaactttgtgctcttggatattaaattaaacgtggtttcaaaaattgctcatgagtcatggacctactgattgattcaatattctggggtgatgcttcagcagcgacagatccgatcgaaaagacaaaaattcagagttagcccctgagtacggtatgccaagttcggtacctcgatgccattggtataaaaggatacagcgaaatatgtaggcaataagaccgatatgtttatcattaagcctgaaagtcgcttttgtcactaaagtgcaattaaaccgcgttcttttttactcttcccgaggcattcatcctcctttatattttaatgtgattttttaataaataaatcaccactataaaaggtgttcattcgcaatcgcttttcccatttgcttagtttttggtttttctattcatctgcaacatattgtattatattatg

SEQ ID NO: 105072 - DNA, 155 bp, Heterodera glycines
tcgattgctgttgatttgcactaatgagggggcggttgtcagaagaaacatttttcgcttttttaacggggggtgccatcaaagaaaaaacaataaatttgcttaatgaaaattttctataaaaaaactaacaaatttccagcgcggagggcatg

SEQ ID NO: 105073 - DNA, 1003 bp, Heterodera glycines
attttttgccagaatggatacgataccgataagactgatcaacggcacaatgactcacgattaaatcaagcgagcgaaatgaaagcaattttcaaaaatatgcttttttaatatttttaaaatttatatttatgtcaaacaacgcaataaatcttttatcaaccagtacagttaaatcaacaaaaaaagtgtgggaggacttgttcagcagagacaaaattagaaacatttaataaacaatctgtttgaatgccaagtgatcagaaaataagctgtgatcagcagtcagattttgctaagggcgatcaaacccgcaaccaaaatatattggtactgatcaaatattatttaaaaaacttgggactgatcagaaattgattggaataatttattgtcctgaccagtttttgggagtgatcagatttgcatgatcagttctttgtcaagtcaatgcaaatgtattttcgtgtaacgattgacaaatatcgtatcggattatgcaagtactatatttaagatggtcaaactttttaaaaaatgtttaaaaatgcaaaagttaccaaaagtaatgaaaaaggggcggattaaaggtgccatactgtggcgtaaattcacaaatttttactcgacggagaatgttacggtgcagctacacaaaaagcctacctattttgtctgtttttgttatatttcattgttttgagatgtacacaatgcgcctctcaagtcttagaaacctacacaagtgtgaaattttgtcgaaaaacgacaaagaaagtgtttggaaaaaatattttgccaagaaaatgacaagaaacaagaacaaaaaacgaataaaaggctaagaaatattgtgccataagaaaatgccaggagaaggatgcgaggccgcaaagagtccgagcccataatttccaaaaaaataaaggaaaaaacaaagaaatgcccccacctccacaaactctaagcccaactgaccatttgctgtccctgttccgaaatg

SEQ ID NO: 105074 - DNA, 755 bp, Heterodera glycines
ctcattaaaatgtgtcttacaattaagaatttgttttagggtgccatgctcatcgaactgtgccaccgcaaacaatggcacaagtgttcgcattggctgccgaactgttgtgccgagtgaccgacacaatgcaaccaatttgcctggacaacccccccccccgaaaattaaaaaattttaatttttaaatttcttttttttccggtcgccaaaatttcgttcattgcccgcgacacttcgacggatgcgcgcgcctttggcttcgttttcggcacggcggacggcaaacacaaattttacggggtgaaaacggcacggacggcggaccacgcggtgctctccattcgggtgggcatttgatttggtttaacaagacaaacaaattttcttgccaaggcccaaaaaatcataaaaaattttctgaaccaattattcttttttttaaatgacaaaaattggtgattttttggcgaaaaacggctacaaactcatgctttttgttcccgacgacgcaaattttaaaataacattaaagaaaattttttttgtaatttttgccccgaagagccaaaaaaaaagtctttggattttccccttggaagtttttttttctggctacgggtctgctgtctcccccaatgttaaaaagaaacataaaaaaaaattttttttctaataaattatttgagagaccggacaactgagtcccatccaaatgtgtcccccattttgcatgtttaacttttcaggacatg

SEQ ID NO: 105075 - DNA, 164 bp, Heterodera glycines
tgcttaaatttgagtcggggtcactttggcgcagtcaactttaaagtgctctaacttttttgttccgcaaccaaataaaataatcgtgatatctaacgatagggctaagtagtctctattagcctgacaaatttcaaaaaattattttaggctgaaaaaatatg

SEQ ID NO: 105076 - DNA, 70 bp, Heterodera glycines
cccccccccctccccacagttttccgaggatgagcgcaacaaatacgttggacagttcagtgtcgtcatg

SEQ ID NO: 105077 - DNA, 1003 bp, Heterodera glycines
atcagaacatttctgacaaatcagaacatttttattttatcagatttggaccctccaaatcagaacattttattttatcagatttggaccctccaaatcagaacattttattttatcagatttggaccctccaaatcagaacatttctgataaatcagaacagatcacacccctgttttatatggactaaaaaccttcaccaaatcaaaaaatgttaatgcagaaatgctatttttaagcccttttcttcatagtgaaaaggacacacgaacagtggccaaaatcattggacggacattaaatgcattcttgtgaaaattgtgatattgatatccacaaaaataaactgtaaaactatggaaatactgtatagatatgggactgggtcgttttggcgcccacgttttggcgccagcgcgagtttttttattataacttttttcattgttggccaaatctctaacaatcttggtatcaatcgaaagcccttcacaagctctattagccttacaaaaaacaaaaaaaaatttagcttgtaaaaaagttattaagaaaaaacttccaaacttttgggtttttttgtaattttatgttataacttttttggtaatgtctaatcgcgaaacaatagcttagaaatagcttctaaacacgttaagctttcgaatgataccaagaatgttaaatttggttaacaataaaaaaagttataatcaaaaaactcgcgctggcgccaagaatgtcggcgccaaaacgaccccgcacccttaccaacgcatcccaaaacgccaagcacatctcataaccgctaaaacgaacttttgcgggattttcgaaatttgaaaaattttgtccaaacaagcacaaaaagtatacttatgtatatacaacacgtacctctctaacaacagaactccaataaattttttatatttttcttgtaaaaattttgtataaattacatacagtcagggaccaaagtatttgagcaaactatgcaatg

SEQ ID NO: 105078 - DNA, 964 bp, Heterodera glycines
ttttcaagcaatcatggatccaaattgattgaattaaatgcttgattatagattatatttattagggatttactttaaataaattaattataaaataattttatttgattaatttgcttaataacatttaaataaattaattataaaatttttgcggttttcgcgcaacgcccttttttgcggttttcgcaaaatactcatttttgcggttttcgcgcaacgacgcggcaccgttggatttgatttgttgatttctttgccacccaactccaaaagtgaccaattgattgttttgatataatttcattttttctttatttttccgcgtcaagcttttgcgtataaatgatttaaatgattgattgattgaaatattttattcatttgtaatgtttgttcacttcatgattaatgcatgcccaacaaatgttatttaatattaaatagaaaaagtaattttatgaaacaataaatgtaaaaagggaatgaatgactcatcagcctaaatcagacaacattttaatgctttatcaccaaaaagcaaagccaccaccgaataaatgaaatgactcaaaaatgggccaaccgccgctcaaaggtttttagtgcttgaaactgtgaattctgtcggttggcaaagaatgttttgcccaatcttcaacaacattttagtaagacatatgaaatgtttttcgttccttttacaatttttattaattgaaatgccataattccaaagaatttttattctaaaagccatgaaaaaatggtaattcatggccataccgggaaggggaggaaatattgtaacacgggaatactttaattcaaacaaaaatttaaaatatatttttatttttccgaattataaagaatttcattgggtaatcacccaaatattccattgattcttaactaaaataattcttatcaatgatttcggcataaaaaattgttcaaaatg

SEQ ID NO: 105079 - DNA, 748 bp, Heterodera glycines
ggtgacctattgatctgcagtcaattgctctgccactgagctacgactccgttgaattagagattctcattttcctccttctttctttaaaaagctcctctaaagaaaaactggattttatggttaaagtggacgaagaaagcagaaaagggaacgatttccttctaatatgcaacttatttgttagctgagaaaaataatgaattatttattatattaaaaagacataaaataaataaaattaacgataaaaaaagaaaaatcaaatgggtggaataaaacaataaaatattttttatttatattttatttaattaatattaatatttatgtagttatttccgaatatgtaaataaataaatttatttattttttcttttatgcaaattaccagcataatttttgcgttttctttgcaatatctacagaaatcttttatgaaaataaaattttctcccattttttttatcaaaaaatattgtataatttaattatttttttgccatataattttaattatcctttccctcctcccccaaggcacgccaatcggctttcatcgaagtgcttagtcatgtgccgtcccagccctcgtccgatcaaacggtgccggatcgtccccgggctgttttggcaccgggcaaagatcgccccaactttcacattgaattgcgctcccaagagctgtttgtggggcagccgcttcgtctggagacaaaactgacgccgatcagcgacccgtcaatg

SEQ ID NO: 105080 - DNA, 471 bp, Heterodera glycines
  unsure (1)..(471): unsure at all n locations
tcaccaattcaattttttgnagttttaaggaccaattaggacaataaaagaaaactcatcccntaacattaaaaattttgtgggataattntaatagaaaaagcttatttgttagcaacataatatgacggcaattaagctcccaacattaaatcattggaatgaattttctaataaaacgcactttattttgtaaaaaaatattcaaaaatttaaattttcacagtttttcaccttcacagattattatttaaaattttctttaatatatatattttttgaaaatacaatatacataatttattttttataaaaaatgtcaattttcgttcctttaaaaatgttttccacttcttcggcgtaaacaacaggattcgacgggggaattgaaagattaatgttctagcaaagcccaaaatcgattcatctaactaaatcctcgctttcaaaaaactcatttcctttatgatg

SEQ ID NO: 105081 - DNA, 258 bp, Heterodera glycines
tcctttcatccctttatataccccttctataaatagtcatcaaaaataaaattaaattgaaaaatgaactgcccgcataaaattaagtgttgtcattactgtccctgtcattacgagatttgtaagagatgtaaaaaacacagtcttttgcatttcggtacatcattttttgataatttctggctatgccccaaatgcgcgaaatatgttccctatgaaaatataaataggtcaaataaataagaggaattaaaaatg

SEQ ID NO: 105082 - DNA, 1003 bp, Heterodera glycines
tgttagccggagttgaacatttaggagttgaagttggacactattattttttctattaaacagagcgttaaaaaattgccagacttttgaaacaaagattccgagccgagaattttttttttggcatttttgctgtttagggcaccagaaaaatctataatgaggacctttttgaagagatttggaattgcaaaagagctgtcaggttcgttttagcgctccgaaatccccgtgaaaattttctcgactaatgacaaaaaaattttttaacaaaacacaaggacccactttttggatttttttgggggcattaaacagcaaaagtgctgaaattttagcaaaaatgcaacaatcttatataaattgtctagctacttatttttgtgggcacttcttccatttgtaatttgactttttccctttccactcacttaagtctcttccgccctccacttttgcaatttgctgcaaatggcagcctcctccgtcaaattcgagctgtttgaccaacagttttgccgtacttttgttgttgcataattttaagtggttcagtttttgttcaggattaaaacattgccaatagtctaagcaataacaaatttacactccttgaacttatttgttagctttatttcaaatgccgataatttttttgtttgaaatgtttaatcctaaacccgtagcgaaatccccaaatatggttttttgtgcgggatcccgcaggagccgcccattgtatttttttattcaaagaacattaagccaagtacctattttttgaatacctatgtatttgccataaataaaatttagtcattaatcggcaacccagcagttcttccctcactagcgtgggaagagtatataagtaagaaattgttagggtttcttccatttgccttattctccaatatcagaatttgcctccctatttggctcttccattgccttattctccaatatcagcacttgcctccctctgccgatattcgtccaaatg

SEQ ID NO: 105083 - DNA, 99 bp, Heterodera glycines
ggtctttataagttaacgagcagagaataaatacctttttcagatagagaggaaggagtgaaagcacttgcggacatggatacatcccgacaaaaaatg

SEQ ID NO: 105084 - DNA, 199 bp, Heterodera glycines
gtgattgaatgtccaattcttatgccaaactattcgtttttaaaaattagaatcaataaatttctgatcagactccgattaaaattttggaatttaatttcatcgatatatacaaaaattctcatttattcagaaaatctaattataataaatcttgatcagaaccgaaattcattgttacttacttgaattaaggatg

SEQ ID NO: 105085 - DNA, 98 bp, Heterodera glycines
tttctcgcaattaccagagaatgtactaattaatatttgttaaattgggaaaaccgtctgttgctctaaccaatttctcacgcacttttcaggaaatg

SEQ ID NO: 105086 - DNA, 1003 bp, Heterodera glycines
ctgtagaccattttgtcctttttctgatgaacctaacggttttttccagaaaattttcccaccccctaggattttttttgaaaatttccccgatttccaatgtattttggggtgtctagatcaccatgaaggagtgatcggatcaacttgttgttaaatacttttttgatcagcatcaaaacttatgttagcatgaattatttcagatttttctgtgctctcaaatttgagattcaaaaactggtgttaaacatatgcaccactgaaaatggggtatggtacacaaagtcaactgtaattcgggtttgaaccgatattttgcttaatgattggtatcatttgaaagccattaaaaattatacaaaaaatgtcaaaacatttggtcatcaccaatatttaactttttatgaagccaaatttctcgaaaaggctagtggtgttagacttatgctcctaactgtatgcactgtgaaagtgatacaataaatttttaatttttaactttgttcacaaaatttattcacactcatacataatataatatgcaatgaagttttgtatggaaatgtcaccgtttttgactgcctcaacttgacctcaaatttgcactgatttttccacgtttcgatacgcgctggtgtacaaacatttctatgacataacttaattgacaatttggagagcaatttgcaattcgcaaaggcaatggaatgccgaaatcatttttcgagggcaaatcttatggattcatacttggaaaaaaaaattttccttgtgcacaggttttcttaaaatttttgcataggctagactatttttgaatcttttctactaaattttattttttagaaatttgttttctaacattgtctcctgcatttttacaagggcatttttttaattagaggtcgtttttggctggcatttcactctagtaattgttttctttgtcatcatcgcgtgttttttgtttatttttaaagttctgtgctttatcaaaatg

SEQ ID NO: 105087 - DNA, 176 bp, Heterodera glycines
  unsure (1)..(176): unsure at all n locations
aaaatatatgaaaattaattaatttgctaaatgagtnttctaaatatttttcttaaagcagccactgtgcnnaaaaatgacaccnncaattcttcttcttcctctacagttgattttcaaatgagccctaagaaccacggcacacacaacagttcgtcatcgaaagccaaataatg

SEQ ID NO: 105088 - DNA, 146 bp, Heterodera glycines
ttatcctagtcaaataattttttgttttttttaatgatatgtgacgatgcagcagttacggtataacactttatattcaaagtattttgcttaaatttttatatttttttatgtttgtaaaataatttacattcaaatatgaaatg

SEQ ID NO: 105089 - DNA, 402 bp, Heterodera glycines
  unsure (1)..(402): unsure at all n locations
agcgaaggttttctcgtgggcggatggatgggccacaaaaaacaaaaatcannncagggtacactcattaattaaacaatttggagtatttggcaggtgccgccaacaacgaaattttccaccgtcttccgccgattccgtcgtccctccgccgtccgcgccgcctccgccgtacagtgcgtacgctgtcactgctgcgacggacgcgcgccgaatgcgccaaaacgtgtcgccacattcaaattgtccttccgtcgtctcggccctctcctcgtcaatgattccgcaacatttcgttaggtgggttaaagctcgaattagttgcagaatcccgaattctttttttgtccctaaattgattattaaaatcgcattttcagaccccctggcggtggtcccatg

SEQ ID NO: 105090 - DNA, 74 bp, Heterodera glycines
ttctacgtcaaacaaacggcatcatagcacgggctgatggtggcggcattgtcaacaattgggcgcacgaaatg

SEQ ID NO: 105091 - DNA, 131 bp, Heterodera glycines
tttcctttgctgaataaattttcaaaaattaatttaatgaaaataaaattttcaagtggtacataaattcaaagcgagaatttaataatgatggttcgagccgggatttcctccctgctggcaaatgaatg

SEQ ID NO: 105092 - DNA, 298 bp, Heterodera glycines
tcctcactctaaaagtttaaaaaaaattatgttattttatcaggtaaaagcctttgaaaagtaagggaaaagtaaatcaaaaaaaaactaggtaaatacgtttttgaatttttgacaaatcaaaatgtcagaagttaaaaaaaataaaaagacgttttgccaagttaaaaaaatatttaaaaaagctgaaactttcctcctttaaaaatctcactgtttttgagaaaagcttttatcaaacttttttgcaattttatatcttattttatattcttcatttttattggcttatcaaatg

SEQ ID NO: 105093 - DNA, 754 bp, Heterodera glycines
ttgcatggtttttttataacgtaaattatcattaataaaatattcaaatattttttgatcaagaaattataaaatatgttgaataaatatccttttcgaatcaatgcaaaaaaagagattaattagggtgtaatatgccttaaaaatttaatcaattaggttccaattgagttttccaattctatgcatttgtttctgctaataaaaaaagcaaaataaaaaaagcagaaggaaatcttttcacgattaaatttttaataaaatttatttcacaacaaataatattttgtttttgatctagattattgaaattttgactcgaaaaacagtaaacagtaaatttgagctaaaaatcgattgttagtagagatcggaccggtcggttttttctgtatttttcggtttcggtttttaaccgaaaaaaaccgaccgagaaatttttgagtttttcggtttcggtttttttcggtttcggtttttttcggtttcggttttttttcggtttttataccgaagccgaccgactgaaataatcaaaaaaccgaaaaaaccgaccgacttttttcaaaaaccgaaaaaaaccgactggcgattgaagcgacataacccgttaataacaatttttggcataatatactgtttgaaattcgatggtttttgattaagttttcggacttttgaaaagtttatcactaattttcatttctttttaatttagtgatataaaacaaacattacagcaatagtcaacatg

SEQ ID NO: 105094 - DNA, 97 bp, Heterodera glycines
tttggacaaacaatgcgagcgtgtccaagagtggcgcaaacgccaaaatgccaaaaagaaaggcaacaaccgcgttggccaccttcgtattggaatg

SEQ ID NO: 105095 - DNA, 164 bp, Heterodera glycines
tttaccatttacattcgttgattagcctaaggcatttttggcaattatttttattgctgattgctgtacatttatgtaataaattcaatttaatactagcttttcaagaagagtctagcttgaaattggaaagattttgacaactttataaacgtttcaaaatg

SEQ ID NO: 105096 - DNA, 776 bp, Heterodera glycines
tttttttaaatttttttaggtcgattcttaggggtgtattttttggttttattgcatttttgttaaggaattttccaaaaaatgtcgaaatagtgaaaaaatagtgacgatacgccaaaatagtgatttctagtgactgataatgacatcagaattgaaaaattttaatgcagaaatgcgttttttgagctcctttcttcaaatcaattgagcaaaaaaaagaaagttttttcactaaaagttgcggccctatttattacgtccaattgttcattatcgtgtaaaataatgtctataaatttcaattatgcacttaaaatcctaaataaatgtttgtttccatttcaaacaccggttttatgggcgaaaaaatatcaaaataatggaatacatttcttatttgtttttttgaaaataaattaaattgaggcaaacattttattcactggtgtcaatttatttcttttttttttgagacacatcaatagagctgagatttttatgaaaaaaaacacttgattttcccatttttaacacatatttagtatatatttcagtattttttggcacatattttattacatatttcagggtttttagcacataaaagtcccagccagcagctctactgatcaacaaaattttttcatcattatttgataagtaaattttattccatagaatattttaatagagcagaattgctatggttatgtgattgatcgtcattataaaataaatttttatgaatttggttacaaaatatttttagaatg

SEQ ID NO: 105097 - DNA, 228 bp, Heterodera glycines
tttttgagggcgtcgacacacatccctggtattaatgggaaacaaaaaatctccttagtttctggcgcctattggcaaaatcccaacacctagttcgcgggatttaaattaaaattatcgattattaattagatttccgagaaatttttgaattcctttctaattaaaaaaaatttccattttaaggattttattttttcaatttcttaaacaattcatagaaaaatg

SEQ ID NO: 105098 - DNA, 113 bp, Heterodera glycines
ggtttttgttggcatttgtgccgacttttccatccaaatgtcccttaagcattgaatattggttccgatgcgtcgatttggacggagacggccaaatttcgctctatgaaatg

SEQ ID NO: 105099 - DNA, 837 bp, Heterodera glycines
taaagcattaaaaatagagaaaaatctggaaaatattacgagatttattatattttattatgttcaaaagaaaaaaagataattcaaaatttaaggaaaaaatcggattttcagaaaaaaatttataactcggttctgaaaagtcattatttaaaagtaaaatactacaaaaatccccaatttttagctctattttataaattttatttcacatttttatcacttttttgaaaaatgttataaaaataaaagtgattttgggattcgggaccaaaggggggtgcacatgatttttgagtgaaaaaattttttcgacaaaaatcttccaaaaacatgtctttaggggttatttgggccgctgatcacgaatatgaaatcagatttcagttatgacatcgttaagacctcagaatccctgtgtgattggggattctgagacatcattttgaggggggggggcaggttcggatccggacggtgtaacattaattttctatgcattttttgattacttttacattttttaattaatttgttttgtattattaaaaataaataaaaatttttaatttaaattaaattattttggtgaacaaatgttttaatttaaattatttaatttaatattgttttattaattattttaaattattttctgatgaataaatgttttatttaatttgaattttcgagaattaattcctttcaatttcaataaatattctatattataaatttctaactttatttttaataagtaaaaggatttttttaatttgataaatttataatacatccaataatacaattttcttatttatttcattttaaaccatg

SEQ ID NO: 105100 - DNA, 511 bp, Heterodera glycines
tattttatggtatttatgttttcataatttttaattttgtatatttactagcatttaaaaattaatgtgaaatttgtccggtaaattgcaaaagtacatcaacccaatttttgatgttttccggatggaaagatatcgatttgggtgaaaaaatactagaaacaatgataatggcggacggttatcgcatttctgagtctaaatgcttacagtgtatgtaataattgtgcgaataagcgaacaatctacctaatccttcacacattctctgccataaaaccaaatatttcattggcatatccaaattttggtgcatattttatgaaagtggtcctaccatcggcaattaccatttcttttttttcgcagaaaccaaaacactgcactattgctaaaataaatccccgataggtgcctaattgtaattgtgtctcatttctttcctcttgaatttgtggaaattggaatttgttttgaaatgattgacgaggaaaagccattttagaaaatg

SEQ ID NO: 105101 - DNA, 1003 bp, Heterodera glycines
ccccccccccccccttgagtttaacccattttaccccctttttgagttttggcaatattttaagaggaattcgataaaattttgaaatatttaatatttggcatttgttttcgtatttttaactaaattttcttacaaaatcgactaaaaacacaaaaaattttcccggcggcgcctgtcggcgtcgtcgtacataaaaattcctttaaaaattttaattgttaccttaaaatctagaaaaatgcccattttttgttaaagttttgtgaacaaataccactttaaattctatttttcccctatggcgccaagcccatcccctattttttaaaaactgtacgcaaaatttcaaccaggaagttactttttggacaaaatttttttggtcaaatctggccaaaaaaaagttatttggacaattttttagctatttataggcttttttactcaaatgccatctttttgtgtgctgacgccccacttttttttacccttatggtgggttgtcgcccctttttgatgttatgctatatataccctgtattcaacataaattaatatgtattcttctctagaatctattgtttttcttctctagaatacatttttttaacatttccgtgttttcattaattctttataagctttatttttgatactgtgtgctgaggtgcgtgacgtcaataggctcctggcttttatttaaataataactaaaaacgaaaacaaagatattaataaattgaatttttgtaatagatttgtatacaataccgcgctggaataaaaaatacgatcaaactcctaccaatctcaataacgtagtaaaaaataacgtttttttaattcatgtaatttttaaaaataatcatataaataacagtttatttgagcataaaataaagttttaataataattgttgtgaaatcttttaataacattgtctttttaatctacaaagacaccaatgttaaaaaatttaagatttccaaccgtaaaatg

SEQ ID NO: 105102 - DNA, 82 bp, Heterodera glycines
aaaataaaataaatttttttaaattttattttatagaaatgtcttttgggccattttactcgaaaaggcatatgccaaaatg

SEQ ID NO: 105103 - DNA, 500 bp, Heterodera glycines
  unsure (1)..(500): unsure at all n locations
tttctcnatggatttgtccaagcgaggcttgcttcccctttttgagggccccggttgcaggtcaagcagtgtttgagtgttgttgtctccaattgtgatgacgtcatcatcattttgaggggaaaaattttcccgtttcgactcatccatttctttaaatttaaaattattataaaaaactcaaaaaatgattaattttgttctcaaacaacaattgatcattgatttttctcggggccattacgattaagaaatagtttatgattataattgttaaaagcataaaatgaacctgcgaaaaaacacgtaattattgattgatagtgagaggggtgttagcgcgcagcgacctccagacgggctgtcccttttaatcgataggccacgcccatccacaaacacatagacgagagagtagtggttagagaaagatacaaaagggcgccaatttaaacacacagtgaaacccaagccaatttattgattttttacagattatg

SEQ ID NO: 105104 - DNA, 1003 bp, Heterodera glycines
tatttgaaatttactaatataaacaattattttttatgatgaaagaaataaaaatttagaaacctgcattaaaatatgccttaaaaactaccaaaaatgccttttagtactaaaaaaatgccaaaaatttttacaaaattcagatgtgattgaaaaacatcacaaccatctaatagatttagacaattggataaattttgatttcaaaatttacagctaaaagaatattacatttcttataaacaaattttttccaagtattcttacaaaaggctcaaaaatttcagtttttaagggtgtatttttaaaattacaaaaaatcgatccttagggggtgaacattcaccaagcaaaaaaatttgaggcacaaaataattatgaatcattttgaattcttacaattagcagtaaaaatattgtttgtctgggatttaagttaattcgaaaaatataatttttttgtcactgatattttctttaacaaatactcgaagaaaatcgcaattagtttctgaatgatgtattaaagaaaaataccatattattaattcaaaatttcaagtctgggtgagaaagagagggaattggtcaagaaggagaaatttttttttatatttttaaaaacagctatttaaaaagcaaaaaaatttaaaaagattgaaaatttattttaaacccagaattttgggcttagaaaattccaagaatcccccctgaaataaaattttaaaaaattttcctcgaattcgttccccaaaacggaaaaaattaacaataatttttaaactattttttatacctaaaaaattaaataaaaaatttcaaaaccacacttaacattattaatttagcgaaaacagtcaagtaatctgaggactttcgttttgtttatcttacaaataaatacctgttaattaaatttttgtttccttcaagcgaaaaaaaagaggcggaattgcgggagtgcgccgaaaaggttgtcaaggcgaagaaggccaggatg

SEQ ID NO: 105105 - DNA, 561 bp, Heterodera glycines
tttttattgattaataataaatttaaataaaattaaaaaataaataaataataaaataaataaacaatcccaaaactaaaacctattggtttaaaccaaaacctattggatgggtgcgggagtgaacctaaacctattggatgggtgcgggggtgaacctaaacctattgaagggtttttattgattaaaaataatttaaattaaaaataaaataaataattcgcaaaaccaaagcctaatggagaagggaaagggcgtcagctgtcgggagggaagcgacgccgggtcatttgagcactcgcgcgtaccacatgagcgcccgcaggggccatttgagcgcacggttgtgataatttgagcgctaatgactgaccgctactaggttaaagggaccgggaggggggagggggtagtaactactaattttattgtctttttcaactgcataaaataaagaattttttcttaaaatcaatttttttttaccatcactattttgtttaaattctaaatttataatattcattaaattaaattaatttttatattctagaaaaatg

SEQ ID NO: 105106 - DNA, 258 bp, Heterodera glycines
ttttttacagtttttaattgtgtaaaatcatttattttaaacctcatttttggactattcgaatttgatttagtctaggcttaacaaatgcgaggaatgagtcgatggaaagggacccatcgacaaaatacaaagaacagcacaatctccgtgttttatccaactttatattaatataatgtttaacttccctcaacagaatggcacattcgccatgtcttttcccattgtggcacaataacttccgtaacagaaatg

SEQ ID NO: 105107 - DNA, 1003 bp, Heterodera glycines
ggcgaattttaaatttatttctaacagatattcaccaaaaaaattaagactttttcgataaatttacgttttttaactatattaaattatcgtgatttactcaaaattggaactcagattttttaaattttttttcttgcggcacatttttcaaaaaaaaaaacttgatgaatgtgcgaggggagagttccggcggtgccgataggcgccgccggggaaaattttaagaatttatatgaattttgttagaacttagccaaatttttcagaaattttcttcttttaaatgaaaataaggcattacccccaaatcagaacatttcttagaaacaagaacataaagaaaccctgtatttatccaccaatccacaaataaaataaaaaacaagtaaaatttattttatttcataaaaatttctcgatagttaaaaaaaattcaaaattgtctaaattttttgccttatttcgcacgaatatgccattcttaggggtgtattttcacccccgtgcccccgcgggggtgaaggtcgcgggggcgggggttgcgggggtcagagtcacgggggcgggggcgggggtgagcccaaaaaacctgtcccgcccccgggggcgggggcgggggcggggctcgaaccctattgaaaacgttgggagtcaaaactgggaattccgttacgtctatgtttgaacagcaagcagaactacgagggtttaacgacgatccgcttgccaaaccaaatattcacgccctacaaattcgagattctcgttcggtcaaatccggcttctcgtttgcggtccccgaatttttttcctctctatttagttcaaaatccgttgctctatatgtgaaaatttcaatcatatttaggacatattatgtgatcactgatccgatacggaaaatgtgcactgctgaattggactaatcagcttttaaaaacttttgctgtgtattttttgatcagtgattgctttgcgttcagctgatattattcatatg

SEQ ID NO: 105108 - DNA, 1003 bp, Heterodera glycines
aaattgctttgatattatgttaatgagttatttcttgaagaaaagtattaaaatgacacctgaaaagtatgacggatttgttaaactaaggaaattattcttagaatgagtaacattatatgcactttatcttatcgactattatagcaccttcacctatcttctcgctttacatatttagtgaatattatgagcaatcaaataatatatttctaagattttcaaaaattatataaatcagtttggccgtgttaaataagaaagaaaatcattgaaaattaagaagcaaatagtttttcttggtcaaaaaaaaacgagcaacaaatgtcatcccgaacaaagcaaaatgaatgaatgatcagagaaaaacaaacaaaaaatgaacaaactcagaaatcacacattttcatcgccaacaatttctgagttcaaatttgcgtttggtttcgctaaattaattaaataaatggtaaaaatttattgtatttcaaattaaaataaaccgttttttaatgaaattatgaaagtttttgcgcgacaaatcggacaattgttgttctgtttaaccctaaatttgtaaatgttaaagttaaagaaattaattgtcctttcatttaccaaaaatcaatgcattccgagtgaaaattgtgctaaatgcaaaattagtattaatgtatagggatgggattcttagttttttaactattttttctgcggctttaactcgacgagaaatgcacgaaaaacacattatttttcgaaaatttttcgtttttagtgccactattcatcactaggaatcactattttggagcttcgccactaaaaaaaaactatttcgaaagttggccactaaaataattttttgccactattttggcattttgtcattatttttgccactatttcgcgattttacaaatttgtaaaggaatattcactaattttcttcaaatataccaaataaaacccatatttttaaaggaaatatcgaatcaaaatg

SEQ ID NO: 105109 - DNA, 225 bp, Heterodera glycines
ggtgtttccgaatccattggtataaaaaataaataacatttcctaattaaggaaagaagttttgccaaaaatttacgaacgcgttcaggccaaaattaggagtgatttggaacagtgcacagtgttgtcgttcacaagtgactgttgggccggcacttccgataattttattaggtatttttgttttaatattttaactatttttatttagcctgacaccgcatg

SEQ ID NO: 105110 - DNA, 298 bp, Heterodera glycines
  unsure (1)..(298): unsure at all n locations
catcacttcattttccaatcaacaattacttgagttcacaaattcttttatttttctgagacacttcgacgacataatttctttaaatttaaatttctcgactacaatcaacaaaattctggatntattttctaaattctggtgttaatcagcgaaacatattccgacaattccatcaaaaacggccgacacgcggagaagaccgaattctttagaggaagaaggactaaacgaaggacaaaccgaaagggataaaaggctttggctcatccatcaaaaaaggcagttgcgtaatatg

SEQ ID NO: 105111 - DNA, 140 bp, Heterodera glycines
tttctaaatgttgcgctttgaaattatttcgctttaattttaacttattttatttttttaaacgttaaaaatattataaaaaatttaaaaaagtaaaatgtaaattaaaaataatataaatataacattattaaataatg

SEQ ID NO: 105112 - DNA, 178 bp, Heterodera glycines
ccaaaagtcatgaaatcatgtttacaaggttttcggagttgctgatcatgaatccggcattcttttgggacaattccgaattctagacccgacttcgaaacatgttttcatgacttttggaaacataaaaaatttttcgaaaaaaagggggggggacaaagcacagtattacccaatg

SEQ ID NO: 105113 - DNA, 422 bp, Heterodera glycines
tttttatgaattggcaaacacgattgcaccacagctcctatactaaaaaagagacatgtgtggcacagtggtttattgcaagatagtaaagcgaaatgggacggaggttcaagtccgccacacgacatattatttacacagcggcccaattttgtgctctcagtgcaaataggtttttatttatttagtaatcagaacgccaaaactttgcaaaacttaaaattttttggggattttgccttgtaaaaatggaagagccgatctcgagttaaaaagcattttggtaaataagcaaagcattatcctataaatggggttaaaatatatgcttatgcaaaatttcaagaaaatcgcaactttggaaaaaattttacgactgcgcgaattttcaataaattttcagtattttagagctaaaaatg

SEQ ID NO: 105114 - DNA, 993 bp, Heterodera glycines
tcgctgcgaatatccgtttcacgttctgacaacgatcctggcgcggtcaggtcatttggaacaccctcaaccagtgcaagcagttcattaacaattcgcccttaaaatcggtccgtatttaaaaaggcaagtcttttcttgactatccctgttcataaaacctctagagatgggtatttatcccatttctattcggcctggcttggattaacatttggacaagtttcagaagtgtattcttcgtttcttgcgggtttttcgaagcaactgtacatcattttcgagtacattacaaaccaccggcattaatcgctccgtttaatttttgtaaagccttatttttctgtataataatcagtagggttgatatttttatgacctaattttcctcctactcccttgtagttgttaatgggataactcgaaaggattttcaaggaaaattcgaacttgtgccccccccacgcgaaacaaaattgagataatctggcatgagtaattttcggtaatagtaaagtttatccccccaccctttttcgaaaattttttttgttttcaaaaaacatgaaaacatgtttccatgggttttcggagttgctgatcacggagcggcatccatttcgactaattccgaatcccggacccaaatttgaacaaagccgaaaattcaaatttttcgaatttccatttttagtctaaaaatggtttaaatgatcttttattgaagcactaatgactttaacttcattttcatgtatttaaacaaagtttgaaccaagaatgcaaaattcgaaaaatttgaatcttcgactttttgttcgaattcggggtccgggggtttagaattggtcgaaacagatgccggattcgtggtcagcgactccaaaaacccttgggtaaagaaaattgtagttttcagttaattaatgatttatcaagttttgacttatactaaaaaacaaaattttaaataacaaaattccagcagcgatg

SEQ ID NO: 105115 - DNA, 391 bp, Heterodera glycines
gcccccgggccatcactcgccacggccatcaccgaacgaacaaccgatcattccccccacattttgtaaggtctgtacatttgcacgtgaatccaattgttgtttaggggggaggggcaacggacgacaaacgatcaccccatcacatcactgtccccccaccactccgctgccatcactgtgatgagtgcaccaaattataaaaggggggccgcgagaggggccaccccaaaacgaaacgaaacgcaaaggaaaagcaaaggaataaataattaattattcactcattccatcgcgaagaagccaagccatcttcaccagcaattgcccctctcatttcattcaattttcagcaattgtgccataattaattattaattggagaacaatg

SEQ ID NO: 105116 - DNA, 487 bp, Heterodera glycines
tctttggaattcttttaacttgacacgaaatatagacaattatacacaaaaattggatttatttgtatgaattcaacgaatgtttaaaaaaattaagattcatccttcattcgttcataacaactacccctcccctttttgggacatgttaaaatgacaggtatacatattttcttgcgaatttgactccctttgttttaattttaaatttggtattttattctgataaattggcgtaatgttttgttcctgttcgtgtccgaatgtgtaccgtaaaaaaattacataggtgtttcaattttcataaaatttgcaatttttagccaattttttcttaaaattgcatgaaaaatcgtcaaaaataaattcgaagtgatgtcatttgctgcatctcgaggttttgtgtgtacaatttgccacgttaagtcaagttttgtaggacgaggcagagggggcagaggaattgccccaagccaaactgagaatg

SEQ ID NO: 105117 - DNA, 140 bp, Heterodera glycines
tctaaaaaaggattttgaaaaggcgaatctttttctaaacgaatgctaagcaatttgacatctcagaaaaaagttgtgatactttcaaattcttatcacgttataactcaagtcctaaactgctgttttcaccaaaaatg

SEQ ID NO: 105118 - DNA, 118 bp, Heterodera glycines
acgccgtgccaatttcagaggaaattccaaccaatcgttccgtcaaggaaaatggtcaaatcagcaacctcgtcaatctcagggacaatggcaaaatcggcagaatcctgttaacatg

SEQ ID NO: 105119 - DNA, 1003 bp, Heterodera glycines
tatttcaaagtcgcacttatctttaatttttcggtcatcgtacaatgggtgacgaacgaaggctaagcgccgtttttcatttattcattttctaacttttcatttcttaattttcacgttcttttttattgcccatttcgcaccgcaataaaagcacaacatcacttaagccgtaactgaaaagtgttgaagagcgcccgaggggtggtgattaattaaaaatagaaaaaaaaaattaaattaacgaaaaggcgcaatgtcattggcattttgccgtcccaggatgatggaagtcatgttggcatgccctttcgacccggctttttcagaatgaatgccgagacgcggggagaggcatggaatttgtcattttcatattagtgaataacgaaaagttccattgccaaaatataagcgtacaacgcattttgtaattggtcaaccggattaaatttatattcattgaaattttttttttcgaattgattggcatgttaaaatatttcattcaaaaattttaatttataaggaaatatttataaaatggaatttttgaatttttgatgatagagtttaaaaataattttgtaaaaatttttaaaaataaaatactttaatcaactcatttttttaaacttttggacttcaatattatcatattaatataaaaatatttaattatttttgttgtgaaattcttgataagtgaattttataaaaataaaaataaaattttttagacttcactattatcataataaaataaaaatattaatttatttcgattttaaaatgaacagttttctgcattcacatttttccattgatttattctatgaaactaatgtcaatttaacgctaaaagagtacctctgcccctaattagcatacaattttctctgggcacaatttttccatagcattcattaacaataatttttttttccgactccattaatttatgcataattattaaaacataaattaaatcttagcaaaaatg

SEQ ID NO: 105120 - DNA, 273 bp, Heterodera glycines
gtataaattttttgccttttatccatgaatatgtcattcttaggggtgtattttcacccccgcgccccagcgggggtgaaggtcgcgggggcgggggatggcgggggtcagagtcgcgggggcggggacgggggtgaggccaaaaaacctgtcccgcccccggcaggggcgggggtgacgggggcggggtccgaaccctagttttttgagacgcgcattttgatggtttttgagtaacgacctgccgcctcagcaattgaacaattccacatg

SEQ ID NO: 105121 - DNA, 300 bp, Heterodera glycines
tttcctattcacgatgaaatcttttgccccacaaaaggcaagctgcttgttgaagctaatgacagcagcccatcagcggcttcttctgctgcttctggtgttcgcattagcagtttcttgctatacgaagaagataatgttcgttgcacttttaatttcaaatcattttttccattttttctttagtcggccccatttatcaattttttgaattatttggacgcggttgtctctgtccttttcatggccatctgcattttgatcaatgttttcgctgtttccgcttacaaacggcaaatg

SEQ ID NO: 105122 - DNA, 302 bp, Heterodera glycines
gtgattcggcaagcgatcaaccaccatttattcaatcgatcgattttgcactaatttaaccatttaaaaaataaagttttaaaaatgttagaaaataggatcgctcactcaaaaaaattggtcataaaaagtttaaaaataggtataaatccaacaaataaaattctaaatgaggatttagaagcatttgaaaaatgtgggtgggcgctcgcgctatataaataagtgcgcgtgtccccatcggcccatttcaatttattcctgtcaaacatttgaccgtcagtttttttgtcagcatcatg

SEQ ID NO: 105123 - DNA, 127 bp, Heterodera glycines
atcataactttttttcaggctggccaaattttataaatttggtatcattcgaaagctctacatgtttagaagcttttgataagttatttctaagcgattgaacaacttataaaaaagttgaaacatg

SEQ ID NO: 105124 - DNA, 244 bp, Heterodera glycines
tccgtgccatccctgatatgtacccgctatgaggtgtgaaatttggtgaaatcaattttctatttggactaaatttcttgaattttgcatgcttacacaaatgaaacaaattttaaaaaagctaaaaatttgttttttctcaagttgactattatccaattcatcctttggggctgttcagtcatctcggaaaaagaattgtggcaaaatgatggcaaagaactgactgaaagagtgcaaaatg

SEQ ID NO: 105125 - DNA, 56 bp, Heterodera glycines
accaagaagaggagcattcaaaacgattgagcgaagaggttgaacttgtcaaaatg

SEQ ID NO: 105126 - DNA, 734 bp, Heterodera glycines
aaaattttttttctttttctcctaagagaggcatttttcaaattggaaattaccattttacattttgtcattttacaaaatattacatattatcaaatcctgattttttttgttatattctatgaaataaattttccataaaaatgtaaaaaaaatgaaaaaaaagattcatgggttagcgagtgtccttgttcttttccggcaccgagcagggtcaaaattcgatcatcccatcaataacatatttttaaatgttattttagctttgtatttatgagctctatagaattcagtttgcctgtgttttgttcgccaactcagttaaattttgtgattggaaagcgagatttatgcgagagcaaaccgatacaaatgtaagctaaaatagccttaattattaaataaataaaagttttggctgggttggtcggaacattcgtgaagaatatgcaataattgtttcttttagattcaacccttacaatcatttactgcgctttaaattcttttgtaagttttttttggatttatttttccattttctgataaaaattactttgggatgcaaatgtggtggggttaaggggccatttcggcatcgaaattgttaaactattttttcgttgtctaaccaatttcctaaataagagatatcaaccaaatttctactcttctcaaaaattccttcctcccctttttagcaaatgcgcctgagcgttggcgcgtggaaaatg

SEQ ID NO: 105127 - DNA, 331 bp, Heterodera glycines
aataaataataaatagggatacaatttaaatgcaaaaatttttgacggagtttttgaacaattatttgtaaaatattcatattgccagaatgacttgaaatttttcaagaggaaaatattttggaaaagggtgatcactgatcagtaggggatgatttataattttaaaaaaaaaatcctggcgctattaaagtgtttgttttgaattttttaaaaaccatataggcgagcgacccttttgttttacaaaaatttttaatgtctagtcatgtaaacttattttttaattaattggattaagtataccaccgatcatttcatcaatggcatg

SEQ ID NO: 105128 - DNA, 290 bp, Heterodera glycines
tttttttttttattaaaaaattttttttattttttttaaaattttaggttttttcctaaaaaataccccccccccccttaaaatttagcccccccccccccttataataagccccacttttgagggggggtgaaaaaattaagccccccgggggctctatttgggaaatatggtattccttttaaaatattaaaaaattaaaatttattttgctaaaattagataaatataagcagttttttatttttaaattttattgttaagcatccaacaatttttcatgtccaatg

SEQ ID NO: 105129 - DNA, 1003 bp, Heterodera glycines
  unsure (1)..(1003): unsure at all n locations
tgggtaaatttttatttccacgcccaaaatcgccaatttctttactttatttttaaatttcctgttttnggtgattgaaaaaaattgtttttttattataaattactagcggggtcagcgccttcggcgcatccccccgctaggcagttcgattgtgttatagaattatgaatgataaaatcgactggctcggccgcttcgcgccctcgcatcattttcttggcttttctccaatctctgggactcaacccaccagcaattcaatctctgggactcaattctccggcattccaaacattgggacttaacctaccaactttcaattacattccaatcgctgggactcgacccaccaactttcaatgacattccaatcgctgggactcaacccaccaactttcaatgacattccaatctctgggactcaaatctgcggcattctaaacattgggactcaacccaccaactttcaatgacattccaatcgctgggactcaacccaccagcatttcaatctctgggactcaaatctccggcattacaaacactgggactcaacccaccaactttcaatgacattccaatcgctgagactcaacccaccaactttcaatgacattccaatcgctgggacttaacccaccagcatttcaatctctgggactcaaatctccggcattccaaacacggactcaacccactaactttcaatgacattccaatctctaggattcaacccatcagcatttcaatcactgggactcaattctcctgcatttcaatcactgggactcaattctcctgcatttcaatcactggcactcaacccaccaacattccaatcactgggactcaaatctccggcattacaaacactgggactcaacccaccaactttcaatgacattccaatcactgaaactcaacccaccagcatttcaatctctgggactcaaatctccggcaatacaaacactgggactcaacccaccaactttcaatg

SEQ ID NO: 105130 - DNA, 69 bp, Heterodera glycines
cagaggaacaaacagtctcaatgcctgttgtatagaggcccggtaatactgccggacctggtcggaatg

SEQ ID NO: 105131 - DNA, 244 bp, Heterodera glycines
  unsure (1)..(244): unsure at all n locations
cccggttcgaattancaatttattagagattaaaatttcattgataaaaataacaaatattaattaaaattgaaaatgactaaataacatattaaattatttaatgaaaaatttataattttaaattgaataataaaaacaaaaagaaattttatattatgggtattttttacaaaaaatttaacatttttgaaaagttaaatttttgcaaatattctcaaaaaattcgaattttctaaccatg

SEQ ID NO: 105132 - DNA, 239 bp, Heterodera glycines
ggtgggggcacctctgataagtcagtaccatcattcgccatgttcctcagaatgttcgtccttcgtccgtctttcgccccgcggtgactgttcagtccgctgacattgtccgcgtccgcgccgatgccatcgtcgacccgctgaagggatcactgttcgccgcactgctccaatcgccagcggaggaaacgacggaaaaagtgttggaagcaaagtccattttggacgtattggaaatg

SEQ ID NO: 105133 - DNA, 458 bp, Heterodera glycines
tagagaccggcgggatcaggacttccgcgggattttacgggagtcccgctcccgactcccgcttttttcggtgaacgggatttttacgggattcccgttagggactcccgtcccggaaaattttgaactcccgatcccgctcccggaaatttttacccaaaaaactggagtaaactgcactggtaagaattgagtttgtaaaaataatgatttttatcgaaaatctgttaaatataataaaggaagtcgaatttatttaagcaatttgaaaaaaaaattctgattttcgacccaaaaataagattttttcatttcaaatttctccttactaaatttttctatatatttttaattaataaattaattgtccttcaaatttgtgcattaaaaatatttttgtgtttttaattaaattttcgaattactcccgctcccgcccgggactcccgttaaaaatg

SEQ ID NO: 105134 - DNA, 344 bp, Heterodera glycines
tttaataaatatataaaatttacaagataatgatttttattttatggaaaaagataaaaataattcactgctattattgtcttattattcaaactttatgcatttgaggtgttgggtcatttttttgcgtgattttgatctataaaacccatataaaacacttaatagataatatataaaagatataacaaaataaaataatacatcaattttcacagcaactatcataatgataatctataataaatttattaattaaattaataaatccatatatgaagaataaaaataaatatatattattctgatagaaaaaatataacaataaaaataattattaaatg

SEQ ID NO: 105135 - DNA, 310 bp, Heterodera glycines
tggaaagagcagctcgagctctacagaaggtatggaaagaaaaaatagttatttctggacttttttcagaaatcagaattattctccaatgtggcccaaatttaggcccccagccacagccccttgcttctcccagttttaagtcttggatttgtcaaataaattcaagacttcaaattaataatcaaaaattctcttaaaatttttttgaacccaattcaaaaaaggaaaaaaatttgcagtcaaaaaattattcgaatttctccaattttgtttccataatttccgaaagttattcggtatcataatg

SEQ ID NO: 105136 - DNA, 109 bp, Heterodera glycines
ggtaagattcaaatgtgacgtgcctcatttggattcattttagaaattattaaatttattatttaaattttactttttcaatttcatttttctttttttagttctaatg

SEQ ID NO: 105137 - DNA, 958 bp, Heterodera glycines
actaaaggagtttctgattcattatttaaattgctaatatctatagctaattgcctacttttgctcaatgaaacaaactaggattgggcccccgaccgtcggggttggaaaagtcggggttcggcgtcgtcggggtcagcaagttcggggtcggggtcggaccaaatcgttcgggtcggggtcggggttcggggtttttcaatttttaccttatgcctaatagtcaaaattttttaattattttttctgaaataatattttttaatttccataataataattgtatttgtttttatatttttttatttcttttttatcagaaattttgtatagaattaattttttttcacgaaattttaaaattttttattttttcggcgacattatttttaaaattactgtttattttttccgttataaatataaaaattacttataaaaaatattatggtagcaaaaaaggcaatttcgagaaattacatttcaaaaataaattatatgcaataaaaaaagtgaattttattcaaaaaatgatcaaaaatttattattacttttttgtttttcaaaacattttttcgcggcgcgcattttctaaagacttttagggagaaaggggtccggcggtaccgataggcgccgccgggaaaattttgaaaatttggatagatctgttaacagattttgtccagaaaatgctaaatttttgcggttttgagctaatttttttaataagatttacgaatttttgggcccgatgaagccgataggcagctccaggcggattttgaaatcaagctctattttctaacatttttcaccaaaagatttatgaatttcccagaaagttttgttttttctcttgatattttgtaaaaagtattttgaaaattgtagagtacattgttaaatattcaaatttacttgaaatttcatcgccccgaatgcaattacgaaatg

SEQ ID NO: 105138 - DNA, 596 bp, Heterodera glycines
attaatggattttgtttgaaaaaaaaatctcttttgtccacattaaaaaaagtcaataggcgcatctgatcatttgctgggttaacaaaacgcataaaaatgcaacaaaaaaaaaattctcgtgtgttttgggttttttgaaattcattttttcaaattcaagtgaaggaattcttgaagggagcagctcttttcctccccgccggttacctccccgagaaattttaaaaaattttttttattaacttagaaaattttcaagaaaaaagcttagaaagtttttaataaggaaattctatgaaaaaaaaattttttgagaaaattcagcgcttttttggaaaattttttaaaaatcttagtttaaccacaaaaatttttgtttagaattttcctatgaaaaaactttctaagatttttattcaaaaatttctaatttagtattttttaaagaaatttctcgggggggggggaacgatgcggggggggggggaaacgtagtgcacccttcttgaaggggtaacataggcaaaacagaaaatatcagttatattttttctttaaagctttgggtaaacagtgattttgaattaagaatg

SEQ ID NO: 105139 - DNA, 1003 bp, Heterodera glycines
ttatataaattttacgaaaaattgtcacaaaaatttctttggaaaatttttcaattaaaaagtcattaaccaacattagcaatcgattggatatgcttggtcttttttctattccagtacgttttctctgctccccccccccccccccccccgctttttcttctattttttcgttcgtttgggtggtctttggccccatagccctcgtccctgtccctccaagccagtcagtccgcccccccccccccctcattttgtgccagccagcacgggaaaatgtaaagcagttaacacagttcgctcgctatacatatacataaattgtggataattccattaatattctgcctaatttttcccattcggcgcctatcattagggctgggaatttaagtcaaatgcatattttgtgacttttttacactttttgggatttttatgacttttttgagtttttgcaactttttcatgatttttttgactttttgaggcaaaatttgaattttagcgaagaaaatgccgaaaaaaaaaattctgaaaaatgaaattttgatcggtgaaaaggcaatgaaacctgaatgagttttttcttaattgtggaagaatctctttttatgcttattttaggtacctatttataaaattaagtgcctaaaaatacgatcaaaatgttattctataaattattaaaaatggaatttttttaactttcgcctattttttcaggagttttttcaatttttcttgactttttttttgtcaccttttgcaatttttatgacttttttagtcgactttttgaagatttttggtgacttaaattcccagcctaccgatcactgctaaaggatttgacaaaaattgtttatgtatgtaaaaatttattttcatcttttgttccattttcgtattcatgctaatatgacacgaccaaatctgaaatttaaatttaaaatattatgtctcgttaaaaaaaaataaaataatttcattttcggagatg

SEQ ID NO: 105140 - DNA, 957 bp, Heterodera glycines
  unsure (1)..(957): unsure at all n locations
ttattaaaataaaaatgttattaattcgaaggctcaaaatcccaaatcgtacaattaaaagttgtcattgttcagctaaactaaacgcctttgctttttcatcattgccttcgcgaaggattcacaaaacgcaaagcgttaccaactgagtcacgaaagggcacaaagacaaaaagaataaaatgcaaaataaatgttttatttattgtcaaatccccggaattcctgcgtatccgcgtggaattcactttgtctntatatcaaaatattaatncttaaatttcttacaaaatataaaaaattattttcttaaaatttaaaaattttaaattaacaaaatttcattattattttttattaaattattaatattatttaatttaccaaaatttaaaaaaaaatttttaaagttttcaaaaattttcaagaattttcttgaaatgaggggggggggggggtggctgttttaagaaacgcactagcacctctatgatttacgaattttgcaaatttttaattcctcacttttgccccacaattcctctctttctctgctgtctctcttccccaagcacatatttttggtaccgtaagggaaattctttgaaaataaataacataaaaaaacagtcagaccaaattaaataattaatttgataattcaatggcagaaaaaaatgttatccgaaggctcagctatgttatgaaattattgtcattgtttagctcctaaaaacatgcagatattttcatcattgccttcgcgaaggattcaaaatgcaaagcgttaccaactgagccacgaaaaggcacgaagacaaaaagcataaaatgcagatgcagaataaatgttttattttttcgtcaaatccccggaattcgtgcgtatgccgtattatttgcttttgatccgagtcgggggaccgtttcagcgacgccgttttggcgtcaagtatg

SEQ ID NO: 105141 - DNA, 348 bp, Heterodera glycines
ttctcgggggggaaacgagctgctcccgtaccagggatggttccatgatttggcatggggaagggttgtatcaaagtgcgaacgggcgtttccccctcatttcaaaatttattaaattaaaaaaataacgtgtttttctacaataaagtcccaacccccttaattaaggaaatgctttcagattggcgacccacttttgcgcactttgttcgcctctttgtgctgtgtgaagcacgacgcttcaattctgggcagaacaatgtctgtccgctttactatttttggtgttttatgtgtaaattttatggtggtttccttttttgaaggtgcaaaaacatcccccacatg

SEQ ID NO: 105142 - DNA, 804 bp, Heterodera glycines
aaaaaaattcttgccgaaaaaatggctatctctttttctcttggggatttgaccgcaaacttggtaccaacatttgccttctctagtctgggctctaccaaacactcacacgatatttgaaatgctaacgaaaaaaattcttgccgaaaaaatggctgtctcttttttctcttggggatttgaccgcaaacttggtaccaacatttgccttctctagtctggctctaccaaacactcacacgatatttgaaatgctaacgaaaaaaattcttgccgaaaaaatggctatctcttttttctcctggggatttgaccgcaaacttggtaccaacattttccttctctagtctggctctaccaaacactcacacgatatttgaaatgctaacgaaaaaaattcttgcccaaaaaatggctatctcttttttctcctggggatttgaccgcaaacttggtaccaacatttgccttctctagtctggctctaccaaacactcacacgatatttgaaatgctaacgaaaaaaattcttgccgaaaaaatggctatctcttttttctcttggggatttgaccgcaaacttggtaccaacatttgccttctctagtctggctctaccaaacactcacacgatatttgaaatgctaacgaaaaaaattcttgccgaaaaaatggctgtctcttttttctcttggggatttgaccgcaaacttggtaccaacattttccttctctagtctggctctaccaaacactcacacgatatttgaaatgctaacgaaaaaaattcttgcccaaaaaatg

SEQ ID NO: 105143 - DNA, 71 bp, Heterodera glycines
cccgacacgtatccatgcctttttctttggtgtactgattgccattttcagcatgttcggacaatctgatg

SEQ ID NO: 105144 - DNA, 57 bp, Heterodera glycines
agcctcagaagaattgccgattttcaagcttttaacgattaaaacagagaacaaatg

SEQ ID NO: 105145 - DNA, 91 bp, Heterodera glycines
atttagcatcatttgaaagttccacatgtttagaagcttgtgataagctattcttaagcgatttaacaagttataaaaaagttgcaagatg

SEQ ID NO: 105146 - DNA, 801 bp, Heterodera glycines
actttttacaaataataattttgtaaggtttttgccaacaaattggacaatttggtagcatttaaaaactctttatgagaaaaagctttttctaagcaaaatattcattatttctaaaaatctaagtttgatctcatattttcccagtgtcacattttcttaaaatgaaaggctttctatcgatgtcgcattttcagggagccttttagtcaactcctcaaagaatgaaatgctttcatcattttgttaaacattatttttcaataaaaataggcaatatccatggctgctataataatttaatatacatatgcatgttataatgtcatagcaaatcctactggtgctgcaattataactatgatcattaattattattatttagtgagaatctacttttaaatgtaatttacaaagtagacaatgtccacggatgatagctaatataaaattataaattttatattagctatagttgctataatgcattatcaaattataaaagtaggaaaatatcaatataaaaggcaatcatttgttaaaaaattagaaccaatttttatttctttaagaattttttgactcattttaaagcaaatgtgaaggttctcaaaaaatctcactaatcttttttttaatgaattttaatttgttttgtctaaaaatttgaagaacaaaaatacaagtccaggttaggcatgaaaatcctggatttcctgtaaaatatttttagatgtttctaagtgaataattatttttttaaatttatttaaaattttagcaaaaacattctctaaaatg

SEQ ID NO: 105147 - DNA, 66 bp, Heterodera glycines
ggtgaggctcacgctgcttttcccattcattccgtcatcaattcaatttgtttctttttcagaatg

SEQ ID NO: 105148 - DNA, 1003 bp, Heterodera glycines
gcgggtgcgtgaaccgtcggctatttagctgtggaaaagcgcttcgcgctttgggagcttcgctacctagactgttacgggggaagaggtacaaccacgggtgggaaggtacaattgtgatcagaagaggtacaactacggtttttttagctctggttgtggagatttggaattttttaaaaattatctgggacttttaggccgcttcgcggcctcgaacgggcgcttcgcgcccgttttttaaattttgttgggcttatacgggcgcttcgcacccgtttctaaatttgttgggctattaaggccgcttcgcggcctcagacgggcgcttcgcgcccgttttttacttcttgagcttcggatcgaattggttggagaggtttttttgaatttttaaaaaattattaggggtttttagtccacatcgaggatcaagacgggcgcttcgcgcccgtttttaaatttgttggccttggacgggcgcttcgcgcccgttattcaattttgttgacctcaaacgggcgcttcgcgcccattttttagcttgttgggccgatcgcggcctcagtcgggcgcctcgcgccagtttttcaaattttgttggccttacagagattagaagaggtaaaaagagattaaaagaggtacaaaagtgattaaaagaggtacaaaagtgattagaagaagtacaaaagcgattagaagaggtacaaatttgatgaagaggtacaaatgtgatttaaagaggtacaaaagtgattaaaagaggtacaaaagtgattagaagaagtacaaaagcgattagaagaggtacaaatttgatgaagaggtacaaatgtgatttaaagaggtacaccagtgataaaagaggtacaaaagtgattagaagaggtacaacagagattagaagaggtacaaatgtgatttaaagaggtacaacagtgattagaagagttacaaaagtgataaaagaggtacaaaagtgattagaagaggtacaatg

SEQ ID NO: 105149 - DNA, 1003 bp, Heterodera glycines
attgatttttattagagctgcacgggaccgggaccgtgacgggaattcccgggtttttcaggtccccgtcacggttccggtttttgaaaaaatggaaatcccggtcccggctttgctagtcccggtcccggcgggaataaataagcactggtaagaatgggggtctggtgagaaaagagaaggaaattggtgagaagtagaaatttttgagaaaaaaaaaattaaattatttatttcattttaatagaaaattttttcgaattcaccccccccccccccccaaccgaaaattaaaaaaattttattggtacatttttgaatataggcaattttcgtaacaaagtgcactcaaattttctaaattttttcaaaaaatttcctcttgggaatagtcccggttggtcccggcatttctcgcggtctcggtcccgggcgaaaaacttggtcccggtcccggcttttccggtcctggtaagtcccggtccccgttttggtcaaaagtcacggtcccgcctagttaaaaatgatcaaatattatattttcagcagcctccattttttccaaaaataaccatttaaaaattttatataaatatttggtacatattacatattttgggttttttgtacatatttcgtgattttcttacatatttatgtacatattttgtctttttctattaatgatcatttataatatttttcgtttttattaaaatattcattttaattttgccataatttttaagaatatttattaataggcttttctgatttttccaaaatcacaatattcttattttccagtctcattctgatcaaattggcgtaattgcttctttcttttttttttgcgtcaaaacgttacgctaattgaattttttcacatttttctctcagcttaaccctgtgttttgttcaattaaaaatccacttaattagtcagtaatcaatgacccttattttgaggattggaattaaaaataacatttttcagcagatg

SEQ ID NO: 105150 - DNA, 56 bp, Heterodera glycines
ggtaaattttgcatttttcaaatttaatttttaaattttccattttttagccaatg

SEQ ID NO: 105151 - DNA, 104 bp, Heterodera glycines
  unsure (1)..(104): unsure at all n locations
ttcagcaatattttttctacgaaggtgaaaatgattaaaataataataaataatataatttaccaattttgatntattaatttgttcagtttttgccggtgatg

SEQ ID NO: 105152 - DNA, 457 bp, Heterodera glycines
ttttgtggtcttttagagggtcaaagaggattttttggaaaatgaggatttgcggatttttgtggacttttgagaaatttaaggatttttgtggttttttgatcacggcaagtcaattttgggctccaagtgtaaataagtttatttttaattcagcaaatagaacgccaaaactttgctaacttaaaatcttttttgggattttcccttctaaaaagagaagagccgatctcgagttaaaaatattactcgaaaaaataaacagggattcgatagagggggggggggggggtcaaaatatggggttgtgcaaaatttaaaaaaaattgtacctgtgggaaaaattttttaccttgttgaaatttaatttattttttagccaattaatgggttttaaacgcaaaaatgtcaaatcaaactaaacttataaattcttcagaattttcccttcaaaatg

SEQ ID NO: 105153 - DNA, 421 bp, Heterodera glycines
  unsure (1)..(421): unsure at all n locations
aacgggttggatgcattacgttcccccccatttttcaaaaaaaaaaaatttaaagcggattataaaggaaaatggcaaagtttaaaatttctataagttttaacaaattcgctaaaatgcatggctgggcaattgagtacccaagattttctcaaaattttaccaaaaatttcctcaaaaatggnagataaaaaaggcactcgaatttttcgctccaaaatttttttggtgacaggcctaaaaactcaaacctttaatccaatgaactcacggcttttcagtcttcccgagctgaacagcaccaaagcaaccgcagcagcgcnggaggtggcggcattggcactgatttgtcatccgtcgacggcgcccaccaccaaccacaatcacaacgtttgccaaaggtgcgtcaacgccggcaatg

SEQ ID NO: 105154 - DNA, 287 bp, Heterodera glycines
tttttgatacaatttaccaatcaaatggtccttccactccctttatataccccttctataaatagcaaccaaaaataaaattaaattgaaaaatgaactgtccacataaaattaagtgttgtcattactgtccctgtcattacgagatttgtaacagatgtaaaaagcacagtcttttgcatttcggtacatcattttttgataatttctggctatgccccaaatgcgcgaaacatgttccctatgaaaatataaataggtcaaataaataagatgcattaaaaatg

SEQ ID NO: 105155 - DNA, 161 bp, Heterodera glycines
aacttacgaagtttttgaaatttgcagactgatagagaactcttattgttagggctatccaacagatacgttttaatgatttttgttccactaattaatgaaaaattcactcattagtaaagtgccaagaaattgctgtccgcataaagctgagcattatg

SEQ ID NO: 105156 - DNA, 1003 bp, Heterodera glycines
atctgtgctgttcgactacgtgtgatattggactacagtgatcagcgatcagtgacaagacagtacttggcagatcggtgatcagaacgacttgtgagtacggtaggagaaatcaggataagaaatacgaatgagttaagcttatggcctataaattgggatgagtcgatttttttggcacagcaaagcggaaccaaaatcattttaccattctattcataagttttggttttgttttgtaattgggcgacaaaactgagtcgccaatctcttgtcttatccatgttaagccttatgctttaaacagcatcaattagtgaccaaaattcatagcaaatcatttaagttcttataataataattgttcaagttaaggcgcttggcgaatctgagtaagagagctttgagtgtggtgcggaccatcaactgtgttcaacgcttcgacggcccaaaagtgtgacacatttcgcattgtgtgaaaactgtgagtatgagtggaaattgtattacgagggccgaacattcagctttgcttaacaaacaatatgcttttcatttgattaaccaaataaactgcgctatgcttttaattaattgttaaacactaatgcacttttatggtccctaaaattttggaaaataattagtatttaattgatctgatgtgtaaatgccggttaaattatacactcttggtacaattgaaggcgtttaggaacattgttttgttttggatttcaacaaatcattttggagaattacaggtgaagaacgacatcagtggtgatcaaacgcttcggcggattcaaagtgaacggacaaagctgactgatcgaacggacatttgacttctgtgggcggacaaagtgaatttcttttcttctattaatcaattagacaaaaataaacaccaaacaaaaccaagtaaaataaaaagggggaattgaaataaaaaggggatcagaatcaaaaattaggtttgcttcggcagttcaaaagcatg

SEQ ID NO: 105157 - DNA, 290 bp, Heterodera glycines
ttacttttgccaacgccgttccgtggtcgagcaagcggattacggtggtaggttacagtacccaaaaggccattagcgccggtccatccgtgctttgtccattgtcatcatttggtgttgcgaaaacggcactatttgtacggagaattctgagctgtataaactcatattgttttactattacctaaattgttttattgattaattattctaattgtatcttaattttttaatcctactttgctggggtttattttttgttttgtatttgctatttttattgaacgatg

SEQ ID NO: 105158 - DNA, 1003 bp, Heterodera glycines
ggaaaatcgcgtaataccttgggtgatgtggctaatttgaattttaaaggactttaaaatatataaacgtcccaagtttttttataagaatgctttttagccaaatttagacttttttttcaattttttaaacagatttcaccagaaatgcgaaatgggcgttgtttgaacaaataatctatcataactttgcttaaactcaaaaaaaaaacttatcaagttgatatcaatagataaaaagcactagcttcttatgctctagcatacaaaatttaaaaaatttactcattaaaaaatttgaaacaatgaaaaggaaaatttttttttttgtacatttttgctcacatttttttggaacatgacaaaaattttgtttttgtaggctaatggagaatttgttcaagaaatggatactatcagtttaaattattttatttttataattaaaacattttgtgaataatgaaaaaacacttttaacgccaaaatttttcataattcaaaacaaaaacttgtttcaactatgatttataaaattgaaaaaaaagaaaatatcaaagacaatttttcttaatgaaaaccattttttacacatcatcaaattccttttatgtgaatttacattcgctgtttattagcatttttttgggaaattagatagtttgttcattctactggtgaatcaccaataaatacagagaatcaaaaaattctgttaacattgaaatcatttggcaaactatacatttattatgaaataaataatttttattattagctcatttaaaacaggatgtcttttttgccaaaattaaaagacagaaattagttatgaaaaagcagatttttggcgaaaatcagaaaatcccaatgtttttgccaggggcaatatttatttaatattcttgataaatcagaacatatcaacacacaccctgctgatgatttaaaaagatttttgaaattttactttgcataatttggacaaatttaagcaaaaatg

SEQ ID NO: 105159 - DNA, 433 bp, Heterodera glycines
  unsure (1)..(433): unsure at all n locations
aaaaaatattaaataatatttttcagaccaaaatntatcaaataatatatttttaaaccaaaaaaattattaaaccaaaaaattattaaaagatttatttttagacaaaaaaattattaaaagatttatttttagacaaaaaaattattaaaagatatattttaaatattgtaactaaacctggtaaaaacagtcattatattcgcccaatttaataataaaatatttttttccgaataaaaacacaatttaaattccaaaaaataaacaattcccgaaaaataaaatattaatttttatcatatgattttaattctcaaaaaatatatatttatttttgaattcttgacaataaatttaaaattatcatgtcttttaatttagaaaattttttacatatttttccaaatttttgctccttaagaacttcatg

SEQ ID NO: 105160 - DNA, 1003 bp, Heterodera glycines
gagcgaagacaatttggtcggaggaatataacaaaataaaatgaatgagggaaaagaccaggagggaggaaatgatcgtctatttatggacaagtgacaacaacaaaaatggcgtggaatttgaatggacagatcgccataataattcaaataggctcatccgaacaaaaaattattattttaccaaaaaactcaattcttaccagtgcatttttactcccgttttttgggtcaaatttccgggagcgggagcgggaatcccgtaaaaatcacgctcccgtaaaaatcccgcccgacaaaaaagtacgggagtcgggagcgggactcccgtaaactcccacgggactcccgttcccgccggtctctatcaataagtgatttttttggcgcgcaaattaaggcacaataaaaatatctgctaattggatcccagcggaatattttttgtgccaaaaaacttcactttttcccccctctccacacattattattagcttaggttgttttggtattttttggtgtcctccaaatttaggacgtccttgaaaagacattgaccaccttttctgtcattcatttgaaaaccctctttttaatgaggtaatttagggtttttttgaaattttatttttctttggcattctatccattttgactacccttaaaacaactttttgatttccatttttgtatttgagtatccaaattattaaactgtcctttatactttccgtcattgctgttcttgaatgcatacctattcaattaaaataattctaagctttatatatataatatatataaatttttagcacaattttcttcatttaaacataatattatactgtacattgtgccgtgtgctgtaccaacgtgttgatatggtatttggatgtcctccgctacagtaaaattgttgttgatcggtcgacaacagcaacatcatcatcatcttcaccagaacaaaaacagcaataaacaatcaacaaaagcagaaccaatg

SEQ ID NO: 105161 - DNA, 125 bp, Heterodera glycines
agttgggccaacaaccattttcactttgcattgacgcaagtaatcatggcgaaaaaaaactcgttccgattgtgatccgatttttcaatggcaaattgggactcaggacccgaatgttggacatg

SEQ ID NO: 105162 - DNA, 742 bp, Heterodera glycines
taagcgtggctgaacaaacaagcatataaattcaatggtcgtaaaccaattagcactaattgcttctttaatttccgctttgcctgaatgagtatttcctgcgccggcctcgtctcctctctgttggtgaacatcgccagcatattgctaactacctaacaaaaacatttttagtccagaagccaatttattaattatttatctctaccatttgtcgaggctgtgcacgcaaaaccaaattggctttctctgggcagccaaaagtgaaaattcgcaaaagtctttggccaaaattttgttgagacatttgttcgaagttcatagacctaaaaaacatgaatagccaaaaaagacataggtgtgcaaatgtctgctttttcagttttccactctgccgttcccatgtttttttttagtacctgactctaaaaattaacacgttatttattcaaacgctaatttgtaagcatttcagagctattgtatttcaatttcaattctttttattccaattttccgcactttagcaaatgccaaaatcgaagcgcgacttagttggtcagcaatttattattcttcagccaaatttgtccataattttcttcaatttgttttttccttcagtttctctcacaaaagtgaagaagaagagccgcgagggcaaagaaaacattttgaaagaggcgggaaaaaaatttgtttttttttgaaaattccaacaaaaattttaggtcagagaatg

SEQ ID NO: 105163 - DNA, 119 bp, Heterodera glycines
tatttggaataaaataaacgaggcattaagaagacaattaacacaaacaattaaattctttaaaaatttaaaagtattttaatttcctaaagctatgatttattttatgcacaaaaatg

SEQ ID NO: 105164 - DNA, 388 bp, Heterodera glycines
tggcaaagtgcgggaccagcttcgcaccggatgttggccggtaacaataaggaaatcatcattgtaaaccgtggtggcccacaatgttcaaaggaaagttcatcgtgctacaatcccaagaaggggtaggacaagttgaaaacaatcccgtgatgggcaggacatgttgaccacagtcccatgaagggcaggcaacgtttaccacaaatgtgacagatgcccgaagggccagtcagtgaatcgcaaatggtgcgacgcatgccctgaagggccagtcagcgaaccgcaatggtgcgacatatgccctaaagagccagtcagcgaaccgctttggtgcgacacatgctcagaagggccagtcagcgaaccgcaaatggtgcgacacatg

SEQ ID NO: 105165 - DNA, 55 bp, Heterodera glycines
cctcaaacttgggtaattaaaccgaaggggaaatggggggacggcacaaaaaatg

SEQ ID NO: 105166 - DNA, 819 bp, Heterodera glycines
tatttgctataattactagtaatgactggtcgagagtctcgagtgggaaatttgggtctttttttttgggggggggggggaaggcataattaaagaactataatattgtctatagttctgagccagtttcgtgatttatctgttatttctcaaaactaaagccaaatattgttttaaaatcttataaataattatttaaatttttaaagaaatggtaaatttatattccataagtttgaaaaattaatgaactcacatgaccaataaatttaaggaataattaatgaaaatgtgtaaataattcttgcagcaatttactatattatgaattaatgaccctaataaattcaaaaaaccgccaaattaatccgtcaaatctccgcccccgcccaaattttgtcaatatgccgcactgttatacatcttcaaaatttaaaatttgcaaggcaaagatttaaaattatattggaaaattatgaagaagcaatagtaaaattgatggaaaaagtaaaaaattttacttttttttattttttaaatttaattaattttcaatttttaattcattgcatttttgcggtgattattcatcaaattctgctgaatcatcttctatctatccatttcatttttttcacatagtgatcgacagaaaacgaattttaaaaatgttaaatcatttcaataatatgacaaaattagtaaaaaaacaattaattgaattaattattctattgtaaataaaataaaattaaaataaaataatttatatttaaatttaaataatttttccatgtttttagaagagtgaacaaaatg

SEQ ID NO: 105167 - DNA, 971 bp, Heterodera glycines
aaaatagttaactaaaatagtgagtaaaaatcccaaaatagtgaagaaatagtgacaaaaagtgtgaaatagtgacgaatagtgacatgattacagccaaaaaattgaacaaaacattttttaactagtgagttgccaatgaggtaacatttcctttataaaattctcttagcaaatatttaactttttaaatcaaaaattttgtcaagaaaaaattttgggggaagaatttttgagaaaattttttcatttcgtaggagtgtatttttaaaaaattttcggtcgattcataggggtgtatttttctgaattttttgtagtcgattcttaggggtgtatttttcgtttttattacatttttcttaaggatattttccaaaaaatgtcaaaatagtgaaaaatttaaatttaaaaatagaatatatgagcaatttaagaataatgagcaatttataaattcaaaaaaaaacagcaaaagctatgggtttaaataaaaaaaatacttttaaaaaaataaaaactaaataaccaaataaaaatatatttgaattgcaataaacataactaataaatgccaatttaacagaacagatccaccatcaacgaagaatgtagctgcaaaaaccaccaagtggaagggtttgggacaagaatttaattgtaaaataatttcagataatttaatagaaaataaatcctaaaaaaaataaaatttccgccctttcctccgcaggtccgccgtccttttcgcctggcccttcgtccgtttccgctcgtccgttgtcgcccgccgctcgtccgtcgtcgtccgccgctggtccgtcgtcgtccgccgctcttccgtcgtcgttccgctacgaccagagctcatgggcaacgcccgtctggaccggttgataagaaatgaaattgtaattttgtttctcaaaaagcttttaaacagattaaattttcaaatgataccaacaatg

SEQ ID NO: 105168 - DNA, 565 bp, Heterodera glycines
atttttgcatattaaaattaataaaaacaaaataagtacatcaatttaatttaatttaaattagaatttatttttttatagaagaaaactgcaaacgaaatttatatcgtggcaaaagcaaatacctatggtaaaataaaaaagtgacttttgaaataacacaaaatttttaaatgccgaaacgcgacgcgcaactgcctttgaaaaataaataaataaattaaaaaaatcataataaaaaaatacaattcattctatcatttttcatttatttttgtaacattagaaaaagtattattatattccacataataatgaaagcttttgaacaaaaatatctttcgcaattccattcttttgtgttgtaaatcaaaagctttcaaaaagcgtttagtatataaagcgctaaaattacaccaaaatcaacaaaaagaataaataaataaaatgcttttttcaatttttctaatttgcttaaaaagagaaactattttttatataattaatactagcaaaaaaaaaaatcatttattcgaaattccaaattttgaaatttaagaaaatg

SEQ ID NO: 105169 - DNA, 817 bp, Heterodera glycines
gctcacgacagtttccagatatacaaggtgccgtggaacaagttgctgctcaacctccgcatcaaaataaggtgcaaaacaataccaacaaaacatcaaaaaactatttcaaggtggcatcaaataaaaaacaattttttaatttcctccataattttttaatcgaattaagaaacaaaaaacacagaaaaatccggaaagttaaggtgctaggtatgcttcatacaagccatattggttataattagggtaggccgagcccggttccgagcaggccctgacccggtgccaggctttttgatcaaggcacggtttagaaatttctacccggaaccgagcccggttttctgtacccggtaatacccgggcctgatttttgcctaaatacccaggcctggcctaacctagttgtaatccgaacaataattagtttttaattcaaaaatcagatttgaataaatgaaaatttttccttgaattctaatgaccaaatttagtgaggttctaggccatagaaggggcccatactgttgctataatttttgaatttatgataatttatttttaacaattttggtgtcatgacaaatcgtacactgctgtacaaattcgtacaaaattgcttaggttaggcctaggatttaggcttaggcttaggcctaagctttaagctaggccaggcttaggcttgctcgggtctaggcttaggctttattttgtctaatataagttgactttttgtacgagttgccataaaaatttttttctgttttttattttgctttgcttaaatacgccccctcagccaagcaaaatg

SEQ ID NO: 105170 - DNA, 429 bp, Heterodera glycines
tcgacaattttgtttttaatttgatcatctcatttcacatttgcacttttttttattgtcaatcatatatacatatatatatattacatacacatgtgcaaggggtgtctcacaagggaaccacccaaactgtaagtcggaaaatgcatccatataaatttgatacaatttttttcattacgggtggtagtttaggatttccgtaattgaaaccaagctacgtccaatcccgttgcacatgtatgatcagatcaatcatccaaaggaattgcaaaattttaacgcttttaaagtttcttcataccaatgcttcgtacaattttattggttttcattctacattttatatttatataataattatctcgattactgaaacgatacactgataaatttccatacataatttagcttttagttcgtaaaatg

SEQ ID NO: 105171 - DNA, 199 bp, Heterodera glycines
aaatcatttggtttattaaacggcatttttgcacctgttcgtcctcagtttgagcactacgcggctcagcggcactttctggcgtgtgtcgaacagaaaaatggagcgatctgcggcacatccggccataatgccttcctctatggggttgcagttaatatgctgcacagtgttgggcccaacagcgtaatggcgaatg

SEQ ID NO: 105172 - DNA, 766 bp, Heterodera glycines
aaagtgccgtcgctcaacgctcttgtattttcaacgattgcaatttcaattggtgaaaatggataaagggaataaggaggggagtaggattagggagtaattaagtctggtataaggaacaattagcggggagttaagggggggcggcacaaggcaattgatttgttgcagtatctccaaatgaccataattgatattaattgccttagttattccttttgcgctgcgagttctgtgattctttttagagggtaaattagtctgaggattggaattggcagaattgtactttcatttgtgtcttcaatgaattaaggaattaattgttttttgttttaaggtatacgttgatctggtttccgcggaatagtcccaataaatctcggggccggagggggggggggggtcggggagcaactctacgtaaaattccaaaacagagatagcagttggggaccgtactttctatattcttacagtacatatctaataaaaaatataaaaaaattacatttttcgaaactcaaatttttgcatgaatagaatttgttaccatgttttggagttttaagttgcttttttcaaaaataataaaggatgttgtggtccagctagtccgaatgcgcctcggggaacttttttttaatttggctcaatttacaaaacattttctccaagaaacacgaaattttcttaagtaattattttttcgtgaatgactgctgttgtcccatgttatgtccctgctggacattgattggccatg

SEQ ID NO: 105173 - DNA, 1003 bp, Heterodera glycines
  unsure (1)..(1003): unsure at all n locations
cgtcaaaactgcataaatctgtgcttttatatatgttatcatcatatgattttgtcgatgattttttaaatcgtataattaagggaactaaaagcatttgagagagtaatctattcctgtcgacgagtggaatagattggtactagtttcagggttctagcccaacaaattttatgctggggtggggcggaccacttttcaaataaagccggtgattagcattttggccaaaactaaaccgcacactcacgccgctcgcttgctcgggcgcccaccttattgacattctgtctgttgttagctgataaatgagtcaattataaattcttaagtgcctccagaaatttttttttcaattttaaatagctttttcttatacattatgtacataattaattcataaatattttatttactatgctaaattatttttattatttaatgatctcaatttatccattccatttatttgctaacactttttccaaacgattggtcgtcggccacaaaaaaaatgaataattattgtacggaatattaaacganaattgtccaattggtccattcccatccatcggaaatggcattccatcagttgttttaacgatgattcggcttcctatttttcgctttttcccttttttcatcgcttttgctcaatttgccaacgcttttcccagcgattggacaaaaattgtgcttggggagtgtaaatttgtggtgatttggcgcccccttcagctgctttcccattttttctactccttttttgtctgtccataaataggcaccgaaaagccacccaaatcacacattttccattcaaatcacagctaatccatcctttcattcaatcatcaatcagttgaaccttccttgcacccttcatccatcccatcactctgcccttcatccaatcaaaaacggtaaattaaagaattagtataaaatgtaatttttaaaaaattaatttaaaaaaagcaaaaaagaacttcacaaaatg

SEQ ID NO: 105174 - DNA, 467 bp, Heterodera glycines
ggttggttcgttcacactttgtcagttaaccaccaattttaacagattgttttgtggcagctttcggttttaggaagttaaattatgaaaatcatttatttcctaaaagatgacaaagatgggacattttctgtataaaaaagaggaaggaaaaatataaaatcggaacccattgaatatgtatctgccattttttgggccaattgtccgttaccaattgtctaattgatcatttttctccatttttaacagtgtaaagcacaaaattgtaaggcaaccaaaaatggtggtgtatttgcgcaacgaattgaccagcagctgacaaaacaagcggaggagaagcgaccgttacgatcaaatgaagaggagagcgacgactacggtagaaacccaaagaaaaaagattcgttttaataaaaaaaaaattaaaaaaaggaaaaacttcacaaaaacaacaaaaacacatg

SEQ ID NO: 105175 - DNA, 120 bp, Heterodera glycines
tgtcatctcaaatcattctatcaccaagttttgcgccaaattttgtagcttttttccttttttttaaatttctgtaattctgtttaatttgagtttttgtcctgatctgcttcaacaatg

SEQ ID NO: 105176 - DNA, 456 bp, Heterodera glycines
caggtccatgccgagttggagcagatcaatgaagaggcggttgcaagcgtggcccatcccaaattgagcatgcgtgccatgttctgtcccccgttgttgtggcccctcgtgttggcagtgttcatgatgttgtcccagcagtgaaccggaatcaacgcaggtgtgctttttatttaattgactaattaattaatggaaagttggtgttgacttacaaatttttttttgaataaagaagccaaaagaaaattttacagaacttgacacaaatactacccgatcggttgtgttttgatcaagccttatcttaatttttcaaaacttgacgaaaacctatccgatcggattgtttgatcaaacctatattaaaaattgtaattgatccccattattttattaaaaaattgtatttaatcgtctcagtataaattacatttttcttttttttcagctatg

SEQ ID NO: 105177 - DNA, 190 bp, Heterodera glycines
gaggcaggggggggggggggggtgaggagaggaactggtcaacaaatgggtctccggatagtgtggaaggtaggtgatctgctgtcaaattggagagatccaataaagtggcggggggggggggattttgggggggaaggcacccccttttcgccactttctccaatccgttgcttattgccagcgaatg

SEQ ID NO: 105178 - DNA, 258 bp, Heterodera glycines
aaatttaaaaatttaggagccaaatttaaaggctttctcccccccccccttaatttggcagaatgtgatcagaagtgccgaggagacgcaaatgttgatcgcggaacgggcgcgtctctccgagcaggaggccattgagcaggcacgacgtgccagcgaagccgaggcggaagcgcaacgcgcaaaactatcccagctgagggtttgtggggttgtgccatttcaggcgcaattcgcttgccaatgttgaaaaatatg

SEQ ID NO: 105179 - DNA, 232 bp, Heterodera glycines
agtgtgaattttaaaaaattgtttttttgaaaaacatggctaaccttttttgtatttttttccgtccgttcgtccattatttcactttgttccccaggaatccgactttgttgagcaacagatgcgctctcaggaagtgtttctgcttcgggcgcgggaccggcaccgggagaagctgtgcctgctggagaagcagttcctggagcagaagcaccagctggagcgcagcatg

SEQ ID NO: 105180 - DNA, 241 bp, Heterodera glycines
ggtgggttacacgcgatttgtactcagttgggcgccggaggctttccccgggttaaccgggttaacgctattggaatatatattttttcattttgaatagatttcggacattggctaccatacgtcggacgcataccgtactccggagcttggccatcgtcaaacccaacaaaattttggcggcggtgccaacactaacaacatcaataatatcaccgatgagtcaccgcctgagtcgatg

SEQ ID NO: 105181 - DNA, 216 bp, Heterodera glycines
gtttccggcaccggtgcgccgcgagcggcggggacgaacgtgcggagcgcaaggtgcgcgggctggagctcacctacaccgccagccaactgctcccgttcgagcgcatgcgtcagctggtgctcaacttcttcggccggtgagcacgagggggtgggtgggataacaatggaatgtgtgtgtgtgtgtgtgtgtatgctacccccgatcaggatg

SEQ ID NO: 105182 - DNA, 101 bp, Heterodera glycines
tttcaatgattactttattgattgatcgattattgatgggattaattgcttgacaatcgattggttacgaaaaatcattgacgcaacttccagaaacaatg

SEQ ID NO: 105183 - DNA, 145 bp, Heterodera glycines
tagtgaaaacggaaataatgtatataaaaggagcgcatttgcagtgtttgctcacataattcattgcccacatattattgttattatatattgctcatcgtctgcaactttaatcccacgaagcgacgtgcccggcgcaacaatg

SEQ ID NO: 105184 - DNA, 296 bp, Heterodera glycines
agatatgtctgaacatattgaaaggaaaacttccaataaggcgaaagtcgcatttgcgtaaattgggcgcaataaagcattggttaagaggtctgtcacgcactagatgcgcaaaaagcgcaagaagaatattgttaaatgctccgtcacaagtcgggtctggagctcctgctattgcgggactattagcaagtattttggtgccaatgttgatagaaaacataataaataaataaacgattaattgaaataagaatgagtaattaataataataataataatgcggcacacaatg

SEQ ID NO: 105185 - DNA, 57 bp, Heterodera glycines
  unsure (1)..(57): unsure at all n locations
aagaatgttcgacttttgtatcaagaaaatctcggaattnatgtgagggaatcgatg

SEQ ID NO: 105186 - DNA, 352 bp, Heterodera glycines
aaaaattaaggaagcaaaagttttttagttatttgaaccattaatccagttgtttgatttaatgatgtttttttctaaattcatgacgatcaaattatcagacacaatcactttctaccacttatataaagttgtttaggcgatcaggtattgaaaaaacttagttttgaatccgattttggacaaaagagcaaatgtcgggacacgccattgccggatagtacatagtaccaccattttttgttcaattttcttaatttttgctaatatgtcatccccaaaatccgaaatttagtcatttgaaatcaaatttatttacctatcttttccaatgaatttccttctgtccatg

SEQ ID NO: 105187 - DNA, 73 bp, Heterodera glycines
aataattaattactaattacgtcttcactcccatttctttatcatttttgatcattctttgctattttagatg

SEQ ID NO: 105188 - DNA, 475 bp, Heterodera glycines
  unsure (1)..(475): unsure at all n locations
ccccccccncccccctcgagggagtatcgaaaaatagccgtcccggggcagttattataggaaaaacggtagaaagaatttattggtccaaaagcgagcgagtacagtggaccatgcttgggtgtataaatctaatttccataagataaccgtttcgggataaaagtgcatgaaaaaatgtgccctgccactcgcttagcccattttggcattgatcactgccaacttttttggcattgccactacctattgaaattttatgcctgatgaaaatgtatagaaaaatgtgcccgccctgccactccctcacttaacccattttagcgtgatcgctacaaaattggatttttatgtttggcgaaaagtgcatagcaaattcattcaaaatattcattcatttttattcacaaattaaatcaaaactctctcattagaaaagactgcttctagtgaaaaagaattttttttcaaaatg

SEQ ID NO: 105189 - DNA, 694 bp, Heterodera glycines
gaaaaaaataaggacaatttacaaaagtcggtgaattttagaatggcatggcaacggaaaaagggaacactaaaaacaaatggtattttgattttaatatttttcaacaatttatttgcccctaaattacccattttaattcgctttgtctgtttgatcagtgatcagggtcttctgccgtcgttcacttgccaatgccaaaatgatggtcgttttcttcctctgctaccgcttctgtaacccttcgaatgtgtcgagaccagtaattaagtgccccccgccctcggggcattcataaccattccaagtaaatccccccacccccccccctaccgtaccctttccttctctccccatttgctcatccatcttccttcttctctcttgtgtaaatattatttgtgggctccaatgcgactgacaacgagcggactgtgcgttggtcgttctgtgacattcgaattgcacttggacaattagtccatttttgttaattggcactttcactagtgacgcaaatgaaaatgatcactaataacttgcgagaattcataaggcaaacaaacaaagaaagggagaacgaatttagcatttccatcggaaaactatcaaaatcaaaaggaatacataaatttgtaactcatattaattaatctttggcttgcaatgaatagtggacaatcggcccaaaatg

SEQ ID NO: 105190 - DNA, 231 bp, Heterodera glycines
ctcggtgtgcgcaatgccaacgtttctatgcccgtactcgaattgctcggtgattttttgtacaaatgaccattgattgcattattttaaacaaaaatgctcgtgaatcggttaaggtctttctggtcttctcccagtgcatccacgaacctttctccgggcgcgaatgaaccgattgaatggtaaatgccaatggatgcttactgggataaattttcataattaaaaatg

SEQ ID NO: 105191 - DNA, 155 bp, Heterodera glycines
ttctccgctctctccgattgattcttcccctctctctcccccccccccactttttctaattgctttattcactcataattttccctcatttattctcttatattttcccaatttccccctcccctttttcttttatttaaatcgttctgagaatg

SEQ ID NO: 105192 - DNA, 109 bp, Heterodera glycines
atttttaaatttgtagatttcgtcagcagtgccatcgcgaacccaaagaccatagggaagaaaaggcgaaaaacgaacattttgtggcggcgaataatcggagcaaatg

SEQ ID NO: 105193 - DNA, 452 bp, Heterodera glycines
ttgtgcataaaggattgtatttgacgcattctcggaaaaaaagggaaaagcctttcaagtaagaaaaaaaatggaccccttgaagagtcgtggctagagacaggcatggttaattattcggtctctaatttaggttgttttaccgaaaaacagaccaaaaatttggaataatttaatgttaaattctgaaaatttgtaaatttggcgattttactgcaataaatcttgcagagataaataacattgaataatatttaatattttaattaattctttcggcaaaaaatatcataaaatttcattttttatagtgttttgatttaatcaggtgaaaaaactaaaaattggattaaaagaaaaatgagtttatttttgggggggtggttcatattttttaccgaaacatttgaaaatagctgtaatttagatgcattctgaagagcataacaatg

SEQ ID NO: 105194 - DNA, 1003 bp, Heterodera glycines
cacagcaaaatgtgttttaaattcattttaattggctaataattttcgctaattagttttatttcaattgtaaaaccaatgaatgcttttctcattttttgcaaatttttaaaagtcaaagaattccatcattaaaacagacaataaagccaataaattttgtgtttatgtttaaaaatgatattttaaatgatgctttcactgtttaaaattgattttgcgagtgctaaattaaaattaaattaaaatcaacataatttcaaatttaaattttcctctttttccccaattttgttttgtttgttttgttcgtcgccctcccctgatcgatcattaatttcggttgggttgtcacaaacactgatcgcccgctccacccacccattgactttgtttgactctccgtccgatcacagcccccccccctttttatcacttatcaccgccaatcgccgtcctttcattcgttcgtccgttgatgatgctccatgtcattcattatttaatgcgttttattaattagtgcttgctaattacttctaattatctaatcccctttctttgttttgtcactcccctctctttgtttttcatttttaattaattaattaattttgtttatttattttttgctttttgaattttttgttcaattagtgcctaaatgttatgtcttcttcgtcctcgtcaacaaattgcagcgtcatcagcagcccatttaagctgaatccgtacaataacaatggcaacgacaacaataacaatagttttcaacaggtaataacaagaaaaaaatcccatttgggtgcaagtttaatgaggctaattaattaatatttgtgaaattaatgggcaatttattcattagaattaatacgtgttaacaaaatttaatcatgcttttaactcaaatattattatatgttacttatattcccaaaattaaattgccgttttaaactacgatacattacggtagcatgagtacgcgtccggatggatg

SEQ ID NO: 105195 - DNA, 1003 bp, Heterodera glycines
gttttttaactatattaaattatcgtgatttactcaaaattggaactcagatttttaaaattttttttcttgcggcacatttttcaaaaaaaaacttgatgaatgtgcgaggggagagttccggcggtgccgataggcgccgccgggaaaattttttgaatttgaatgcaatttgttaacaaattagccaaatttttcagaaatttgcgagttttagatgaaaataaggcattacccccaaatcagaacatttcttagaaacaagaacataaagaaaccctgtattaatcagaaaaaataaattaattaaaggaaaacgttagccggaatcgaactcagacaaaagtactgttagtattgaagcactatccaccaatccacaaataaaataaaaaacaagtaaaatttattttatttcataaaaatttctcgatagttaaaaaattacaaaattgtctaaattttttgccttatttcccacgaatatgccattcttaggggtgtattttcacccccgtgcccccgcgggggtgaaggtcgcgggggcgggggttgcgggggtcagagtcacgggggcgggggcgggggtgagcccaaaaaacctgtcctgcccccgggggcgggggcgggggcggggctcgaaccctatttaaaactattaatcggtgactcaaggagctgaaacagcaatgattatgatcaattatttaaatataaaaagaaatttggaatgatcacacacttattaaaattaataaaaaatattttaaatcttcaaaattagaacaataaaaagcattaactatttaaataaatatttttataataaatagcaaaaacccaaaaataatataatgttttttatagcagtcggacaataagctattagaaaaaatgaaaagtcataaaataatattttttggttttctatgtgcttttgtaaattgtgttaggaaaacaatgctttgagatcgtcttattgaccgatcgtgacctgaaaatg

SEQ ID NO: 105196 - DNA, 883 bp, Heterodera glycines
aaaattttaatattaattttttttctttgtttttgaagtctcctggatgctgcttccgccaatccgagtggtgatcactgatcagaaacagtaaaaaacgaattgattgattgtcagatacgattatgagaccgaaattgttggactttgtcatttaaatatagttgtacaatatttgctttttttgcacatgaatttataaaacgatataggattcggctaaactttgtatagtcaacccccagaaaaaatcgattagcacttgcaaatttaatgtttttcattttgttgcgaagtgaataggttttttaaatcattaaaatgaagagatagtacgtcaaactgagagaaataacagaaaaaaggaatcgacgagataatagtactaggcttttttctgcccagtgggtggacccatatttattgttcttgcttagaccttgtttgtttgtacatttgtagctttgcttttaattgactacaataaaaatgtgtgttgccatggcttattaatatggaacggatttttaaggggcgaaaaattccaaaataagggcgaaaaaatcgcaaagtaagggcgaaaataaggtcgaaacgccaaaataagggcaaaaacttattttaagggcgaacatctaaaataaggatttctaaggtcgaataagggcgttaaaccgcaaaattttcgaacaaaaaatatgtttttcgtgcttttctcgtcgagttaaagccgcagaaaaaataaggaaaaacttaaaaatccgttccccacttattaattgattaaaattttgtttttcattcaatagtttttccatttttatccacttaaaatatttatttgtaattaaaattggtttaagccattttcacccaaaatatg

SEQ ID NO: 105197 - DNA, 484 bp, Heterodera glycines
gtgtatatattttttggattttaccgggttttttcactttcagcacactaaaaataaatatgaagaattttgcaaccttttttgtttttgttcagtgatcttttgccttctttttagctcacccattgtcattttcccaatgaaaaaacaattagcctaccgaacagggccaagtgctgttaaatcgcataaaacaaaaaaggtagaattttttgtttttttttgttttttcaaagttcctatattaaagccgccttgtgagcataggcattggacccaaatcaaattagaaagtgaagatcatcttctgtatgatctgatgtacgatgggaaaacttgcgaattcacccacattgaacgcacttcctattcacacacttgcaaacgatgccgatcctatcataaattttgccttgttcgatactccgttctttctgatctgatcaccccctggcagccacgcctataaaagcacaaaaaaatg

SEQ ID NO: 105198 - DNA, 889 bp, Heterodera glycines
gggatgcgacttttagtgacgaaaaatcccaaaatagttaactaaaatagtgagtaaaaatgccaaaatagtgagaaaatagtgtcaaaaagtccgaaatagtgacgaatagtgacaaattttcagccaaaaattgagcaaaaataatttttattcactatgcagttgcaaatgagtaggactgggatttttgagggcaaaaaatacaaaataggttcctaaaaaataatttttagaattaaaaatttttgcaaagaaagtgaattttgtgaaaaatttttcatttcttaggagtgatttttgaaaatttttatgtcgattcttaggggtgtattttttgaaaaaaaattttaggtcgattcttaggggtgtattttttggttttattgcgtttttgttaaggaattttccaaaaaatgttgaaatagtgaaaaaatagtgacaaaacgccaaaatagtgatttttaactattttagtgacgaagtcgccaaaatagtgatttctagtgacgaaaagtgacgtccaaatgaaaaaattttaacgcagaaatgcgctttttgagctcctttcttcaaatcaattgagcaaaaaatttagttaaaacctaaaaatcgcatccctactgatgatgatggtgatgtagagctggatggagtcggagatgacgatgaatttttcatttgttagcactttcaatgtcgattttgtttgtttttttgaaaaaaattgacggcatataattttcagaaaattttatttatccccatgggggataaatggagactgggggattatttttcaaacccttcctagactgggggataattggagattgagggattaatggagattgggggataattagagcaaatacggtaggtcgaaatg

SEQ ID NO: 105199 - DNA, 476 bp, Heterodera glycines
aaatatgtataaaaatatgtacatttgtaatatgtagaaaaacccgaaatatgtaaaaatatgtaaataaaagtcccaacttttgttctcaaacacaaaaaaataaagtgtttttcctactatttagagcatggagaagccaggaaaaaatatctatttacataaaattgccagccctaataatagtagacgaaaaatatgatatttgatacagaagaaaatcaggacacttgggagctctgacttttctctttgcattttttttcattcaattatacctttttaacgtcgaatattagctgattaaaaatcttaatagcaaccattttacatataagcttgggtatgtgtaatgtttggcaggaaaagcgtgggttaaacgtggccaaatgcttttaaaagaaaatggaaaaaccatcttaaaattatcattttctttcacaaaataatattaatttcagccgttcacaaaaatg

SEQ ID NO: 105200 - DNA, 1003 bp, Heterodera glycines
ctgacaatcgctcatgtctatctcccaaacatcttgaaatgctacttatttgcaatgtgaatttcaataatgatttggttaatattgtttactttttggataaaattttacgattttacacccctaaatttgaggatttttagtgcctattttccatttttttattgcctattttgggggttttttagagcctaaagcctacctattttggcggtttttagtgcctataaatgtgagccctatatattaccatgcaaagtttcaccagctggtttaaagtttaaaaaaggtaaatttttaaaaaattaacacaattaaaatttttttgaatttggtagactatttaaagttgccaaatatacatataaaaaaaaatgcacataaatttttctaaattgagggtaattatccaaagtttcttcaaattcgtaaataagagttaaaaatctcgaaaatagctaattttacatgaaaaaaatacaaaataagctaaatttttaattttgaagaaaatttattaaaaagtaaaacttttcctttgaggactttttttcttaaatttctaatttttcattttcgaaaaataaaaaatttagttttttgaaaatttttggtccaattcggtcaaaaaggctgcttaatagagtgtgccatttaaataaaggatttttttagaaaatgccgaaatatccacttaaatcacgaaatatgcattcaaaaattcatgtattgtaaatttcgtcctataaggttcaaactaaattaaaaacattttttttgcccatttcatgggtattatggcgaaaagttataagcaataaattttctaaaaactctttttttgagtttttttctgccaataatttttttgaaaatgcacaaaattttttttgaaattttgaaggctaacagagagcatttagggttaccgaatgataacaaaaaattaaaatttggttacgctttttcatgggttttcagttttggctttccatagttcatg

SEQ ID NO: 105201 - DNA, 191 bp, Heterodera glycines
tttggtatcggataaccaacagccccacatttggatattcgctatgccatttttgtttattcgtatttgtttcccaactctttccatgtttggttggcaaatatatgaagcattctttttcattacataaaattttcataatttttccatttcaattcccatatttcccgtttccttaggccttagctatg

SEQ ID NO: 105202 - DNA, 350 bp, Heterodera glycines
ttaaatttcagtttacccatatttgtttatttttgcaaaattttaagccgtctcgccaaaaaaagttgcaatggattcccaaagacgcaaatgaccgccgcaactggaagttgtgcgtcactttaaaagcggtacggttgctttaacactccatgttgcattttgggtcaaattttgaaaattttaaggaaattttatcgtctactaatttttcgaaaaatgcacccattaaaattttgagatttttcattcggaggacccgcctataggcctgggctttcaatatttctctcttttgtcagattatcccttcgctctccccactttctgcgccttctccgcccccaatg

SEQ ID NO: 105203 - DNA, 562 bp, Heterodera glycines
ctttcaatttgaaaaacgaaatttaaatttaattttttccttccaaattagcatattaattaacaaattaataaaataatacatcatcatatgttttgttctgctttgatagaaaaggttttgctcttgctgcttgtgtttctgcaatgctgcttcaccaacagttatggcagtatggcaattaaaaaatttttatttttaattatctaacaaaccctacggtggcccgagattgtgaattcaattttttgtacagtatccatgttttaaaattcaaaaacaaatcgcaacaagtcatttttagacatggttattccacacgttttggacttggtgtatttcgtgaagacaaaagtttttttaaattaggcctctctctattcggggttttcgcccctaaaaattttcactcctattaattacaagcaaaataatttgaaaaaaattcatgcaccgcgtacattcttccggaatttctcgttttcatattgttcattttttccaagaatatgattgttttgtgaccattcgtcaccgtagtggcacaccgccggacgaaatg

SEQ ID NO: 105204 - DNA, 214 bp, Heterodera glycines
tcatcaattattcataaaaagataagactgcaggtcaagcggggatcgaacccccagacccccccccccccccccctcatctcatataacccctaaaagagatgaaagatgatcatttctcctttttttaatttcctgtcattccttcctgattaatttgtgtcttttctttcagttttcttttcataattgtcaatttttttaatcttcaatg

SEQ ID NO: 105205 - DNA, 178 bp, Heterodera glycines
cgtttgtttaacggatttgttcattttcacgggcaatgttagccttttggacaacatttggccaatgttccgcaattctatgtgtgcgatgattttgaataccatcgcttttcgtcgtttgcgtcaattggccccgtcacttctcaacgattgttcattcaattgaaccacaaaaatg

SEQ ID NO: 105206 - DNA, 595 bp, Heterodera glycines
tttttggaggaattgtcaggagaaaaagtcaaagagagagagagagcgaacgaataataataataataataatgaaagtggcggaggaagagcaaccacttttatactaaattttgaagttatagcaatttaaaaatcacaaaaaacccgaaataggcaaaataggcattataaaagtcattgtagacatcccaaaccaagcggaaaatgcgttttttgtgcttatctttgcgtatcaagtgcgcaaaaatttaggcatttgcctaaaaaagaagccctaattattagattacatataactgtaaatatgcaaattgtgtaaaaataattttattatacattcatcatttgttttcttctctctttgttcaggtttttctccttgacaatgccttcaaaaattgtacgctttcacattttttacaaaagcataaaaataatattaaaatgtgtttttgcgattgttttacttaaatgtcccctctttttttttctttgattgcattgttttcatatgaatttttgagaaaagaaaaagcccactgaagtacaaaagtgccgaaattctgtcttaataattgccttcaacaaaatg

SEQ ID NO: 105207 - DNA, 1003 bp, Heterodera glycines
ttgataaacgtttatctgaacaggatcgcaattcattctcattctgtagcaccttttgacacttttttttggcatttttgactgttttatttgcttaaatcgctttttttgccgatcttcaaaaataacaataatttgtcaccatatttagaagatgtttttgagcattttgacgatctgtactcaaaattgctaaatttgccgtctgaaagcatggaaagaatgttaattgatgaacaattggacaaaaatttgaaaacaaatttggaattttgtattttatatgcaaatatcaaaaatataatgacttcaattaaagtaacagaaaatgagcaaaaaattatagaaaaagaacagaaggcctttgaagaactcttcagcgcaatttcatcttttagcaaaatttcccagtatgaaacttgcattctgtggcagttttggcgcggtttgggcaaattttttggtttgtgataaaaaacgcacgaaaaaaagttgtttgttttttttttgttgcggggttgtgttatgctacttttcgagttattagagccaattttataggttatttttagagcctaaaaggcctaaaaaattttgaaaaaaaactattttggcatttgcccaaaattattaggaaaatgcaataaaaacgaacaatacacaacttagaatgaccctaagattttcaaaaatacatcccaaagaaatgaaaaattttctcaaaaaattgatcgccaaaatctaatttttttatttgacaaaaaattttgattttaaaaattatttatctcaatattgatttggcttagttttgtagctttttgaataaatttgtcattttacacccctaaatttgagactttttagtgcctattttacatttttagtgcctattttgggggtttttagaacctaaaaatattagccctagtgataaaaaagcaaaaaataattttaaaaaattacataatttttgtttcttttttcagtggaaaataaaatg

SEQ ID NO: 105208 - DNA, 960 bp, Heterodera glycines
  unsure (1)..(960): unsure at all n locations
atgaagtgtgtctgtccctctccctctctctaattttcgaacaaattttggggaagggaacaacaaatcactcctttttctctgttgttaattgtgttcggccgtttcagtctcttattagagggcacaattttttatttacatattttttcctcaaaagtttgacatttgattccgttgggttgaaatgtgtaagggaaagagattcaaatgtgaatgaataataacagagaaacagacatatggcggcacatttttgtgtttgtgtgcgttttattgttttagttttatgttggggaaccgcgttttttttttgtgattatgacaaacaaaacagaaactcagaggaactgaggtgaagaaaagactgatgagagtgacaaagaaagcgatcggaaacgaaaatcatgggaaggaagtgagagaaagtgagagaaagagaaatagagaaagagagagagacgagaagtgatatagagaggaagggcgaagagatgaagcgtgagagagagagagtgagagagatagagagaaagcgatcggtgagcagcacaaaagccgagcgctgaaaagaaaaaaccgctcttcaaacagttgatggaacagcagttcagcacagaagatgaaattgagtaatgctgatggtgacgctttttgaggaggagtgaaaataactgcaactaccgtattttctanatttaaaggccctcggggatttagggagtatacggtaatggttgtttttgagagaagtcatccgagaaggagggggacggacacattaggtcaattatttatgatagcatttacctaattggattacgttcccacccctccccccccttatcgtttcctctgctctaaaaatttttaaaaaacctaaagaatttttcaaaaaaaaatttaaaacattttttatgagattttaaaaaaaattcaataaaatcaatcaaataaatg

SEQ ID NO: 105209 - DNA, 689 bp, Heterodera glycines
  unsure (1)..(689): unsure at all n locations
gttttcggggcagtccccctgaaccgatgcgcccagatttatggggagaccgaatccttccggaatagcttcactatagcctgtactttaattctgcgttggatttttgctccccataattgtttgagtaccccaaacggacacttgaaaaaatcgatttatttttgttttcggggcagtccccccgaaccgatgcgcccagatttatggggagaccgaatccttcgggaatagcttccctatagcctgtactttaattctgcgttggatttttgctccccataattgtttgagtaccccaaacggacacttgaaaaaatcaatttttttgttttcggggcagtccccccgaaccgatgcgcccagatttatggggagaccgaatccttcgggaatagcttccctatagcctgtactttattctgcgttggatttttgctccccataaattgttgagtanccccanacggacacttgaaaaaatcgatttttttgttttgggggcagtcccccccgagcgatgcgccccagatttatggggagaccgaatccttccggaatagcttccctatagcctgtactttatttctgcgttggatttttgctccccataaatggttgagtaccccaaacggacacttgaaaaaatcgattttttatttcataaatatttttttcagaaagtcatg

SEQ ID NO: 105210 - DNA, 311 bp, Heterodera glycines
  unsure (1)..(311): unsure at all n locations
cggaaaaatgngaatatcagatggggtgcgctctnttctaaaaattcctcttttcgtctaaccatccctccctattgtgcactatttcgtttcaaaattgaataattttttttggctttttgaaataaattgtgaaaaatatacgaaaattattttcggttttaattatgctgtacaatgcttttaagccccgccgtgcggcggctccccttttgtgcactattttagtttttaaaattggttccggactttttggctttttgaaataaattgtgaaaaatatacgaaaattattttagcttttaattatg

SEQ ID NO: 105211 - DNA, 1003 bp, Heterodera glycines
ttatttctctctctctcacttatcaattctcggcatttgcatttcatggacattttacgttttttggttttgatgcctttcattctgcagcattttttcgtaatgatcaccactaatttactaatttgttggttgcatttgctttaattggcaattaaaatagttatattgaaatgctcatccaactgagcttagtggagaattttgaaaataaaaatgaaaatatcagcctttaaacttaatccgtctctttttggcgggttctcactgatcagtgccgattccttaattctgttgcatattttccatttgcttaaatcaaatccatttaatttgaaaattaattggcaattttattagcaattcaaaattattcgtgtcttttataaaaatagtaattgcatcaatttccgattttggttggtttgatcagtcggtggtttgtgccgtggcggtgcttttgaaattgaatttgttggagaattggcatgacgaagaattgaattcaattttgttgcctaattagtcacttttttgcgttgccccccccccccctaattgatcgctttctttctctctctctctctcactttgttcatattctctctctttttttgttgttcgtttttattgcacatttgcaaacaattatcctcattatcccatatatattatttaatcattagtaatttcttgatcattaattgcctatcaatgatattttgtaattaaaaaatttctttctcttcctctattctctatgtttattttagttaattcgaaaaatattaaaaataaaaataaataattcatttaaattcaccccaccgataatttctgatcacctttcgttcatttgcttgactcattaataacattaatttcttttcataattgcttcctcgttcttttccttttaattttatgcaaaaaatttcacgagaaatgcgcaattttagtagcaaatttcttctttattcttcaattttgaagattttcaatg

SEQ ID NO: 105212 - DNA, 90 bp, Heterodera glycines
ttagagttaaattttaactgaactgttaattattacctaattatgaacaaagtttttgtatgaaatgaacgaaacttgcagataaaaatg

SEQ ID NO: 105213 - DNA, 745 bp, Heterodera glycines
  unsure (1)..(745): unsure at all n locations
caaatttagagtgtttaaatttttntggctaataaaatcctcccgtgattgtnttgtattnataatggtgaggaanttgctttattaagtngtgtttttatagggttgnnattagattgatttgataagtggtagaagttttagaagattttttttcattatgagtgtgaatgttggtggttattggttttctggaattatataagttttgataatttaaaaattttatgtaatgtaagatgattgatttgttttgccgagcaattatcgcaatttgtacaaatattggcgcagcgtcaaaaggaccgattttatattttacaaggtaggtaatctatagagtgcttgctcagctttcagcacaaaaaatcaccgattcagcactgtaaacagcaccaaattttcccaaaataatgattataaaaaacctccaaaataggtgctaaaatggtaatgagatacataattttaaaaaatcaaaatcttgtcaaaaaaataaatttaaaaaaacttaggagatgaattatttttgataaaatttttcatttcttaagggtgtatttttctgaaattttttgggtcgtttctcaggggtgtattttcgtttttattgcatttttgttaataaattttttgaaaattgctgaaaatattttcgaaaattcctcaaaatgacgaaacagcacaaaaaaagcaccaaaatgccaaatcagcacaaaaaccaaaaaatcgagaaatcagcatg

SEQ ID NO: 105214 - DNA, 173 bp, Heterodera glycines
ggggatctctagagcttggacattgtggggacagtgaggagatttatgcggggggagaagcggcatttgcggaggagcaagcgaatgacttggccagtgtcacactgaacttccgttctggaagagtgtgcgattattttcgcgtgtacatttggatgctctggacggaaatg

SEQ ID NO: 105215 - DNA, 309 bp, Heterodera glycines
tgcctcgaaaaaccaacgcgtcccttgattcataattaagggtgaccttttgacctctaaggattgaaaaaatcagcttttaggaaattccttagagaatttaataaaataacctctaaaattggaaatttatgccaaaaatgagattttcgatttactcaatttgaagcaaagagagaaaacgtgagcgttgcgtgttaatgcccttttatcaattaacttaactattgattctagaattgaaattcgttagtttaaacataaaattggagtttagacaatttttaaagtaataattgatttaaaatg

SEQ ID NO: 105216 - DNA, 471 bp, Heterodera glycines
agctaatcaccaacaatcgtccgcaatgacgttaaactagcctaagccatcaacaactgtccgaaacgctaatcacccggctgccacgagtccggaatgacgttaaactagcaaagcatcggccaacccacacaacaatcgtccgcaataacattaaactaaagaaccaaccaaacaacaaatgtccgcaaagacataaactagaaaagcaaacaaaacatgtccgcaatgacgttaaactagagaaacaaaccacgcaaagtccgcaatgacgttaaactagcaaagcatcaaatgtccgcaatgacgttaaactagagaaacaaaccacgcaaagtccgcaatgacgttaaactagcaaagcatcaattgtccgcaatgacgttaaactagcaaagcaccggccaccaaacaaccattgtccgaaaagacgctaaactagcaatccatccgacggtcagggccgaaatg

SEQ ID NO: 105217 - DNA, 80 bp, Heterodera glycines
aatttaatgcatttagaattcgactgaaaagcaaaacgaaaccttttacttgagggcattttctccgcctttttcttatg

SEQ ID NO: 105218 - DNA, 277 bp, Heterodera glycines
aaaaataaatgcttgaaccaaaatatgattttaagtatcaatactataaacaggttctgttttggttttataactcgctctatttacaaaaatagggcgcagaaaatgggttttttcttgaattttttactctaattagccaatttatgattttttaaatctcaaacattctaaaactttctaatcgaattatttaatttctaaaatcctggctggccctttcaataataaaaaatcaaattttacaaagtgggtatttcagtgcctagcgaagatg

SEQ ID NO: 105219 - DNA, 334 bp, Heterodera glycines
tgccgaggatcattttgcttttgtcctattccattggctccacgggatttctctgccaatgaaagcaaatttacgtttcctttaccatatggtgtgctgttgaaatggaacttaaaaagacttaaataatttatatctggcgaactgtttaaatttaaaaaaatcgcaaatttttttatcgaaggaaaaaagacattaaagttaaacaaatttacctatgtatgtatatgtgttcacgcaattaaaagctataactaacttaaccctttatgtgcacttgtatgataatttcttatttgagctttttgtattaaaataattttgctaaaaaatg

SEQ ID NO: 105220 - DNA, 82 bp, Heterodera glycines
ggtgcaccaaaattgatcatttttatgacactaaaaattgtcaaatttttttcaatttgtttcaggcaccaaatttgaaatg

SEQ ID NO: 105221 - DNA, 1003 bp, Heterodera glycines
ggttaaaaattgtggcaaaataatgccaaaaattggcaagaaataaatagggaaatttggcacaaaaatgtgcaaaaatttggtaagaaataaatagggaaatttggcacaaaaatgtgtaaaaattggcaaaataaagggttaaaaatttgggcaaaacaatgccaaaaattggcaagaaataaattgggaaataagggggcaaaacaatgccaaaaaattgcggcaaaatggcacaaaaaactgtaccataataatgccaatctggcacataaataataaatggcaaaaagtaatgggtaaatgggtaaacaaatgccaaagaaggaaaaattaaggcataaataaatgataatggattattgattggcttttccttccgtaaagtgaattaaatgaaatgaaaatgaccaaatggacaaaaaatcaattaataaattgtttattgtctgaaggtgtcaaattacataatgggcatgcgggaaggagggcggcactacaaagtacgcgaccaattaaaaaaattgaattgtttatttggcaccgttccaataaccccgcccccttcataattgatttgtttatttgacccctcctcccgccttctcgccgcccgctctcgccccctgcccccgctggtgacgtcaatttttccctttatgagagcaaattaatgtttattgtccattgccaatgtggccgagtggttagtgcgtcagtctggccgcccccctggggttcggatccgcttggtgcggggaatttttggagaattttaaatgaatttaaattcaacgtctttgacctttaagacgtctaaaataatttaaaattaaataaatttaattaaaataatttgcataaagtcgcgcagtcaaaaaagtcgcgcacccccctgcaataggtttgggtttccaagaaaaagtcgcgcaataggttttggcttcagtactgaaaagtctggcgctcagatggcccgcgatcacttggcggcgctcaaatg

SEQ ID NO: 105222 - DNA, 118 bp, Heterodera glycines
tgttttgcacaacggaatcaattattctaattaaattgaattctaattacccctcatttaaattaattgctgcctttctctccttcaggcaatctttgccgcttctgagtacacaatg

SEQ ID NO: 105223 - DNA, 358 bp, Heterodera glycines
tttttgtatattcttaagaccgtgacgccccaaaaaatgcacaaattattccattcgattttaataagcctggtacagtggaaatggtctttcattttacacagaaaaacaattgtacgaaaaattgccggaagatttaacatcggtggcacttttggaggcggaggacatttccatcgaaagttgttccgttgcttacgttccgatcatcggatatttgcttatggtggcggaaagtacgcaaattccaacggacacaaaagcgctcgtggaaattgtaaaaaagcgcaaataaaaatgtttggagtatagaaatttaaaatccatcccttcacagattttttcttccgagggaatg

SEQ ID NO: 105224 - DNA, 243 bp, Heterodera glycines
agaccaaaatttgtacttaaaaagcgacgagaacaatttgaaattgaagccccattaatttatgtggtgaattgcatggccagaatctcgagattttatttcaattcaaattgggccgagaattctgaatggaaattaaatgtatttttcaaatggggcaattttgacccaattttattgaatggggataaaatgaattatttttattttaatcgatcggcaaaattggacgacgacaaaatg

SEQ ID NO: 105225 - DNA, 449 bp, Heterodera glycines
gtgattcggcaagcgatcactcaccatttaactaatcgatcgatttttcactttaaaataaaattttaaaaatgtttgaaaataggatcgctcactcaaaaaatgggtcataaaaagtttaaaaaataggtataaatccagcaaataaaattctaagtaaggatttagagtaatttaaaaatgtgggtgggcgctcgcgctatataaataagtgcgcgtgtccccatcggcccatttcaatttattcctgtcaaacatttggccatcagtttttcatgtcggataaaaaagcattgtttaagcgtgttatcgcagaggtggacctcactataagcacgggcggcataactttgagcggcccccgcctgtctgttccccgtttcattccgtttgaggaaaacgggcgttgccgagcatgtaaaggaactgaggctgaggtggacacaatg

SEQ ID NO: 105226 - DNA, 621 bp, Heterodera glycines
aattttattcattagcgattaacgggagaaaggattcaaaattgtgtggcattttattaaaaatgataaaccatgccatctatcacaccagtatttattgggtcgactcaagtgttcatagaccagtgatagattataaagtccatttcaagctgcagttacagattacacggcaatctttttaaatttatttataatttgcctcctgtttaattaataattttgaatttttcacgtaaattataatagagaggggtaggcacaataaaggtgccaatttataaatgtaaaatactttgaaaaaaatcaaaataaattcatcatttgtcgagcggatccgatcccatggcaaatggtcattaaaatggaagtgaaaattacaataacattaaactaatgtatctttgcttgtgtttttgtttgatctattttttcgggtgttttagtgaaggcgcgctgtcatttcgtcccgcgtcgtttcgtcccccaagccaaaatgagtcatttcgtccccaaatttctttttatttataaaatatttagtttttaaagtgttaccactaaaaatttttctgggtttagttaaacaaatcataaatttacgaatttagacgtatgatg

SEQ ID NO: 105227 - DNA, 300 bp, Heterodera glycines
cattggccaatcccatcaaatcccatcaattgacaatgccattggctaatccaatcaaatcccatcaattgccaatgccattggccaatcccatcaaatcccattgctattggccaatcccatcaaatcccattgctattggccaatcccatcaaatgccaatgccattggccaatcccatcaaatctcatcaattgccaatgccattggccaatcccatcaaatcccattgctattggccaatcccatcaaatcccattgctattggccaatcccatcaaatcccatcaattgacaatg

SEQ ID NO: 105228 - DNA, 58 bp, Heterodera glycines
aaaaaatgaattaaataataataataataataattttttcagaaattttttcataatg

SEQ ID NO: 105229 - DNA, 53 bp, Heterodera glycines
gtcaataaacttttattattttttttataaaacttaaatattttgcagcgatg

SEQ ID NO: 105230 - DNA, 569 bp, Heterodera glycines
agtaacgaaattgcattaccgtatatgctctaattatagcccatgggggattatttttcaacctcctcagaaaaggggggataattagagactgggggattatgatagagggattatttttcaaaacacctcgtagactgggggataattggagactgcgggattaatagagactgggctataattagagcatatacggtatttttggcagacttgtgtttgtttttaaaataaattttaatttttttaagggaattatttggcaaaaacttatctcaaatttcgattcttttaatttgtaaataaaaattccgtttttttttaacttccatcttcccattaagtgcaattaataaaattatgaaaaaaagcgaaggcaagtacaaatttgtaaaaaatgacttttgcttttgatcattaacaatttacaaaataaatttttgtataaaaatgatgggaaagactgttaaaaggaaaatgtaatttaaatttttcaatttataaattatttttaaatatttaaattcgtattttttttaataattgggtttcaaataaacttaaaaatg

SEQ ID NO: 105231 - DNA, 682 bp, Heterodera glycines
aattttagtgttctttatcctgaatttgaaaaaaaaacttggtcaccctcaatatacatatacttctgaacaattctaatgctaaaaaacaggcactcgcgcgaaaactgaataaaaattttgtatttgaaaaattttgtccaaaaatttttacgttggaaaattaccggtttttaccggtaccggtaccggtggaaaaagttggtaccggtaccggtttttgcattaccggtcagtaccggtaccggtttttttacaattaccgattaccgctcaactctagtcgaattgattatttatttggggtaaagtaaaactccccgaaatctcatcatttgcaaaatattctcctatttggtggtcctcttatgtgcgttcccttttctttcgatccgtcgtcattttatgtcaaaatgtttccgcgccttccgtttttggcaatgatttttcgcctcctattggcacttgtccaacccctcgagcccattggcaacagttgaagctgaactggttcaaaattgttttaataaaatgcgattctcgtgtttttctcatcaagtattatccgtaaaaaataggaaaaccctaaaaatccaggctttatccaacgcaattatttttctgctatttgtgtgacatcattcgaaattcaacagcaaattttgctaattgccaaaaaatg

SEQ ID NO: 105232 - DNA, 283 bp, Heterodera glycines
aattcatagaataagtgcgtatatatatatacttgacatttaaaaaaataatcgattaattaactctgcgcattagcattttctgcacatgatgctgggtaatagtggagaattggtgtcccggcgaaaaataaatttaaaaattttcttttctagttttctatgtaaaaaaataggctgattacggatctgagtccagaattcgaaaaatcattgaattagtgtatgatttttcatcaagtacttgatttttcttaataaatgttcatgtcagaaaaacatg

SEQ ID NO: 105233 - DNA, 107 bp, Heterodera glycines
ataaaaacaacatcaacatacttataatcaatttactgtagagcagtgttgtttttattccatgttcgcacgcttgctcctgtcaaggttgtgccaaaaaaataatg

SEQ ID NO: 105234 - DNA, 1003 bp, Heterodera glycines
aaaagaatttttttaatttaagaatcattttttgtttattttttcataaaaataaaaatacacccattctaaaacgggctgatttcactaataatgacctaattcggcataacaaaaaaaattgccaattttataaaaaattaaatcactgacgaaaacccaaaaatttcctggataaaaaacctttttccgggcagcaaaatccggcgccattacaatggtaacccttttggcactcgttttttgcttgggttgaagaacatttttgtaaaggctcaattagatttgggcgccatgtttcattgcactgtgaacctaaaataattaggctaattaatgctaattataattttggaaaatttaatttgaaacattcaattaattttttgtgagcacttatgaaatggtcaacgtacacaaaaaaaaattttcaatatttttttaaatattttttttcggagaaaaagttttgaacaggaaaattttttcttaaaaaataaaatgaatattaaaaaatattatgtttttatttctttaaattttccaactttttttctctgaaaaataaatctttttttttttaaattttgtttacaattaattgctcattgtacgaattgtcaaattgactcgaaaaatggtatcaggcccaaccgaacaatattggcaatccaataaaacaagatcccgtcatggttttcctgtaattttggctatttcaacaaaaacatcaggaccggtacccacattttatacattaagtataaatatataattatatttcacaaattcaatttcttatccactcttttccactgaaaataaaattttgataattttaattttaaatttgaaaattttttaaattgttacataaaagaatacgctaaacactgtgaaaaaaaaattaacaattaattgacaacagcacaaattaaaaaattgcggcgacgcttttttctaattatgatgaaataattaaataaaaaatccagtgaccatg

SEQ ID NO: 105235 - DNA, 113 bp, Heterodera glycines
tttggccgatcgaacaccgacaaatcaaacagaactaaggcgaattgcttatcgaataggagacctttttcaggcaactaattggtcattcaggcaaaagtaaatgggaaatg

SEQ ID NO: 105236 - DNA, 180 bp, Heterodera glycines
  unsure (1)..(180): unsure at all n locations
aaatccgtgaagagatttctgttnggcaagcagtaatttttttaaattaaaaatgttataattttattattaaaattgttttcctatttaattttaattgttttttcggcactccgttggaccgaccaaaaatgcagtgaaaatggcattgtattttcagcagagaatcgccgtcaaatg

SEQ ID NO: 105237 - DNA, 543 bp, Heterodera glycines
gatgttgctatcaacacgatgtgtgttacataataaatggcaaaaacgttatgattgtgatattaacttttgcatttatctttataaaactactgattgctttctaacaaaagtttgctagttttttatatttttaaagatttattatgtttaggatttgttatgcttgtcagttcatatttttggagagagttttaaagagcaataaaaattcgcatttttactatttttaaattatataaaaaattgataatcacgtatatgtacaatattttgtttacattgacggatttataaaacgcgcaagcacggaaattttatatggtttaaaaaattttttttctggtctttaaactatataagtacccaaaattactttagacttttagaatcaatataaattaataaatttagcattttggttgaaattagaggcgcatttaaattttgaaattctcagatttttcaaatatgttatttttgcttttccagataaaattttggtttagacaaataacaaaaaagattttggactgactaatg

SEQ ID NO: 105238 - DNA, 117 bp, Heterodera glycines
cttaattttgaatattgttgattcagaaaccaatgcttttaggaaataatattgatatgttcttttgcctcatctacaatatttaatttaattaattagcttttactaattaaaatg

SEQ ID NO: 105239 - DNA, 79 bp, Heterodera glycines
aagcgatgtccaattagtgaaaaggcggcgacggatcaatgggaaaatgaaaaaaattgggacgacaatttgaacaatg

SEQ ID NO: 105240 - DNA, 1003 bp, Heterodera glycines
  unsure (1)..(1003): unsure at all n locations
aataaattctttggagctctttagtgaatttatctctccgcctaataaagataacataaaagattttttatcctaaattatacaatgatttactgtaacagaaaaatgacataacataaaattattggaaaatgaatcttcagctaaattgaggttaattgtaaacctcttcgcctgctacataaaattgttgaccaaacgccaattattgctcgagtgaaaggcacagtacggaatcccaagcgagattttgcggaatatccgtcctgcagcatttgatcaccgcatcaccattgatcagacttgtttgatcggagtacgaccgtagtgtcagtcgacttgatatttaagtgtcaaaagtgatcagaaaaaatatccggaaatacatataaaatttgaaaaatttccaaaattttcctcacaaatttataacagattaattattatgagttcaaataagcccgactttggaaaaatttaaattttataaacaaccgcttaagaaagtgaattgttttaataaaagtttaagagatttcttccaactcgactatcaatttctcaaaagttttaaaaaatagcgctgaaaatatgaaaaggaaaagtaactaatttgaatgaacaaatctgacacccccccccccattaggcgacgacctttctttgctatcttcacactgtttttttacggacgcattttttcctaaaaactattggaaccaaggcagggggccaatcacattttacgaacgacaagcgacaaaaacggacgacaaacgaacaaatnttggcatatgtcattacgacaaaaaattatgtccgtttgaataagccgtttttccgtttgtcgttcgtaattgtgattggccccagggggaggagtcccggcgttgccagctttcagtgacggtctcatcttcaagtctaatttcaaaaaattttcagcggcacctaccagcactgccggaccctcctgttttccaaaagttttattgaaaaaatg

SEQ ID NO: 105241 - DNA, 114 bp, Heterodera glycines
ttgtgatcgtgttccttctttttcagttatgtcgaccaaaatgtcatcgcttttctccgccgttttcatccactgttggcccatttgaacattaatttgtccattgcggcaatg

SEQ ID NO: 105242 - DNA, 80 bp, Heterodera glycines
tgggcactgcactaaattgagtccgtaattttacccttttgatgttcagaattgttggcaagtcgctggccatgaaaatg

SEQ ID NO: 105243 - DNA, 198 bp, Heterodera glycines
tttttaaaagtgacgggaaaaattgcatagattcggcaccaattggatcccaaaggaaaatttgaacagatagatgacaaaacgacaggaaccacgcttaaattagaaaagttataattttttgttatttttttcgtttaaaaattttgatttaattgaatttgatttaccaagataataaagaaactctggaagatg

SEQ ID NO: 105244 - DNA, 60 bp, Heterodera glycines
ggttatgatttttaattgtaaaattaaacaattcaaaattcattcagcttttattgaatg

SEQ ID NO: 105245 - DNA, 140 bp, Heterodera glycines
ttcagtggttaatttgcaacaatcttttgagtttttcctcatctaatttgaatccattaattaatttaaccccactcccattttaggctatttgctgcttatgttggccgctccctttctgtttataattgtgctgaatg

SEQ ID NO: 105246 - DNA, 69 bp, Heterodera glycines
ggtcaaattttgtgtcgtttattatttttcttaatttattttttcaatttcagtgagctgttgaaaatg

SEQ ID NO: 105247 - DNA, 336 bp, Heterodera glycines
ttgctcaattgtcgtcgttttcgttgtacacagagaagggatgattgatgaagatgaattgccgataattaataatggaaaaatggcaaccaaatgaattttttgtgccttttatatatgaatttatccgaaaaatttgactcttccgactaaaaaatttgctatttaaggcccacacattttgcttttccacgttcattccgttcattcattccatccacttaattattcgtcctcctccaccgccacttaaatcgtcagtttatttaggtaattaattgttttgttatgtgcattttcattgtgctaattgccccccccatttttcagcgaatg

SEQ ID NO: 105248 - DNA, 580 bp, Heterodera glycines
  unsure (1)..(580): unsure at all n locations
ataaggaaaaaatttgatgggttgtgggtggctttattaatattatttataattacgacnccataaacgcacaaattaacactttttattaaaaaataaattataaatgattacgatattttatgatatatttatacaatagaattacttagaaatttaaaattttaatgtttttatttaaacaaatgcaaaaattcattttcttataataaaatgaattttattaactattttacttttaaaatgatatattgatttttattttttcataatttggtcgaaccctattagaatagttgctttatttatgtaagcttaatttaatagattcataacaaatctgacttttatgagtccaatcagactatatgagtccaataaaatatttatgattcccatgacaatttatgagtcaaatcattttttgaatccaatgatttttatataaagttttgagtcgaatttttatttttcaaactgtcagcctgaaattgcaaatacacaaagtaagacaaaataatagtggatattggtatcgaatttcttcaagaatattttagaaaatttttgaatttacatg

SEQ ID NO: 105249 - DNA, 434 bp, Heterodera glycines
gagtataaaagaaagaaacctcatgccccaagccatcagaccataatcggacgacatcatcagctagccaggaaacaaacgtattcgttcagacgcatttggactttactaaataaatggctttccataaaattgataatgacagtgcaaactcaatcaccaatgccttagacttttttcgtattccacccaccaatgtgagcgtctcttcatcaaaagtgtttgagctgcttcccagtaacccactgacggacactccctaccacttcaagcttcactccagccaaaactttattgatttgtccaaatgctacttacaaagtgaattccgaattcgcaaagaaaatgagcatggtcagctggttgacctcgcagctgacgaagttgctccgatccagatgatcggtcaaactttcatccgaaacatcaaaatg

SEQ ID NO: 105250 - DNA, 1003 bp, Heterodera glycines
attgtttttggcgttatgtccctcgcaaaatttaaaataaacaattctggcaatccataagatgccgaagggtttataaaaaaaaatttgtcgttcggcacgttaaaatcgtacattttccaagcatacaaaattgtcataacctttttttttgatttcaataatcaaaacaaaaattattgagcatcatttggtagcgctaagtttttccaatagcctgaaaaatcttaaaaaattctaggttttgaaaaaaaaagttagacagaaaaacaattgttgaacagctttttttataagtgcaaaaatatcttgaaaataacgaatagagaaaataatattattttaattgacaattgtaaatcaatcaagatcaatttagttcatcatgactgttaagttgggtttagggttgtccaaaaaaaatttcgaaaaatccaccccctcctctgaccctacaaataaatgacacaagaaaaacgtgactggaacgggcagttcgggactgaattggctcccataggaaagtgatcggaactaaactctttgtcatctcgagatcattcctcctccatttccggtctcgagggcgcacagtgaaattttcttttcaaatcgcattttaaatttggcggcggcggcggacgctggcgcaaagttcagttccaaagttccgcgacagtttttaagttcgcgcgcggggatttggccctcaaaaaaaacgccacaaatggtgggggcacattaattaatttgggacttttcacaaatggttttgcggttgtgtcccatgcgcgcgcgcgagcgacccccgccaaacaaagacaaaacgcacacaaaatggtggggggggggcggcgggagggggtaggacaccggcttccctataggctgtactttaattctgcgtaggatttttgctccccataaatgtttgagtaccccaaacggacacttgaaaaaatcgatttttttgtttcataaatatttttttcagaaagtcatg

SEQ ID NO: 105251 - DNA, 53 bp, Heterodera glycines
ttttgccactttattctttccttttttgccctgtaggcactcgtccttacatg

SEQ ID NO: 105252 - DNA, 528 bp, Heterodera glycines
ttaaaaaataggtcgactacaacccaaaatattaaaatgatggacgatatatataattctatacaaaagaatcaacaaattgacataatctatattgattttgtcaaggcgtttgattctgttccaattgatttattacttcaaaaaatcaaaaagattggaattgaaggaaaaattcataattttttaactaactttttaaaaaatcggagttttaaggttaaaattggcgaggaattgtcagaaagtttcagaatattttcaggagtgccccagggaagtgtcttagggccattactctttttaatttttataaatgatctgccgtcctttattgcaaatgaagcatcatcagttggcataaaaatgtatgccgatgatgttaaattatattatacacatgaaaacgatgaccattcaaattagttggataaagcaattgaggctttggaaaaatggtcaaaaataaatgggttagaaatttcaactgaaaaatgttttgttttatatttagggaaaaataatatg

SEQ ID NO: 105253 - DNA, 175 bp, Heterodera glycines
ttcgagaatggcatatgtaatgtgaatgtaggtcacacttacgaccgaaacaaataagagggaccatcttattaaatgataaataaataaataaattacggatgtataaattaaagaggtatataaaaggtggcaatttttggatagattcattttgctattttcttgaaaaatg

SEQ ID NO: 105254 - DNA, 955 bp, Heterodera glycines
attcccttaattctaactaatttttaattggctgattttaacaatcagccaactttgtttgttacattatgtttcaatgttttcattttctaatttttgattttcttacaatttgtaacttataatttataattttatcagagctataaatgtttccagatttacgtaatttcagttttatccatttggtttcctcgaattccaattattttaataaaatccaaattttttttttaaaattttattagaaacacaatagggcttgccactctctttcctgtgcatcgtttgtcggcactgcttttctccccggcattaacagcgcctttgggtaagttaatatccgtactaattaattttgttttatctgtcctttgattgctcactttcaaaaattgaatatttaatccagaatttatgtgttagtgaaatgcatttttccgtttgacggtttctattttttgccacggggcacaccttttaaactgaatcaacacagtattttcgtctattggaataacaatgagaaacaaaaaccttgttggattgttgtggtgttttgctccatttttccttccccggggaattgttagtcattttctgtgctccattttttccatttctgtctttcttttttcattatttcaacccattaggtagaaagagcaacacatcactaaggaattaatttcttttcattaagtaattctctaattgcaacaattaaataaattttcgttatttttttcacagaaattctctgtgtaaaataaatgaacggaaagataagaaattcattttcaaagcaaataaccatgttttattgtcgtttgtttgatttttattacctaaatttatttttaatttttaagtgagacaatttgccaaaatttcggcgacccttcgccaaacagtgccaacgcaacagcaaaacagcaggaggacaatgtcaatg

SEQ ID NO: 105255 - DNA, 405 bp, Heterodera glycines
gtcagaatttcgaaaaattttaaaaacaacaagcgttgcattttttcaggttaagttagtccttttcaatggagaaggcctgcaaaatttggagagattatatcgattttagtgcgctaggttcgatgaaactttttaaaatataagcctaaactttttggcctgtttaaaaaggaattaaaaatttttaaaatatttattcatctcccttttgatagaaaaagcatcagagagccttatttaacttttaattaacatttggtgcgtttcagagcactttctgaaaaaatacttatgaattaattttgcaaaaaataaataagtaatgaaaaagtcagaatttcgaaaaattttaaaaacaacaagcgttggcattttttcaggttaagttagtcctttacaatg

SEQ ID NO: 105256 - DNA, 662 bp, Heterodera glycines
  unsure (1)..(662): unsure at all n locations
atcagaaatttaaaaatagtaatcagaaaatacacccagcaaaaaagtgcgtcagtgatactgtactttttaatgcgcttttataacaaagcaaaatggtaatgaaagtacgtatagtaaagacccattacagtatatcactaaaacagtgtgtttacaatacgcttttaaaaatcccaattngatgtatttcgggggacaactntaattaaaagaactaaggcgcctaaatgctcaaaaaaaattcaaaaaaggaatcaatgtgctttttaaaaaacaaacttcacgttcttgaatttttttgggaaatcatttataaaattttgaaaagaaatctttttttaattatttttaatataactgccaaatggtttatttataaaattaaaattttttactattttataaattaaaatttcttccaaaaaattttgggcctcgtaaatcgattttgatctgtttcctacgaaatcaatccctcctcctgtaattgttccccgtaaaaagtagaaaaaaattctgatgaaatccctctgaaaaactctctccgggatttgattggcatgccatgttaattacctcgtgctcactttgccacacatcttccaacatgccattgtggaagttgggttggcccatgtaaaagcggaggttggccaatg

SEQ ID NO: 105257 - DNA, 247 bp, Heterodera glycines
ttaggctttttggagaagcgaagaaaacatctgtgttgactttatagtgtattttaaaggcctacggacccaacaaaacagaaaagccaattggcagaagaatcaaaagcagagggaaatttgtagttgaaaaagaatggctttggattatcttttgggtaaaaactaagagtatttttgttgttttttttgtaaaatttttgttgatttttttttaccttttttgccacttggggcgacagaaatg

SEQ ID NO: 105258 - DNA, 254 bp, Heterodera glycines
cgaaatgtcccagcatcataatgtccaagcgtcataatttggaagattcgaccatgcataccccctaaaattgttgatttttttatgtttgttattttatgtgattatgataaattcttatgaacttcatattctgaagccttagaattatgtaattttaggatttttcgaaaatttttattgggggacatttttactgattttagcttgggggacatttcgacgattggacattatgacgcttggacattatg

SEQ ID NO: 105259 - DNA, 304 bp, Heterodera glycines
catggcttttgattttctatttacggagtttaacatttcacaacaccgaagcattaacattttcatttctcgcttaaatttgaaccccccccccccttctttcccaacagtttaaagtattattaccttgatgtgttttctgtccctgctaatcaccgctcaattataaggctccccgtcgaaactgagccccgcctcggcagtgttcgcacccaagccgttgtgcgtgttccgtgggcacaccgcggacgtgttggacttgagctggtcgccccgcaattatttcctcctttcttccggcatg

SEQ ID NO: 105260 - DNA, 472 bp, Heterodera glycines
  unsure (1)..(472): unsure at all n locations
ttattttttattaataaattaancattttggaagaatcaatttctttaagagttagaatgttgattattatttactaaaatatcccataaggatagttataaataaatcatcaagataaattttggaaaatttcttgatcaagaattaaatgatataatgggattttctaaatgacgcctgaaaaatttgaatttttactgatttgttaaatagttattaaaatttcgtattaattaaaatcaattaaagagtttaaagaaatctgaaaaatgttccattccactgaagttaatattttaagcttgtttaatttatttaaataatttatttatttttaatgataaataaatttgtaaaaaagaactaaaaaatagcattttagaaaattttaaccgtaaacttaggtagttcaaaaataaaactttataaaaatgctctgcaataaaaaaaattaaaaaatgaaacaaaatg

SEQ ID NO: 105261 - DNA, 646 bp, Heterodera glycines
  unsure (1)..(646): unsure at all n locations
aaagttttgaaaaaatgaataaaaagttttatttacttcaagattaccttgnaaccaagaaaactatagaattgaataaatcacatgcttttacgcggcttgcttaaggcctaaccagcggatttttcatggatacaattttgtttttgtttaccctttttttttgaattttccgcccatatattaccaaagatatttgtataaaaattaagaagaaaatgtgaatttttattttatttttattcttttttaatttattttcttttaatcgtataattaaatgcattgaccccgttttatataattatatttaattattttatcaatcattgagttttttcgaatcgtcacatcacgctctctgacccgcccaacgatttttttctcatttattaattgcaatacaatactgttccaattggtaaataaatttaaaaatgaataaccaacctccttttcccaatttaatcccgaaattcgattcgcaatgaatttaatttgtcaaataataaaaattttttaatttgtcaaataataaaaattttagccaaaaagctataaaagtgacaaataaattcatttttgcaatcataatttacgacaaaagtgtgctgctgctgctgctgctgctaattgccataaaatg

SEQ ID NO: 105262 - DNA, 296 bp, Heterodera glycines
accattgatgtccttatttttgagataattatgatctaacgtcctttaaaccatttaaatcaaaaatataaaaaatgaaaatggaataatttttatttaattttttaaaattaagattgcggtttacttgttccaaacagacagctcgctgttcatccaaattgttggacattacattctgctgaatgatgcgcgtgcacttgtgatgccagcctggtttctgctctgggcctccggtgaaatgcgaaaaattgttggcaaattgattttttgtgccaaaaatgatccaaataatg

SEQ ID NO: 105263 - DNA, 1003 bp, Heterodera glycines
cgttttcgcgtgggcgttttcgcgtggccgttttcgcgtggccgttttcgcgtgtccgttttcgcgtggccgttttcgcgtggccgttttcgcgtggccgttttcgcgtggccgttttcgcgtggccgttttcgcgtggccgttttcgcgtgtccgttttcgcgtggccgttttcgcgtgtccgttttcgcgtggccgttttcgcgtgggccgttttcgcgtggccgttttcgcgtgggcgttttcgcgtggccgttttcgcgtggccgttttcgcgtgtccgttttcgcgtgtccgttttcgcgtggccgttttcgcgtggccgttttcgcgtgggccgttttcgcgtggccgttttcgcgtgggcgttttcgcgtggccgttttcgcgtggccgttttcgcgtggccgttttcgcgtggccgttttcgcgtgccgttttcgcgtggccgttttcgcgtggccgttttcgcgtggccgttttcgcgtgggccgttttcgcgtggccgttttcgcgtgggcgttttcgcgtggccgttttcgcgtggccgttttcgcgtgtccgttttcgcgtgtccgttttcgcgtggccgttttcgcgtggccgttttcgcgtggccgttttcgcgtgggccgttttcgcgtggccgttttcgcgtgggccgttttcgcgtgggccgttttcgcgtggttgcatacaaaatagaataattactcacactatattttaccaaatttgttgctcttatttctttttacttatgtaattcattttataattaagtgagtttataaacttaattaagactgtttcaattatataatatggaccagcagcaaaaaattaaaacaaaacgaaacaaagttaagttagaacatgacggcgcactctatgttttcgaccaattgagcgctggttgggtatttccaatttgctactgtcttttaacatcgaagtgtgccgcaatttatacgcgtatgttacagcttcttttggaacgatg

SEQ ID NO: 105264 - DNA, 107 bp, Heterodera glycines
aagattatatttcacaaaataatttttttttttttagaatttttttttgcgtcaaaataatgtttttaaaatttctgattttggtcttctgttttcaattggcaatg

SEQ ID NO: 105265 - DNA, 879 bp, Heterodera glycines
actgtaaataataaaatgataaattcattaaaaataatgaaaatgaagaggagtttttgctttggaaagaatttgtgtaagaaaaataatcaaaaaaaaagataagagaataagaaaaaattgttttatatttttggaaattttaaataacattcttatcatgtgaaaacaaatttattttaaagtaaaaaaaaaattcgctaaaaccacaattctaaaattggtaaataacgattcatgccaattaggacctaatttctccataataaaatgataaaattttcggtatataaaatgaaaaacaatttatgggaaaaaaatttcaaattttttttaatgaatattcaatttccaatttcctattttatttttacatttttcaaaattcgaattccaccgggcaagtaacattttctgttttacagatcaaccaaaaatcaaccaataataataatgatgatgattaaactacaaaagcacctccatgcagcagcagcagcagcaagcagtccaatcctacgaaaaattgttgtttaatgtttaatttttttttcgccggagaccgtttttaacccttttttaaacgagaatctcgtccgtggagacaggtcgagtctccaaccacctgctgctgttgctggaattattttgcaggtaagatgtaataattgatcgatcagtttagttgagtgatcaatcttgaaaaatgtgtgcacaattttctcacccccccccccatttttaccgaatgtaattttcggtccgccgtcatttcaatagccaaccaaacagttcacccaactcaagaacaaccactcaaattggtccaatatttatttgtttgtaatcctgtgggtataaattaaatccatcaaaatg

SEQ ID NO: 105266 - DNA, 153 bp, Heterodera glycines
ttttggattcggtttaaacttggccaaatatttggcagaagaaggccaccaaattgtaattaattagggttttaatttacattttatggttaatttcgccaaaatttccaaattttacgaataaataaaattaaaacgcacttttagcatatg

SEQ ID NO: 105267 - DNA, 58 bp, Heterodera glycines
tttaattaaagtttgtaatcccaatttttgcccgtgctttcattgggctgtcatcatg

SEQ ID NO: 105268 - DNA, 1003 bp, Heterodera glycines
attttctgttattaaaataaactttttcacttaatagatatagaaaattttattaagatgaatttaattttgaaaattttcatgtaaaaattattccaaaattagtttcaaaatttgataatgaatttttctgaaattaatcacccaaacccaaataattcacaattccattagcaaaagataaaagcaaaaaattgagaaaaaaaaatattagaaagcaattaaaacacaagcagagcagacgaacataattaatcactaaaaaaaagttaattggaagggaaattaacggggataattatgaagagacaaatggggagcacataaatatgtaattgcataaaataacgaaagccaaaaaaggcaccgaatttaatcatggaaaatgtcattgggccatcccaaaaaaaggggggacaactcagcgaaaagagaggggaaggaaaaatttgggaaaatgatcagcaaaaagtgatcgcaacacaatgtctggacggatggatcaacagcaaatcgggcgcaacagcagcgaaacagaaccggattagcacagaaagcagcacaaagcacagaacagtgagacattgggcaaaagcaaagcgattggacagagtatttaagggctaattggatcaacgaaggcacacaacacaaccacaaattcatttacagaacctcaatcactagtctcaactttttttggcacttaataaatggcatgtcgatcccacacccttccaaccacaaattcttattgttttgactaatccccaattaacgggtctcattaacaaatcgaggacaatcagtaacccgaccccaaaattcgagtagatgtccccagtgacttccctaagccccactttattggtacttcgctgggttatggcatgccgtctcccgacattgccaacaattttcctctaaattcgagccgcttgtcacctaattatttttctttccctttagccgcttaatcttaatcaaatccgattaaaaaatg

SEQ ID NO: 105269 - DNA, 366 bp, Heterodera glycines
aaaaattttgaaaatttttgaaatttttaaaatttggaaaaattagagctcattaaactttccaataagttcgctggcaccccctccctcagaccaaaccctgacgtggtattcacctggtactgaagtgggaaaaaaaaattaactgagtctccgtgtctgtacgggtccgggatttggtctgatcaaaaaataaaaaatactggattatagaggacacttctgcggagtgccctcacagcgggaattttttgatccgagtttcagaaaaaaagttaggggccctcaaatgcacgaaaaaatgagaaatcagccgctgggactcagttgggcgtcgagaatttttttctatagttttcccagatg

SEQ ID NO: 105270 - DNA, 348 bp, Heterodera glycines
acgagtgcttgcagatgtcaccaaagtggccagagaaaaaactgaatggattgctgagctcagcaataattgattggaaacataataaaaaaatttttaaacagaaaacgtccaatttatacgttaatgtagattttttaaatactggttaatatgtagagaatcttaaaaatttttgagggaaatcacgttaaggaaatcttgttttccgcccatatacatatatgtatccccgttcaatcggtgtacctatggatggttatacattatttatacataaatataggtcccatacagacacaaaaaattatcagactgttggagtgctaaacaattgttgcatcaatg

SEQ ID NO: 105271 - DNA, 985 bp, Heterodera glycines
ttttctatgcttttattaacagctaaacagaattatttcggaaacggaagaacaatttgtgttatattaacacatatttgatcaggtatattttttatgggcgtgcctctcttttgaaatctctcaaaaagactattactgccaaaaaatttcatttatttacataggtttttaccaaagacaactatctcactatgggtcaagcccaatgttagacaaaattgcacataacgccaaaagcgtaattggcgtaatttttgcgcgctaattcaaaatttacactggtaaataccttttttgtattttttattttgatcagacataactcgcttcattcccaactaaactgaataaatttggtatctaattttgtgtttttgattagcgctcaaaatatgtcccattttgcgttttgtccttttttattattctcaaataaatttttgatcgttttttatgtggcaacaaaaacaaaaagcggtgactcattgttaattaggtacatatattgcaaacagaaaaacaaagataaaacttctttcattagatatttgtgtggttatatacgccgagctgaaagtatttctcaaccactatgtataaatgcaataattcctttactttcccccgtcgtcccgcaaaatttcattctctcgttttgtttgtttgtccgtttgtttgttttcatattttcccttttaaccaccgctgtttgctgctctctgctcgtttattctgccaattacacatcattctgccccaagccaaaaataaataaaaaataaaatttatttccaaaatttatcctttcagaaacaccccttaaattattctaaaattacaattatttcttggtctaaactccaacaaaaatggtgcgtaaactgaaaatgataattccccccatttgagtcttttcctccattttgtcccccccccttcccaggaccggtccatcctcgtcccctacacttctcggttgatg

SEQ ID NO: 105272 - DNA, 116 bp, Heterodera glycines
ttttcagggctagttgattcggcaggtgagttgttacacactccttagcggattccgacttccatggccaccgtcctgctgtctatatcaaccaacaccttttatggggtctaatg

SEQ ID NO: 105273 - DNA, 70 bp, Heterodera glycines
cccccccccccgttccctcttccgaaagcttggaaaattttaggcattttaggagtatttttccattatg

SEQ ID NO: 105274 - DNA, 166 bp, Heterodera glycines
gctaaatttgtccaattttgacgccattacttttcatttaatttcccacttttctcagtgcgtcggttggctgtccgaacggcacacggattgtctgaaccgtttcctcgagttcctttgcatgcccatcgactgggccaagcatttgtgttacatcaccaaaatg

SEQ ID NO: 105275 - DNA, 938 bp, Heterodera glycines
tctagagtcaatggctcgaaattacagaataggctgtatttagcattgtcattttcaatgatgttactacaatgaaaagccaaagaaatgtatttattggattttctaattttgatttttaaggacactaattaattatcccaaaaagcctcaaattttgcatttgaacaaatttgacaaaagacaaaactttccgtgtgttcctgtgctgctaaagatcgggattcttagattgttcataaaaaccaaaccaattgaatgtgcgaattgcgaatttgccgacgaccagcagaaagtgccgttcatgccgtaaattaaatgattttagtcaattaaaaatagcgatttacttaattttgaattttcttttttgtttgatcaggacacacaaaaattatatttaacgaaaacaaaaataacaaataaatgcgagtgtttgtcgtctttgaattttaatggaatgttatgagtgtttatacttttcttttcatttcgattttatgtttttaactcatccgaacaattacacgaaattgtcaaattattcgttttaaatattttctaaataaatatatttttaatttttttttaatttcaattaaaattatacaacaaaagcataaaaattggaattactacaacacatgattataattcgagaacaaagaatgtcaattgataaagtcaacacggaaggagcggacggcggcggagagagcgaacgaatggcggggaaaatggaaaattaaatgggcaaattaacaattaattatgagggtaattagtaaaacaaatgaatgacattgaagcattttggccagagcaattcctgctgataaatggaacagataagaaaaagcataaggcaaatgatcagttctaaattctttgaaaattaaatgtaaatatttccaaaatattttttcaattaaaaaatg

SEQ ID NO: 105276 - DNA, 390 bp, Heterodera glycines
ttttatgtttagggttttatttatttattttttatttttggaacttttttttattgttttccaagaaaaactcaaacataaattttttttttcgcagaaaaattccaaaaactcgagattaaaatgcatgaaactgtctcaaatatatttttggcatttttagttagggtttatattaattattttcaattatactttttgcttattttccaatattcgaaaatataatttttttcgcagtatttaaaatgcatgaaactatctctataataaattaaataatatttttatttcaaaaacatattttaaagtacacaacacgataacaaaaatggcgacgaaatattcaaaaattaatgttatagtaacatggattaattacagctaatg

SEQ ID NO: 105277 - DNA, 67 bp, Heterodera glycines
tttcgatgtcatttctttcgcatttttaaaatttgattaattaattcacttttgacgttggaaaatg

SEQ ID NO: 105278 - DNA, 1003 bp, Heterodera glycines
ctaccaatgttccaccaccctaattaaaggccccaataattgggtgatgttaaaagtatacattaaagcatcattttacaaattgcctattattattgtacatgattttaaaataaaaatttcatatagaaatgaatgcataaaaaatttttcaagatgacttgtgaaaattttgattaggttttaattttgggaaattgaccaaggatggttttatgtttacttgattacgattttgtttatacgttttttgatcaaatttaatccattttctgtgcataccctagcaaaagcctgcaaaatgactagaagaatctgaaaaaaaggcaaaacgtttcctgatgaaaccaaatccttctggttacggtggttgattatttaaaacccaaaatatgaaactgcaattgctattttttttgtccacaaatgcttacaattgcttttcctagggtttatcaaacttggaatgatgatattcattttgcaattaaaattgccaagctcatttaagttcctccgtgtcctttcctccaaataccgaaaaccgggacttaggtactcatttgtacgacgttttttcagtaccaggtcccggtcccgctaatactctagtttctcattcatctcagaccaaattcttttgttattattattgataattgcttgaaatttatgagatttgaaatttatgagatttaaaaagaatatatttttcatttgtctaatgaataattactcctttttgagtaatttcttaccaaaaagtatttttctgtaccaatgaataaattacaaatttttaagtcaaaagcacagatttatttatatacaatggcaaatggaaaagcaacaaaaataaattacaaaaactgaatcttctaatataattattcttcttttttctgccttcaaacgaattcatttaaatctttttaaatttaataaattattataatttttatcaaaaacaataaaaattttatttatttattttttgataatg

SEQ ID NO: 105279 - DNA, 121 bp, Heterodera glycines
agttttacgactggagcacagctcgttttttatatatagataattttttaattttcaaatattttgaaaaaatcaccaccatattttccacatttttcatccctcttcattttccagaatg

SEQ ID NO: 105280 - DNA, 729 bp, Heterodera glycines
taccaggcgaatacacggaaaaaatttacgactctccgctctatgcacgtgttttaccaaaagaagtattagaaattgaaattgaattgcgaactatgactgacggacgactggtaccattttcctatggtacagtgctgatcgtattgatatttaagaaggtgataaatttttgaaatcactcatttttgttaccactataattgataaaatggttcacattctatacgacacatcggtttcgggctatgatgcattttttgtgcaaaatggatgtggagtcggggatgactcctcctaccaagtttttcgaggcgcgcaaccgtttcagcgcgggtggggcactgcacaaacgggtgcaggaataggagatatttttcgtggtctctggcgctttttcctgcctctaattcgcagagctggagatactgtagcagacgaaacaattcagactggaaaacgctttataaatagagtaatcgatgaaaaacccggcttaaaaggaagtatagagacattgacaactgagagtaaacggggagcagacaatgttttagagaagggcggatttcgacgtcaatttggcacaggaggacgaagaaagcgtataaaagctaacaattctcccactctatcacatcagactttaatcggaaaagcaataacgaaaccattaattaaaagcaaaaaaaggcttcgatcagacgcgtttggtctttattaaaaatg

SEQ ID NO: 105281 - DNA, 55 bp, Heterodera glycines
ggtacaatgctatttttctaaatttggttaatttaaaatttagggtaataaaatg

SEQ ID NO: 105282 - DNA, 401 bp, Heterodera glycines
cctaaaaatttattttttttacatcaaatttattttttgccaatttcctttcttttcactatactaattaaatccacgaattttgcggtcaagtcattcctgaaatctcctaattcgtcggtagagcaaagagtacgacctcgagtctccaacgcgaacttagtggcccaactgaatgcgtaaaattggcaatgcttttctcgcgaatgctcgattcatttgaactgagtcactccgtccgtctcgggagtacaatctcgagtatccaactcatttttcgattacctctaacaagcaaatggtctcgaggaattattgccgagtgattggcccaatgaaatttttcaattcccatttttgtcccattccaaaatttcaaatttttagggagaaagaaaatg

SEQ ID NO: 105283 - DNA, 51 bp, Heterodera glycines
ttgccaatagcaattattttctgttcgtccgttgtccaattgcgcgagatg

SEQ ID NO: 105284 - DNA, 223 bp, Heterodera glycines
  unsure (1)..(223): unsure at all n locations
aatgtagcatatttaagtttctttctcatttgaatgcttccacgaaaaaaattcgcgaccctcagtaaaaaatgtcttacatncgtcaagaacatcctcaaattttttaaaaatttcttgtttttttgtcatttctttcaatgcatctcgagaacactccgctgcagttccattacatcagcagctgtaacagttgaagcagttccggcacgagatcggaatg

SEQ ID NO: 105285 - DNA, 296 bp, Heterodera glycines
ggtattttttgggaaagaaaatccccgtaaaatatgaaatagccacaaaatgacataaaaattactttttttggtatttttaggcaacattttcaaacttattttttctttataaattttcaaaatatgtaaaaaaatgaaaatatatatgaaaaaaatccaaaatatgtacaaatatgtaagaaaatcccgaaatatgtaaaaatatgtaaatattgtcccaggtcccggtcccgtggcactctattaaattctataactcaatcttttaagcttttttcgtcaattttgacatg

SEQ ID NO: 105286 - DNA, 113 bp, Heterodera glycines
cgggggggggggggattttttagacattttaagtagttacattgaaaagagcacaaaatgctctacaagatgcaaaagacaacaactctacaacttttacctgcagggatatg

SEQ ID NO: 105287 - DNA, 55 bp, Heterodera glycines
tctgcaaattggttttgaacaataaaatatatttaaggacagtggttctcacatg

SEQ ID NO: 105288 - DNA, 364 bp, Heterodera glycines
ccgaattggacagattgatcgagttgggtgttctccatttgttgactacagcagatgggccgcaccaattgtggcagtgcgcaaagcaaatgggaaagtgcgcatatgtttcgactttagcactggactcaacgcggcactcgaaccacatcatcacccgctcccacggcctgagaaactttttgccaaattaaacggcgcaaaaatattttcccaaattgattttaaggacgcttatttgcaaattagcgttgatgaacagtcgcgtcaactcttaggcgttaacactcacaagggactttatcaatgccaacgcctggcattcggaatcaaaagcgcaccaggcatttttcaatggacaatg

SEQ ID NO: 105289 - DNA, 302 bp, Heterodera glycines
ggaaggcctttgccatgtctgtctccttttctttctttcgttctctctctctctcgcctctctctttctctattttcaaccatctctctctctctttctctccatccctctctctctctttgtctttccaaacgcgctttctttctcccttctctatttctttcaaagtctatttcctttctttcatcccctcacttcctctctctctctctttttataatggaaacaaaattcactcataataagtttttacccaatttgttttaattaatactttcacaatgaattgtattccaggaatg

SEQ ID NO: 105290 - DNA, 103 bp, Heterodera glycines
caactctccgttggcgcactgtcacgcgccaatggaagcggtcggccgcgcagtcgggtgaatattttttgatgaattattggcggactatcgccgccaaatg

SEQ ID NO: 105291 - DNA, 191 bp, Heterodera glycines
tttggaaaagctttatttctcactattcatcaaattttattctctagaatttaattttaagtattttcatatgaaacgtcgaaaattttaaaggacgaataatcttgaggttagatgaaattctggttatctatttgttctgctaatcttacatttacatctagatttatcaaaaataaatacaaaaaatg

SEQ ID NO: 105292 - DNA, 1003 bp, Heterodera glycines
aaagcttttcaattaattttatcgttaaatatttttaaaagataaaaaaacaaacttactcatatatttaatttatttttaaatgtgaaaaatgcgttgccttccgtcaaaatttgtgtttagttccttttttaagcttttgttagacccctttgttttcttttgtttcattctttccccccgaaagttttattgacccaaaaggtggacaaataggcgggcattattttttcaaattatttaactcagattctcgccaattaataattattatttttttattaattcttccattggtgtcggtttgaaaagaccgaagctcatagagctgcaaaccgatacgctcgagaacctataattaatttcctttcaatttttaggccttgtctcgagcgtgtgcttggccttcgaccagacggaattttgccaaaattgcgaggaaaaaactcgggggtgggggggggggcaaaagagccaattcttgcactgaaaatttgccttaatacagaaaagtcaggataaagcaattttgaaaatgacggggaaatggaaaaagatttattcgttcagcataaaaatagaagaatgagacaaattaaaaaagaaagagcacactataaacagagagagcgagagagagggggagagagagagcgaaagagagagaaagcgagagagagagagggggagagacagagagaagagagagagagagagagaaagtgttcattgaataagcatagacacatagagaaaaagcgtaaaccaatttcggagccaaacggacgacatactagatgaccatatcgcacatagtcgataccaaagtacatcaaataatcgtattataacacttatgctttaattgagccaagaaaattagcaatgaatgccaagaaaataatttattttcaaagttaaaattggatttacatttataataaattgaattgctttggacatcaaaaaaaatgccaaaaagcgagaaatgaaggaaaaaatg

SEQ ID NO: 105293 - DNA, 1003 bp, Heterodera glycines
agggcggaaaaaagccctgaactaaaaaaggaaaacctcaaattaaggtttctttgattgtaaaaatatatataaaggatcagatcaatccatcttggtgatcagataacaacatttcaggctaaaatgatatatttcgtataaaaaatgttattaaatggaaaataattagaatttgttaaaattagaaaataaaggtttcatgaaaaaaggttatgtaatatcattatgttaattttaagaaaatatttttttattggaaataaattcttccaagaaaaaatgctgactgttaaataccaaatgggtatcctaatttaatattaaatgaaaattataattcaatttgaaacggctttttatttattaatacttagtaaatttattttcaatttaagttgttgactccatgaaatgccagtacactacccttttttaatgttttacgttaaatgttttattaaatttaaaatcgattttttacttaaatacaaaaaaagcatttctacatttctcttaaataagcacatgatcacactgatcaaaatttattttattttaaatatttatctattataattttaaacaatttttttgtataaaacccaaacaatcctaaaaaaaatactttcacttattcaccaaaattgcatgatcagcacatttcatcatgataaaaattgaacaaaaagagcgaaaaagaacaaataaatgatcaacaaaaaagaaaaacagttcaaaaatttgaagcaattaaagaaaaattgaatcaaaatggaaaatgtaatcggagaaacagtgtcaaaattgagagaaaaatttaaacgcggcatatgaaaaagatgcatttatttttattaaaataataaaaagaaaatccattaattgcaggaaattggtcggatatatttgccaaccaaaaaattatttactttttaaagaataatttttttcaaaagcctcattatttaaaaattttaatttcctttttattatagaaatg

SEQ ID NO: 105294 - DNA, 143 bp, Heterodera glycines
accttaaggaaaaactccctgaatattgttgcaacgacgtacaaatactcacccacgccctcgtcgaattacgccgggaattcaaacaactgacacaacggaacggaaaacacggaggaattgacatcctgtggcaagccatg

SEQ ID NO: 105295 - DNA, 304 bp, Heterodera glycines
cctaaaaaaatttaaaaaaataattctaactaaaaattgccattcaccctaaaaattcgcttccatttctcttcaattgaaattccaagaaaagaactgtatcgaaatatggccaaaaaattgaaaaaaaacaaaaaatcaatttggccgagattaatcaggatgaagaaagcagtgaccgaacatagtgagcaccttgtcttccgcgttgtgttcgtctcccgccttgggttcaaccacagaaaaatcggtgagtgcagagcagcaataggcgctgaagagacggagcagtgcggacacaatg

SEQ ID NO: 105296 - DNA, 163 bp, Heterodera glycines
tcttagacttctcggcgaaagcaggatcagtgttgtaagcctaaactactaagaaaaaaatttatcatctgaaaaattcaattgacatgtgtgaggccaaggattctgatctgcctcttcatgttgcggacaagatgaaaaaaacagtagcggacactgcatg

SEQ ID NO: 105297 - DNA, 70 bp, Heterodera glycines
ggtaaaaaacaattattcaacagttaatttacacctgcttttatttaatattatatttttagctcaaatg

SEQ ID NO: 105298 - DNA, 154 bp, Heterodera glycines
cgtacttttacatataaacataaaaaatatatgtggggcataaactgcataggagcaaataattgcaatattaatccgggtcaaattcttatcaagcaatgataaccaatcctttgcattaaggctgaaaccccgatgtctgggttgtgaaatg

SEQ ID NO: 105299 - DNA, 202 bp, Heterodera glycines
gattgatctcaaaaacgacgattgaagacgacgaaagtgatcgtggcccaatttgatgaatgtggaaacggaacttttgaatgctgttgtaaagcaatttccgttgaattccgatcaattaattgttgagattggaaaagatgaagtgctaaaaaaggtcatgaagtaccttcgcactcaatggcccacttcaaagaatatg

SEQ ID NO: 105300 - DNA, 76 bp, Heterodera glycines
ttagctgctcgacccggaaagttcgccaatgtgagaggcagccggtcggcacaatgtgctcgtcattttgacaatg

SEQ ID NO: 105301 - DNA, 425 bp, Heterodera glycines
accaacaacaacaagtaagggttggacaactgataaaagagaattcaaattggctctgtgccttggcccgaacgaaatcctccaaaaaatgtaaaaagttgattcgaatggcaagcaccgatcagctgctttcacttgtggaaatttgtttgaatctcgtcgcttcgcgcttccgacttacaacccgacagaaaaaacgattaatgccctatgtgagcactgtacgccggatgagcagaacgagaagtgagcggggtgccaggcgcgtgcttgtccagaagggcgcaggatttggcggattgttcgctgctcttttaacacccgttttggttgaattggcaaagaatgtcgtgagcaaaaatgcataaatacccccacatcattattgttttttcatgcaccattcattcatttgacaaaatatg

SEQ ID NO: 105302 - DNA, 1003 bp, Heterodera glycines
tttttaggaaatgttgtgcgataaatatttccatttttttagtttcggtttctcacttttttcaggtgtccggtgatggttttctgaaccaattgttggccggaattttgcggacgttcgttcgttttaaataatttatttttttatcactttttaacaatgattttactattggtgtatttattgcatacagttttgaaccaattgcggattccgaccggcgcgatcggatgtggcgcacttgtttcaaggaaccatcgcgcccgaattatgagtaaaaataaattaattaaaaagtataaatcagatttcgatatatatttttagtataatttcccaatgtcccagccttttccccaacttttacgtccccttttaccaataggctgttccaaatctgcatcatcctctacctgttctgcattttgcttatcactgctggggttggtttttgtcttttttcgcaatttttaaaatccaaatgaattaatcgccacagatttatctgtcacgcgttcgccatttggtggccctgcactatttgcccgagcgtgcgcacccgcgagcaatgcatttgtacaacaaaatcatggccaaccgagaggacatgtgagtgctgacagtgaatggtgatgatgaaaatggcaaacaaacagtgtagcagtgcattaggaggacaaaaaagcgaaagcattgggcaaaaaacaactgaatgggcttttgtttggcatggacgttttaatttttacaaaagattttttggaaatgactccaaaaattcaaaattaaatcgctcactaaatttttatttagccgacccatttccgacccttgcccaattcctcttaaactcttcacttttaaaaatattttagacacaattaactccactcctacccaattttacttttttttgtcttaataaatttcaaaaaaacattgataaacagggattaactcttcaatttctttccttaaaactcccaaatttttcgtcaggatg

SEQ ID NO: 105303 - DNA, 297 bp, Heterodera glycines
ggtaattcaaattattcaacatttttggcatatcattaaaattatttacatataaaaatttaaaaaatgcaacaacataaatgaacttttaaattgtttttcatattaaaattagaacggaatgaaaaaaatgacggaaaattggcgcctaattaacgccgcaccgcgttcacggacaataaaatattcgttctcctcctcagtgcgcatgagaagctgacgacgtatgtacgtcttcccctcccctccccctccataaatccttccctaattatttatagagcatcggcagggatg

SEQ ID NO: 105304 - DNA, 989 bp, Heterodera glycines
cctgaaacttttttatgtcatgagtcacgactaaaagccggaagaattttgggggttttgcttaaactttattgctaattgtcaaatattcaattataagcacaactttataaatatttaagctttttttattactatctatgatttaattttaaattgcgcatgatgttgattaatcataaaactatttcacaaaagaaaccaaaatagttgaatattttgaaaaattgcatgagaaatcactaaatatgataataaacgaacgaaatataaaagttccataatttatttatacatactaaatcaatgtttcgaaacgaaatttcaaactcttaatattactgactaacttgttttcatcatttattgtaacataaacaaaaataaacgaattaaacataaaatagttatgtaataaaaaacaaaaattacttcatatttttcttcgatttctgttatcaaaataaaaaacaaatatgcattaaatctcacaatttgttatataaaatcgttaaaagctaaactattttaaattagaaaactatagtgaataataacataaatatttaaaaactaataagtgacaaatcggaaacccgatttctttatgcgatttgacaaagttgtatgtttttatgaaaattttatggacgcaatggctattgttaatgaattgcgaaaccaatttatttctaactttacttatggataaaaatatataaatatttgttgcgttcaacaaaacacgatgtaaaaaatattaaaaagaattttcagaaaaacaaaaatagctaataaataaatttttaaaaggcaatggtataaaaagaatgatttttctgctcgaatttatatttttcaaatgttagtttgcaaaattttgataaaaaccacaaataaaaaataaataaattatatacgaagataaaatatatattatttatttatgcattaattttaaatattttaatattaaaaaataatagatg

SEQ ID NO: 105305 - DNA, 224 bp, Heterodera glycines
tcccccgcactttctcagagtgctctccttctctacttctctctcgattccgcctcatctttctttctgtccgtcgatctgatcaacggaaagccaagactgaatgtgggactgacttttccgcttcaaagtcgcgtcattgaaaagtccgttaacgatgaaagtacgctttgctttggttctttccttttcatgcctttaccctctctaaatgccacagaatg

SEQ ID NO: 105306 - DNA, 1003 bp, Heterodera glycines
tctcgagcatgatagggagggcggtgcgcaatagaccttttatttttgagggaatttttaaatttatactcaatcccagaaaaatgtctatctctttttttgagaaattttatacctcacaaaagcgcttgcgtagagacggagggctgtgcacaatcgccattttatttcacagaggcgccgggggaaaaattgagaattttgaccatatttttagcagattttattaattctttatttttggtttttcggaaaaaattggttctattttcattttaatgctctattacaaacccaaattattaaataattgtaaaacattatgccaatttatcaaaatttaaaaagattctgaggattttccccaaaagcctcaaaaatcctcaaaatttctcaaaaagccacaaaaatcctcaaatcctcatattccaaaaaaatcctcattgacctatcaaaaagccacaaaatgaggataaatcctcagatctgggagccctggatatcatagtgattcaaatatgtttcacattgcaaaactttatcttctcaatattttactcagatccccattcttaccggtgcatatttttttgcctatgccgcgggttgagaaaaatttcgggtcgggcactcaaaaaatttcgggttcgggttgagaaaaacctcgggtttcgggttcgggttggcatcactgccgcctacctacttgcaaaattaaagaaacttttttttggattttattgaaaaaattagagtgccacgggaccgggaattttgggcaaacccgggaccgggacctttttgggttgaaaacccgggaatttttggctgggaaaaccgggaccttggtactcagttgtccgctaccaggtcccggtcccgtggcactctagaaaaaatacatacataggtatgtaaaatgaatgtagaaaaactttgttaactgataatatttgtttttacagttttttccacttttctgcaatacaataaacaacaaatg

SEQ ID NO: 105307 - DNA, 157 bp, Heterodera glycines
tcttttggtctgtaggatgtttttgtattaatgaatcgagtcaaaaattacatttcgtgtaaaagaaacggtcgatttcacataattttttcatctttgctaagccaattgaaatccgaaacgaaaactgtcttaataatttccactcaacaaaatg

SEQ ID NO: 105308 - DNA, 82 bp, Heterodera glycines
agtgagttgggcatgaataaaacaaacattgcccattccaacggatgaatgaatgcctttcagaagtgccactgagcggatg

SEQ ID NO: 105309 - DNA, 664 bp, Heterodera glycines
tttttcggtttatttcgattttttttgaatctgtttattttttttcaaaaaagcaataaactattctattaatagaaaaagcaaaaatttcctctgagtaaaattgtagagctattgaaactctatattgcgagctcaagccataactttagggccggcggtgctgataagagccgccggaggaaaattttaagaatttttaatgattttgttaaaaaaatggccaactgatttgtcaaaaaagtcggtcgattgtttcggttttttaattatttcgtcgaacggtttcggttaaaaaaccgaaaaaaaccgaaaccgaaaaaaaccgaaaaacaaaaatttctcgttcggtttttttcggttaaaaaccgaaaatcgaaaaataccgaaaaaaaaccgaccggtccgatctctaaagtgtatgaatgaatgaatgaattgcgaaaaaatgtgtgaaatctgtcccctaaactagaaaagtactgaataatggcgctatttgccttttctaattcgtaaaaatacataggtacgtacatatgttctgaagcactttgaacaaagtctcaaaaaagccacttgggcaaataacgccaatttaaatgaacaaacaaaaacacaaaatacataccatcaattattaattattattaaacaaaaaatg

SEQ ID NO: 105310 - DNA, 1003 bp, Heterodera glycines
agggccaaattgttcacatttttcactttgtggcccatttggccgatttttgcccccctcaattgtcctcccccattgctcacccatttcggtttaattacccaagtttgagataaaatttggtggtaattttctgtgctttctttctgtgcggccccaatccgaccgtagtcccgtctcgatcgcccccggcccctttgtgctctccctccaacttgtcaaagtcctgcacccaagtgcaggcaattgtcggactccaccgcgcccacacccgcacacaaactcggagtacgacaagtggcgacctgggcagggacaaccaagcaacgacaaacagcaacaagtgcgcgacaagccgcggcggtgcactcaacggaaaaggtgtggtgaatttggaaaaattcactcggtgttccaagttttcgctctccgtggcaaaacttggacacaacaaggaggggggaagcaaaagtgggagttcggggaaatactgatcggtctccgtgccatcagtatttcctaggtcaaattactgctcggtctccgtgccagcagtattttgtcaattactggtcggtctccgtgccgccagtaatcggtaatattactgatcggtctccgtgccatcagtaataggggcaattactggttggtctccgtgccgccagtaatcaagcaaagtactgctcgctctccgtggcaacagtaccggtccttgccaagcaaaggaaggacagttggcgtgaactgctcgctctccgtggcagcagttactccaacccgacgcggacaagtcaaacggtcggaacaacacaagtgtactgcttgatctccgtgtcagcagtacaaccagagcagccaatcaatcaacaagcaacaagcaagaagcgaaggcaaagcacaacaagcaacaaggcaaagcacagcaagcatcaagcaacaagcaaagcacagcaagcagtcaatagcaacaagcacagctacagcaacagagcaaacaatg

SEQ ID NO: 105311 - DNA, 231 bp, Heterodera glycines
ttaggctatttggagagcggaagaaaacatatgtgatagttttgacttttcgttaaacgcctacgggccaaacaaaacagaatacgaattggcagatgaatcaaaagcagagggaaatgcctcgcaagaataagcataaaattctttttggggttttcgtccattgttgccaattaaaaataaataaaaatctaagaaagaaatccaaaaatatacagcaaaataaaaatg

SEQ ID NO: 105312 - DNA, 471 bp, Heterodera glycines
ttgtaattttttgtgataataattcgtgaaaaatatgttctctatggttttagggatacgaattttacatccatttcgatggattccaaatccctaactcgaacaaaatttatttttgtaatgaattttcggttattgttttgagttctttgatgggattcagaatttttgaaaaggagaacaggttcgtgaagcgaccccataaaactcccagaacaagtttacaggactagacgacagattataaaaacaaaagggccctccctccctctgttttaagtaaaattcaaatgtgccacttttaaagtagcgcccaatttttattcaaattcataaagaaaagttttggccatcccatttttctgaaattggcccaaaatcattttgtaaatgtttaaaattcggtcaacatcatcatctaaaaaattgccaaaaagcaaattgtgcaatactgaattgtatagtaaaatg

SEQ ID NO: 105313 - DNA, 73 bp, Heterodera glycines
agacgcagaaagacaacagttcattgaagagtgcgaacaactttttggcatcaaaattgacgaagcaaagatg

SEQ ID NO: 105314 - DNA, 373 bp, Heterodera glycines
cccccccccaaacgaaaatttaaaaattttatgggtacatttttgaatataggcaattttcataacaaagtgcactcaaattttcaaatttttttccaaaaaaatcccggtcccgtgcaactctactttaaatattaaaatgtctaaattaaagtcttaacattcttttttattattttggatcagtagtaaaattacattaatctagtccaaattttcaaagctttcgtttattctaattcattcgattttgaactgcgaattatttaattcaaatttaatttaatttaatttaaaaataactgttttaattaggtggctccgccatttcccacctttctcaacaacatttaaactgatcgatcagaatatg

SEQ ID NO: 105315 - DNA, 893 bp, Heterodera glycines
aggcgaacttcggatgcacaacttaagaatgacccgtgattttgatcaatgcgggcatatcgtgacgaaaaattgtaaggactagagaccggagaggcccatgggcccgggcttttaaccgggccgcctggtcccggtcccagtactttcaaaattccgatctctagcaaggacaaaacaattcgtatcatatttgttgaaattaactggctggtctcaggcgagaaaagtgcctgtcatgctcccggcgggggttaaacgccaccaccccttaattaaggatacgcgaattattgtaaccatggaatcgactagagaccggtgcgggacgtgattccgcgcgggatcccagtccgcaatccaacattttttggaaaatgagggatttgtgggattaatcccgcgggtcgccgtcccgaaaaaaaataacgagttccaatcacgcagcgggaccgataggtttgaaatttccaatctctagaagtgatcttacaaaagtataccaattgccaacataaaaaaggagaactcacaaaaaggcactgactaatgctttgaataaatgtattggcgttatgccctacctccccactatggcactatgggtacgccccactgtgcagagaaaagcctagtactatctcgtcgtttctctttttctttgtaatttctctcactttggcgtactatctcttcattttaattatgtaaaaatcaacattcacttcatcctgtttaacttttttcctacttgttaaatccacaccaaattttgcatatcgatagagaaaaaaattatgaacaaactttcagtgttttgagtaaaaatttcggcccagaaaatttttaattgtcagtttttatgaaaattcttaattttttaaagatttatg

SEQ ID NO: 105316 - DNA, 228 bp, Heterodera glycines
actcgaattccattcatcgatgccttttcgcttggaaaggaaaaatattgcaaatttgttgaccgatcggtccaagtcgaaagtgacttggattttgccaatttaaaagtggaaggcattgaaaaggaggatgaaaatcttgttgaaagtgtcagtgccgcttcaatttacaatggcaaagaaagttcgatttcaacaacagcgaactcgacaaattccactgaaatg

SEQ ID NO: 105317 - DNA, 87 bp, Heterodera glycines
tcactgtaaatccaagtcggattacagttgatcagcatcatcttgaatttgatccgagtgggacaaattaagaaaagtccaactatg

SEQ ID NO: 105318 - DNA, 486 bp, Heterodera glycines
agaagaataaaaaatataataagagattgcaaaaaaaaatatattatttaggtttttcagtttttttttttttgaaaaatttataatgatttttccataatttttattgtacattatgccttttgtatcttttgccatgactccgaaaatatttttaggcaaggctttaaaaaaccctcaaaatatgcagtaaaaatggcaaataggcctctagtaatgttttctcagcctgtatattataatttgttgaaatgaaattttgacaataaattaatatttttgacaaagttccaaatcgatttttgggctttttagctataaaataaaaacctagatatagtgcactaaaaagccgaacaaagcttaacaatagcacccttaatatgttttattaaacgacaaaatgccacattataatttattttctaattttattttaaaatttattatttcctccccgttacaccatttcatcctcccccaatg

SEQ ID NO: 105319 - DNA, 422 bp, Heterodera glycines
tttttagctctaaaatactgaaaatttattgaaaattcgcgcagtcgtaaaattttttccaaagttgcgattttcttgaaattttgcataagcatatattttaaccccatttataggataatgctttgcttatttaccaaaatgctttttaactcgagatcggctcttccatttttacaaggcaaaatccccaaaaaattttaagttttgcaaagttttggcgttctgattactaaataaataaaaacctatttgcactgagagcacaaaattgggccgctgtgtaaataatatgtcgtgtggcggacttgaacctccgtcccatttcgctttactatcttgcaataaaccactgtgccacacatgtctcttttttagtataggagctgtggtgcaatcgtgtttgccaattcataaaaatg

SEQ ID NO: 105320 - DNA, 122 bp, Heterodera glycines
tttcgaaagtcagaaaacacttaataataaattaatttaaaattttgttttatttttattgtgtgtttttaaaagtgttttatcttaattttttagccaaaacctaaaacaacaaaaaaatg

SEQ ID NO: 105321 - DNA, 73 bp, Heterodera glycines
gagcaattggcattgaaaagaactgacaatagcgatctttttctgctgatccgttgcgcaattgcgagagatg

SEQ ID NO: 105322 - DNA, 58 bp, Heterodera glycines
agtcatagtgacttggggtcttttgcatattgtagagcattttgtgctctttcagatg

SEQ ID NO: 105323 - DNA, 79 bp, Heterodera glycines
actaaaaagcgtgcaaaaaacgtaaattttgttgtttgaaatttgaaatggccgggatcgggcctgaacttggaaaatg

SEQ ID NO: 105324 - DNA, 106 bp, Heterodera glycines
tattaaacctgaaatacaaaaattgacatgacaataattcaaatatctatgactagggagtgtaattatatggatataaaatcgcgaaatatggccataaaatatg

SEQ ID NO: 105325 - DNA, 320 bp, Heterodera glycines
cagctgagtttggcactccaattccggcacttttcagcctgaaaaagggcaagcgtgcctctaattctatttttccaacccatttcgaatctttttacatcgattctgaccgtttttaagcatttttgagtttggggactatgaccaatatttatcggcggtgttgttggcatgaatgctcaaaaacacagaatgcgaacaaattaaagcttttaaacgttttaacaatttgtgataattctgatttaaattcattgaacttaatctttgaaatgaattaacaaaaattcaacatttgcttgatcacaattgcgatcatg

SEQ ID NO: 105326 - DNA, 354 bp, Heterodera glycines
atctctgatcattcattcattgatttttcgttgaaatgagcaactctttctttgtaattttgcccagcaatacgccgggatttgtcggcaataaaacgaataaattcaaagtacacttgccaaaaaaattagtgtttgatgggccgggttggatggtgggcatgtctggcataatatatcccaacaggtgtgtgggtttgcacagttctcattgcccttgtacagtttagctgggcgactgtagggaccctggagaggcaatacgtagtggtgcacctgcgcgatgggcgcaagttccggttcagagtgccaaggggcagcttcctttcgcctcagcagctcgaacgtggaatg

SEQ ID NO: 105327 - DNA, 362 bp, Heterodera glycines
  unsure (1)..(362): unsure at all n locations
ttaagctattntggaaattttatcactttgaactgcccaccttattacagtacaagaaagttactgtgtaatttcccttggcaactgaaaataattatttgaaaaaggcatatcgcggggcatttcgtcactctcactcatccaatcgtcttcaccacaccactctcctaaatgccggtgttcaacatctgatcagaaaatgaaatgaaaataaattaacaatttaattacgataggaaaatctaaaaaaggcacaaaactacagtaatcgcttaaaaatggaatcggagcattagcacacaataattattatctcaattgcctgtcgctaacgctttttttttgcctacagcacaaaaatg

SEQ ID NO: 105328 - DNA, 204 bp, Heterodera glycines
ttgcgcgcaagtgagattttgtgcacattcaagcgcttttatatgtgcgtaggagcaccgtaactttgtctttcacgtagcgcgcatcactgtaccttttcgctatataaaagcacgcaaatatgacgcaaaacttcattttaatcacaagattttttttgcaaaataaaaatgaatacttttaataatgttcagcaaaacatg

SEQ ID NO: 105329 - DNA, 953 bp, Heterodera glycines
ttttgagtttattttttttctgtcggtgaatttttttgctttttacaccgtctttttttctggtatgattttacaaaaaaaaattttggaaaaaggggtccagaggagccgatagacgctgccgcaaaaaattttgaaaatttgagtcttatttgtgcacagattttgtccaaaaaatgaccaaattttgcgaatttgagcaaattttttatgaaataataagtttttgggcccagcggtgccgataggcgccgccgggggtaaaattgaaaatttgagtgcaatttgttaaaattgttaacatattttatccctaaaattagcaaattttaatcggtctaaaaagtcaaaaaacgatgaaaaatgcaatttataggagcgcttgcatttttcaagttaaaaaaaaatcgggtactgaagtgtccattggcaagcgcgcccataatttgcatttttcgcataattgtgcacgttatcaattgattccgatcatttttaaatggttttgagtttgggagctatgagacatatttacccaatttttaagaaaaatgggggttttagtggaaaatttttgaaaatttgttgggatttattaactgattttgcccaaaatacctttatttcgagcgaatttttaaaagaaatttagagttttaatttaaattgggtcatccttgaaactctgctttttgtttgcacttttcgaataatattggtagatcataaactacgcattctttctactgctggaatggaatttgaatatacatctatcattatataatattaaattcgatcaatatgcattaatattgtattttatattttgcttttcatattcattttacattttatagcctcctttaaactaacaaaagcttaccacgaaaatttacaatcaaaattattttaaaataaatttaaaaattaaaaaatatattcgaaaaatg

SEQ ID NO: 105330 - DNA, 1003 bp, Heterodera glycines
attttttatcttttaaatgaaaatttttttctcttaattattaaaaagattgaaatttttggcatttccggtcacatttcaaattttttaactttctggaagagatattccaataaaatacagacactaaataaaacaattaaatgtttctgttcctaaacaagcatagaaataaaagacatgtgcgccatttatttgtgcgtttggtaaatatatgcaattttcattaatctcccacccttttgtcacagtcaacaattgggacaacagaatgtaatttgggtttagatttcttttcgcaacagttttttctcctaattaatttatactttgtgccgataaatcacatttatgtaaatcagtcttcatattagcagactatcatgggaaaaataaaaaaatcttttaaatgaaaatttttttctcttaattattaaaaagattgaaatttttggcatttccggtcacatttcaaattttttaactttctggaagagatattccaataaaatacagacactaaataaaacaattaaatgtttctgttcctaaacaagcatagaaataaaagacatgtgcgccatttatttgtgcgtttggtaaatatatgcaattttcattaatctcccacccttttgtcacagtcaacaattgggacaacagaatgtaatttgggtttagatttcttttcgcaacagttttttctcctaattaatttatactttgtgccgataaatcacatttatgtaaatcagtcttcatattagcagactatcatgggaaaaataaaaaaatcttttaaatgaaaatttttttctcttaattattaaaaagattgaaatttttggcatttccggtcacatttcaaattttttaactttctggaagagatattccaataaaatacagacactaaataaaacaattaaatgtttctgttcctaaacaagcatagaaataaaagacatgtgcaccatttatttgtgcgtttggtaaacatatg

SEQ ID NO: 105331 - DNA, 416 bp, Heterodera glycines
aaaaagatttattgcatttttttgcaattaccctgggtcttgtcatgacagttacgtattacggtatttcattacagttgacaaaaaacattgtcttaaatttcaaagctcctcacaattcttctcaagaatggaagaagggggtcttgatgggataatattgggggattctgcttaccctcagaaaaattggttgtttacgccagtaagatttccccgaaatcaaaaagaagaagcatataatgccgcacatgccgtaacacgtgttactatcgaacagtgctttggtatttgcaaaaatcgatggagatgtttaatgaataagtgtaggctccaacccggtataaatttattttttgcttttttcacttttaaattaagaaaaattggcaaaagtagcaacagtttgcagtatg

SEQ ID NO: 105332 - DNA, 349 bp, Heterodera glycines
agcccaaaagccaacaggtccaatttaattaaatttacaatttaaattgtatgtgttaatcaatttaagcttctcaaagaagcgctaaccaaggatgaacatccggaaatgtttgtcacaacagcattggagcgatttgacagcgaaattgtggtaaatattccgtggttaaatttcaaaaaaatatattttaaataaattaaaacatattggaaaataatatttataaataaatttaaatatatatttcaaaaacctaatttctgaataaatttaaataaatttttgaaaaaaatatatataaataaatttaaatgcataatgaaagggtcgtcaaactttgcccatg

SEQ ID NO: 105333 - DNA, 62 bp, Heterodera glycines
gttttttttgtgggggtaaagtgaaaaagtacccaatttttagttctaacatttaaccaatg

SEQ ID NO: 105334 - DNA, 89 bp, Heterodera glycines
ttgccaccatttgtcggctgtttcgcactttaatcatcacattcaaaattgttttgtacggaatgccagaacgttttgccaaaaaaatg

SEQ ID NO: 105335 - DNA, 204 bp, Heterodera glycines
ttttgcagaccgcggacccataaaagatttgtctcttcaaatatgtgtaggactactgtaattgacaaattccggtcacaaattgggcccaataagccaaattgtatgttcatctttcacttaaaaataaatttagctaatcctcttgttcattcttcaatcctcctcaatcccttccatcccactcatccgatctgatcaatg

SEQ ID NO: 105336 - DNA, 1003 bp, Heterodera glycines
tattttctgctgctacacattgtgaaattcaaccagctaaaagcaggaggagtcataatgccataaaataaacaaaaatcgtttttttttctattaaaatgcaaggagatggatcaaattgcagatttatttttgtttggattaatattattatagtaaataatgtttttgttcatctgaagaatgcattggccctcgaaaattgttttaatttttataatttaacattttcttaagtattcgaaaaaggaaatcaaaaataaaattttcgtaaattttctaaatattgacgataattctgtttaacttaatacagtatgccaaataaacattttttgttttgttgttttattacagtatgccaaagagtaatcatataaaaattcattttttggggagttcaaaaaacaaacaaaaattttgtacgccatttaagtagtttacaaaaaatgtttgtttctcaagaatctcacgtatggattattacaaacttagctttaccattcatgacaccactcgaattttccacaaaaattttgagaaagaaaaagcatgaaaaagatttaccgtgtgcaaagcgggccaaacaacaacaagcattgggaaaaacaaacaaaaaaaagaaaacttttgaacattcggcgccaaaagcagaaagccaagggaagagggcagaaagtgtgtggaaaaggtggagattagcagagagagagagaaggagagagacgagagagagagagagaaggaagaaaaaagagggtgagagaaagagagagaggggaggggaagtgacttagggataagagagagggggtgaggagagagagagagagaaagaaaatgaatgagatatacaagaaagaaaaaagagagtgagagaaagagagagagagagaggtgcggggaagtgatttagggacatttagatgggtgggggagagagaatgaaggtgagagtaaagtgttttatcataggcataagacgatgataaaaaacgaaatg

SEQ ID NO: 105337 - DNA, 1003 bp, Heterodera glycines
ttttctggaaagatcggaaaacattatttatttttgtgtataaatttatgttttatttaaaaaatttaccgagaattaaatataccaaaatgaattaatggacaaattgtgaaaaaatggcaaaatgaatcatagaaaattcaacaaaaatgtgaccgcggggccattccctccccgttttttgtcctttttctcattttccatataatttcattattagtgagaatgtacaacagaccacgagaatgtgaaaatgaatgcctagtaataataataatgataataaataccagtttgactgacacttttttgtcatattaaattcgcccgcctttcgccgcaacaatcgccgccccccccccccggcgaatgcgcaaagtgtcgccgctggtgccgccgccccctccccctcaaaacgatttgttggtacagtcaataaacatttggtacaaaaaccgaaccaaccaaaaccatcctcaatcattgattatactcacaaataatatgttgaatgaacgttgcaacatcaaaatatcattaaccttattatccgtgttatgtcatccgtccttaattccaaagaaagtccttgaaaagaatttgccatccaaggacaaaagcagcataaaattacagcttttattctgcggaaggaaagaatctcattaaattacgcattaaagcagtaaaatgaaactttttattttgttctgttcgattatttttgcgttaatgcaattgattttgacagaaaccgaagaaaaggtaaatgtgaaatatatgtattattactaactgaaaagaatgcaaattatcactttttaattttgtgaatcccccacccctttggagtttaaaaaaatgtacaattcacatgcccttaaatactccttaattactaacctaattagcaattcaaattaatccctctctcacccccatttgatcagcaaatcgaagtgtttggagaagagcgcacaaaaagaggagacgaagggaaatg

SEQ ID NO: 105338 - DNA, 221 bp, Heterodera glycines
tttaaatgcatagcttttttttctcacagaatcaacaagaatttttccatattcgtggagaaaatcgacgtttgcaggagcaatgccgtcgctttcggcacgaacggaaacggtggacagaatggctaaggaagaagtacggtaattggaaagagagagaaaacggagacaagagagagcagcagacaacgactacagtaacgttggacgggcaacgcatg

SEQ ID NO: 105339 - DNA, 112 bp, Heterodera glycines; identical to SEQ ID NO: 101677

SEQ ID NO: 105340 - DNA, 550 bp, Heterodera glycines
aacagtgaaagagagagatgaattcagcacaaatagacgtgttgctcaaaaggctgcgtgttacaagcggcaagttcattggcgtttatccatcaaacaaaataccgcctgttcttgagaggcagaaacgaatgcggcgctacccccactgcatggttgtaaacacagacaaggagggcacacgcggagagcattgggtggcttgttacgtgccatctgcaacgcaaattgaatactttgacagcctaggtgtggcaccaaatcccgatttatccgcctatctcaacaagtttcagcatgtgcaggtaaacatgcatcaaattcagttcccttcatcggacgcttgcggccatttttgtgtctatttcttggccagtcgttgttccggcaccccgttttgcgacgttgttgaaacattgcgcaaaacgcgtgggatggcggactggttagttaaatggtatgtacgtacactggctcgccatgtataaaaggccgactaaaagtggagaaggtaccacattgtttctttcattgagagaacagaaggatg

SEQ ID NO: 105341 - DNA, 193 bp, Heterodera glycines
  unsure (1)..(193): unsure at all n locations
tggcccgccgttccaatggcaatggcaaataaaatcgtggaggaccaatttggcgctgttcttgacaaactgagacacgtcgaagaaaaggaagccaattcgcccgatttactcggtcacttgggtcggcgccatcccctcaaaatgcctttcccccccactcaaaatgcctttccccccnccactcaaaatg

SEQ ID NO: 105342 - DNA, 447 bp, Heterodera glycines
tttattgtactcacttttaaatatttgtctgatgaaagcttgaatacatattagaaaatatataggcattaaaccggttgaaaaaaaagaattttgccaaagatccatgacatccctatgaatataaatttttttcgaaatacatatccttccaaaattttattttgtttttctatctaatttaataagttttaaactagagtgcagcgggaccgggaaatttgggcaagaccgggaccgggactttttgggttgaaaaaccgggactttttggctgggaaaaccgggaaaaaagccgggaatttcccggtcaaaactggtcaaaaccgggaccttggtactcagttgtactcagttgcccgtgttcaggtcccggtcccgctgcactctactttcatcgtatttctccaatttgctttagtggacctcgccggttgtgcggggatg

SEQ ID NO: 105343 - DNA, 702 bp, Heterodera glycines
cgaaataatgcttgtggggaaagaacgctgaaaatgtggaagggaacgcttaaaaatgggaagggttaatgttcactcccaggtcaaatcgataatccattcctgtgctgggcaggaatggatgcgcacagagaaaagatgagaaaatatccctctctaccctccccacccgctccccacaaaatttgaatttcccctcatctgtcactttggtgaccaatcaaaaaatttttctgtcaaaaattttcccctcccctcgtctgtcacttttgaaatcaatcaaaaaattttcacccccctccccatcggctgtcagtttttaaatcaatcaaatttttccgctcatcaaaaaagaacatgacatttgacacacgccccctcataggtttaggtttccctaattaattaattaattgctcacaccccatcacatatccgagtcggggtcgttttggcgcccacgttttggcgccagggtcgttttggcgccgacgttttggcgccagggtcgttttggcgccgacgttttggcgcccacgttttggcgccaaaatgtagataaagggcgaaattgtatatttttttgttttttcttggagtggggcaaagtctataaaaggagcaccttcctagtagatttagtattttttttattttcattcttcaaataacgcatttttgttttttcttgtttaggaaatg

SEQ ID NO: 105344 - DNA, 1003 bp, Heterodera glycines
tgttaaaatcgaccaattcttggtgccgttcgatagctattaacgttctctaatcgaactgctgaatgcaagaaaattttattgcttttcaaaaaagttatagccaaaaatcgtaaaaaattttttacaaacttgatcaaattttttgaaacttggtaggtagataaagaacgttaatagctatagaatgatacaaagaatgtttaatttggtcaactttacaaaagttatgactatttttttgtcgaaaaacagtacgagttgggttttttccctaacaaagacgtcgacgcaaaaaataaataataattaaatattgagtaacaaattttttgattttttaaaaataattttatatcccggcgacgtttagcggcgacttttgtcctcttctccgtttgatatcctgcactattttgccggtttacctcagttcagcccccacgtttgggcctataactttctataacttttttctttgtcatccaaatccaaaatttttggtatcattcaaaagattaatgtgtttagaagctttttctaagcgattgcttcgcgattagacaattaccaaaaaagttatacatgaaaattgcgaaaaagttgaaattttgaagtttttccttaagaacttttttctatgcaagaaaattttgagcgagtccgcttttttcagctttttaattgataaatagtgggttttggcgcaaaatctaataaaaaatttttgaatttcaatatgtaaaatgatttctttaaaaattttctacaaatttttcccatataataaataataattagaaatatatagctcaaactcaaattagtgataaataaaatttgtgaatccattttttgacaaatattttgccaactttccttcccccccctcacccgttacgaattgcaattttcattctggctgttgtacatagttgatcttctcatcaacaatggtgccaatgtgcatcatggcgacccggccggcgtcaccgcgttaatg

SEQ ID NO: 105345 - DNA, 235 bp, Heterodera glycines
ttggccataattgaattttttggaagtttttgccatattccatcccaaaaagtatttttaaaattatttattcatttatttattaatagcgaaatttatttcaatttttttatgaaattgtgccgcaataaataagaattcaagtttttaaatctatagatttttgcgatttcaatatgccataccctaaattcaaaaaatttaatgaaaatgatgccaaattgaacaaaaaatg

SEQ ID NO: 105346 - DNA, 316 bp, Heterodera glycines
aactgacacaatttgggaccgttcgggtattacaatcctcgagcattttagcacattgacatacagatagactaattaatatatatcaattagcgaatgtttcaagcttttcttccctgccgactcaattcattaatcaatgtttaattaactgtttgtttaatcttaattgcttctgaccagcagataatcagtcaaaaattttccttttaattaaaattggcattttaagcgctaaaagattcaggccaaggaatgttaggtgatcagcaagcaaatccaagccctattttgatcagctgtgatttaagccatg

SEQ ID NO: 105347 - DNA, 473 bp, Heterodera glycines
cgaagctgatttttttgcggcgctttttccaaaaaacttttggggcgcaaggggggccggcggcgccgatagtaaggatttttacggtccggcggtgccgatagtaaggatttttacggtccggcggtgccgataggcgccgccgggggaaaaattaagaattttgaccatatttttagtatattttcattaaaaaattctttaaattgccaaacattatgccaatttatcaaaatttaaaagattctgaggattttccccaaaagcctcaaaaatcctcaaaatttctcaaaaagccacaaaaatcctcaaatcctcattttccaaaaaaatcctcattgacctatcaaaaagccacaaaatgaggataaatcctcagatctggcaaccctatattaaaattgtctattcgctctgttagcaaatttaatgcaaaattcaataaattgacataaaaataatgataaaaaatg

SEQ ID NO: 105348 - DNA, 1000 bp, Heterodera glycines
tttgtttattactagagtagagcgggaccgtgaattcccggtcatccgaggtcccggtcccggattttgaaaagctcaggtcccggtcccggtagggcaaccgggaaccgggaaaaacaagcactggtaagaatgggggtctgagtgcaaaaattagtgagaaaattggagtaaaaggaaaaaatttagaaataataattaaatatattcgataaagtagcacgaccaactgtgcaaatgacctagtggctagtctccttcactttcccttcttctttcccctggttcattccctctacagaaattaaaatatttgaattttctttttgtacactcatggctttcctatcgacaaaatatgattcttaatttttttaattgtattttatcattttttaaagaaaaccgtacaaattgagcctagtaatctcaaaaaccagccttttttttttgttgaaatttgttaacaaatcacactcaaattttcaaaattttcccggcggcgcctatcggcaccgccggacccccttcttccccaaaagttttctggaaaaagcgcgccgaaaaaagtgatgtgaaaagtatgtaaatctgaatttctattaatattcgatcatttaaagtacaaaatgattgttggttgaaattagtttgaaaatttttattaatttaaatagctttaacttttggattttataaaataaaaaccaaaataaaaatttaattatttaatattttcacttgaaataaattaaaatttgaatttttttttaattttttgaatttttaaaaattcccggttggtcccggttcccggtcccgaacaaaaatcgaggtcccgtcccgacttctcaggtcccggcaagtcccggtcccggttttgcccaaaattcccggtcccgctctactcaattaattaccataactttgctcaaaatcaatatcgatcttggtatcattaataactaactgttttttagcctacaaacttcaaataatg

SEQ ID NO: 105349 - DNA, 810 bp, Heterodera glycines
  unsure (1)..(810): unsure at all n locations
tttttaggtgttaaaaatcctggaaataggtattaaaatacgttgccaaaaaaagtgcaaaaataggtgctaaaaacgccaaaaaatgccaaaataggtgctaaaaaattggaaaaatccatgtctttatgcacaaaaatccccaaaaatgattcagtttgatcgatttcacccgcacaattgcaacttcnaagataacaaataattaaattttgaagacgaatttttgggaaaatttttaatttcttaggggaatattttctgaaattttggtcaatttttaggggtatatttttaaaattttatggcatcgattaataggggtgtatttttcgtttttgtttgcagttttgctatgaaatttctggaaaaaggccaaaaaggtgctaaaactcgaaaaatgccaaaataggtgctattgaccgaaaatccagttttaggtaattttaggtgctaaaaagtcgctctaaatcgaaaattgttaggagaaaatgctatttttgggcttctctcatcataattaagccgcaaaaaaaataggtaaaaacctaaaaatcccatctctacagatcaccttagcaatttaggagaacttcaaattaaaaaggattttataaatttaggataaaaaattggaaaacaaattgatttcgagtactttttcattgattatttgagaatggttcaaaaattttgaattttggctagcctcctctgaacttaatcgaaatttttcgaattttggcatgcttatagaaaacacctagggctatcgagtgctactaaattcattcaattcggacaactatg

SEQ ID NO: 105350 - DNA, 815 bp, Heterodera glycines
ttttttacagattttcactgaaaattggccatttcaaaaataccttatcgtttttaattaattctatacaaaaatatttatgataaaaagaaataaaaaaagtacataaaattattattatgaataataaaatttttaaactaaagtaataaaaaaaatttgactatatagtataaggcaaaaattgaaaaatcccgaccccgaccccgaccttgctgaccccgacgaccccgaaccccgacttttccaaccccgacggtcggggacgcaactctagataaaacggaacggacaaagtctgaattctagcccaaacttagctacctaatttgaaatattatttatttttggcattttgcctaaaattcacgattaaaaaactgttccttctcgtgcctttggcgaaattgaagcccgtttatctcgtcaaaatgaacagggctttgacggaattggccggcaccagggcttccttcgggacaactatgtcttggtggttttccaaaaaaaaacgggaccgggcggccccgtaaaaccctcaggctcgtcaggtcaataccaaaaactgctcttccctctggctatgtttatgcagtggcttattaaacaaaataatttttaaagaaacgctataaatccgagtgcagaagaaattgtttttcgttcattaataattgtgagtcacagacacccaaaatttcaaaaaaaaaacattttttttcttttttactaaattttactaatttttatttcttttttttttgttagatacataaatcaaaaattagcatttgccatttctgccgagcgaaatg

SEQ ID NO: 105351 - DNA, 737 bp, Heterodera glycines
tcttttggcatttttttcacaattaatgattctgatacgtcattggaagacaaggccttcattggaaacgggcattgttacactaccaagagtatgtccttaaaattgtcaatcgcccgtgggtaattggagaaaaaataaatcatccattcttttttgaacaattttgacacaattgatcactcaaaaatctttttgatcactcggacctctatttgatcacttgaaactcgtttgatcactcgtgaactctttgatcacataatgagagaattggcattatttcaaaacattagacaaccagttgatcaaattacccaggtacgtacatcgccgggctggaacagttcggccagcgtcggagacgggggcggctcctcaatggtcggctgtcggctgacttgcgcgttggcgacaatggcactcgccaacgcttctccatcaccgccgctttccggcggtcggctgctgagcagcgacgcggcgtgcaccggcggcgactgttgttttaagacgcacacgctcgctggcggcactggcgagtgccgcccctccgcgcttgccgcccctgccgcgcgtttatgctggtgcaacaagcgccgcttttggcccgcgtgcaactgctgctgcgtgccgttggacgacgacggccgcgacacggtcatggcgactaccagcggggacgacgaggtcgcgtcgctggtgtccatgcgctcgtcctcgtcgtccagctgatg

SEQ ID NO: 105352 - DNA, 96 bp, Heterodera glycines
  unsure (1)..(96): unsure at all n locations
gtttcagtctgtttatcatttgcgcaggtccgaaaaaacagtctctaanaatatttattaaattgaattatttattttttagaatttctttgaatg

SEQ ID NO: 105353 - DNA, 99 bp, Heterodera glycines
atcagcaaatgctgatcacgaaactaatccgtactccattattcatgaccggggggggggtaggtcagtaatcagtcatgacggattaagaaaagcatg

SEQ ID NO: 105354 - DNA, 83 bp, Heterodera glycines
tctggaaattgaatttaaaagtaaattaaatttcaaatctaattttaaaattaaaactttcagccgaattgaatagaaaaatg

SEQ ID NO: 105355 - DNA, 192 bp, Heterodera glycines
cgtgagaaaatcttgacgccgaaatttaaaaaaaattgttccctgaaattttcaagaaaaaaatcttggaaaatttttataataaatatctaattacgcataattggattataaattttagcatccataattcggaatgcgacgcagcaacagctcgcaaatgttggccctgccgcgcaaactgctgacatg

SEQ ID NO: 105356 - DNA, 85 bp, Heterodera glycines
ctcgaggacggacgcaccttgggccgactacaacatcttcccggagtccactcttcacctcgtcctgcgccttcgtggagggatg

SEQ ID NO: 105357 - DNA, 70 bp, Heterodera glycines
gggaaaaaaaagggggaaaattaatttttgaaaaactcaaaaatttttctacctcatccgtgaagcgatg

SEQ ID NO: 105358 - DNA, 81 bp, Heterodera glycines
ggtgtataattttaggtttttttttttgaaaaaatatttaagatacaaaatgccgataattactgcttgttttacgcgatg

SEQ ID NO: 105359 - DNA, 94 bp, Heterodera glycines; identical to SEQ ID NO: 97954

SEQ ID NO: 105360 - DNA, 63 bp, Heterodera glycines
tgtcgtggcttcggtttttccaaaattcccgccccgtttttctaaatagttttatgcacaatg

SEQ ID NO: 105361 - DNA, 1003 bp, Heterodera glycines
actccccgccccctcccccctcggccactcgtacgttctacggggaacctgctggccgaccccttatacacttgtgatcataatcagggtccgaactgaaaaaatcagcatttgaccgacaaaaaacagatatgacccctttaaatcagcaaaatgctgataaatcagcagagttgggagccctctgatcataatgaattatggcataaaaattttttttagaaataagttcatttggaagttaaaattaaaaatgaaaagctaaaattaatgtcttttatttcagagaagatatccctttcaaatctcacattcaaggcaatttaaaacttttatcaaattcctttcttacttttttgctagcacttttgtttattaaagaatttttttgtttttttaagcaatgtgccaaacttttaaaaaaaaatttctcagtgacgaactgaacagtgacggaacgatcagtgacgaaatgatcggccaccaaaagaatattttttacaatttttggggttaaaattaaaaaattgataaaaatggggtccggtagtgccgacagtcgccgcctaaatttcaaaattgattttttccttatgagttaatatgtttttgattttaaattgtgtaagaagctttacaaaaaagttgcttttttggggggtattgttctcaattctcattaaaaaaccatttgctgataaatgtcgcttacaaattagtaaaattctgattttcattattctagcagattttggtatcgattatgagtatttaaaaaggtatttatgtgtgaatttctaaaggttgaagatcggcagttttttccaaaagatttgttatgtaattctgataaatctaccaaaaaatatttgtttttgtgccaattaaaaaaggcctgtatctcttacttatgttaatttttacaaatttaactacatatttgaaattgtgtaaacaaaaattatttcatttccccgcagtgacctcctccgtcctgacaatg

SEQ ID NO: 105362 - DNA, 403 bp, Heterodera glycines
aagagaatttaattaattttggattgaattttcaagaaaataaatatttaaaaggcattcctttaatgattcatactatttaaaagtcagcccaaaattgtttttttcatcttggagaatttttttattgttcgaaatttttgactataaattttcatataaatttttcgtaatttatttttaattaataaaataatatttaacattttgtgggccaataaaaatttttgaatttaaattctttaagcttttctcttttttgtttatttaagaatttaacaattttttcttcgaaatttggtaaaagttcttttaaaaattgctttcttggcattttgtctaccgcctctttaaggcccattcgaacgcgatcaccaagctggacaagaccggcaacgacatg

SEQ ID NO: 105363 - DNA, 312 bp, Heterodera glycines
acaattgcacgtggatcactggtcactttctgcttccatcgtccaaattgtcgttttcgaatgtttacaatgagtaaaaatatatgaatatatgtaattaattattccgttgctttatttaatccaattatttaatacttttgtccgtatttttcttacaaagacaatttgtcctttttttcttctcttttcgttccctttggtgtgatgagtaatcatccccattctttgtcaattggccaaccacaacaaaaaagtcgtcgacagcgatggtgcggcgacggtccttttctgctgcttacactgacaatg

SEQ ID NO: 105364 - DNA, 109 bp, Heterodera glycines
tttctaagcgaatgctaagcaatttgacatcccagaaaacatttgtgatattttcaaatttttatcacgttataactcaagtcctaaactgctgttttcagcaaaaatg

SEQ ID NO: 105365 - DNA, 357 bp, Heterodera glycines
ttttgttagcactgactcatttagcagcttctgaccccctctcccccccccaatttcctccgttttttattcgatgcctatcaaaacgtttaattcggttattccattttatattgactgctcacttttctctataatttcttttaatttggtcttttctttcctttttctaaatgtgcataatttctgtatgtatttgtgttctacttattggacggtggtaaaaacagataaatatattaagggtcattaatttaaaaaggaaacgaaaatgatttaacttaatttattatttattagtaaaaagatattatcaaacgaatgaattaattaaatcaactaattataagcgaaatg

SEQ ID NO: 105366 - DNA, 174 bp, Heterodera glycines
  unsure (1)..(174): unsure at all n locations
ctcaacttttgatcgtaagtgtgntcgagaattggggatggtcgagatcagaattgaaaaaaaaacaactgcgaattgcagaaattctgtggagttttggagagcgaaaatccgatggatttaaatattttatccctccaaaaaatatttacgcataaaaatcaaataaaaatg

SEQ ID NO: 105367 - DNA, 303 bp, Heterodera glycines
ttaaaaacgggaattttcaagttcactgtgcttgatctttattaagtccaatttcgaactccggacccgaaatttaaagccaaaattgtcgaaattctcattttttttccaaaatcacattttgataaaaatttggattttttacccgtgaaaaaatacaaaacgatcggaaaagcaattaaattttatgtgataccatcaacaaacagtatttatgtttattttaaatttaatttcaaataaattttaaaatgaaaattattaaaaataaaaccaaaattcatagaattaaaaaaaacaatg

SEQ ID NO: 105368 - DNA, 438 bp, Heterodera glycines
  unsure (1)..(438): unsure at all n locations
aaatttttgaaaaaaaactatttttcaactattttttactagtgaataaaaatttgttatgaaaaatgcaataaaaagcgaaaaattccccccccttaagaatcgacccgaaatttttcaaaaatgcacccctaacaaatgaaaaatcaatctccnaatatttattnatttattaattatttcttgacaagaatttatgattttaaaaatatttagctcaatactgatttggcctaattttttttactttttgaataaattttgtcattttacatccctaaatttgaaagtttttagcaactatttacccatttttagcaactacttttttgggtcttttagaaactaaaaactaactattttgcagttttttgcaactagaaatataagccctagtaataacatgcactggcgaaataagtattcttaaaaagtatg

SEQ ID NO: 105369 - DNA, 250 bp, Heterodera glycines
  unsure (1)..(250): unsure at all n locations
ctgcannggtctcttttgattatacctaatttactgaattgcttgctgtcaatcgcataaagaaattggtatatattttttattacttttatataaatttttcatagttattacaaaaaaaaacaaagaaataatccatttgattaaataaaaatttaaatatattcactgaactcgggaaaaattatcgaatttggtataaaaattaatttttccattatttttatataggatttttttcaaatttatg

SEQ ID NO: 105370 - DNA, 1003 bp, Heterodera glycines
gcttttcaattttttggccttcccccaaagtgtcgtctttttcttccaatatttttccgtttgcttgttaatccgggaagagccatcaattttacgcattataaatgtgtgctgtcggaggaaaatttgttttgctccgccggagggaatttcaatttgcaggcgcaggttttaagtcggaaggaaaaaggcattttgccaacatcatttttgttattcacaaaataattaactttttttcgtccatttttatttttattaatccgccatttattttttggggttattcccccaaatttcttttgtctcatatcaatgcaccgtctcccaattatccatcatccttttttaacaattaagccctaatagccgctaaaactgctgcaccaaagagtgaccattcattgctcggcctccgtcactttccgctaaacatttgccctccccggggcactcactttggccgctgatccctccccccggggcaattcatttcttcaaagtgatgcctcaggggatttttgggccacggacattccccggcggattgaatgaatttttcacctgtcagctcaattagagagggccagccgtcgtcactgtttgctaccatccggccaagcactcactcattcaattcattgtgtgtctgctcagtttgacttggccacaatggccggcggcagtctttctaattgatcagtcactcgctttgtgctgatcagtcattgcttcccaaattgatcaattcgccattgaacaacaaataacatcttatccctttacactgactaaatgccaacggcaaaattcatttttttaagtttttagaatttttatttggcaatttgtccaatgtgataatgtttttccctttctgaattttgcattattccgtttttcagtctttggcaattcgtccgtttttgtctttttttcaattttgggaaatttttgcactttggcattccgtaaattgtttggcattttgccttcccaaatg

SEQ ID NO: 105371 - DNA, 157 bp, Heterodera glycines
tcggaaagagcaatttaaaatttgttttttttgaaaattttatgcgatttgttaacagattttgcaccaaaataatcaattttataaatttttggtttaaaatcacattttttgtttttaaaatcaaaataatgaagaaataagcacaaatagcatg

SEQ ID NO: 105372 - DNA, 580 bp, Heterodera glycines
  unsure (1)..(580): unsure at all n locations
gaatggggacggggaaatgctggcgaaccctgagcccttttttgggcgactcctttattattacgttctgtcatgtctcaaaatgcaccnttcagccaaatcccattttactgaatagtcaaacattttttttgaaaatatattccaaantttgtgtatatatttttttgtattaaaagcatttgctggttcatggaatgacaaaacgtancttanaggcgagagaggaccccccccccccctttcggtcgcaaaaaggataagaattaagaatgattattttttgactccacaattcattgtcaatctctgccccttttttgtataaattgtgatgtttcaatgttccagcattgtctgcagtatcgtcagagatgtgccgaaaattggtttttaatgagaaaaattggtgcatcccttttccgtttttcattgccattttaaatagttattcaaacaaataaatcatgataataatactgactattttatgatgcgttatttactgtaaatgcaaaatttaatttattttggcaaataaattcactgttatattaatttgtgcgttttctttcagatg

SEQ ID NO: 105373 - DNA, 185 bp, Heterodera glycines
cccgttcagggaaaatttttcttctgggtgtcaattaattgaaaaacaaaaataaattctgtttttttttccggcaacgaatcgtttgaacttttaaaaattagatattaaaactgttaacaaaaatttgttgaattataaaaaaattttgtaaataaattttggtcacagaaaaattgattatg

SEQ ID NO: 105374 - DNA, 170 bp, Heterodera glycines
attcaattacgattgtgccgtgggttcgcttgccattgctccctttgccagattaattgttttgattaattttagatatgcgagaattaataaggtagggaaacatttgaagaaaaaatagttaacatgaatgcgttagtgtggaggatgtgctagaagatgaggacatg

SEQ ID NO: 105375 - DNA, 130 bp, Heterodera glycines
ttcctccattatcgattttccatcgccattatttcgccccctataaattcacatttttttttttgctattttatcatttaaaccgcatttcatctctctctcctcttattagatcaaaaacaaaaaaatg

SEQ ID NO: 105376 - DNA, 1003 bp, Heterodera glycines
  unsure (1)..(1003): unsure at all n locations
ttttntggcggtattttataagtgtgccatttaaattttgtttcaattctatttcctcatacattttattaatgagttaaaacaccgaaattatatatatgtagcgtatattaaattaacaaacatattaacacagacaatcattagccccaaaattagcgagggatctaaaacccaaaaaacttggcctttttacttatttaaattttttataaattcgtaataacaattccacgtgatatgccataccgtttgtctatcaatctgtttaagaaggatgcttgctgtgttgaataaatttggatctgaaatatttttaacgcgaaaatttgctagacacttgaatacataattaatattccatccaatacatgataaacaagcttttcatcagaatgaatgagaattttcaattagggagacaaatttccttagttttatttgataaaaattggaaaattaatattctggcgacgtcttctcaacttgatcagaatctatataaaacatttcttcattaaaaatgtgatttatttactattttatataatgtttgaaattatgttttttaattatttgctcttttagattttaggccaaattatttcatgaagatttaagaaatttgaaatttcggtgcccacttttattttttttatttttttatcatttttattcaataaaatgaatcgcttaaaagatttttatccgtattttacgtttgctatttgatttattgggtcagcgtttaccgataatttttatggtgtttttcttttatttatttgttaattaatttctatattttgtattaaaaaacatttacgaaaatattaccaaaatatatatattttttaatttaataaaatcttaaattctttatgatcaatattaatttaaaatctaaaaatttaaaaaaaaattaattcatttaatgctctctcgctataatatattattgatatagattaattttaacattttatcgtataatttttagatg

SEQ ID NO: 105377 - DNA, 1003 bp, Heterodera glycines
gatgggacgcgtaaaatgtgatgggacgcgtaaaatgtgatgggacgtgtaaaatgtgatgggacgcgtaaaatgtgatgggacgcgtaaaatgtgatgggacgcgtaaaatgtgatgggacgcgtaaaatgtgatgggacacgttatggcggacagaaagagcataaaatttgaatcaaaatgcaaaaaagcgcatgtcactgtgcccgaacggccaaaggacttcaatgtgccggaactgccgccacaatcatcaccttactgccagccgatcaggtcaattcgtttgtgatcagaacgcagcaggacgagctcttggggacggtactacaataacagaccactttttttatcgattgatttccaccccaaacctattggcttcaaaagttttgctttcactagaaataaaaagaaaaattgtgtatattaagaggaagtttttatgaatcctttcattcgcatttttaatctgttcttatttcattttttatgcgttcatcacatccttagtttcttaagccataacttttttcttactcaagacatacattcttggtattaatcgaaagttccgaccagtttcgaacccaggaacccaaattcgaacaaaaagtcgaaaatccaaattttcaacttttcgtccgaattcggatccggggttcgaaattagtcaaaatggatgtcagcttcgtgatcaaagaccccccagaaccccaacaaaaacgcttgacgacttttttaaactttggggaacaaactgcactattaccaaaattacaatggggttttccgaatttcagtacttttcgagaatattctggaacaatttacttacataaaacttagactttaagctttcgattaataccaagaatgtatgtcttgagtaagaaaaaagttatggcttaagaaactaagtgtggtcattgattggacgtgtaactgtcgatttagcaaacaactcatcgcacagaacaatttgcaaataaatttctgatg

SEQ ID NO: 105378 - DNA, 791 bp, Heterodera glycines
ttttaaaagaaaaaaaacataaaagctaaaatttattaatttttttagcgcaaaatcaacaacaaaagcgaaattttcgcttttttgcttatttttgacataatttattaattttaagaaaatttaaatttattcaatattctcgagaaattttggcgaaaaaatgattttttgaaaaatttttcgggttttgggctcaaaaaagctaatttagctgctgggggccgttctaatagaggtttttttgaaaaatgccaaaatatggacataaaatatggaccaaaatgccaaaatatggaaaaatatggaaatatggacataaatcgcgaaatatggaaaatatggatatagaaatccttcctagaagcttcaaaccaagctaaaaacatgtttttcgtgcgtttcaggcctcccacagtccaggaaaaaaatatggatttccatgtaattctattccctaataattagacgacattttcgttgcttttgcccgcttcttctttttctttcgctggtggcgacaatggcctaaaattaagatattttaaatatgatcaaagtgttattctataaattaattcacctaatttttcaggattttttttcgtgactttttggcgatttttatgacttttttagtcgactttttgaagatttttagtgccttaaattcccagccttatgcatcattgattgatttgtactttgctttctcattttaactgtctctttttaagttacataacaacagattttaaagggaaaagtgtgctaattgagcctccaaaatg

SEQ ID NO: 105379 - DNA, 75 bp, Heterodera glycines
ttagaaagcaaacgaatctattcaccagctctcttcagcaaaaccttcgcctctccacatttcgacgacaaaatg

SEQ ID NO: 105380 - DNA, 398 bp, Heterodera glycines
atttcgaaaaatttaaaaacaacaagcgttggcattttttcaagttaagttagtcctttacaatggagaaggcctgcaaaatttggagagattatatcgattttagtgcgctaggttcgatgaaactttttaaaatataagcctaatctttttggcctgtttaaaaaggaattaaaaatttttaaaatatttattcatctcccttttgatagaaaaagcatcagagagccttaattaacctgtaaataaagttttgtgtgtttcagagcactttctgaaaaaatacttatgaattaattttgcaaaaaataaataattaatgaaaaagtcagaatttcgaaaaattttaaaaacaacaagcgtggcattttttcaggttaagttagtcctttacaatg

SEQ ID NO: 105381 - DNA, 212 bp, Heterodera glycines
tgtttttagtctgtaaaaatgcatttatttattcggcaaaattcgaacaattttaaaatggcaacaaaataccaaattgaatttccatattttggcaatgtgccaaaagaaccgatcggtcaaaatatgtgtgatcgctaaaatgcggttatctttgaaaatggctcagaatctgcttctggcaccggctagctgcatcggcgggtgagatg

SEQ ID NO: 105382 - DNA, 290 bp, Heterodera glycines
aataaaaaatgaaataaataacccaaacaaatttagaaatattatttttctgtaaaatattaaaaatcgcttaataaaaatgtattattatattaattaatatttgttagcatgatcattattactttctgcgcaattttatttgttttaatttcaccaattttgccatcatttataacaatatgcgtaagaccgcacatattgaattattttgggcaactgatgtgtaaacgcaataacattatgcacatgatttacgaaaatatgcctaaaattgaagatcaaaaatg

SEQ ID NO: 105383 - DNA, 103 bp, Heterodera glycines
attgatcggatcatccaatcattgatcagtttgaagaaaatttaaaaagcaattttattatttttcaaaaaattaccatttttacagtaatattgccgaaatg

SEQ ID NO: 105384 - DNA, 1003 bp, Heterodera glycines
ttgttaaaaatctgtttttttgatcccgaatacacaaaattatgatttgctaattttctcccctaaattgttaaaaatgatcatgggaagtggtgaaacatataatatttgatacatttttgatcgaataaattgtaaaataactgatttgaagcaattttgcgaaatgttcttatttttgatcctaaaatcttattttttggccttgatgttcttattttgaaaaattttcgatccgagccctggtttaaaatgctaaaaataagaaataatgaaacaatatcaaataaaacagacaattggtcacttttggagctggggtggcaaagaaatcaacaaattcagatcagatctttcaagaagtttggcaaactcattagaatttagtaatctcgtctctttaggcaaaagtctatagagacgagaggttcgaataaagaacgaattgtatctagcattggttgagcaatacgctgttcttatagtagagatcggaccggtcggttttttttcggtttttttcggtttttttcggtatttttcggtttcggtttttataccgaaaccgaccgaccgaccctcttgtccgggctctatcttatagtgaattcattttttacaatgtttttggaaaaagaaaaggattcattattttgtaaatttattttacctaaaattatttcatgaaaaagttttaagtctatttttaatctacgactctcaagcgacttttgatcataaatgtttaacaattcagcataattaggtaaatcagcagcataattgttacgtctaaatattactctcaaaaaagttttttggacattctccagtttttctatatcctttttaaataaggattgaaaatcggagatccgaattctaaaattggtctgcaataaatattaaacaaatttacaagtatttgcgtatcaccagttttgattgactttagtatagcgaaagcagatcgtaatgcttttttcgagataatgtcaatatg

SEQ ID NO: 105385 - DNA, 107 bp, Heterodera glycines
actaaacaaagttgaaaagacattgaaatgtggaaagtgggggggggggggggggtgggcggtgactgctcctcaccagtccgtggtagtagggcagtttccacatg

SEQ ID NO: 105386 - DNA, 67 bp, Heterodera glycines
cctggaaccattgttattttgctgaactcctaacatatgttttagaaaatagtgcttgattaatatg

SEQ ID NO: 105387 - DNA, 1003 bp, Heterodera glycines
atggcaaatttaaaaattaggtgacaaatgtacaacaaacttagtaacattcaacaggacaggttggacataaattaaattgaatttaggagtcaaaatttttaaaaaatccataaaccattaagtttttcaaaaggcacaaaaccgcattttatttttcagcgctatttttactaattacctaataatttaacaaaagctatttggaaattgctttcgcctgctaaatatgtatttaggtatggtttcagtttattttttgtgtaacaaagataccaaacaagagaatttcctgctgtactacataatttggaattttgtatttgtgattttttttttgaaaattaagaaacattacgcaaaagccaaacactgccatttaaaatttaaagcattttccgggtggtggcttatttttgccattgccattggcctttcttcgattcctttcatccttagaatttttcgaatcttttttcaaaaaaaacattgaaattttgtaaaaaaaaaatatttcgcaaattttcgccattttcaatttccttttgtttcccttataaaagtgtcctcttctcccaactttgcctatttaagcagctctcttttctcgctttcccctgtgtccaggccattcattattcattctctttaacgaagtaccacaacaacttctgcatcccagaacattcgttcattcattcatcagtcagtttttgcatgcttttatctttatttcgctaaactgttgtttatgtgttcaattcaattttttggtttattcatctgcgcttttttgttttgagataactttaaagccttaaactgaaagtgctgccaaaaagtggctctaataatttaagcaaaatgccttttttggttatttgtttagtgcataaataaaattgtttcctgaacgcataaatttcagtagagcaacaaacacttaattatattcatttcactgataaaagcctaatcccttcaaaaatttcagttcataatg

SEQ ID NO: 105388 - DNA, 348 bp, Heterodera glycines
atttgcacgcctttcttcgtttttcttgtctcaacacacttccccacccttcgccaaatcattttgcaacgcttttcttccgtttttcttgtctaaacacacttcttactcattttgcaatgtttttttaaacagtgctctctctgtgcgtataatgaatgaataaaatgatatccaggcaaccaaatttattggcataattttgtttcaattttttagtgcatattttacgattttgtgcatatttgatacatctttggcaattttatttgcatatttatgtgcatattaatagcagaatggaatataatttaattgtaattgtttttggcaatttttacagacatg

SEQ ID NO: 105389 - DNA, 966 bp, Heterodera glycines
tactgacgatgggtgggacccgcccaaagtgccgtccttcgcgaatggtcaatctgaagggcaaacaaacgaaggcaatgagcggacaaaacacagattaactgacagattggcactttcgctgttttattgaaaagtacaaccattttcacttttttgattttgtgccttttaatgaaatatttgctgggacgaagtccgaatagttaaataaacaatttatttaaataaaataatatttctatgaaatgttaatttttcatttttatattaaaacattcggctggcaaaaataagaatgatattatagtatttttaatttaaaaaattgatataatttctaagaattcattgaagaaaaatgcatttttgactttttaatttaaaaatatttttattaatgatttttttttgttaatgcgtaaatgtgttttaatgttaaggttgaaggaaatatttatcacctaatttttcaataattttttttaaataatacataaattctgtatagtgaaacaatgggaattttaggcacaaaaaatcgcaaaataggcacaacaataggcattataaaattgatcctagaagcttcaaatcaagctaatttcattttttgtgcttatctcatgcataattcggacttcgtcatagcgcggatcattccgtccatgcctttttaaatgaccgttttgatcactcgcctgaatcattcgttgcgatacatatccccctcctcctcctcctcctcctccccctcctcctcctcctcctccccctcctcctccgcctcctctttctctttctccttctcctctcctccctccttctgctccttcccctctttcgccttcgctttgtgtctgcgctttaaaatccaacaaaatcatctgttgcgtctcttgtcgccctccgtcctctccgttctctttgtcctccgtttttttctcattattcgtccaataaatg

SEQ ID NO: 105390 - DNA, 446 bp, Heterodera glycines
ttgtaacagattcattatgggtaaagtgaggaatgactacgctaggtaaaagcttttcactcccccccccccgaatacaaaaaacaaattttaaaaaatagcaaaatttgaattttgataagcgaaagtttttgggatttgttccttctccccccgccgaaatgggagggactggcaactgttgagtttgcattgggtacatttcattttttagcttctgcttgaattccgtggcactaaatggcaattgatcggttagtaaaattggataatttcagcggcagttaaatcaattatgaagaacccctcctataaatcccccagggagtgcccttctcttccctcctcccccagggagtgcccttctcttccctcctcctccacccagagaatgtcccttcctccgttcagcactctcttacaccacgcttaaatcaatctccatg

SEQ ID NO: 105391 - DNA, 397 bp, Heterodera glycines
aggatctaacgaaattgagaattttgaaaattttagattttctactttttattcgggtccgggtttcgaaattggtcaaaatgatgtcagattcgtgttcaacgaccccgaaagcccttagaaacatattttcagtgacttttaaaaagttaaatattttttcaaaaaggggtcctaccatcggtagtattagccagtttggtgcaaaaatatatggacaaaggaattcgatgaaaaaaaaagtcgtgtaaaatcccaaaaaaaaaaaaatggatgtatgttgccaaaaactctcttcgcacaagttgccattaatttattgatcatgtaaatagacgaacatttcttcattttcaatttcaaaatttaattttagaaaataatttcactaaaaatg

SEQ ID NO: 105392 - DNA, 252 bp, Heterodera glycines
ttttgtcagattccgtatacggggacctgaatttgtcgaacaaaaatcggcattcaaattttttttgacatttttgtttcatattcgtgatcagcgactaagctcgttgttggagaaatgggcattgcagaacaatacaattgttgaatgattaaatgctatatgcttatttgttagctttttgtcacgattcggtttttttgttaaaactgtcaaatacaaaatttcagggaaaatttttgtataaaaatg

SEQ ID NO: 105393 - DNA, 491 bp, Heterodera glycines
ttatgtttgcatatgtatttacgtctatcctgcctttttgattgtttttggtgcacttcataaataaagagaatcagagcctactattcactttgacgggcaaaacagaatatcgaattttctaaagaaatcatccaaaactttgagtattgtcaaggggtagtgtttatcttccgggtatttaactcgacttattcattcagcacatgtacattggtttaccaatcgagtagtgtgtagtaaaattaacaaaggggtagagagaaatgaagtcacatagaaattttttcattccgtcttcaaatccgctcatttatttgttgctcattaacattttagcgatctcgtagcctaatacacttacaactggatggacaacttgacttcgtataaattcataacgttttacattcctctcccgcactttatcatttatttttttcaattagacattaatatacatcttctagatagcgctaattgcaggcatg

SEQ ID NO: 105394 - DNA, 559 bp, Heterodera glycines
accaatatatcgaaatcgttgtttagggtctaaaccacattttaataaaagaaaattaaacatgtatcggatcgggcagggcccggtaccggttttttaccggccccggaaaccggccctgcgatttttgaaaaaaaatccggtttaaccggtttataattttgccacaaattttccatttgctcattttcctttgaaaatgtctttttatggcataaagttcttatttttttgttacaatctgttgtgaaaacttgggcaaagtcaaagtcgaacgtaagaccccttcactgtctcctcccgtgcatacgtattattaaacgaaaagaaaaaacccgaaaatttttaactcatttcattcataattaaaaactgattttttgtaattttatttacctattttggaaaaatgtattcaaaaatttcgaatatagtaaaagaaattgcctaaagaagatttaaatttattcatttttatgcaaattttcatgctcacaaatcagatgaaaatgccaacaaaataaagaaggcaaatccggataactgtgtggatcggatg

SEQ ID NO: 105395 - DNA, 838 bp, Heterodera glycines
ggtaatcattttacaaaaggttaaagcatatatataattctcaataagcactccgtaataaaataaaattttcacaatttaatttttgacatatgtcatttttcggcacttcaaagcaaaatttaacaggatgacaaaaatttggcaaaggctcgtccccgtaatacccgacttttctccaggcaaaattaatccatccattaaaacgttcggcttgaaactggttatggattaacgattgtaatttaataatgttatccctgacgtgcaaatttattttcacatcataaatcattacaaattccgttatttttctggtaaattgcttaaattctaaaactattttttttatttttggcaacaaaactaccggaaaatgtaaacatccaatggttggcatattccagggattaaaaggggaaaataaattttcataagagggaatcgaacctgcgagggcaaaaaggtaaggccggagcacaacctccgcaccaccaagcagcacaaaaaaatgcaaatatttatttaatttattgcgataaaaaaagtttggcacgtcatatctcggcactcagactcatttcgcagaaaataaaaacacttttcttaagaacccatgggtgctctatccacccaccaaatttcattcggaaatcccacggacacccggggaccttcctttgtaagcataatgctgatttaatgctatttaattgctttttaaccacataaatgccaatttaatgcttaaccttttttaaaattgattttgaccagggttttttttaaaagttcttatttaaaaaaaaattctttatagtgccgaatttactcaatg

SEQ ID NO: 105396 - DNA, 637 bp, Heterodera glycines
tttcgcgccagagaaattcgccccaatacgagtcaagcattgggcgatgtgtgccgtgttgttttttcacgccacagtcacatgcgcgctctctatggataatccccttttctgctaggaaatgtgctgcggtaaattcatttgttgttttttgaagagtgttataaaattaaagctcattttattatcaatattgggggaaggatcgggttgggaagaatgaggggaagcacccttaggtaacgcgtattgcgctaatttattcataaaaatggtgggaaagcaaatgccctttcgttattttatgcaatgggaataaagattattacaattctacgcgcccgctgttgattttttaaaaattcaaattttcggcctcaaaacggaaaagtaccaaaaacagatagttagtccaaatgaatatgtgtattaggtcgtttctaattatttgcacccccctagaaatggcataacttttgaattctcacattttcttgctgtaattagcaatcattcaaaagccaagtgggtcagaattaccttgatcagagtttcaaatacataactttgtttgttttattttaaaaaatgtggtttactactatgcaaacaaaacaaaaattgtctttttaagatg

SEQ ID NO: 105397 - DNA, 94 bp, Heterodera glycines
  unsure (1)..(94): unsure at all n locations
aatgattttattaaatanttaggaataatatttntttcctataattaaaaataattaataagaaaataatttagacaacggtgaatggaaaatg

SEQ ID NO: 105398 - DNA, 1003 bp, Heterodera glycines
ttttttgaggcatataaatgaataaaaatgaattttctctgattaaaaaactgaaagaaaatcctacctctattgattaacgaataaaataaggaaattctacttaattgcaaagaaaaattaataaaaatattaataattttatttccacttaccaataaattgcaaattgttaaaataatgtttaaatgcttattcgaaagtcgtaaaatttttaagaaaaaataaaatttaaatttaaaccaaagtcagttacggacaactgaaaatttggatgggtttttgcacacccttcaagccaaataaagcctggaactgtcgctgaaattttacaattttatcgtaatattttttgaggcatataaatgaataaaaatgaatttttctgattaaaaattgaaaaagatcttatttctattgattaacaaataaaagaaggaaatcctacttaattgcaaagaaataataataattttattcatattttattctattaaattaattcattacgtgtaattaactaattaacaacttgtggactccatgggctacgaaatcagaaattttacaaagctatgcataagcattcaaaattgttcaattaaggtgctcatttaaaaaaaaagtaaattttcttaatttatgaataagttttattgaaaattgcttgtttttattgtcattttgaacaattattggtacctttttatacctattttatccgcaaattaatggataaattattgcgaaacccttgaaaattagtcaaaaaaggagtgttttaaatgggaaaaatgtaattttgagaagatccatcagaaaaacgaatgctttttcgcaatttaaaacgataaataatcaaaaatccaacatatttttatttttctatacaaatccatttttttaattaaaaactatttttcaaactaatacattttttggttatattaaatttggtccttttttgataaaattatttttataaaatgaaagttccagcatg

SEQ ID NO: 105399 - DNA, 288 bp, Heterodera glycines
ttttcattaaacggggataaacgcggtcataaaattgcttgaaaaccgacggttgaagaaatttgaaaaaagccctcgtgttggcgcattttgttgatttgattttgtcctcgtgtgggactgtacaacttctgctcgccaattgtttaaaagtactcgttttgtactgagccgcagcaacaaaacgaacaccaaaacacacaaagaccgcataacaccgctaacaccgaaaatgttcttgaaaattctgttgttgatggaaaaattttaaggacgaacggaaatatg

SEQ ID NO: 105400 - DNA, 607 bp, Heterodera glycines
gcttaattagaaccaattaggactgtttccgattaattgtgtgccattcatacatgtacaaggggtgtctcagcccaagggctgtcgccaaagcgactaagaaagtggagaaaaagaagaaatgagggaaaaagagagagagagagagagaaatggaaggaaattgaggaagagaaatttaattgagttaatttggataattttgaataattgtgattttttatattcctgtgatgtgatttctgtgcttagtattagtcactcttttttgttgtttgtcgctctgctaaaattgctccacctacgctttctctctccatataagcatccgcgttttctcacatctttatattatatttattcttttttttctattcagccacactctttttctttgcgtaggcgccgccgggaaaatttttttgaattttgtatgtttcgctaaggaaattttccctcttcgttacgaccacactccgcgacgaccccccccccctacgacgaacgaggggggggggggggggtgtctcgagacaccccttgtatatgtatgattgaaatttgcttttgcagctacacgccgttttgcgacagtcgcaagtccatg

SEQ ID NO: 105401 - DNA, 296 bp, Heterodera glycines
  unsure (1)..(296): unsure at all n locations
tagaacttgtcaaaagctatcaaaataaagaaattaagacattaaaaaaacttcatgagcaataaaattttttttgnatcagtaggataaaaatgtttatttaatcgtggaattactttattttttatttatntacaatcttcttaaaattatttattctaagaatataattattatgtgtatatatatatatatatgtatttgccatgaataatattctgtcaaatcaaaataataaattcatttttaatgttttaaattttattttatttaagaaataactcatctttaaaatg

SEQ ID NO: 105402 - DNA, 144 bp, Heterodera glycines
tgtgttgattatgctgttatcaaaaaagtttatataatcaaataaataattattttcaaagcatttatttgatttacttggcttttttgagtggagttcaaatgaatggcgatagtttaataaaaaaaaggaaaagctcaaatg

SEQ ID NO: 105403 - DNA, 171 bp, Heterodera glycines
gacgcagcgccaatgacattcatactgccaaatcaccacaaaatcggcagatattaagcatttaataataaaaatagttataataaataaataaataataagaacttatgttttattaattcctaatttaaattccgcggaaactttaccgaaattcgaaagtaatgaatg

SEQ ID NO: 105404 - DNA, 59 bp, Heterodera glycines
ggtaaattctgaatttcaattatttttattttgatttatttttcaatttttagccaatg

SEQ ID NO: 105405 - DNA, 76 bp, Heterodera glycines
aaatcatatattaatgggattttacaaaaaaaaaatatttatttatgtagatttttagtgaaaatgccaaaatatg

SEQ ID NO: 105406 - DNA, 53 bp, Heterodera glycines
  unsure (1)..(53): unsure at all n locations
caagcaatcgccctgctgaacaattcgatgaacaaccgcntttgattcagatg

SEQ ID NO: 105407 - DNA, 502 bp, Heterodera glycines
tcattttgaagatagaaattctaaaaaagtataaaagctccagattttctctattttaatgctttttgcactttaattgattcatttagaagtgaattatgaattttcaaacattcgcctaaatttccaagggccaaaaaatgaaaaatcttttcaattcaaaaatttcagattaagatttaaattgtaccattatgcaaaagccaaaaattttgagaatttatacagggaaaggggttgaacaataaaagccccccctcgattggacccccccccccctcgaatataagccccctttggaggggggttgaacaatagaagccccggggcttataatcgaagaaatacgatatatgtagtgttttcaaaaaatgttatcacaattttcttgcattttctttatatttttttttggcaacggtttgtcctgctccgattcaaataatataaaataatttttactgttttcgaatccaaattctcctaggctgtggcgggaatg

SEQ ID NO: 105408 - DNA, 760 bp, Heterodera glycines
tttagtgactaaaaatcccgaaatagttaactaaaatagtgtcgaaaaagtgccaaaaaagtgacaaaatagtgaaaaaagtccgaaatagtgacgaatagtgacataatttttagccaaaaattgagcaaaaaataattattcactgattgcagttgcaaatgagctacattttctttataaaattctcttaacaaatattgacattttttaaatcaaaaattttgtcaagaaaaaaaatttgggggaagaatttttgaaaaaattttccaattcttagtggtgtatttttaaaaaaaattttggtcgattcttaggggtgtatttttttgaaatttttttaaatggattcttaggggtgtattttttgattttattgcatttttgttaaggaattttccaaaaatgttgaaatagtgaaaaaatagtgacaaaacgccaaaaaagtgaattttcactattttaagtgacaaaacagcaaaatactgatttctagtgacgaaaaatgacatccaaatgaaaaaaaaaatttttttgagctcctttcttcaaaacaattgagcaaaaaaaaaaattttttcactagaaatcgcggccctacatattactaatctttaaatatgctttttaatgttttgacaaaattaggtttttaataactacaaaggaaccaacatcaagtaattaaaacaaaacgaaacaatgcggagttggagcatgatggtgcattgacggtgccttattttgacccgaacgaatg

SEQ ID NO: 105409 - DNA, 405 bp, Heterodera glycines
actttaaagcacataaaattttttgggtcaaatgaaatcttctcaaaagtctgggaagaagcaataaacaaatggccgaaaaatcaatcttttgagttttttggccagaacttttttattcagagctaattttttgaattttattgattaatcgggactatcaagcgctttaaaatataccaagcttatttaatttaaatgacaaataaaaatgttatagcgtgccgaaatggctggcgccaaagtgggtggttcccaaaaaaggcccctccaataaattcaattcataaatttcttccgcaccctccctccctgtttcgttagcatttcataaattttggttagacctccaaccaaaaaaaaaaaaatatccgagggccaagcattgggctggtggtgtgtatg

SEQ ID NO: 105410 - DNA, 430 bp, Heterodera glycines
agcaaaaaattgaaaaataattatttaatgacagaattgtccgatttggcacgccgttgtgccaaaacatgcgcattttgttgcgaaacgccgcagttcaattgcgtggacagcggcggcacggtgattgactgcgcgacgcataagaccaaatgcaaagagccgagttggagaagggtaattaatgtgctaattaggagtatcttattagtaggcactcttttttgactgacaaccgagtttcgggtcccaaaattggtctttaccagaaggaaatccgtttttaaaaaatttgtcttcttctactctctatgaatataaattgcccgttaattatttcattttaattgcccgttaattgttttattatttgattatccctttaattaattaaccaaatgccgttctctccctgatttgtcaggtgatg

SEQ ID NO: 105411 - DNA, 1003 bp, Heterodera glycines
attttgcttaaattattagagccactttttggcagcactttcagtttaaggctttaaagttatctcaaaacaaaaaagcgcagatgaataaaccaaaaaattgaattgaacacataaacaacagtttagcgaaataaagataaaagcatgcaaaaactgactgatgaatgaatgaacgaatgttctgggatgcagaagttgttgtggtacttcgttaaagagaatgaataatgaatggcctggacacaggggaaagcgagaaaagagagctgcttaaataggcaaagttgggagaagaggacacttttataagggaaacaaaaggaaattgaaaatggcgaaaatttgcgaaatattttttttttacaaaatttcaatgttttttttgaaaaaagattcgaaaaattctaaggatgaaaggaatcgaagaaaggccaatggcaatggcaaaaataagccaccacccggaaaatgctttaaattttaaatggcagtgtttggcttttgcgtaatgtttcttaattttcaaaaaaaaaatcacaaatacaaaattccaaattatgtagtacagcaggaaattctcttgtttggtatctttgttacacaaaaaataaactgaaaccatacctaaatacatatttagcaggcgaaagcaatttccaaatagcttttgttaaattattaggtaattagtaaaaatagcgctgaaaaataaaatgcggttttgtgccttttgaaaaacttaatggtttatggattttttaaaaattttgactcctaaattcaatttaatttatgtccaacctgtcctgttgaatgttactaagtttgttgtacatttgtcacctaatttttaaatttgccattttagagaaatattattcaatttgataaacaaattattaagccatcatccatccaatcgctcgtaaaacacactctttgttgctatcatctttatcattttcatctcaattgttttcgccatttgtccattggaatg

SEQ ID NO: 105412 - DNA, 184 bp, Heterodera glycines
tcggtaattaccataacaattacccttaatggataacactcatttgctaatcgtttcttttgcactaattgttttgtttctccatgctccccattttgttcctttttacgcttttccccttgtcagaatcggtgtccaagtggtgtctccgtcctttggcattcagtccgtcggctggggaatg

SEQ ID NO: 105413 - DNA, 1003 bp, Heterodera glycines
atattcgtttaaatatttttttcggtttattggattcaagactgtaagcatcaaaggaagaagaaattgaattcccaagtgccaactaaggaagcagaaaattaggaaaattacaatttgaaattaaaatgtacactatattttcaataataattatataaatcatatattcatcaaatattttggtgtcagatcgatttgaaaaataaatatattagttatttttaaattattaataataaataaatagatttttcaaaatgaaagtggatgcgataaaagagtgaaatacaaagctatccaattaaataaaaaataatttccaagtaactacaaaatttaaaataaaattattttatgtcaagaaaaaagttcactaatatgacaaagaaaatgaaaatttaatttaaatacaaaataaaattcatttagtttgaaaaataaaatagtcataaaaacttaattcatatcttatttgaaaaaagccataattgaaaaatataagttcagagaaaacaaaaatagaatgaaaacttctttatttgaacataaaaataaaagaacttacaattagatggcattttggataatttgctttaattattttaaaaggaatttacattgttcaataaaatgataatttttcttatttattctagaaaacatgaaattttacttaaaatgttattaaagatactaataaaatatattacatcaacttaaaaaaatcaaaaaattcgaccaaaatcagaaaatatgacatttgctttattaaaaactataagacaaatgcaaataaaatggtgtgtaaaaacataaaaaatagtgtaatgtaggcattaactcgggataaaaccgattgcattgcacgtgatttgaattaaattgcatcttgacaactaaagtattaaacgaaaaagaaactataacacaatttatctgaattttcaaattaaaatatttgtgtttataaattttgctttttttagaccctataaatatg

SEQ ID NO: 105414 - DNA, 120 bp, Heterodera glycines
aaattttaaaaaaaattttcaaaaaaatcgctggaagttttttatttttttcccttgaattttctaagaataatttttaaagattttttcatgaaatttttttaaattttttccaggatg

SEQ ID NO: 105415 - DNA, 932 bp, Heterodera glycines
tacgaatgtctgaaaatatcaaatccatgccttttttatattaaaactaaaattggaactgaataagcagaaagggtagaaaaatacgcaataaatatgcatatatcctcaaagaggcattaaaaatagaccgaaaatttcgatttcaaattttacaagattgtaaaagctgattttcttattattttgtattgtcagatatagcttttttctttggcatccaaatctaacaatcttggtatcattcgaaatgctttattagccttaaccaaaagcgaaaagattttcaaacttagaaaactcttattaataaaaaaacttcaaaaatttcgactttttgcaattttcatgtataacttttttggtaattgtctaacggcgaatcaatagcttagaaaaagcttctaaacatgttagctttcgaatgatatcaacaatgttggatttggatgacaaagaaaaaagctatagtggaaaaacatgctggcgccgaaacgagcgcgccgaaacgcagtggaccccataaatgatacagcatgcaaattttaaaaacttaaaaaaaccgaattttttcaaacttgaaaacacgcatatttttgcaaaaattttgaagtataaaatctatgaaattttatagactattagcgcttatgttttggtaaatttttccctggtggcatctttcaccgtctccgggcctaaatccttaatttacttcaaatatttactcaaaactctaattactaaatggatataaaatttaaatgcttttttgtaatctaaaaaaaattttttttttctttttataaaatttcgaaatcaattcgtcctttctcaacagaaatattcttacattaattgattttttctctccatcaactttattttaatatattatattcatattagcttctcttttttttagcaaaatg

SEQ ID NO: 105416 - DNA, 542 bp, Heterodera glycines
tgattcaatgcagaaaatttatccaaataatggaaaaaatttccattgtttatcaaattgaaaaaaaatatttttagtttttttactattaatttttggagaaatttattagaaaaaaagtggcagaaatttttgcttttttagataagaggagcaattaattgttcttaagaagacaaaattatttagaccaaaaaactcgttatttagctatttcttgaaataaaataaaaattacaattttttaaaataattttatttcgccttcgtaaaaactcacagccttattaaataaaaattgtcatatgaaaaaggaattagcatttaaaataaagcacaaatttatgaaaaatatgtggatcacaacaaatgattaaaacatattaaggaaaatttgtaatataaaataaaattttccatttttgattaatccccatgatttggggtgtaatcaaggatgtagcaacaaaaatatttttttgtgaatggtgccgtcaggaaaattttaaattagttttttagaatttttcagaatccatatg

SEQ ID NO: 105417 - DNA, 221 bp, Heterodera glycines
aaaaaccctaaaacggctgaagagagtattaaaagactgtattaaaagaaaaaaaagtgaaataagctaaattactattaatttttctcgaaaacaacctaaaaaatgagcaagatatttgaatttcggcgacccaaaacagaagatattttctaaaaatcccttccattcttcagctttccaattacaattttatttcttcaaaatgtctttctcacatg

SEQ ID NO: 105418 - DNA, 176 bp, Heterodera glycines
tttttggtcataacttttctgaaacttaataaatttttttgaaattttgcagaataatagaaaacacttagcgctaacgaatgacaacaagattttaaaatttcgttgcctttgagcaaagttatatgaaaaaatcttttcatttgatggttttttgactaacacccattttgatg

SEQ ID NO: 105419 - DNA, 51 bp, Heterodera glycines
tgaaaaaaatcgatttttttgtttcataaatatttttttcagaaagtcatg

SEQ ID NO: 105420 - DNA, 197 bp, Heterodera glycines
tttttgttggtaaaattaagaatgatttgcgaaatcgtgtggaagttcaaaagcgtgccgattttatatgttttcattcgactaggctccgcccacttttcgacagttcgaagctccgcccatttttcgcttcccaaccttcacctacccaaaatcaggattcatttgcaaaattttcaaaaaattctatcgaaatg

SEQ ID NO: 105421 - DNA, 283 bp, Heterodera glycines
  unsure (1)..(283): unsure at all n locations
ggcaaatatatatgacaaattcaaattttattttttatgttttcttcagcaatatctatcgaaaaattgtaaattntaataattcaaaatgatttcagaaattgctattgaactattcattaatcncaaaaaatgctcttgtaaattntgattaagtataattttagtgcttatatgtggaaaattttgtttaaaaaataaaaatcaataaagttaaattttatgggagattttatgaggaggcgcacgcggccaaattgtatatggcgtagcaagaggaatg

SEQ ID NO: 105422 - DNA, 85 bp, Heterodera glycines
  unsure (1)..(85): unsure at all n locations
tgagaatgagttgctnatttatcaggcaagagatnaatcccattagaaaagtcttaaggagtttagagttgataatgtaaaaatg

SEQ ID NO: 105423 - DNA, 280 bp, Heterodera glycines
  unsure (1)..(280): unsure at all n locations
atagataataaataatgtaatattagatttaattgaattgttcatgttantaaaaaatcaaattngagcattgactaataatcatttaattattatgactntaattaatagattttaaatntaaaatcttgtaatgttaaaaaataactaactttattttcaaaaattttacaaaaatattaatatattcacaaaaagtattgaattagaatttttttatttgttagaaattattaatcactttttaatgtttgatgaataattctaaatctaaatcatg

SEQ ID NO: 105424 - DNA, 1003 bp, Heterodera glycines
gtccggggatagaaatgggttgtaggtttcgtgatcagctaccccgaaaatctcttaatttagtgttttttatttgaaaatgaaaaaaatgtaaaaaaatgtgggatctgaacggaataagagccaatcatacgcattagtaaactattcaaatgatagtccttttttatcaatacttttggattaagttttcgtgtaaatctaacgaattcaatgcaattttcaatgccatcaaaaattagaaaccaaaaaccagtttttttttttttgaagttcagaccaattttatttactgaattcataggtttaaatcttaaatgtatttgattcgtctaaaaccttttttctgagttggcttttgcgacaactttttgtcgcatgcgattgactaataatcgcaaatttattttatatagaatttaaaacaataaatagcgtaaaataatatcaaaattaaaaaaaaaaagttaagtattcctccagaatttcatttcattcatgtatatagaattaaaaattatacttttatacatacataatatgattttcttttcatttttacctaattaggtgtactcatttaaccgggcatttgcaatgtaaacgctaaattgtacatacataaaaaagcgaaaaaataaaaatgtttattcatttaaaaaataaaagaaaagtgttttttgagggcaatatatgtagcttaagaagaacaaatgtttatgcatttcgtagttttgacttttgcatgttaaattacgcaagctttgaaattccaaaaaaagccatttaaatttaaacagaaaacacaattaaggaattccaattttgtttatttgtttgacaattgtcttacaaaaatatcctgaaatattaggtaagaccttcaaccatgtattaatacataacaattttcttttttgacagattaaattttattataaaatttcaatacttttgcttcgtcttatttttgtcagtgtttttgttcaccaacagtgaaatg

SEQ ID NO: 105425 - DNA, 669 bp, Heterodera glycines
actgacgggttccggggggggggggactatatttttcaaccacctcaaaagaggggctttttcagcgctctaatttaaggggaaggggttgtattttaaaaaattacagtattatgttttgtttttttggtgtaaacgctcatacgaaaacggccgcatgaaaacagttgcagaaaatgttaaggcccgtctcttacattgtcttacattgcctggtaaaatttaaattaacgcccaaaaaggtggcgttttgtattcaaaaaatttactgaaaaaaagttagttcgtcatttctgtttctcatctttagaataattttagtattacctcggtctatcggaggtgtgtactttgtctgtacctagttttttttaatgggaaaatatttttgttccacataggttattcgtccgaataagacccaattcacacgtttaggtcacaatttttgaatggtaacaatttttaagggtcaaaacccaaaaaataagtacccaattatcagaaatttagctgttattgttgcatcatatctataaagagaccattgtcggggcttttaaggcatatgtacatttataacaaaaataaacgatatgtataattaacacatttttaaaaattttatttctcagatttcttgattcaattacgctgatcaaaaaaatg

SEQ ID NO: 105426 - DNA, 147 bp, Heterodera glycines
  unsure (1)..(147): unsure at all n locations
aaaaaatttccaatctgaaattgacaagaaaaaagaaaacanttgggctttaaaattattgtagaacgagaaaaaaaatgtcaacaaaaaccacacattgacgagcaattcagtgctgccggtccaattgctgtgcttgcaattatg

SEQ ID NO: 105427 - DNA, 1002 bp, Heterodera glycines
accatggggatatgattggtctatggatgctcttaagtgatattcttctattttatttcacattttttgttaaaataattattaaatattattattcaacaattcttttgtttttattataattgcttaatttaattatgaatggttggttagttttgctgactatttaattattttaatacattttaaaaagttttgttttttcattgatcaaaaaagttatgtggccaaaaatatccaaaaaaacaaggggttttttgtgttccttagtcataaccttttttaaacaacaaaattttttgaaattttgcaaactgatagagaacactttgggctatcagatgatatcaacaattaaaaattggttgattttgagcaaaattataaataatttttcatcaaaaattttcatattgatggttttttaattaacgccctttatttatgatgttttttgttatattattttttaaccaatttaatgtatatggtgaaggaaaaaaatcttgagttaataatttcgagacggagagcatataattacaaattagcatatgatataatatggattaaatttattaataaaaataaaaaccatttattttttattatttttatcaattttttttttgtcacattttccgttcgtttcgttttccatgtgattgcatttgttatcgccagcagaaacaatgaaaacaaactacgaatatattcttgcccagcagcaagtttaagctacagcagcacacaacattatttcgcgcatttcggatgatcaatcaaagaaagaaatcgttgtttaatctttttcattaatgttgtggctattaatggcggacattactaattacctaatattgtaatattttcaaacaaaaactatgaaaagataaacgaaaatcaatttaaaagggaattaatgccatgtgaataattcattcattaatacattaataatatttgaaaatcacttctctcttaatcctcttctcaaaaatg

SEQ ID NO: 105428 - DNA, 159 bp, Heterodera glycines
agaaaagtgtcattcccattgctaacttattaattcgttttcgatctctaaaatcctactttttcacttttaatctacaattgaggtcttttatctcccaaatatctgcgtgataaatggatttaaatgattgcttttcaattctaaaggccaaacatg

SEQ ID NO: 105429 - DNA, 125 bp, Heterodera glycines
aaataaataaataaaatttagttttgccaaatccgctattgtttgagcttttcacttattatttatattattattattttttattctcatttcagataattaaaattggcaataaaccacaaatg

SEQ ID NO: 105430 - DNA, 385 bp, Heterodera glycines
  unsure (1)..(385): unsure at all n locations
gaaattttttgacatttttttcaattttacaaaaaaaaatttatttcgtaaaaaaatttcaatataatttttttttaacaacggcttttngagggggaatcccattgggttttctgttgttgttgttntgaggctggcttcaatgtcagataataccgatgctggaggcgcacattttctaacatatttttttgctttaaaagagcatggaaaagggtccctgggattttcttgcaaaaaacaatcccggacaccgaatttgaacaaattcgaaaatgcaaaaatcacatttcgggtacaaatttctcattcgtacaatttttgagtttttgccacttctgagaataaattttcgttaattttttttctagggtaaaaaaaaatg

SEQ ID NO: 105431 - DNA, 351 bp, Heterodera glycines
aacttggaagaatttaacggcgagcatttcaaatgcctggatgccgcacaagcggagagtggaagattcaaaggttgattaatttcttcgagcaattaaacaagttacatttttgttttcatttaagcctaccgttttcttggacgctttatgctggactacatttggaatgccgactaccccgaagctgttttgaagagcctctttttgatgtgcctgtcatactctttgaagggtgcttcggccatgaacatcacggcaaaccatctgattttcctcttaacatcacggcatcttgactacgaaatagcagtgcacttcaaaaacttcaagaaaattgatgacaaaatg

SEQ ID NO: 105432 - DNA, 93 bp, Heterodera glycines
ggacagagaaaggcaacgggaccaaaaggcaagaccccttttccaaaactcgacaacgactttttctgtccttcagattttcccccgccaatg

SEQ ID NO: 105433 - DNA, 981 bp, Heterodera glycines
ggtttatttttcattttttgcacatcaaactcaaaaacgatactgcaaaaaagaaacacgggccataagtatattcaaaatttggaaatttttccattttctgcccatcatttttgaaacttttgacttttgtcatgcctaccataacatgccgagtataaaatcttacggatttgtaagaaacaacccccccccccccgcgttaaggcattcacatcatcaacattcgcaaaacgtgggagaaactgttgttcgccgcccgtgccatcgcggccattgaaaaggttctaaaatttgaattttcgactttttgttcgaatttaggttccgggattcggaattgggcgaaatagaagtcgttttcgtgatcagcgacccagaaaacccctggaaacatgttttcatgatttttgaaatttaaaaaaaactcgaaaaatgttcgaattcgggttcaggatttgaaattggtcgaaatggaggcccggattcgtgctaagcgcctcaaaaacccttaaaacgtgttataagaatttccagaaaaaaatataaagaaaaaatgttcgggaccaataatcttggcgattgccaaatttttttcgctccaatacttttgaccgtgactgtaattaaaattgatattttaaaaattaaaatcgaaattactcacaaaaaaacaaacaaagaaaaagtgcgattttttattattgcatcattttcaatcgtttcatcaacaaaaattattttttggcattttgttttttcgcgttaatttgaatggcccttttttgtgacggaaactcaaatagtatatttaagattaaaaagagcatgaaagcattgcttctcttttctgtttcaattttcttactcaaattgctctgtttgttgcccaatttcgacttcattctttcttcccaaactcatttccatcttccccctttttttccagattattacgatttattttctgcctccaacatg

SEQ ID NO: 105434 - DNA, 477 bp, Heterodera glycines
ccggtaccggtaaaaaaccggaaattttagacaaaaaaaatttttggacaaaatttttcaaatacaaaatttttattcaattttcgcgtgagttcctgttttttagcattagaattgttcagaagtatatgtatattcaggttgaccaagtttttttttttcaaattcaggacatacagtcatggtcataagtgttgtcccatcatgctttgaaaaaaataattgcgtataaaattgtcattttccaatttcaacagataagtagcataccattggatagcattttttatgggctttccaatgataccatatttgcatttgtgacataaacatttatttgatttattttaccatattcacaatttgatcaaaatataggtggtcaaaagtgttgtcccatttcatttttaaaatattgcttctctggatcagtattaaaaaaatctaaaaaaattcaggtaagcataactttggatg

SEQ ID NO: 105435 - DNA, 384 bp, Heterodera glycines
attgggtgctacggtattttaatttgatcagaattaggcaaagtcttcgtccactttggccacattggtcgcctgtccgcgcaaagccgttgcgatcatcgacgccaacacggacggcggcggtgttccgcaccacaacgacccggacacggactcgctgggcttctacctgagctcgccccggacgcgcaaagcgattgccgactttttcgcgaaggcggcaaattccgccagcggcgaggagggcgacggaagcaacgaagacgaacagacagcgaaggcggatgaacgccaggaggtgggaaagcggaacatttgcgagtcaattaaggggaaaatgggtttctttgtcagccggaccattcgacgacggcagccgaaatg

SEQ ID NO: 105436 - DNA, 220 bp, Heterodera glycines
gaacagaaaaataaccctgtcacattttgcagcaaaacgccaaaatttctctattttcaaattttatttgtgtttatgcagtcagtttatgtttaacaaaaaaatcgtaagactcaaaaaattacccaaaaatttttgtctaattaaataaccgtgtcttaattgcattaacaaatacctattttcttccagccacccaagcaatgttcgtgccaaaatg

SEQ ID NO: 105437 - DNA, 493 bp, Heterodera glycines
agagtggaaacaacaacggtaacagcaacactgacagaccagaaacaatacaactagaaaagagacaacaacagcatcaacaacaacaacaaaagcaagcgaagaaaaaagggccaacaccaagtcaatgcattcaacaaaacaccagctttttcaagcagctgagcaactgtcgctcggcacgcgcacgtgcctatcgtcagctggtgagtggggcgagcagtgagcagttgttgtgtctggtggaaagtgcgttaaatattctccgtgcacgtgtcccgctcaggagcactcatctgaagcacttgcgcgctcaggcccaacacgtgcgtgcgttgggccgtgcgagaagcggacacggggcacgtcgactgttgctgagacagcagaccgggcgcggcgtcccggccttggctggcttggtggccagcgttgtgcttccactgctggcggataagctcatgagccgcaaagacagcatcatccaaacatg

SEQ ID NO: 105438 - DNA, 104 bp, Heterodera glycines
acgtcgagtcattcccctcatcccgcactgtcaatgacttttggagtctcgaggcgatcggcatcacggacgacccgaatcagaacgacgaccatatcgccatg

SEQ ID NO: 105439 - DNA, 545 bp, Heterodera glycines
atctgtacaaaaataattttctttaattttcatttaaggccttaagagagttacgtcaattatcaaaaaggttcggcttaatgtcagatattcgtgtgggttctataataagttttaatcacttaaatataattttaatatattataaaatttttaaaaatgtatgggattttaccgcattatgagtcctttaagaggataaaattgttattattcaaaacacgctgattgtgatgggtttagcctttttagcttttacaacaaataaaaatcaaattttataataatttgggcgtgggcaaactaaagagagagcaaaggagagacggctagaagggagtgtgggaaaataagagagagaaaagactgttagagaagcgacgtgagaccggttgccccccgcactcctttaatgacccccctaattaccccgtctccctataatatcattaaattaatttaattatttataataatttattttcattacattgatgactaactctaattacatttctttttctgtcattgatcagtcaggaatg

SEQ ID NO: 105440 - DNA, 212 bp, Heterodera glycines
tgaattaagccaatccattgacctgatcagaccattataatccattaatcaatagctgaccaattagtaatttttgatcattttaccaatgtctggtcactttcatcatctttttatctttccctcttccattcccattcattaatcaaccgcacactgcagatgaactgctccaattcacaccactcggcacaattccgttcaccgccatg

SEQ ID NO: 105441 - DNA, 251 bp, Heterodera glycines
atgagtatagaatttattttcagaaagtgtcaacagacttttggaaaatatatttgcaatttatcaacaattttgagaagtgagttagaaatgataaacttcacgattcaaaccaattttcgttgctctaattaaccgcgataaaaacattcgaatcaattaaatagcttctgagataataaggtttatcataaaatttcaattaaaaataaaccctcaattattggtatgaacgatactttccaaacatg

SEQ ID NO: 105442 - DNA, 666 bp, Heterodera glycines
tatcaaactgtaaatgtccaaatcactttataaccacttttatcgtgtagaggcatagtcgatttactattttgaattttcggcttcttttggctccgcgccaaaagtgatcagaaaaaaacgatcaaaattccgaaaaatcgatgaaaatggtcaaatttgcaaaaattcctaaaattaatttttacataatatttggacaatttgcgtcgtcgcacttcaccaacaattctcactgatcttgatcaattgaattcaagacattctcccatcatttatagggttaaataaatcagattttaaacaatttttttgcggcgcattttttcagaaaacttggggaacttgggtgggcccggcggtgccgataggcgccgctggggaaaattttgaaaattttagtgtaatttgttaacagatttagtaattaaaatagtaaattaaatgaaaaaacggtaaaataaagtgtgggcatatgggattgaacccatattaaaaaaacaacaaaaatctgaagtgtgcactgggctttaccagtggcgatgctttggacaatttgcgtcgccgcacttcaccgacaattctcactgatcttgatcaattgcattcgatcgatttcgctcttatgtgctctggcacgattgatgatcaaattctgtccaaatg

SEQ ID NO: 105443 - DNA, 235 bp, Heterodera glycines
tccgtttggccctctcctcggcgtcatccgtcggttgtggcggcggcggcggatgcgtcgcacttcgtttggctcttgttttggcactgcctatccccgaggcaattgtcgtcgtctctgatcaatgatcaatcgcctttttctgctgatcctttgctttcccttctcttaaccaaccgttgctgttggttcgcaatttgcccacttgggtcagtttcttcagcggcgcactatg

SEQ ID NO: 105444 - DNA, 57 bp, Heterodera glycines
attgtaaaaagaggggggggggggggcaactaacagaaactttttgcatacggaatg

SEQ ID NO: 105445 - DNA, 56 bp, Heterodera glycines
ttattattatttttcgtgcccccccccccaaaaaaatggtatttactccggaaatg

SEQ ID NO: 105446 - DNA, 210 bp, Heterodera glycines
tctaaaatcgctcaaactcgtcaatatactcatcgcgacgttcttcgctatcataaccagtatcaacaaacgaaggcgtcattgtacctttgccgaaataaaaattcatcgaaaaataaaaaaaatgtgttataatattcataaatatattaatttatcgttttacgtttttttaaatagcactcaatcaatttgttcagagtcaaaatg

SEQ ID NO: 105447 - DNA, 1003 bp, Heterodera glycines
tttgcgtcatcaaaatattgaaaaaattgattaaaaacattgagaaataaatccaaaaataataaatattcataaaaaatgagtaaattaaatgaaattattaataaacctaaaaaaattattaaaatattattatagttaaagtaagtttaaaaaatatttggattagcaaattcttctttaatactcctttcaattggatgttgctctgtaacttttaggagagtcattgtcaggaagttaacgaagataaacttgtgcctcacctcataaatctgttttaccccaaccattggtcaaagcgtgtgttggcattcctattgcgaagctgggcaatgtgttcatctcttttgccaaagctcgcttctgaccgaaaaagtataacataaactaacaaatttacagttcaattttttccctcatttcatgattttgccgaccgttgtttggcttacattgatcggaatgcggacaccttgttcaaatcagaggcatttttgcaaattgaccagaaattattgttcaaaattctgtgccgggatcagttggttgtaagccaagaaattgccatatggaatgccgtaaatttttgcattttgtaaaaatttaaaattttgcttttttgggtcgattcttaggggtgtattttttgaagaaatttttaggtcgattcttaggggtgtattttttgaattattataattttggacaaaaggcaaaaataggttctttcaaaaaatttttaggcttttaggctctaaaaataaaaacctagaaaataggctctaataactcgaaaagtagcttaacaacatcccaaaaaaccatgtttttagtgcgtttcaggccacggggagctcaggaaaaaataggcttttgcctaaaaatcccagccctagtgaggaccgtggaaccaagctactttaagaccaattaattgttgctgtctgattgtgagatcgaaaaactcttgactttagagacttttttttgtatgaaaatg

SEQ ID NO: 105448 - DNA, 240 bp, Heterodera glycines
tgtaaaaaaatccgaaaattttgaaaaaatcgaaaaattccttttttcagcttcatctccgccgattgttggctcgaagtgttcgctttacttccgccttctcagcttggcctcggaatcgctctgatcagtcgccgatttgaccgccgcgtggacgaacatttcaaaacacgcaaatggatattggacaaagaattttggattcgagagaagaagcgattgtttggcaggaaggaaatg

SEQ ID NO: 105449 - DNA, 428 bp, Heterodera glycines
ttatcgttcttcgggtgaaataatttgataaggccctttttgcatggccaacagccaacggaacaatatgtaaattaaaaatattttgaaaagaaacttaaatttacttttatgaacatcaaaatttgggtcaaatactaaaatttaacactgattgtgcctgaatttaaaaaaggcttgctaactctaattattatttacacttaaattaatgaaaattttcgcgactcctttgcaaaaaggtctattcataccaagtgcccacttcttttaaaaacaatgtttaagttccattatcttcgtttttacgaacactttaatttaattaatttctgttatttccttttactaaaatttaaattagtaattactcaaattttacgattattaaaaaagtgacgtcataatttttcttgcgctgaaaaatg

SEQ ID NO: 105450 - DNA, 595 bp, Heterodera glycines
ttccggcctatttccgaatctcgaacccggactcgaacaaaaaactcaaaagtacaaaattttggcgctacttgcaaagagcactattttgaaaatgttttcacttttttttggaaaaatttttttttgttttttttatgcagaatttgtttttttaacatggaacgtattgcatactatttaataaactgaaaaaaacattttaaaagaaaatttagcgctagttaaaaattgacaaattttgagttttatcaaaaaccaaaccaaaggggggaccctattgttttgcaaaatttttttgagataaaaaatcgtgaatatattttttattcgccataattatgctgttaatacttaatattcatcattatgtgtcaaaaaaacaaaaaaaaatttttccaaaaaaaagtgaaaaaattttcaaaatagtgctctttgcaagtagcgccgaatctctctagcaaaacttgctcaatttatttcgaaatgaaattctttgcttatcttttctctttttgtcttgggtgatttcaaccgttttatacaaaatttaggcgtatatctatttaaaattaaatatttgtattaacagatg

SEQ ID NO: 105451 - DNA, 84 bp, Heterodera glycines
ttggtccatcccaccaatcagaaaatgccgaaagttgatttgaaaaattttggcaattttcaacaaaattaccgtcaaaagatg

SEQ ID NO: 105452 - DNA, 453 bp, Heterodera glycines
ttttcttagctgtaacattagaaattaagtcgattttattctaattcatgataagcatccaaccgctggaaatcttttctatttttgaaatttttaccaaaatttgtgaaactttttttggtatggaaatgaaccaaatacgtgggtaaggaaacggtggtaaggaaacggttggtaaggaaacggctggtaaggaaacggttggtaaggaaacggtggtaaggaaccggtggtaaggaaacggtggtaaggaaatgagtcgatcccagacatatatatatatatacagtatactttaacaatgaaatcctgtttttaactgcttcactgaagctggggcactacataaaatgccgttacataacaaatatgattttgatgaatttacgttaacattcactaaataagtttggtgttaatctccattaattcagaataaatattgttaaaatg

SEQ ID NO: 105453 - DNA, 205 bp, Heterodera glycines
aacgaacgaatggaggcggcactttgccattttgggggaagagaaattgcggtactctttcagtttaatatgcctataaatgtattcattttacattgtgtctggtttttgcagaagagtaaataaatgaatattaaagtcttttaaaatttccatgcttaaaaaaacaatgtaaaatgaatacatttataggcatataaaaatg

SEQ ID NO: 105454 - DNA, 220 bp, Heterodera glycines
  unsure (1)..(220): unsure at all n locations
tggacnaatacaaccagtttcgcccagcgctacaacagacttttgagtgggtacggcgctgaggtttgtttttagcattgtaaccttttttctataatcagtntaaatcgttaagcatgtttacgtgccaaaattgctgacggaggtttcaaaaagactggaagcggttccagttcaaaaacgcaaaagggggtccgaaagggctcaggccgaggagatg

SEQ ID NO: 105455 - DNA, 110 bp, Heterodera glycines
ttgcttatatgaattgtatacaaaaaaactttttgccccttcctagtgatttgtcttatgctctagacatatttatctacttttctataatcagttcaattttagaaatg

SEQ ID NO: 105456 - DNA, 357 bp, Heterodera glycines
atgatttattatataacaaataaattaataataattaataaatttaaatatttcaatcatttatacttttggtaacttcggctcatcatgacgtgctctatttgccttacaaaaagcaaaaagattttctagtatataaaaaaaaattcaaaaattttgaccttttttggtttttgatgttataacctttttatcaattttttaatcgcaaagcaatagctagaaaatcttctaaatatgttaagttttcgaaaggtaccatgatttttgatttggtcgacaaagaaaaatatatatagtgcaaaaacattctggggcccaaagttgagggcccaaccgtgccggtctaccgtaatg

SEQ ID NO: 105457 - DNA, 167 bp, Heterodera glycines
atgagaaaagggaggcaaagagcggcggatccgccaaagtataaacgccgtgtgattttgcccttttcagcagcaattgggggacccctttggcaatgccctgcagtcccttctcttctccgtctcggtcgagtcgcctctcagcgacggttcctcttctcccaatg

SEQ ID NO: 105458 - DNA, 258 bp, Heterodera glycines
tttccacttacctaaattgttaggaaattcctttgcgacgaatcgatttttattttagccatttttaactttgtgtgttcaaatgtttgtccatcaatgtctttactatgatatcaaattcagttcattagttttataaaaagtaggtgcttagtcgacctctaaatgcatcagtgtctgtttcatacttttaaagcgtttgaggcatttatattgatataatttgtagctaaaatattacttttgacttttcaaatg

SEQ ID NO: 105459 - DNA, 412 bp, Heterodera glycines
gacaaggggcgggcgcgaagcgcatgcccttcgaggtgcgcgagcgaggagcggagcgacgagcgagtgtaccgagcaatacgaacctggcctcttgcccggtagccacgcacggcggcgcacccggggagcgggggggggggggttaattataattttcaaaacaatttcacaatttgttactgaaaactccgcgcacaatataaattatgttgtgtaatttgcttacgaatacacactgccaaaaaaacattttttgttaaatttcatttatttattatttttatcataaaaaatagattaacttaatgaaaatatacggtaactgattatacggtcgacatcggaaaacaattaagcagatttcaaacggagaagttaattaaacaagcaaaacaatggataaaaaatg

SEQ ID NO: 105460 - DNA, 1003 bp, Heterodera glycines
ttaaatatttataccatgccattttattcattatttcttttaaaaatttgtttttttcttacactaataaaaaaaaattatagtacaaaaatattctaaatcgtttaacgttttggtgattcatcaaaattcaccatccattttcgttttgctttgatggagtatgatgataatttctgtccctgggttaacaccaactatttttataaatatgtttataaatcaatcgtaatgagaagaatttaaaataatattaataatttagtttaaaccaaatttttgattaattaaattaatggacatccttaaactcttcacccttttttggcttcctttgcttctccataatttttgtgtggaatcagccgacgagggtaattaattaattaattaaaattaattaattaattagttaataaattaagtataactaaaaatttaataagcatctactaataattttcccaattacgaagcaatagttaatgacggacaagtgggccagagccgtgaaacaaggaacgcgaaaaaatggaaagactggaaaaccggcaaagaaaccacctctcgaaatgtgccagttgtgtttgatgaacacggcgaaatgtaaataaaaaataataattattaaaaatgaatacacattattttattggtgaatacaaaaaaaaaaccagctgaattgggaaacatatgatttttagttttgataaggtaatcaagtatcagtaggtcttttttaaacttttgtatatgtttattttaaactaattttttaatcttctcatatgcataaatcctaatatgcgcaaaaatatgtttgaaaacctgcacaacccataatctttttaatttgctaaatttttcatgtttttgtccccactcgttctgtttttcaacaaaaaaaaatcgtcatatcttttgtcaaaattcttggtttcaagtggtggcccttaagatgctctatctttatgctaaattcaaaaattatatttcagaaatg

SEQ ID NO: 105461 - DNA, 129 bp, Heterodera glycines
tctgtttcttcaaaatttaagaaatttgtgcaaaccctttaattttttttaaatctttttttttttgctcgaatttactattcttcaacattttgtatgccgatttccttttttttacagatacaaatg

SEQ ID NO: 105462 - DNA, 146 bp, Heterodera glycines
tggaaataagcttaatagggcctagttaagctgtaaaaaaatttgggggcgatttgaatgagaatagaaagagccaggttcgatgaagttttggtaagccaaaaaaaaatccaaacatttaaaaatctataaaaaatttaaaaatg

SEQ ID NO: 105463 - DNA, 1003 bp, Heterodera glycines
aaaaaccgaaaaactattggatttttgatgaatatgaatagaaaaatttatgaaattactgtaaaaaatttaatctataaggaatttaacaatgaaaatatttagttatttaataaattcaattaaagttttcaaattcattaaaaaagaaacaattaaatttattctataaaaattttcctataaaacaatcatttaagattaaaggaaaaatagtttaaaattttggtatttccaattgatatttaaaagtggccatatcgtggaataaatctaactgtgaaaaggagcaaaagattaattagaatgctaaatatttaattgattgtttgaaaaattaaaatattaaatggaaattaataagaattattaggatggaataaaaatattttaaatgaaaaatttaatttttgagtatttaaacgaatgtaaagagctcttgtaattattatttataaatattcattatttttagaattttattcaaataaatttatgtaaataaaagaagttatattaagcttttttaatatcttcaaaaatatttaaaaaagtgcttctaggttagattatatttaaaacaattctaatataatgagtttattaaaataatttgataaagaaaattgaaaaaattaaaatgtaactaaataaatcttgtcatatatcatatcgaagtgaatgaaaagtcaaaaattaataaaatatgaaaaaataaaaattaaaaatgatattcgaatcgataaaatttatttgttttacgaattaaaatagtttatgtgatattttccactttttaatacattattcattaaacattaaataaatatacgaaataaacttacacttaaatattgaaatgtttttagtaaataataaactataatgaaaaaacaatttaaaaataaaaataattgtcgataaaaatgggtgacggagtgacgacgaggaggaaagcgttggcgaggaagaggggatgaggaggaaaggaagacgagaaatg

SEQ ID NO: 105464 - DNA, 397 bp, Heterodera glycines
atggtgtgggattatttatgaggtcggaataatttttgaaaacgcaatttttatgtcgttttgtcttttgaaataaaatgcaatggattttttgttttaccgcatgtgtggccgagtggttaaggcgttgcgtttatatcgcaaagggatatttcctgcgcaggttcgaatcctgccgcatgcgtaccactttttttgttaaccaacatacaattaaaagtagggaccagtagaattttgctaaggccgaccggactttgaaaatataccgggacgttcccgggatcgggactcccggggccctaacccaacttttgaccgggatctaggactttttcagaaaatttgaaaaaaaagtttaaataattcaaatttttcaatatgttctctacaaatg

SEQ ID NO: 105465 - DNA, 211 bp, Heterodera glycines
attaattaaaaaataaaataataatttatttttaatttataaaataataattttttttaattaaatttaaaataacttgaatattaaataaatacaaaaataacattaaaataaaataaaatctaaatattttataaagaaaaataaaattatgcacttttggtcgagctttttgcaataaaagaaaggaagggaaaagggcattaaaatg

SEQ ID NO: 105466 - DNA, 226 bp, Heterodera glycines
ggtattcccagctcttaaataaatacgggttaggtaaatagttattttttggaaaataaaagcgaattgtttttgtttgtttgttaaggaggccctttctcactacacccgcgctattataaagaacccgaatgatccgacttactttacaaatagagcactttgcaatttaaatcttaaaaaatgggactccgcagcggacgactgcagaaaagcgctttacatg

SEQ ID NO: 105467 - DNA, 107 bp, Heterodera glycines
aaaaacatttgaatcaattaataagttctgagataataaggtttatcataaaatttcatttaaaactaaccctcaattattggtatgaacgatactttccaaatatg

SEQ ID NO: 105468 - DNA, 130 bp, Heterodera glycines
  unsure (1)..(130): unsure at all n locations
acgctgccgctgcgacaccncggaggtgcacgccgcccgtccaagcttggaagacggcgtaaaagaacaaaaggaaatgactcagatggcataaacacttgtccatttttctattgttgatattctgatg

SEQ ID NO: 105469 - DNA, 134 bp, Heterodera glycines
agtgcgtggaattataaaagaaaattaaacaagctcttcacttatcatttgaaccaaaattgttaaatgagcatagattgaattataatgtaaaattggtcaacgaaaaaccaaaagtgccaattaacgaaatg

SEQ ID NO: 105470 - DNA, 209 bp, Heterodera glycines
aaatgaaggattgctgttgattaatggaaatcacgcgataaagatttcatcctcattttatatgaattctctgagtcaagttaatttcgataaatccattgcagttttgttgttatgtttttttgcacggatttcttagtaaagccgttcatttcgcttataatttatttatacgtcccctaaattcatttttgatgaagcctaaaatg

SEQ ID NO: 105471 - DNA, 777 bp, Heterodera glycines
  unsure (1)..(777): unsure at all n locations
tcaaaataaataaataaatactgtgcaattttatccgagtcattttgtgtcgtcactttttaaatcttaataatacctcggaaaatttagaactgctaatntaaaatttattatttttgttatactttctttttgtgagcagttcaataattgtcgccatacagtttatcattggatcatttatgattattcgggctgccaaaatcatgtacaaaaagcggtcacatttagtgaaatatctatgaaatatttacaaaactgaaatatgtactaaacgtaataaaaattttaaaatggttcttttttggtaaaaaattctttgtaaagggtgaaaatttcgaacttttggatttttgaggcatttaattaagattttcataaaaaattttgctaaaaagattcttaatatgtgcaaaagatgtataaaaagtaaataaaagttacaacccttctgcttcacattagtcctcaaattatgtttttatcgaaaaataaaattctatgcaggttagttgggtttcactacagcactcacaacaaacacaggccttacgctgaataatttgtattatttttctcaacaaaaatttttgctttttagaatatattaatttgttcttgagaattctttcgcttcatttgtagttttgtacacagtaaacacactttctaattgtcattaatggaacttaattattcaaaactgggccaagaagatgcctatttaagctgcaattatcaaaaataaaataattttcttcggttttcccaaaaatg

SEQ ID NO: 105472 - DNA, 1002 bp, Heterodera glycines
ttttcgcattttagcgcgaaaagtgagaatttaattcattgttaagaattgggtcagaagagtgaaaaaatattttgaaaatacggaaaaaaccattaatttaatgtatattttttctatttctgaatttttcgaaactgctttcatgtatgaatactattagtggaattgtactacatatattcctttatattcactgccctactgatatttttagaaccagctaaattggttaactttaccgatgaatttcgtaaagatcggttagggctctcagggtgactattgaaaagagtaaaaacttggtttcattcaattggcattatttcacccaggataaattatatcgatgtagaacctaaagtgactcgcccggtgggactcgaacccacgacctaattaatgggtctttgattgaataatacgagaaaaggtagaaatatttggttaccaaactaccgtattcctgggagtactattcttgcgcttgtttgttagagaattctagcacagaaagtacggaaaataatggaaaacccctgtcggaatttgattccttcaactaacttactctgcccagccctactcatagccttcaaaatgataccaatttaaaaatttctttgatttccagaaagtcgaaaaataattttatttccgtttaggcactgactgatcatcattactcttccagatgggcgattatcaaaagaaggatttgaaaagttaaaattttatttcaacagaaatgtcaatttctatgcaaataaatgagcatcgtttgtatatttcattcttttttggaaaccgtttttagaaaaggccaacgaattaaatgagtatttattattatatgaaaatctggcgatgaatcagctaaaaatattatgctaaatcactaaaaatggttttcactttcattttgctcatttttaaaaatgaaattcaaatataaagtaaacaaatattttttagtaaattattaacaatatttccgaaatg

SEQ ID NO: 105473 - DNA, 233 bp, Heterodera glycines
cctgaaatcagcaaattaaatttattaaaaattttccaaaatgataatttgcaaataaatgaaagcaggaaaaatttttgtctttgttccaactcgtttcaaaatgttatgaacgcaaactatggtttgctgcgatttatgacaaaattttattggccatttttcattttatcagttaaatgcattcgaacattgaacaaaagggaatattttactgataaagcgataaaatg

SEQ ID NO: 105474 - DNA, 106 bp, Heterodera glycines
atttaaacaattaaattatttaaaaaaataataattaaaccaattttaattcagtcctttttttaaattttttaaacctttttagaagttgaaagtgatcagaatg

SEQ ID NO: 105475 - DNA, 1003 bp, Heterodera glycines
aaaaagaatagaggaaatttgtaaacgcagtcactcatgcctaattaacaattgtttcgctaattgaccaataattagttgaattacggattctctaaggatgaaactgaggaaacaattaagaaggaattaagatggtaagggagataaatgaggaaggccccaaaaatcattacaatctgaaattttggttcgaaatggaaaaacgacacaactatttcaacattaaataattaaaatattttatttttctgttcatttggtcaaatttcctgctgctttcagaatgggtcgaaagggtttttctgccggaaaatttgcggcggatgcgcgaggcaagggaccgaacgctgcgctccctccagcggatgggcgtgcgctgcttgaagccgcgggcgggctttttcgtgctggccgacttttccaaagtcagccgctgcccgtccattttcctcaaataattgtgcttttgagtaactgtaaaaaaggcattaaattatggttaattggtaattagacaaattaataattcctgccggaggtttcacacatacattttttttggggggggggtcgcaattttgaaaattttcttaacaaattcattaaaaagtccaaaaaacattccccggcggcgcctggcggcaccgccgaaccccaaaattcctatttttcttaaaaaattggctcaaaatcgcaaaaattggccattttttggtgaaaatctgttaacaaatcacacccaaagagcaaaaatttttctcccggcggcgcctaacggcaccgccggcccccctggtcccgaaaagttttttggaaaaagcgcgccgaaaaaaacggtttttgaaaggcaaaaaaggtcatctgcggccgaccccccttcgcaaaaaatttttccgacccaccccccttttttatgtatggattggattaacaattttaacccaatccccgtattgtttagcgccaggttgcctcgtccgtgctcaccacgcctggtatg

SEQ ID NO: 105476 - DNA, 176 bp, Heterodera glycines
ttttttttgtcgagaaaaatttagaatgattcgccaaatggggtggaatttcaaaaacgggccaattttatacttttcaatcggttaggctccgcccacttttcagttcgtaaagttcatccgtccaaaatcacgattcatttgcaaaaaaaaatcaaaaaatttccaacaaaatg

SEQ ID NO: 105477 - DNA, 346 bp, Heterodera glycines
cacttgcatttccatttgcaagtggtttccctttcgggaaatgtgatgagtgtggcctcacttgttacaccataggaatcgttgtgacagtgccacccgaaatccaaaagttcgaaatatgctgtgcagaaagctgcatagttctgcaagggccttgaacttcgaactaccaatcgaagtcctactcaacaatcatcactgtgaggccagattttggactgactcacagcacaccttcacatcaaacacgacctgcccggcagtcgatgaatgtgatctcatcgactgctacttttgtttcacacaacttgtgaatccaacatgccagcccgtcattgcggcaatg

SEQ ID NO: 105478 - DNA, 1003 bp, Heterodera glycines
agaattgtaatgaatcccaaccatataaacatggttaattgactgggcaattttttaaagactttacagctcgaatttgattataatttacaactatgcttttaaattagacggctatattatttacatattaaaatatttttatttccttaatttgatggccaaattttttggtgcccaattttataatgcccaaactttccggtgccaaatttccccttgcgttttagaataataattttcctctgataataggaaacatgcaaatgtgaattgtatatccaaaaatgaataaattgttttgagtaatcgtgggagtttagctaaattaagaagcatattttcgttgcgtctttaattttaaattcagtaggtgttggtgcacaaactcttgaaggcaacttaaaacaaatggagaaaaatataaaagtatttttaatattctcctgtccaaaattaaataaaaccgaatttttgaaaattttcgaaaataaaaattttcattgcgtctattatgaatttgctcaaaagcaaccaaactttaaaactacaattcacatttctatgattcatatcatccgagaataaatactacaggcaaaaaaaaggttgacagtattaaagcccttttctcattgatattctaattcttctattaaatctaaggagacaaatttattgttcgaaaactttcaaaaattcgcttttattcaagaaaaggctggaaaatattaaaaatataattaatatttttctccagaatgattccgggttttgttatagaagatttttaggatgtttgaagattttcagcaccatcacctaatgaatttaaaaaattaattacacattctaaaatttgttctgatttagtctaaacccccaagagtaccgaaaaggttattcgtttttagaatctatcagctaaattttgcagtttcgttctcagtaaattatggaatattaattaaagctaaaaatttaaaaaagccaccaaaaaatg

SEQ ID NO: 105479 - DNA, 90 bp, Heterodera glycines
  unsure (1)..(90): unsure at all n locations
tttcgtataatttcaagttcaattagtattttgaatttttttttcttaatcctttaatgacgttccgttctttntaatttttgaagaatg

SEQ ID NO: 105480 - DNA, 1003 bp, Heterodera glycines
agcaaaaacttttttatttgttgaccaaatccaataaacttggtatcattcgaatacttttaacaagctctattggctgtccaaaaaatacaaagatataccgacatataaaaaagctataagtaaaaatatgcaaaaattctgactttttggtagtattcatgtttcaatttttttataagctgttcaatcgcttagaaatagcttgtcaaaagcttctaaacatgtagagctttcgaaggatgccaaatttataattctactattatttataagtataacatttatgctgacttaaaacttacacttacacaattcgtcagtttaaaattaacacaatttacttcaattaattatataaagattattaatgaatacagcataatcatttgtttttgaattaaatttttatactaaaattaaacaattccatacatactgtattggtgatttttgagcaagtaaagtgcgtccaatttggcattttataaagtggcattccgaaaccccaaattgtcaattttctgcaaattttaaatcaattaaacaattaagctcatttttaatttttgatttgactgtactcaatcagtcaccataataaatttcattatgtttgagcaaataaaaagccaaaaatggaaaaaaactttctctataaacaaaaaaagcaataaaatttgtggatatttgagcaattactaatttctttttttttgttcatttaaacgaacagctatgaaaacatttaaattatgaatttacagaaaatagaaaattattacgtaaataaaataataactaattcgcattttcactacattttaagtcaatataaaaggaatgccaaaataagagaaatgcatcagtctcacattcatttattaaatatgtttaataaaaatacaccattaaaattgaaaaataatgattcgtcacttaactaaattttctttaaataaattaataaatgaattttagtatagaagtaatttaaaaaatg

SEQ ID NO: 105481 - DNA, 118 bp, Heterodera glycines
tcttaatagcataaaaatttctcggcttccgagccaaaaaacccgagaccgagaaagaaaacagtattcaaccgtgatttgagtcttttaattttacatttttgacagagttaaaatg

SEQ ID NO: 105482 - DNA, 240 bp, Heterodera glycines
tttcggggacggatgggctaaccgcttacaatcagcaatttttagggatttatttcgggcattcacccttcccgaaattaaaatttttccaggaaaaattggcaattagcccctcccagtgtcatttttatcaccggatattctttggcatttttgtcagattggcaccgtttgcttgagctgcacagtgccaaggaacgactctcctatttgacttttttggtcaaacgtaacaaaatg

SEQ ID NO: 105483 - DNA, 257 bp, Heterodera glycines
ttttgggcacaaattttgtcagtttactcactgctgacttaattatgacggtatattttaaaatttcaaattttttttttatttcctatttttcagcctccaatttttgctataaattgtggcacactttttttgtggttgttgtcattttgggcacaaattttgtcagtttgctcactgctgacttaattatgacggtaaattctgaatttcaaattatttttattttgatttaatttttcaatttttagccaatg

SEQ ID NO: 105484 - DNA, 97 bp, Heterodera glycines
tctttctcctctctcagacaacgcatcaaaaaaatccaccactgactacccgtacaccgctcttagtgaccaacttgcggcaatctcccaacaaatg

SEQ ID NO: 105485 - DNA, 284 bp, Heterodera glycines
  unsure (1)..(284): unsure at all n locations
catccatattttatgtaaaaatatataaaacaaagtacctttaatagggaaaagcgaaaggagggcaaaccgcagcgcactttaaaggaacgactcaggaccaacagcccaacgaggccaaacaaagnccaccgaacaagaccaaacgacatcacccacacaaaaaagcccaccaaaggagagagagagaacaccgactccgagccggagnncagaggaacgggcgggatccgccgggacaggaagcatttggtgtcgggaataaccccgaaaatggcaaaatg

SEQ ID NO: 105486 - DNA, 157 bp, Heterodera glycines
tctttttttattataccctttcttattattattgttcatcacattttaattcatgctttaagtacaattccattagtgagttacttcattatggaaattaattttataattcattttaattaattagattaaggacaataggctaattgcaattatg

SEQ ID NO: 105487 - DNA, 105 bp, Heterodera glycines
tttttattttaaaaaataaataaaattatttaaatagtaatgtaagtaagtaaacaaattttatttccccaggatttgggattggacgacgacgacaggaagatg

SEQ ID NO: 105488 - DNA, 212 bp, Heterodera glycines
ttttcgggacagctggttattaatgcaaaaccttttggcacatttacccaaaacatttggtttggattgtgactctaaattatattttccccatcaatttaataaagaggaaaattacggtaagaatatttttgtcgttacaaaaaaaaaagaatttaggcaaaattttgacaaccctcccgccttttgaggattattttcctgatgaaatg

SEQ ID NO: 105489 - DNA, 61 bp, Heterodera glycines
gtcgcagatagagaaagaagcattggccatcattttcgccgtgcaaaaattccaccgcatg

SEQ ID NO: 105490 - DNA, 360 bp, Heterodera glycines
atataccgcaaaatgttattaaaaatttggagtttttgaagaaattatcaaaaacaaaatctcaaaggaaacgtgaaataatatttaaagaagcaactaatgatcaaattgcattattaattgaaatttgttataacatattaaagggatattttttgcttaccaaaaaacaaaaacatagacttataccttatgttaattttataagaaaattaggaagagttagaacagaaaagggtgcaaagaaaattattcaacaaagtggaggagggtttattagctttgctccattacttttacctataattatcgctgcattaaaatatggaaaataaatttattcttgttccttccgacatg

SEQ ID NO: 105491 - DNA, 1003 bp, Heterodera glycines
cgtattctttttgattggaaaatatgagatttatacacgtacatacatataagtgggggaattctccacctacaaatgttatttaatttattactaatcactagggatgggaattttatgcaaatgcatatttttttcctggcttctacatgctctaaatagtaggaaaaaccctttcttttttgtgtttgcgtataaaaatcggacttttatttgcatatttttgcatatttcgagatttttgtgcatatttgcatattttggctttttgtacatatttcgccattttttggaaaatttgttaacaaaaatgcaataaaaacggaaaatacacccctaagaatcgaccgaaaatttttaaaaacacaccactaagaattggaaattttctcaaaaattcttcccccaaatttttttttcatgagaaaatttttgatttaaaaaatgtcaatatttgctaaagagaattttataaaagaaatgtagaagcgcattggcaagtgcattagtaaaaaatttttttttattgaatttgcacccctaattttcaattttttagtgcatattttacgatttttgtgcatatttggtgcatatttcacgactttatttgcatatttaccgtatttcctcgattataagccccggggcttctattgttcaacccccctccaaagggggcttatattcgaggggggggggggcttcccgtataatcgaggaaatacggtatgtgcatattttggccacttttcgtgcatattttttgcatccctgcaaataagggtctggtgtgagttaagtcatactgaaatgtcagtactgaaatgactgatctcagaagaaggtgatttttctcatttctcttccttctttcgttttattcgccatcgccacgttcacgtttaaaaatgtttctacaatgttaccaaccagcatctaaaacattttaaagaaactttgtttttttaatattttctagagagtacataaaatctcaatg

SEQ ID NO: 105492 - DNA, 1003 bp, Heterodera glycines
agaactccttcatagaggcttcaaaccaagctaaaaacatgtttttcatgcgtttcaggcctccaacagtacaggaaaaaaatatgaatttccatataattacaaaccctattataagcattttatggaagtctgagctcgaaaaatcgaagttgcacttcacttcggccaatgctttcactgtgcatctcttaaattttttgcttttaaattgctctttttgtgacgtggttttccaaaaaactttttgggaacattgggggagggggtcggtccggcagtgccgataggcgctgccggaaaaaatttggaattttgagtgcgatttgttaaaaattttgtcaaaaaaaatgattttgactgaggatttttcgaaaaaatgtttaagatttgaagaaaaagttcgaacattttgccaaatatacctaatttttcaaaaaatcatgcatttttgtcacttttttgtcaaaagaccacaaaaatacgcaaatcctcatttttcaaaaaaatcctttttgaccctctaaaaaaccacaaaatgagtaaaaatactcagatatcgcagctctggataaaagcctttttttattttgttttattgaacaaccttagctcactatcattaatctccatagtatataatagcgaatatggacataaaatacggaccaaaaatcgctaaatatggcaataaaatggcaacaatttctcaaaatttcttcagattcattaaacttaaaattttcaaaacggctaaattagtattagaaattattttaaaagaaaaaattgtaataaagctaaattattaatttagcaagaaaattaagtaaaaaatcgaacaattttcatttttaatttattcttagtataaattcttattttatagtaagtcatatattttttttaatattctcgaaataatttcctaaaatttgctttttgaggaattttccggtcttaaaatactaaaatatgggaataatgccaatgggaaaatatg

SEQ ID NO: 105493 - DNA, 391 bp, Heterodera glycines
attgtggttttttggaaaattgtatcctctccccccagggagccaggaaccgtcctttgtttgacgaattcgaaatggccaccgactgtttaactaaattatttggctatcactttttattgtacatgtttagaattcctttctcttgcgcttcgtgttggtcaaatggttgtattttctttcttttttatttattgtaatacatataaataggttgaagccgcgaaatgcggaattccaattgatatacagcagctccccgaactttattccaatgcgactgctttgccaaaatcagccacaagaaaaatggaaacaattaacgaggagactttgagtacagtcattacattaaacataataaaaattgccactaaaacacagaaaaatg

SEQ ID NO: 105494 - DNA, 163 bp, Heterodera glycines
ttgccaagggtgccggagaacggtaattgtgataatattctaacagttcttttcttttttcgcagacaccgtttcggggaaaaccggcgaaagtgacaatctctccaaaagaggggccaattttttgcacacgaaagtgcattcggcccaggaattgacaatg

SEQ ID NO: 105495 - DNA, 1003 bp, Heterodera glycines
aattattatgatatagatcaggccagtttatgactttttaaagatttttctatattttaaaattacaccatttgtaataacaataaataaaactttccaactgaaagttaacatagaaaaaccaaaattgttaactattattttgttttgctttttcattttataatttttacaccgaattattaaagtcataaaatttatatgagatttgtctctttcagtcatagctcaactaaagaaataattactttcaaaaaatgaaaattcaaatgtataaaagaaaaatttgtaatcgaatgaatagaaaaatttatttattgaaaaaaactcaaagatgataaatagaaatattaacaatttaactataaattgcccaaatgcgtaaacagcttaagaaaaaaatatatgtaacgtgtgaattcaataataaaaggaagcaattagataacacgtgaataaaaaacaattaattaaataaattaattatcattatgaactaaatattgacaatgaaagccgtcgttagtggaaaaaaaagaatacaacatatatcaactttaagcatatttcaatgcaattataaaataaataaaaccgaaaaaccaaaaaaaaatacaaaaatgataaaattaaaatatatgacttaaactacagattatcaaataattttttaaatttttccggttatagaatggaataattaaatttttattcaaaattagcaaaattttaaaaaattataatcataaatgcttatattgcagataaatcaataaaaataaaaagattggaaatttaactgattttaatatattattttaatgtttctataaatttaattatttttaattaacaaattctaaaaataataataatttcttaatgaatcattaagtaaaaaaccaaaaataaatgtgacaaaaaaacataatttttaaaattttgatttataagaaatttacagttaaacaaattatgtttacagcaatttttaataataatg

SEQ ID NO: 105496 - DNA, 78 bp, Heterodera glycines
agtaaaactttgtttttggtatataaacttgtgatttgacattagttgtttccaaacctatcagttttacagaaaatg

SEQ ID NO: 105497 - DNA, 108 bp, Heterodera glycines
tcggcactgtgatttgcggggagcagattcagaccacgacgggagttactcccgattcgtcggtattcgcgatcccccccatgtggggaggacgagcgggatcaaatg

SEQ ID NO: 105498 - DNA, 422 bp, Heterodera glycines
  unsure (1)..(422): unsure at all n locations
ctaagtatatgtaaacaaagggaaggagatctctacaggggtttagtgnacgactgattcctttaattgagccctcaaagggagannttanaantaatgntagtgaggaggtantntgtngagnatttttggaaaaattgaatttatatttnaaatttntnantngaannntgagtgggnnngtnagaagggatttnnaaatattgagaatgaatggangggaagnagaaatgatgnatagagagattnntaaatntattccagcacctcttttccaatttcggagcaacaaaatccgagattcaacaacaccgagccgccgaaccacccggaaggcaactttagaacatgggctcccacaggctctaacagagaacccataagtcccagacagaggaacaggaacaactgggataacaatg

SEQ ID NO: 105499 - DNA, 86 bp, Heterodera glycines
  unsure (1)..(86): unsure at all n locations
atcatcagtggcataaaatgtatgcgatgatgtaaattatatatgcccatgaaatgatgataaacaatcattagatanaagcaatg

SEQ ID NO: 105500 - DNA, 101 bp, Heterodera glycines
tgtgttacggggaaaggtctcgagagggaacctctcggggcccatcaaataatcagataaaaaaagaggtgacaaaatcctctcatagtcatttgactatg

SEQ ID NO: 105501 - DNA, 129 bp, Heterodera glycines
tttttgtattttccaatagaatttttcattttaagacatacaacaacgatgccgtctttgctgaaaaaagcaaaatgatcacttctatggcgtttcttcctgtccaccatctccctgctgctctcaatg

SEQ ID NO: 105502 - DNA, 59 bp, Heterodera glycines
aagaggtacaactgtgattagaagaggtacaactgtgattaggagagagaggtacaatg

SEQ ID NO: 105503 - DNA, 109 bp, Heterodera glycines
tttcactttttaatttcttatttcacttttcagcttgtggctacgccaatttttggcccaaaatgttgtgccgagtccgattgtgcccgatgtgcccgacctgcaaatg

SEQ ID NO: 105504 - DNA, 318 bp, Heterodera glycines
ttttgagggggggggggcaggttcggatccggacggtgtaaattattttcgttatatttatggttatttttaatgtttttaattcatttaaaagagtgtttgctttataataaaaaataaattttttaatttaaattaaattattttttttatgaaaaattttattaaaattaattatttttttaattaaataattttatatatttttttttatttgagtttttcagaaattaatttcatttcaattattataaacttcaaagtttttttaataataaaaagaggcatttattttacaattttaaaaaattattaatg

SEQ ID NO: 105505 - DNA, 320 bp, Heterodera glycines
aggagcaaaatggacggacaacaaatggacagacgtgcaatgtgtgagagagagaagaaaggctgagatttgggagagcagaaaaacaaaaaaatggttggatgaataaatggaaatgagtttttgcgcgtattttttgtgtcgaatgaatttttgtcactttttcactgcatacatattttttttgtttgcgaccatacgtactctcactaattttggtattgattgataaacaattttgaaataaatgactaaactgattttaatgttaaaattaaaaacaaaaattttttttcaaaagcctccctattttcccaatg

SEQ ID NO: 105506 - DNA, 658 bp, Heterodera glycines
ttcactatttactactaaaaatggaaatttaatttttttttcccttaaatgtgagaagcatgaattacataaattttacttccttaatattattctcgtcgtctcttcttttcaaattattttgggtaataaatattatatttttgaatatttcggcacatatttcaattaataatttcaattaattttcctaattattagttcctccatttgggctgaacctgttgctgctgcactttgctcaattgcacaataaacccacccaaaatgatgacaactttgctgctgctgaactgccacgttactctctccccaatttttgctgttgcgcgttcgaacaaatttatctaactaataaacaattaatcactcacaaattgcctaattagcgatgagttagtgaacgcatgagtgaacaacaacagcttgtgcactaaatttaaagtaaaatttcattgaaatgttttttgccctccccctcggtttttttgggcgaccaatgggcggccttttgctgaatttgtgcccccccctacccaaaaaatggaggccaaaacgcagaatgcactcctataaaagggggggtcaaacatgccaaaatcacgttcatttcccaattggcccccaatcgccggacacaaaaacccacccgaaaatg

SEQ ID NO: 105507 - DNA, 682 bp, Heterodera glycines
aaagggacggagaagaatttcttctccggagttttgctcgtaattgaccgggggagctaactgatattccgtttccctacggggaaaaggatcagcgaaatgctgatccttaatccccgccttcttttgttactgtgtgtaagggggggaaaggggtactgtacgttacactattttaaattaaactaatgagtagtgtagaacacaaaaagtaaattactcatattatggtcaccgatttgtatgttaaaaagaagaggatcaaataagattgataagaatttggaaagaaagtcagaacccaatacaacatcaaagttattttccgagacccatgagtcttcttctgtgatgagtaattttaaggagtgagtttgagacgctatttcaatgttagttgaaatttgccgatagtttgcaatggaaggaacgacacaccaacacataggggtttggggaaggagtaaaatttggacttttgataacatgccattcggacatgagtaaatgagatgtcagattttaagtcaattttgcagttaattaaaacagagttgactttaagttggatgactgggaaaggagggctttggttacttgctttttgaagctacgaaatggtgttccaggaggaaaaaatatttgtaatggatagatgaacagaatagttataattgaaatg

SEQ ID NO: 105508 - DNA, 441 bp, Heterodera glycines
cgtccttgcagattttcgctggtgtgaaggccgtgatgatcaaagttgccgcgttggggctgacccccaaacatttgggccattcgcttgaacaggtcagaagagaacactaatgacggtgacagcggcgggttgaatataacgatttttttgaaaattcccgaaatttttaaccttttttttacaaattttacatgctttgaatagcaaaaaaaaaagtcgtcgccggagaaaattggggacattcgtacgaaaaatttgttatgttttgaaggtcccaagttcaaatccaacatcaaattaaacaaattttaatgaatgcttaacaaaagtaaataatcttggctgagcaaagagtcgagactctcgcgatgcattaattataaaaattctttaattttcaattatatattttttgtttttccccgcattttgcagatg

SEQ ID NO: 105509 - DNA, 1003 bp, Heterodera glycines
tcaaaatttcaataatttttcctcttttctccctttaccggcgacccactccccgaaagggtcatccttaacagtgtaaaaatttctcggtttccgagactaaaaaaccgagaccgggaaccgagaccgggaagcgaaaaacccgagaaatttcccgagtcgggaatcgagaaccgagactctcgcacatacctatcgcccccccccctaaaaaagtcggaaaagacgaacactgggattaaaattttaatctgcttaatgttgttgttgttcggtctgctaacgcttaccgtaccacgcccgaaacgactgacaatttcgttctcctacagtaccaccccctaaaaaagtcgaaaaaagacgaacactttcggagcgtgtaggggagagagggaaatgggggattaaaaacaaaaaatcgctttaatttgttgttggtaagtctgctaacgcgtaccgtaccgcgcccgaaacgactgacaatttcactcccctacagtacccctccctcccctaaaaaagacgaagacttttggagcagaaggagaggcaaatgtgggattaaaattaaaaatccgctttaatgttattgttgttcggtctgttaacgcttaccgtaccacagccaaaacgactgaaatttcgctccactacaataccaccatcccccctaagaaagtcgaaaaaaacgaacaccaatttttgctctcctacagtaccaccacacccttaccacccgttacagtcggtcagactaaagggaatattttgaaaaaatttcctccatttagtttttgtatttatttgttcaggctttgaggatgagttagtcttgcaaggctattttgaattgcttttctgtcaaggcaaaaacaatatccaagacttttttgagtatgcgataatttgcagtaaaatattttctctttttgccgaatttcacaaaaaagggacgaagaaggacgaaacagagaaattgtggaaatcgttcattgaagtgatg

SEQ ID NO: 105510 - DNA, 857 bp, Heterodera glycines
ttgttctgtggaagaatttcaattaataatttaacaatttttaaaatttcaaaaagttaaattaattaaatatttaatgcatttatttcaattctatattgtattagcattttttaaaatttttttgcttttctgtcattttgaatatattttaatatttttgtgattttttgaatgattttaaattttgcatttttgctaaatttttgctgttcggaatagcataaaatatgtgcaatttatatgaaatcggaatgcttcttaatgctttgcaattatttaaatttttatttaaaattaaattcaatgaatgctaaattttactttccatatattaaaatattttaatgaattttggtttatttgcattttccaaaatattcttaaatatccaatttaatccataatttagtgagtcccattgattttgcatttatttataatttttgcgcaaatttcgctaagtctttgttaatgtacataataaaaactatttatttaatggtgctttattcattcattaattatacaaatatatgtatttttattattcttattaatcctttccttaatattctctatatgatattgttattttaaaataaaataattgttaattgcctttaattttgcatttatttatgtttttgtcattttgaattattatttttttaactttttctcgtgttaattgttgaatttatttttgattttataataatttaatcagcgcatctttttattagtattattatttttttgtaaaatttgatttatatttttttccttttcttggatttatgtgggctaataaacaccaaagatgtcataaatatggaataaaaagcccgaaaatg

SEQ ID NO: 105511 - DNA, 88 bp, Heterodera glycines
aaaaaggaaaaaaaatttgcagtcaaaaatttatcgaatttctccaattttgtttccatatttccgaaagttattcggtatcataatg

SEQ ID NO: 105512 - DNA, 522 bp, Heterodera glycines
aaaaaaggctaagaaattgaacaaaatccggcaaaaggattgggggccaaagagtatcaccacttcttatttattgtaaaccgtggctcgaaactgagccaaatttttcaaaaattataaaaaatatccatatgtaaaggaaattttaaaaatttacaaaaataaaattacatgtattctaattactagggttataaattgtatgattttgcatattaaatttagaaaatcaaaaattttttcaattgtcaaaaaaagctccttagcagcaattgttttggtgttttttaaactcaattctgtatttttacaccaaatttggcatttttttttgagggttagaagccattttgggtaatttttaaggcatatttgtgaattttttggatttttagggtatatttgggggatttttaatgcatattttatgcgcatattacaaaaatttaaaatgacaaaaaaattttagagagcaaatcaacaagatgcgacatctatggaaaagactgtgcagtgatcatg

SEQ ID NO: 105513 - DNA, 262 bp, Heterodera glycines
atgaagggatttggtgacctgttttggcctttggtcatcagctcattgttttacgccgttgttggaatttatggcgcttaaatctccgctgcgaatgttttgtttgcttccattatgctttatagtttttgcaacgatcaataacaaatgtttgaaatcaaaataaatattcattcgaatgctatttattgcacaaataccttaaaaattagtaaaagggaagaactaatttcacgccattttaagaccattgtccgttatg

SEQ ID NO: 105514 - DNA, 94 bp, Heterodera glycines; identical to SEQ ID NO: 97954

SEQ ID NO: 105515 - DNA, 1003 bp, Heterodera glycines
catttgtcccgaaagatcatgcttaaacctttttgattgcatactgaactatatcaaaactaaatcttcctgggcaatacgacggattagggttgggcccccgaccatcgggattggaattcggggtcatcggggtcagcaagttcgggatcgggttcgattaaatcgtcggggtcgggattcgggagcccaaccctacgacggatgtttagaatattctttagtgtaaatccgatggctttagttcaaccgtttagaatgaacaaggaaaatttatcatacctaaatactaacactatccaattttgacattaattaaaaaaaattctcaatagtgtcgaatttactcgatgtcgaaatggtccagtgtcaggaaaacagtgaaagtttttgaaatagttcagtgtcgaaaattctgtgtcgaaaatgtagtgtcgaaattacttagtgtcgaaaatactcagtgtcgaaattacatttaaacgcgtcgcacatagttttcctatttttagactttaatttccgagcgcattcaagtggcctctagggccaacatgattgcgttctaggaaaactatgatttgacgaaacaaataaaaaaaaaaataattcaataaattgaagatggagtgtcgcactcgcacataattttccaaatcgaaaattctgaagcggacgcaagtgcccactgacaaaggagagtgttcgggtgatggtggaacttccaaatgaaactttgtaggtgggtagaccacccctgggttgtattgccaaattttttttctagctgcggaataagcttctgtgccgagatatgaggctttaaatatttaataattatattatattaaatttaaaaggagaagcaacaagcgaccggttggcagggtggttgtgtgtcacgatttcatttttgtaatggaaagttcgagtcccccctacgcaaacatttttttttattgtttttaataaaattacatatttagataatttaattataatg

SEQ ID NO: 105516 - DNA, 100 bp, Heterodera glycines
gctttttctccatcgctccgacttatccttgacgcgtcaccgataattgggtgtcatgtgaatgggcttttcctcaggtggcaaatcgacacggccaatg

SEQ ID NO: 105517 - DNA, 158 bp, Heterodera glycines
aaaaaactgggaaagcagatttttgtgagtatattcttgaatatttttttgtttatctgttggttttagcacagattttagttctttaaatctatagactttaagttttagtttgatgccaaaaatgtggatattgtccaagcaagaaaaaagttatg

SEQ ID NO: 105518 - DNA, 467 bp, Heterodera glycines
agtgatttaatgaagttgctgaaaagactttttttgatcagcattaaaagttactttaatgggaattttttcagaatttttgacctgcaaatattgagatttaaaaaaaaataaaattttatgccaaacatatggtacacctagaaatgggggtgaatgtatttcaactaactcccaaccagtaacagctgacacttttcttcaagtttggtatcattggaaacacccacttaaaaaaaaattcagaattgcttttgacctttacccaatttgggcctttcaaattaatttcaaaaaaaaattatgctaaactaaagaaacacataataatttaaacatggaaattaacaaaatgaactcatatccctcattttaaatacgctgaatatttcaataaattaaaaatagtttgaaaaggttattactacataattatttcaataaacaattaaataattttagatatg

SEQ ID NO: 105519 - DNA, 327 bp, Heterodera glycines
ataccagagtcaaatgaatcagggcctgccccaattcttgaatatggaaacaatgttaatcgggtggaaggcacaaggtcatcaaattttgaaaatgtaaagccgacaatatcaaataattctggcctaggcacccgaaatcagcctcaatcaaaaaactttctaaaacaaaattgtttggtgatccaagaagaggatgtgtaccgagaaaatgcgttttttggaaaaattgactcggatcttgagatagaaaattttgttgagcatttaaagaaaaacgtggacgaaaacctaaaagtggaaattcccaaagtgggaaaagttatg

SEQ ID NO: 105520 - DNA, 271 bp, Heterodera glycines
ccaaaactgccgccccatattgacctgcttattgcctgtaaagggcaatccgttatctgatagacagttacgggctgagcagtgtagacgatctgtacacctgtttgaaagaggaaattaaaagcgggcctgaaggtgggaattgtctctatcccaacccactttgtgctgtcgactgtgtacacatttcaaacgctgaccatccgaatcaacctgtgcatatcgacgggtcgctcgaattgattgctgacgttgaactgtactcaacatg

SEQ ID NO: 105521 - DNA, 313 bp, Heterodera glycines
tttgtgccatcaaacttgtgcaaatttgcatgaatttttgacgtcggaccgttgctaaattgatgaccagctaaggaccgaattttaatttttaaataaaaattatcaacttttttttcttttgtgattttaaatttaaaaattttttaaaattatttttgatattaaatgatccaatttttaatccttttaagcatttaatttgaccttttaagggtcgaatttaaatttaaattaaaatttttttttcagtttttagtttatttgattttaatgttttttttcgaattaaatttgccaatttaaaaaaatg

SEQ ID NO: 105522 - DNA, 208 bp, Heterodera glycines
agaaggaagggaccaccaataggcgaaggatccaatggatggccaacccaattaagggaaacggtcgattcgctggtcgaggagagcggatgccgcattgaaaatccgttgtcgcagaaactgcgcgactacggtcagtttaatcatttgcagaaatttggggcggagaaatgtaggcaaatttggcattcaacatttagtgcaaatg

SEQ ID NO: 105523 - DNA, 516 bp, Heterodera glycines
aagacgcgaaaaaaagatcagccgattttatttaaccgtatatttacttttatttaactttttgtcactttgaattttgtaatttattcgttaactttgctgacataaaaattaacacaccgtttaaaaaatgagtcagtgcaaagagaaaaatctcattttagcgtatatttattattcatgaggaaagaaaacatttaaatgtgactaataagcacattcatcacatggcttccatctcaatggacgcgtcttcatccgtcatttgtttgccttggtcagcaatgcctccgccttcgttaccatttcctcgtacgcactcttcgccttcaccaatttctgcgtgacaactgcgccctccttcagatcgtcgatgtttttattggcactcttctaaaataggaaacaatttgagtaaagatagcaaattttaatgttaaactagagtcaatgcgtttttatggcaaaatattcgcgtgttaatttgatttattatttctcaactttgagttgatg

SEQ ID NO: 105524 - DNA, 528 bp, Heterodera glycines
aagtgccgaaccgccgaaggagggatgaacagcatcagacagacaataatatgtactcctcagattgtgcccgaagcaatgatatgaaaatgatatgtttttctaaatttagaaataaaacgatttgccattttgggtgccattgccaagagtatttaatttttaatttccaataaagtgcccttctcctcctcctatctctctctccaccacttcttttggcacttttcttctcccaatggtcatcatttccatggaaacagaaggaaacccataaagagagaaggaaggggtcagcaaatgcctgctggtgaacgctgcccgtcaaaatcccgatgcgtcgaaatcccgacgcgtcaaaatcccgatgcgtcgaaatcccgatgcgtcgaaatcccgactaagccaaaatgagtcataatcccgacaaattaaaaaatataaatttatttatttttgtacatctatttacatgtatattatatattatatatataaatatatcataatagccttataaacaaaatg

SEQ ID NO: 105525 - DNA, 846 bp, Heterodera glycines
ttttttgcttaataaaaagaaagcaattaatttattttatttttttgtttgaaaattagtcagacaaaaaggaaagggagagattggtttgagttaggggctggcggattaaccaaaatcgggttgacctaagaatcaaaaaacatggggcagtcagagaatgaaaatataacgaggagttgttgtgggataaattataatttagggaccggatttataagtttttactgattttttctgcgaccttgccgtttttaatttaaaaattacgcttaaacaaaacagaattgaaaaactgtaaggaaacctaacatataatacttattgtttgtatatttggttcccaaattctgaagggttctcgggaggcactaaccagggatctgacatccattatatccaattttgaatgtctaacctaaattcaagcaaaaaagcaaactccgaaaaacttagttttctatttcactcgagttcgggtaagagatttgtcaaaattggtataagattcgtgattagctactcccgaaaacccataaaacaagttttcacgaaaaaaagggccctcaccctgtggtttttttcggagtgccccaacagcaaaaaatgcagatatgaattcccagggaaagaacaaattgaaaaattttttaatgggtatttttaaattaaatttgtcacttttttaatctggcataatgttaatagttaaaaaatttgaacgaaatatgactacttctggtagataaaaatcagtgctatcacttcaaaatcacaaattccttttcaaatatacagacagaccagaaataatcttttgaactttcctttttgataattgtaatg

SEQ ID NO: 105526 - DNA, 153 bp, Heterodera glycines
cagtattttcttgggcctattcaattcaattaaaaaaaatgaattttttttacatttattttctaaaaatttaaattttctttctcaagaattggatttttatatttttttaaaatttatctctgggattttatttgacaattttccatgatg

SEQ ID NO: 105527 - DNA, 432 bp, Heterodera glycines
  unsure (1)..(432): unsure at all n locations
atatttgcacaatgtaattgcttagcctttcataataaaattaaatntaaaattaaattaataataatacttttatgtatttttttaaatttctacttataaaattttttgtttgtccttgaaaaatcccgaatcaacattgaagaattcggaaaagtgtctgggtaatttgaaaatccccggatttggccacctggtatgggtaaacagaccgcagctcttgatattttttgaaatatcgagattaagcatcccgagtccaaccttggctggcctgaccctatctttgaatcggggcgaactgcccgccaacagcaggagaggcaaaaaacggaaacaatccaattttaattgccgacctaattattccaattttaattgtccacctaattatttctaattaattttttgcagtcaattggcatcgacatg

SEQ ID NO: 105528 - DNA, 473 bp, Heterodera glycines
attgtcttatttttgcgaaagggcgagagagagagagagatagagaggggggggggggagaaagacgaagagataaacagtcattagtcatgaatttaattaaatttcataattaaatattttatgcacttaaaagggcccaaagatagaatctgttgatgacatttggcaagcatcaaattgtgaagatgaaaaggtggcaaatgaagcagtgcaaagactgtcaaaatgccccatcattgagcaaattcatatccgacagttggccgtattttattaccaacacgagtttttttcaaattttttgcatgctaatgcctacaattttccaataatcaaaaattcaggtgctaattaaatacaatagactatccacttttataatttttgcggcctaattacccttaattatctccctatttttctcaggtttgaatttgtccgaaaacgcttctgacttttactatgaaatg

SEQ ID NO: 105529 - DNA, 1003 bp, Heterodera glycines
ataatgataatgatgaagaccggaccgggggacctgcagaaccgaatcaatcccccgggtttccgattttcataaacttggcccgggactcgagactggctcgcccttagtcgaaatagagccccaaaaattaatccacgaccgagatttgcttcaagactcgagaattgtcccgggactggataccgagccccaaaaagacatgaattttttttcaaatcgacactcaagcatccagcccagtttatcgagagccataacctagcggtagggacacagggggaaacggggggaatgaatgaatgtgtcacgcgggggcggctgggcgggcactttgaccacgaaaagcggaaattcaattcggcaaaaatgtcgtcaaaaccgatttggtcggtccatttggatcgctgcacaaagcaggggggaggggggggggcccacccacccacccactcactgatgcaaaagggggggggggggacgacggcacaaaatgccaaaaatataattccaaaattttttagcagtttttgcagctttattttgagggtgacgggggtactcaatttgtttggtcttttacggaaataaaatgacaaaaaattctccacaaaatgctaaattttaattgttgttaacctgaagcatagacaaatgcaaattaacgaccttatttggtctatagtgggaaaaatgccaataatttgaccaaaaatatgaccaaataccaatttaaaagaaaatggatgacaaattttttcaagattaaaatttaaaattatttaacttttaaattatactattgatttgcccacgaatttccctgtgggcattttgattgggaaaaaatttcaacaatttgtcgaaactatgacaaaataaattttcttctttcaaattactcttaattttatacttttttcagattttcctaaattaatttgcctattttatttatttttttttctcattctcattaaaatggccaattttggccccaatg

SEQ ID NO: 105530 - DNA, 88 bp, Heterodera glycines
cacatttctaaactgattttatccaaaacttttttcataattctttcagtgaatatattaaagaacaattcaaattttacaaaaaatg

SEQ ID NO: 105531 - DNA, 397 bp, Heterodera glycines
aaaaattggagcctgacgggattgaatcccgtcgaaacgggatttctcgggatctcgatcccggctttttgaaaaggcccgagattatcccgccttatgccaatcccgaattccgactttttcaaaattccagtgccctaaaaaataaaattgcttttttaaaaataaataatttgcatttatttcaatttttattgaatagattaactttttcatttcatttagaaaaaaatagttaatagaatgaatgcaaattttatatttaaataacaattaaatattttattttcaattttctctccggtcactttcaatgcttagctaaaccattagtgatcatcataatttatttctaattgttttttcagttcgtccatggctgaaccatgacgacatg

SEQ ID NO: 105532 - DNA, 768 bp, Heterodera glycines
ccctttctttttttcaaagataatttgtatcagacagccgaatttgcctaaaataaatttcagtttttcttgggagcctaaaattaccaaaaaaaaaacaaaaagtttttcataaattgtgatgggagcagcaaaccactgaaaattttgaaaaagggaaatgagataaaagaagtggtgggaggggagaagggacatcggaggctttaatttatgcacgaaaccatcgatcgcttttacaaaataacattttgacatcctattccaatttttgggacaggaaatttggacgcgatttattgaatcgcgtgcagaaaccaaaatagaatcacattcatacatatttttccattattctcaaaaaaatgaaaaaaaaattttcatttgatagacaaagtggcatactttttaaccacatactttttaaccattttaaaaaccgatttacctaacctgatgctctaaaaaattcgaaacaattcgacaacgtatattactatatttttggtaacattcgaacgcaacaaagtctgacttgagacttttgaattggaaacagaaaaaatcccaaattgctctatcgccgaaatgcaaccaaattattttaccaaataaattaaaatgacctagtaagtatgtatctatgactttacgaaatacatatacggtaccatattacattattatttgagtcctataacaatacagtacaccaaaaaagccccttaaatttccattattttttagatagatttggccccgttgatg

SEQ ID NO: 105533 - DNA, 555 bp, Heterodera glycines
tgatgatttcaagaatatgattttagattacaataaggaaggacatgataaaatttttcaaatatgaaaaatttggcccgtcacgagacagcatgattttaacacgagaattacgaaaagaatataagcccgtttaaaaaaggaataataggaacggattgggagattattccatatggttattggtgaataaacagaacaataaatttataaactttatttttaatgttgtttctactgttaaatatttctattttataattaataattatacatttagagtttagatgtgtcaagattatgaatattggcatgataaagcacgagataatttttttgggtttattattcttgcaatttttttaagcttaataataatttgtgttgttttaatgatcatcgattgttttaacagattttttacaacggaatttaataacaatgaatttgaaaataaaatttaagaaaattgggtatttttttctggttttgtcacaaaataaaatattttagtgataatttaaataaaactttttttagcaacaggtgtaaatg

SEQ ID NO: 105534 - DNA, 129 bp, Heterodera glycines
aaatagacggtagcgcgcctgtcaaagggcacacacacacatgaaaatctataaataggcacgtaaatggatgttctgtctacttgacgttcacttaataaattcagtggcataaaactaacaataatg

SEQ ID NO: 105535 - DNA, 328 bp, Heterodera glycines
gatacagaatttctttctttttaacagatggtacgaatgacgaaaaatcaacaaaaaaagtgaaagattttgaattttattaaaaaaccaaaggggggaggacccttttgttttgcaaaattttttgaaataaaaaatcgtgaatatacttatattcgccaaattatgctcaatgcttaatgtgttcatcattctatatcaaaacaaacaaacaaaaaaaaatgtgaccaaaaaagtgaaaaaattttcaaaaaaggtcactttttaactagcgccaaaaattttaattgcccctttcatttggtagaaaaagaaattcgtcattatg

SEQ ID NO: 105536 - DNA, 270 bp, Heterodera glycines
tttttaggggttgaattaattatattgaatttaaaaaatcaaaattattgaagtaatttatttatttctgaaatttccctcctgggttttttaaaaaaattcaaaattgaaaaatttctaaagatttaaaaatttaataaataattttccgaaaatactttatgtataataatgcttgatcaacctgaaatttcaataaatccctttcaaatttttaaaactattttttaatttattgaaaatttcagttattttggcctccaagcaatg

SEQ ID NO: 105537 - DNA, 991 bp, Heterodera glycines
  unsure (1)..(991): unsure at all n locations
atagaaaatgttatatattccatatttaatcattttctaatgcttttatccaattttaattggcaatctttgtcaaatttctgttcatcaatttaaaatntaaaaaaaaataatgatgaaatttaagctgattttgtttgatcatttcattttggttgaaatgaatgtttttattatctacagaatgttgaacagggggagaatcatgaaaagccgaagaatatcaaagaggaataatagttgagaaaataaatattattaaaaacaaagcaattaggcatttaatgaagtcattttaattaattaattataattcgatttcttattaattaatggtctaaatttcgaaattgaaactgccatttaaatcaccgctaaaatggaaatgccattccaaaaatttgcccgtttttataactttcttcgtcatgcgcctcgggttaattttaatagaatcaatcacccacccattggctattttcccaaatttaagtgttcgtctatttcttttccttatgttgggatcaaattagggcaagaaaataaaattttgctctactatttcttcttttgtctcattcctttgatccttcattatatttattagtcctatttgatctttcttttcgcaattttggtaagtaattttacatttttcagaaaattcttcagatttatgtaattaattaattaatttttttaaaacctattctatttttaatagcaattaattttctccaatttttatcaaatgaattgcaaactacgaatagatggacagtaatattttgctgcggaaaattgcaacaattagtcaggttttatcacgccatagttgtcatggactcattttaaacaaactcataagtgcggtgccattcctccacccaagacttttgaaattaaaacgggtaattaatgacccaaccaaataataattaatatttcaatttcttattattctggtcattaataaactgttgcaataatg

SEQ ID NO: 105538 - DNA, 181 bp, Heterodera glycines
  unsure (1)..(181): unsure at all n locations
cttctgaccattttcgggcacttgtaaattntggtgaaataaattaattattggaggaagtcaatgaaaaaacaaaaataaatacttttttaatataataagtacaggggcgaagacagcttatttgttcgcaaatgccattgctaacgctaaccagaaaataatctttttcagcctaatg

SEQ ID NO: 105539 - DNA, 53 bp, Heterodera glycines
tggcggcaccggcacaaccaccatcaaagtgattgaaaggtaacggcaaaatg

SEQ ID NO: 105540 - DNA, 59 bp, Heterodera glycines
agttttactacaaattattccaaaaatacaaaaattcttttaggaacaaaataacgatg

SEQ ID NO: 105541 - DNA, 396 bp, Heterodera glycines
aaaaagtctcgtgttttcagtctcgaacagcactattttgctgttagttattccacttccaatcgttgtacacaaattattaacttacaaaatttatcgtcttatttgtcgttaaataaatgactttttatttttattaaaaattttgtatttcaactagagttgtatgggaccgggtactgaaaaacacgtacaactgagtacctaagtattttgaccgggaccgggaaaaatcccgttaaaacttttttttgcgccattgtacaaatctgtggccaaataattatttgaagaaggtaggcctgatcgccatcgccaaattttggaatgtcaaaattggcatagccgagatttgaccaaaatttagaccgaccagaaaatcggttaagagacatg

SEQ ID NO: 105542 - DNA, 1003 bp, Heterodera glycines
aacggaattcgcatttcctccagtgatatgttcatatcccattaataattgttattttaactgttttacaaaaagaaaattttaaaaataaatttaaaaacaaatatattgcctaaaaattttcaaaaaattctctcgaaagtgattttggtaaatattgatcataggccccaaactcaaaaatgcttaaaaacagtcagaatcgatgtaaaaaggtttgaaatgtgttggaaaaatagaattaggggcgcgcttgccctttttcaggatgaaaagtgccgaaaatggagtgccaaacaattcgaacaacgaaccctactcgaaaaaaaccgaaatttaattttcgacaaaaaacaaaatttgtaccacatcttactgtggaaagtccaagtaccttaaggactacagaagagaatcaatgacgcagtcacctttggacagttattaaaaagaaataaggaaatattcgatggggtgcgatcctttcaaaaaattactctcgtcttctacccccccccctctctttttgtgcactgtttcgttttaaaaattggttccgaaattttaatgtgttaaaaaaaaatttttttttatggtctgtaaaccacataagtaccggttttgctacccctatgaaaatgtcatggtcccggcaaaggaaagcacttttctagtgtagttttaggagctgatcatgaatctggcgttaaattgatatatgataagactcgttatttctttttcgaaaaatctgaaaaaatcaagatgaaaatcattgatgaaatcatagatttttgtagttttgacgtcagcttctttcccaaattccctgtttattttggcctctttcctgaacgtgtccccataatgtcttctctgatatccaaatttctcgcaaatcgtttcccccgatgagtccgattcgcccaattttatgagtttagtcctaacaataaccgtttttaaagattaataaacgtattatttttctgccttcaacatg

SEQ ID NO: 105543 - DNA, 442 bp, Heterodera glycines
ttttgttgaaaagcggactatgatttattaatctcgtgaatgacccaaaaagcccaaaagagaaaaacggcacatttaattcacttaattattgcatttgtcctcaggctatatgtagtaatagtttagcttttcaattttgctttttgaattgttcagtaaagaaaacccactcaaaataaacaaaagttgtttgaaaagctttgtttcttttctcaattacatattgcataaaatgaaatggaaagagcattacataataatttaatttttacaaaaataaaattggtcaattgagggaaacaaaaagaaaaaagtgaatggcgaagagggggggggggggcgaatagctgaagctgacgaactttgtgccggtgctgttatggtgcgttaacaaccacaggacccttttaaccggcaccattaatgagaggagccaatg

SEQ ID NO: 105544 - DNA, 289 bp, Heterodera glycines
tttatccttccccaattacacgcccatcctcactaatgaccagtcgccgcccattagtcactctcattcaatcattttcctgcaacatttctgctttttttcatttgtttaatgggtgtaattcaattgcttattaatgattcgctcgctgcccctttgatcagtggtcacttaaatggccgtaattgcgaaaaattggctaaactttccaaattaattgcccctaattatttataattttaagaattttcctcgattatctctttttacgtaattttcctgcaaaatg

SEQ ID NO: 105545 - DNA, 87 bp, Heterodera glycines
tgtttgttttcacagaatcccaaattaaaaattaaattaattgcctgatgcgcccggtggaaattgccgactccgaagtgaacaatg

SEQ ID NO: 105546 - DNA, 1003 bp, Heterodera glycines
tttgtattttattaagtaacggaaaaaaaattgttttgaaccgaatttatataaaaaagaaatgagacgtatttattttgtgctaatttctttgattttggcacaaaaattatataataaaaacagaaatattgagcccaataattttttatatattaatctgcataagtgcatattgatgtgtatatattagaacttaatgcctaacaaattaactcaaaattccctaattattccagacggcgttttgtcggcagcgcctgactcaaatttattttatcgtaaaaagcaaattcaaattgctcataaatatgcattttattgcgatctctatttttcttattatttctagtgatttacataatatttgtattaaatgaatgggttttaatatcatttccttattatgtctacatatttacataatgtttaacgccatggggattatacattattatggttacatatttaaaaaatattaaacgtcacgggtccgttttgtatattgattgctctagattgatatattcatttccgtattatgcccacatatatacgtaatatttgttgggttttaatattttttccatattatgtctaaatatttacaaaatatttaaatgtttaacgccatagagattattccttattattcaagggattttgtttaatttctctagctcgattatattcacttccttattatgtctacaatgtttacgtatatttatattgaatggatattcctattgcgtcacaaccggaaagaaataatcgttaaattaataaagaaaataattaattaatttccctacatagatatattttcttcaaatacatgcatacgcatataaataatgagttgatgaaaaattttatttattttttatattaatttaatagcatgaaaatatttcattagagagatcagttaattattttaatatattcaaataaaaattttatggctttagacagcggaaaaatatttttttaaatgatg

SEQ ID NO: 105547 - DNA, 82 bp, Heterodera glycines
gcctttgtcttttatcccaccgattgttcccccattggcactttctccccaattgaccccccaattgtctgattagaatatg

SEQ ID NO: 105548 - DNA, 516 bp, Heterodera glycines
aaaagtgagaaatagccgccgggactcagttggccctcggagaaaaaaacctatagtttttccgaattctcctcaaaaagttgtaagacccttccactactttcagacccgtcccattagccgttaagctcaaattagtttttgaaacgaaactcaaaacctatataacatatatataactagcgggtgcgtgaaccgtcggatctgggcttgggataaagcgcttcgcgcttcttgagcttcgctacctaggctgtaaagcgattcaaattgatcgaattggttggagagatttttttgaatttttaaaaaattattatgggtttttagtccacatcgaggcacaagacgggcgcttcgcgcccgtttttcaaattttgttggccttacagagattagaagaggtacaactgtgattagaagaggtacaacagtgatagaagagctacaactgtgattagaagaggtgcaaaagtgataaaagaggtacaaactgtgattaggagaggtacaatg

SEQ ID NO: 105549 - DNA, 122 bp, Heterodera glycines
ttgcctttgtgccaccaaagttgctcatgctgtgccccctcctacgattcatttcggcattttagaatcaattaattaacatagaattttaatttaaactttaagaattgtccgtgtccatg

SEQ ID NO: 105550 - DNA, 971 bp, Heterodera glycines
cattttcgcaactgtagatcctttattagcctgcaaatttcaaaaagttgcttttctaaacatttttggccataaattttttgaaacccaccgaaattttttgaaattttgtaggctaataaatagggcccggatttttatgtgctaaaaatcctgaaatatgtaataaaatatgtgctaaaaaatgctgaaatatgtgctaaaaacccccaaaaatgccaaaatatgtgctaaaatatgtgttaaaaattgaaaaaataagtgtgtttttgcataaaaattcccaaaaatctcattctttatcatttttagcccatacaacgcaaatcaaatacatttcgaagtgtttggggtaaaattgtctttttttgataaatcatttctataaattgaaagttccagcagagaacttcgaaatccaatgacgaattaatgaattcgagatttcattagtttctacaatcgaagaaaacattttttaatttgaaaattatgttaataattaggaaaaaagtcgatttttagggggtgtatttttcaattttcttgtatttttattgcaatttttctcaaaaatgccaaaatatgtgcaaaatatgtgccaaactccaaaatatgtgctaacatattttatgtgacaaaacgccaaaatatgtgtttttatgtttttataagtcgctctaaatcaaaaattgttcggagataatgctatttttgggcttctctcgccataactaagccgcaaaaaaaatatgtaaaaacataaaaatccgggccctaatcatgacacataaacaaaaagatacaaaaacattcatcaatcccttttcatggctataaaaatgtttgttttttcgctttgtctcgcatttgaaaaaaaaaataaaaatttctaacgcaattaattattctgctctttgtgtgacatcattcggaactcggccaaaattgtgctaattgccacaaaaatg

SEQ ID NO: 105551 - DNA, 392 bp, Heterodera glycines
agacggcgagaactttgtgccgcttgatgcaattggtaagctgcagatgtatgtcagagtttgactcttttcttaattggactttgccgatcgtgcgaaattccgcattagggcccgtaacaaggtgttcacgctgccgctgcgacacccggaggtgcacgccgccgtcccaagcttggaagacggcgtaaaagaacaaaaggaaatgactcagatggcataagcctggtggaccctcgcccggagaatgccccttcgccacgcggaaccaaagagttgaagaggaaactcgcacagaatccgcttgccagtagcctactcaatcgactgtttgttgggtctgggttcgtcggacaagtcaaacaaacgagaggatttgttccctcaaaatg

SEQ ID NO: 105552 - DNA, 462 bp, Heterodera glycines
ttggtactttcctgtttggaaggcacaccacatttacaatatgcaacaaacattgttcaatattaaaagaagacttattttgaaggcataaaagcaacaatttccgccaaaatttcctcaaatgcagcgacgttacgtcgctaacagccctcgcgtcatagaaattcgcataaatacgaatcaaacaattttaaaaaaatggagtgtgccttcaaaacaggaaattaccaaatattttaatatgattgaataaacaaaaaattctactttcttcaaattgaaaatattaaaaaatataaaagtagaattttcaagaattattgcggttctggttgactccactcataattattttaattattttttaattagactaatttccattaagctaattatgaatgggtatgagatatgtctgagcattaaaaatagaaaacgggcgaaagtatcgcacaaacaatg

SEQ ID NO: 105553 - DNA, 389 bp, Heterodera glycines
tttctcttctttatttaattgtgtcttcaccaaaattggaataaataaatatttattctttggtcaagtgcaaaggcacaacaaattggcgacgcccgtggcagatatttcgacatttaatttcttcaaagaaatttcgtctgttttggatttgttggatttgcttttagcaccaacaaattttttccaaatttcatcggagcgaacttcagccagtcggcatttgaattttccaaattgttcgtcatccctactgattagcttttagcaatcagtagaagttagcgctgctgataatttgtctaggcgacatttattagctcatccacgcgcacccactcagtttgtatctaggcgctgcaaacataagagtggtaacgacaaaaatg

SEQ ID NO: 105554 - DNA, 135 bp, Heterodera glycines
ggcacgcccttttttgagtgatttggccaaaatttgtgccaaattggacagattccgcccccgagcattgacttcactttgccgtccccgtccatcggtttgagccaattgccggtggttgatccgccatggatg

SEQ ID NO: 105555 - DNA, 77 bp, Heterodera glycines
cgtaagtcacttttttgttttggccaatgaaatttttcttaattttcccactccccactttacagtttccggtgatg

SEQ ID NO: 105556 - DNA, 452 bp, Heterodera glycines
gtgaaactaattaaatcttaaaaaatattaagcgaattattggggaacggcactacaacagtttgccgcagtgaggccaaattttctatttggaggagaaaaaaagattgaatctttgcttggcgttgtggaccgattaggcacaattgcggcatacttttttgacccaacttacgcagaagaattcaataacgaatttgacaaattgtttcaagaatggcccgagccaaaattaattaacgagacggaagtgagtggcgaaaaaacaacatttggccaaaaaattattgaaactgttctgcaaattagaaaaaagtagtccaataaaaaaggggaaagaaaaggttgaggaggactgttcatcagcagcagaacaggaatcactcgtcatagatcgggcaaattttgaaaattttttgaaagaaaatttggaaagcctaaaaacggaaatg

SEQ ID NO: 105557 - DNA, 246 bp, Heterodera glycines
agaatttttattaggtatttaggtttcattgaattattttatttttttaagtgtccaaaaactattaataataaataagatatttatgttattctaatgaaattaaatttattgaagatcactcttaaattcaatttaaattaaaataatatttgaatgcgtcaacaaataagggtgttggataatccgactgatgatagcaatcaacatttttaaataataacattattatttagatattaaatg

SEQ ID NO: 105558 - DNA, 1003 bp, Heterodera glycines
tattaaagaagaaaaattaaacttttaaataaacaaaaaaattatttgaatgaaaaaataaatataaaatttttctcaattttatttattagaaaacttatttaaaattatttacctctatagtttggttgttccttgaattttctcctccacttaagaacttctgagtccaaaaatatgtttttgcatcaataattcgaaatgggaaaattctatttaaaaatgaatgacaattggtatgcatgattattagggctaggatttttatgttttaacatactttttttgcggcttagttatggcgagagaagcccaaaaatagcattatctccgaacaatttttgatttagagcgacttataaacacataaaaacacatattttggcgttttggcacataaaatatgttagcacatattttggggtttggcacatattttgcacatattttggcatttttgagaaaaattgcaataaaaatacaagaaaattgaaaaatacaccccctaaaaatcgacttttttcctaattattaacataattttcaaattaaaaaattttttcttcgattgtagaaactaatgaaatctcgaattcattaattcgtcattggatttcgaagttctctgctggaactttcaatttatagaaatgatttatcaaaaaaagacaattttaccccaaacacttcgaaatgtatttgatttgcgttgtatgggctaaaaatgataaagaatgagatttttgggaatttttatgcaaaaacacacttattttttcaatttttaacacatattttagcacatattttggcatttttgggggtttttagcacatatttcagcattttttagcacatattttattacatatttcaggatttttagcacataaaaatcctagccctagtttttattatcccgattcgttttttgcctgcaattttctaattcataatttcttgattataaaaaacgtaaacaattatatttagtgccataatg

SEQ ID NO: 105559 - DNA, 1003 bp, Heterodera glycines
gacctggacctggatttcctggacaaaaatccaggtccaggaaaaatccaggctcatcgtgacctggatccaggcctggacctggattttttgaaactaattttaaaaatcaaaaaaaggtttaagaaaatcaattaattgcttataaatagggctggaatttttatgtgctaaaaatcctgaaatatgtaataaaatatgtgctaaaaaacccaaaatatgtgttaaaaaccaaaaaaaggcctaaatatgtgttaaaaatgcaaaaataggagctaaaaattggaaaaaccaatggtatttttgcataaaaattccaaaaaactcattctttatcatttttgcccgcacaattgcaaataaaaaacatttggaggtgtttgagggtaaaattagtccttttttgataaattgtttttaaagataatttttccatcagttgagtaagtgccagcaagaaacttcgatatccagtaacgaattaatgaagaattcgattttcggtacacgaaataaataaagaaaattttgaaagagcctataaatatggcaagaaagttgatttttagggggtgcattttttaattttttgtgtttttcttagatatttttttcaaaaatgccaaaatatgtgcaaaatatggccaaaccccgaaatatgtgcgatatgtttttatgtgcgaaaacgccaaaatatgtgtttttataagtcgctctaaatcaaaaattgttcggagaaaatgctatttttgggcttctctcgccataattaagccgcaaaaaaaatatgttaaaacataaaaatcccagccctaattatacgaaaaacaacattcacttagtgatgtttaactttttttctgcatgttaaatccaccccaaattttgaatatcgatagagaaaaaaaaatctacatagtgtaatacagccattttatactttatacactttttcatgagatatgttaagatttgtaataaaaaattattttgtgattcaatg

SEQ ID NO: 105560 - DNA, 1003 bp, Heterodera glycines
gattgactaaaaggatggatccatccctttaagattgactaaagggatggatccaaaaatattgtctccatccctttaccatggatccatccctttaagattgactaaacgtcttttttactattttaaaaataatgtctccatccctttaccactgactaaagggatggatccatccctttatgattgactaaagggatggatccaataataatgtctccatccctttaccactgactaaagggatggatccatccctttaagattgactaaagggatgcctaaagggatggatcaatccctttaagattgaccatacggattttttcatccctttaaaattgactaaacgtcttttttactattttaaaaataatgtctccatccctttaccagtgactaaagggatggatccatccctttaagattgactaaagggatggatccaaaaatattgtctccatccctttaccatggatccatccctttaagattgactaaacgtcttttttactattttaaaaataatgtctccatccctttaccagtgacaaagggatggatccattttaaaaataatgtcttcatccctttaacagtgtctaaagggatggatccatccctttaacagtgtctaaagggatggatccatccctttaagattgactaaagggatggcctaaaggtatggtccatccctttaagattgactaaagggatggctaccattttgtgtgagggggggggcagtactattagagtgttgagagactgtgttaaagagagaaactaaaaaagtttcataatgccaatttttattttttttattattctagcaatatgtaaacaataagaatttgtcataatacatcttacgtaatcttcagattttcatgacacatatttttgataaaattatgaaaaatttcgataagacttgtaagctcatttatttttgcaatttataatatatttattcacagacaagattcctaaaaaaatg

SEQ ID NO: 105561 - DNA, 468 bp, Heterodera glycines
aaatcggaggaggaaatattttcttcatcagaaaaaaacggaatctattaattcacttttttaagatatatattttttaaatatacatgaattaatttaagcctggaacatttttaaaattttaccttttttaaattttgctcgaaggtctttgaaataaccccaaaaaaacccaaataaatttaggttttttaaatttattaaaaatcattttgattgatttaattaatttttatttgctcatttatcacattaatattcaaaattattatgaaacgactttttatttcaaaatgaaaaccaaactctgcataatttttacattataaattttagacaatttgtgcattaatttttcattttatttcttttcctctttttatttgatttccatttccccatttatttttttcgtatttatttcattttttcgcttcgctttcgttagtcttttcgcctttaaaaatg

SEQ ID NO: 105562 - DNA, 724 bp, Heterodera glycines
ggtgggcggggggtcagatgggtatggaaaataggacattctatataaaatgtttccttgagtaatttaagatttttttatcagattgaaaaatgttttttttttggttttctcaatttttgtcagtttcatttctgtataatgttataatatattcttacaattatttttaaactatttatatctatttatattcctttccattttaatttcaaattaattaaggaaaagttaaattacttaaattttaactattatgcgagacaaaagaaataattgtgcacagaatattaattaaaaatttgttattttttatctctcttgatgaatttttacttaaaccctcattaaaatgcccaaaattatttttatttatttattcaaaaataaaaataaccaaaagaagggctgtgtcacttacacttttggtggaaataaggtgaaatgggaagtactgataaaagacaattgaaattttgactggagaagcagaaagtagaaatgtcagacctccaacaaagggaaatttggttttttataggggttggagaaaaaagaaatttttttgaggaaaatttttaaagaaagtttgaagtaggatgttttgttttttaattttatttgaagaaattgttggaggtctgggtgaactatttattgaaaagatgagggtattgttttcgagcgattgatttggtgaacaattttgtcgttgttggcaatg

SEQ ID NO: 105563 - DNA, 110 bp, Heterodera glycines
ggtcggaattcatttattattatgctttattaaaaaataaagttaataataataataataataattttctacagataatttaaatttaaaaacaaaaccccctcaaaatg

SEQ ID NO: 105564 - DNA, 271 bp, Heterodera glycines
  unsure (1)..(271): unsure at all n locations
ccattgtctcntgtcggtttcaccggtgcnncttattatttggaaatgaattggtggaaaggtgacgacgaatgacctaaaaaggttgataatgcttttgtttttgggttctttattttgtttttttcaattttgatttaataaagcaaatttcttgctcttttcatttatttatttatttttgtttaatttgcgatttatttttccattttaaatgatcataataaccatttttcacaacaaaggcatttaaatcgtaacttggcaaatg

SEQ ID NO: 105565 - DNA, 858 bp, Heterodera glycines
atttttaaaccatagtcagaaattagtaaaagaacgtcaaatataaaagattgaatttgcttattgcgctaaaaaaccgccgcacactcgactacggcggccagtaggtgggtgagactacggaagaagtccgcgcgtgatccgcaggcggttgaccgattggcgggggcccttcgggcacccgcaagccaccgcctgtggcgctcgtcagacgtcttcctccgccctccgtctcgcctcactacttgctccgtcttcgcatgctcccttttgcgaaattttgcttttaaattgttatttcccgttattatttttcggcactgaaatgtccattttcactgggacttagttgtcccagtgctcagatggcgtcggttcgataccttgttttttaacttagctcatcaagagctttcgaatgatacaaaatttgtgtaaattttgcgctttgccgcgcagtttttttttgatggtttaggcgttttcagcacctaagaaaacctataaaagtatttttatgcaattttgagtctgggacctatgatggatattttaccttttaaattttttagtaaattaaatctcggttttttgttcaagtcagggttcgagtttcgaatttggcaaaaatgcatgtcataatcgttttcagcgacctctaaaacccctagaaatatgtttcccttgtaatttatgaatttagaatttttgttcgaattcgggttcgggattcggaattttgaaaaataaatgtcatattcgtgatcagcgccccaaattaccctagaaatgactttttatttgaaaatttcagggggggggtcacaaaaccgaaaagaacctctaaaataaattatg

SEQ ID NO: 105566 - DNA, 805 bp, Heterodera glycines
taaataaaaaatcacgaatttgacgcaaaaattctcatctaatttgccgttttcgttgacacaaattgaccgaaccctgtgttaattgtacaatagtaataatattatataaattttatttgtttaaaaattttattatatgcacacataaaataatataatataattgattaccattaatgaagaaatgaatcattgcagcatcatatgatatgtatatgaattggcataatccaaaaaattatgggctttttttcggcaaatattactccaattttattcgcattagcatttattccaattcttctttccacactaataatgagactctccaaatctaaatcattttttattcaaagttataactttagttatgaaaaatttaaaaaatttttcgaaaattgttgaaaggggggagaaggagtgagtgaagcggcggctaaattttatttttttttattgaaatttttcaattttttgagcactgaaaaaattatttaaaaaattcctctcataaatatttgcttgaattttttcaacccattttgaaatttttaaggcaaaaaaagaagctttgaaggatgtcaattaccgaaaaaattgacgaagagatagtaaaactgaagcaaacaaaaaaaaaacaatttttaaaattcgagcttttggaaaaatcggcgaaataaaattttaaattattaattattcctattaaaattagtttttgattaatttcaactaattttgaacatttaagcatcattcataactttttgtataatcatttttatagcattttgaaaaaatg

SEQ ID NO: 105567 - DNA, 409 bp, Heterodera glycines
aattagggttcggaccccgtgggcgggggtggcttttcgcggaggcgggggatgcgggggtcagagtcgcgggggcggtggcacgataattccgcccccgcggggacgggttcgggggtttgatttgaattagctccaaaaaatctcacaaacaaattaatttttatgaatgatgtgttggctccacattcctttagtcgatgtatcgcctcgattcaattccttttggcataaattacacagattttgtctaaagaatgaccaaatttattgatttatgctaatttttttaagaaaaaataggttttttgggggccggtggtgccgataggcgccgccgggggaatttttttttatgaattttgttagaaattagcaaaatttttcagaaatttcattcttttggatg

SEQ ID NO: 105568 - DNA, 127 bp, Heterodera glycines
ttacgtgtcgaaagtcacttcggattttggtattgcgccaaattcgctctctaaaaaaatattttgatatatttattaaacggagattgcttgattgtgagaatacaaagcgaaatgcggcggcatg

SEQ ID NO: 105569 - DNA, 323 bp, Heterodera glycines
ttatcccgtatggggcggggaggtcggcatcggcaatatactttaacagccattgattctcctttgtctaggcttttcacgctgtttttaatacatccattaaattcaatttaatatacctaaatgaacttttcattcctttttcttttgtctagattagatgtcttcttaaagtattgtctaaaatcgctttatttgcttgtaatagattcttattgtatacaaagagggttctgtttacaatgtaagttgtctttcaaaattaaatcgcattgaaatgacataaaacttattaatgctttagtggaagagggttcgaaatg

SEQ ID NO: 105570 - DNA, 1003 bp, Heterodera glycines
caccctttcattcaatgagtcaaccaaaccatcgattaatggctgaatgaatggaggaaatttttcttccagtaaaaaatcgtggagacgcttgatcgtcggcagtatcacagacgccgttgatttttcgcgggataacttaaaaacatttttttatttagtataaacttaaaaaatattttactttttgagtttccacatcaaaaattttaagaattggacaaatttggcgcaaaagttcgaagtctttgaatgaaatggacggcaatgaagaagaaattatttccatctcggccatccgaggtctttttggtgcagataaaacgccggcatttctttggtctctttcaaattgcattgccatcaacacttttttttgctctttgaaagcggtcaacattcgattcggtaaatcgagttccatctcgtcggaactgacttaaaattagccgaaattgaataagaaaggaaaaaattaccataacaagttgccttttcggcatattcaattgctcctgatgtctccccataggcgctaaaaataaaagcctagaaaataggcactaataactcgaaaagtagcttaacaacacccgaaaaaaaacatgtttttcgtgcgtttcatgccacggggagctcaggaaaaaaataggcttttgcctaaaaattgcatccctaccaatcactgctcaaacgttgccccaatacatttggaccgacgcggaggtggtcaaaaaagtgccaaatttatatacggaaaatgcgtcagtgatactgtattaacactggcttttccggggatttgagatttttcggtgctggaaatttgggattagattccaaattttgggaaaaattatttaaaataaaattaatttttaaaaattatgacaaaaatttaattaatcacaggggcacgcggcactatcagtaaaactaataaaatgggataacggattgccattagttatttttaaaaaaagcgcagattcaaaagcgtatg

SEQ ID NO: 105571 - DNA, 791 bp, Heterodera glycines
tcatcgcaaaatccatgaggacgttttttcacttacagctcctcgatgaaattcaaattataatttatatattcaaatcaattttatttgttatcaaaattatcatcatcaaaaatttaaatcattgatatacaaaactatacgtacaataaaatcaatgaaatttatgcatattttttagttggtaaaaggggattcagttcaattgaaagagatcggacctaatcatgatcagattcataatgaagccttttttccctaaaaagcggttttggaaactcaacttgcacattttggctcacactttatttaaatacacggaaaaactgaaagtcgtcattgcttcaacaaaaaagaacatttaaattatttttagactaaaaatacgaaccgaaaaaatttgaattttcgactttttcttcgaatttgggtccggattcaaaattggtcgaaatggatgccggattcgggaacagcggcccggggccgggacacgtttttccaagactcccggtcgcggtggtttgtccaaaaaacgggaccagggccgggagtcccggcaaaatcccggagaggccccggtccgtccggtctctaatttaaggcatacatttaattttaaattagaaaattttggctcaatttattatgttgttttacaaaaacatttgcaaaactgttttttttttttgattaatcaacaacaagatttcgggggtcgggtcggtgggggaggttaaattgtcgggggtcggaaaccctgatcaaaaaattatttataccagattatg

SEQ ID NO: 105572 - DNA, 151 bp, Heterodera glycines
acaccacggatcaataaaccgtttagatatatatatccaatggaaattaataaatttgatccaacaagttttggattaattaatttttaccctttcatattatagaatcgtaattttatttaattatttctcagattgttgttgccaaatg

SEQ ID NO: 105573 - DNA, 89 bp, Heterodera glycines
tgtagataattttaatttttttggatgtgacgaatattcttttgccttctttctagaagataattgctcgcgcaaagtccgtcagcatg

SEQ ID NO: 105574 - DNA, 349 bp, Heterodera glycines
cacacaccgtccgaaaaaacgagatgtgtaccaataaatagagagtgccagagaaaaacattatctttttttctctaattttttgtctccttttggcgtactatctaatagtttcattattaggaaaaacaacatttacttcgctacgtttcattatttttctctacgttaaatcaacaccaaattttgcatatcgatagagaaaaaaattttgcatcgatttctatgtttattatcatcgcttaaatgttgtcttaaaaagttataagataaaaaagttaaattattattctttttaaagatttaatggctaaaagaactttattacggaagcgacagaccaaaaatg

SEQ ID NO: 105575 - DNA, 138 bp, Heterodera glycines
ctggtccagcgatttgcgtcgtgtgcatttttgtcttctctttggtggtcacttttgtttcacttgcggtcggtggaaaaatttaaaaacttttaaaattgattttaaatgaatgcgatttgccattggcagacaatg

SEQ ID NO: 105576 - DNA, 1003 bp, Heterodera glycines
aatttctattaatattcgatgatttagtccaaaaatgattaattgtttgaaataattgaagaaaatttgtttgaaaattttcattaatttatttattaaataaaaaaaccaaataattttgtattattttcacttgatataaattaaaatttgaattttttttaaatttttaaaatttttttgaatttttaaaatttcccggttggtcccggttcccggtttttcttgcggtcccggtcccgaaaaaaaatcgaggtcccggtcccggcttctcaggtcccgacaagtcccggtcccgttttggcaaaaattcccggtcccgtggcactctaatttggaccaaagtttataagacatatattcgtcctcttttagaatatgcgcctgaaatttggaatccgacatacaaaaaagatataaataaattagaaagatgccaaaaatattttacaaaaattgcattatttaaatgcagacttccttacataccttacaaacaaagacttgatttattcaaactttagaagaaaggagaaaaacaattgatttagttcaggcattcaaaattattaatggtctcactcatcttaaaaaagacatattcccacaattttctggtcacatcccttataatcttagacgtaaagttgtgttaaaatcacaatccagtaaaacttcaaattcttttatcaacagaacggccttaatatggtctaaactcaacaaagatataacagatgctccatctgttgacagtttcaaaaaacgtataaataaatggattgagttaaacaaaaattcagtctgtaaaagagctccttggacttgatattaatttactaaaatctaacgtgtaagtggtcaccccttcgttggatattttatttcttctgaataaaaaaaaaaaaaaaaaaaaaatttgttccacatattataactttttgttgttttctcaaaaatttatttccagttgtaaaatttccgtttcagcttatcaataatg

SEQ ID NO: 105577 - DNA, 1003 bp, Heterodera glycines
taattttcaaattaaaaaatttttcttcgattgtagaaactaatgaaatctcgaattcattaattcgtcattggatttcgaagttctctgctggaactttcaatttatagaaatgatttatcaaaaaaagacaattttaccccaaacacttcgaaatgtatttgatttgcgttgtatgggctaaaaatgataaagaatgagatttttgggaatttttatgcaaaaacacacttattttttcaatttttaacacatattttagcacatattttggcatttttgggggtttttagcacatatttcagcattttttagcacatattttattacatatttcaggatttttagcacataaaaatccgggccctacctatgaccaacggctccaattttttaaattagctactcttgaaaaacgaagaaaaatttttgacctcctaactacttacaaaattttacatggttttacacatttggacccaaattctctgtttaaaagaactaacctaaatactcgaaataagtcttttttccggttaaatgttaaattacaatctaaaaaatcttccaaatcttttgttaacagatcagtcaaggcctggaatgcccttgataaaacgttaatgtctagctccttaaacacctttaaaaaattattagaattgactcttgattctgaaagcaccaatgtataaagaattattaacttttgaggcattttattgactttgacctcgattttattttcatataaatttttcgttattgtttatttttaacctgtgatctcacttgatatttattcaattactctgtgactattttaccgtgatcagtcatcagagtaagtggttcccgcccttctgatggcaatttttttttttttttttttttctttatcgatttatctatcagctacgaacataaaagtgaatttattgggaatacaaagaaaatggtcaataaatgaattgtttcattctttcaggatttctctaatatg

SEQ ID NO: 105578 - DNA, 1003 bp, Heterodera glycines
ttgcactttccaaaaagggaaaagcttggataagaaagtgcatatgcactttataagttttacaattattattttatataatcacaaaaaattattttattaataaaatcaaacaagaagatgtggcatttagtcatatgaatagaaaatgtgacatagacattggataataaaaatttacaagtgcttatgcactttcatccaatgctactacctatgagctatgagcatattcactgaatagggaatattatttttacatctgtatacattttatatagtgaatataattttgtatatacatttttgcgaatataatttcgtatatacatttttgtataccttttttatagcgaatatatttcatatatacactttgtatatattttttatagcgaatatacttttgtatattttttacctctgatgtattagggtattgaataagctctgtcatagcaaaaaaaaatttctatgctgatttttttttaaattgtcatcatcaaatatgtagttaagattaatttgcatataccattcgaaagagaaaactttagctattttaagcatttttataggtaattagcaaaagaattgttttaattttagcaaaattaaaaggaacatttattattcacaattgaacactttcacgatgccattatatatcatttttaatgaaaaaaaagattttatattggtttttgtttgttttgggaacatcaatattatgagatctcatcagtctcgggtctagaaaattttagtttcgagattttgtggattaagtgttgctcggtctgtttcctcctgctggcaaagactcgggctcagcaggccttgaagttagagtgctctgctatctttggggtttagggttttcgtctaaaaaagtccgtttttgagtcctataaaattctcgatcagggaatgtttgcgtaagttagagttctctgttgtcttgagttttaggaaattttcagtcttgggttttgggctcatg

SEQ ID NO: 105579 - DNA, 739 bp, Heterodera glycines
ctgcaggtcactttcattataaaaaaggaattttgtgagacttcgaccgaaactcaattcaaacaaagtgaacgggattttgactaaaatttgagttcatttcaattaaagtataaataattatttcagtttgcaaagataaaagcaattagaagaattttgaaatagttgaaaaaattatgtcaacgaggcaaaaaggttttaaatttcggcaaaaaagtaccgattgagaaaatttaaaattttaatttcataatatcttaacacaaataaagatttgaaatcgttatcagacctttgaattattaaaaaatgcttttttgaaatgtataataattattttcttcatttatctcaacaatattataaacttttgtttccgctttattctttgaattttaccgaaacatttgctgtggcggcgtgtaggggggtgatgtatattataagcacaaatgttcttttcatgtttggcgatgtataacattgatgcttatttttacatatttgatctgataaagtgaattgtgccaaacaatatgtcggcacgaacacacataaaaaaaattgtttggacatttattaatggaatacaatgaataaagatgggtctagggataacacaatagaagaaaatggcgaattattggacaaagtgatagatttgagaagagaggcggggacagggaaaaggggccaggccatagaccacattcataattaacttttcctaaaaatg

SEQ ID NO: 105580 - DNA, 89 bp, Heterodera glycines
ggtcagctgatcatcccattttatcgataaaagaggggcggggcgggaaaaacacgtgaaaacgaaaagttaagtttggagcacggatg

SEQ ID NO: 105581 - DNA, 93 bp, Heterodera glycines
ctgatcagcacgccaaatcaccatcatcaccatcaccagcagcagcatcaattggttgatcagctgtttgtggcagccgctttccagcaaatg

SEQ ID NO: 105582 - DNA, 164 bp, Heterodera glycines
ggaaaatgaaatgaaaatttacacgacgattttcccgtctcaaaacgccgcacgattgatcacttatgtaaacgcaaaaataatcagaaaagcaatgatcgaaggcaaataattaattacttaatttaattaaattatcatgcattttagcgctgaacaaaatg

SEQ ID NO: 105583 - DNA, 685 bp, Heterodera glycines
taaatcagagtcccaagttttttttttcaaaataagacaaaatggctcaaaaactaagattcagacctcaaaaataatatttttttctaaaactaatattagcgcgaaagaaaaccaataaaataattttattaacataaatcaattgaatattttttcccgctgatcatttttttcattttaccgcatatgcacttttttgcgtcgcttttttccaaaaaacttatttttaaaaaatttcagaaaattgtaaaatgttctttaaggcattttgggcaattacactatttgttaacagattttcaccaaaaaatgaccaatttttacaattttgagccaatttttttaagaaaacaaaagatttgggggccggcggtgccgataggcgccgtcgggaaaagcctgaaaataagggcaaatcttacaaataaggacatttttaatttctaagacctagcacctccaaataaggacaaatcttacaaataaaaacacttgtgaacttatgctaaatccctaatgttcattcggttattttaagcctgacaataaaccaatcgagtggattttgcgaattgtcgatggaattgccaatccgatcagtcgctttccggaattggaatatgtttgttctaaaaaattatgaattaaaagcagaatttagcgcaacaaaaaaatcagtatg

SEQ ID NO: 105584 - DNA, 287 bp, Heterodera glycines
tggcgaacggttgcacgagcagttcagatgtgtatgaagtgaattgttgttggaacggaaatttaggggcagaaattttggaattgttttatcgttcattttttcttgttttatatcaaatgaatttttttgccaaaatttgttttattttcctatttaattgacttttgtgtctttaacataacaagatttactgttttcatcacagttcaaattatttgtgctttcattttattcatgaaataataaatgtgatcggattttgttctgaactgcttctgaccatg

SEQ ID NO: 105585 - DNA, 1003 bp, Heterodera glycines
gctgtcattcatttttgaagaacttttccgagtctcgacaaatgttgaaacattcgaaagtgccgaaatgtaacaaccgataaacaactttgccaattgtcagctttgttgcatcaatgatgcctcaatgctcaatgatttttttttacctcagggaaataattgattaattggtgattaatcgccccttccctccgttcgcaatttttgcccctttgcccccccccccccccccatttgccattttcttcgttcatttgttcgtttttcattctttccttcgccgtgccttcgcttcgcttggcttccgctgcctcggaacaaagaacagaaaaagttgggaaagcagcagcagaacccgtcccatgtccacgtccaagaatcgttttgcttatgaatggcgtaacattcccattcaatcattcattttccatcgttcctttggttgcgtgtgaactgagaaccatccccatcagaaacggacgaaaaacaattacctcgttaattgattcgccctacccaattcacgagggtttcgtttaaagtggttaattatgtgctttgataatggttgatgggcactgtccggggttaattattccgtaatcaatcgttacatgaacagagagagagatggggcgaaggagagagagagagagagagggcagagagagcgagaaaaacatgggaggggtctgtaacttaaatgcctgtgctttcgaataccgtaaaactgtgaattggttttgcgtgactaccatggtccattcatgtctattcaaaattctgcttgtttggcgttatgtttattttattccatatgatttccccgaatcccctggggcgctttttcttttccgtgtttttatttggcctgactttttcatttctctttccccatttctcatcgcttttccctaataattttgttcaaatttctctcccccacagattttcatcttcacaaatctcagcttgtcaacaacaactcatttaaaccatg

SEQ ID NO: 105586 - DNA, 203 bp, Heterodera glycines
accatcaaagcttgaaactccacaaaattatcgaaatgctttttagcacccggacaaggcacttccgaccgcccccctcctcctttgcctccgcgacaccaccgccgaagtgccaatggccacaacagcgcccttcctactgtaacgtattaattaattagttgcttttttaatttatttggcaggtcgaagttcgaccgatg

SEQ ID NO: 105587 - DNA, 1003 bp, Heterodera glycines
aagaattttagacccaatgaaagcgtcaaatatatttatcgagaattttatttttttttaatttaaattattctttctatacatcttttattttttgcaatgtttaatttcttttattcactttttatttttcctctccttgtcacacttttcttccttagaattaatttttgctcttagttttttctcagtttctcttttatttttacatttttataattcccctttattttatgatgtttaatgattcttattcactaaaattctggtaatatccgtttttttcagggtttctttatgttcttttttctaagaaatgttatgatttgggggtagtgtcttattttcatctaaaagaggaaatttctgaatttggctaatttctaacaaaatccattaaaaattttaaaaattttccacgcacattcacccgagttttttggaaaactgtgccgcaaaaaatgttaaaaatctgatttaatggatccagaatgtctgatatttatggtttgtttatctcctccccaaaattgttaaaagcgataatgggagacgaaaaatataataattaaataacatttttgatcggataattttaaaaataactgatttaaagcaatttcgcaaaatgttcttatttttgaccctaaaaacaaaactcatagcaatttttctctgctgaaatgtacattttatttacaaaatataaaatttttatttaataaaatgaattcagttttagtagtttagaagattaaagcatgcattttcttattaccagtttaattatgtttattaaattgtgacggaggccggagaatagatttgaactttgatcgaattaaaatggattacttaaatcgcactttttagcgtattgggacatttgcggataatttttgaaaaaataaaagctattcttgaaaaaatgaaaaaaattaaaattgcggcaccattaattctgctttttgttttactttttttgcgagtgacaaacaaaatg

SEQ ID NO: 105588 - DNA, 225 bp, Heterodera glycines
ttgatggtaaggaaatgattaatgataaaatgaacaatattccgggaaagagctaaacataaaaagggttaattgttgcacttattttctaaatttacaataaattgttttaaattagagtggtacgggaccggatattttgggcaaaaccgggaccgggacattttggatttaaaacgggactttttggatgggaaaaccgggaaaaaacaggtcaaaaccatg

SEQ ID NO: 105589 - DNA, 105 bp, Heterodera glycines
atggtatggaaaatgccgatcaaaattatgatcaaaggcaattttccataattttggcatcgtttatggcttttgtgaatatacattgtgtgtacacagaacatg

SEQ ID NO: 105590 - DNA, 207 bp, Heterodera glycines
acaaagtgcttaaataaggacaaagcttacaaataagaacatttaaaatttgtaagatttgaaccctcaaaataaggacaaatcttacaaataaggacaaagggtaaccctggtttagtgtataaaaatccggtctctataatttattaaacccaatttaaaaataattatttgcaattaatatactgtgattcgggtttagccatg

SEQ ID NO: 105591 - DNA, 71 bp, Heterodera glycines
atgggttgttttaagataaacaatcctgatgagcgcagctattgttattttatgccttacaagcaacaatg

SEQ ID NO: 105592 - DNA, 322 bp, Heterodera glycines
ttaccccgaccgtccctaatcgcaatttcaacaaattttataacacattcattaaattcaaattttgccgccgccaaaagatgtcaatggggcgcttaaagtcacttattcttttgtgtccaatattccctgcactaatctttgctgatcgccccgagccaaacaaagaaagataacatctgtatgaccatttctacaatgaaaagacgacaaattgacaaaagaaacaaaaatttggagaactaaagtggatgggaagggggggggggttaagcgatcgggccatactccgctggtcatttctccgaatattcgcgccatg

SEQ ID NO: 105593 - DNA, 362 bp, Heterodera glycines
aggcgcctctctcgtcaagcaattaagacggaaattcccgatcccgtaagtctgatgaaagtccgatttgggtgcagagttttaaaaattccaacaaaaaaaattgtttttttttttgaaaatttctgttttttgaattaaatctttttggacaatttgttgagggcgggtgacaactaaatatacacatattttttgttcgaacattttttactagtaaaaccccatcatttttgtagcagttgtcgcccggcctggagacgtcgttgcatgactcgttgaaactgttgctgaccaaccatcataacccgcaccacgaccagcagcagccgcaccgtggagttcagcagcaacagctgatg

SEQ ID NO: 105594 - DNA, 527 bp, Heterodera glycines
tctttccccgactgcttctacacctcctccaaaaagactcacaatcagacttgatttttgattatttaaaatttaaatactgacatttcatctcgttttgtattatggacatgatgctgcttaaccgttcagattgcaccgtttaaatacagacgggtttttgttttgttcttccacgcttatttgctgcttatatatttattattattaaaatagaaatacatatatttttgttttccattagttgatataaaatattcagatatctttcacacttacaaataataaccataagatcgaattaaagcggggggcgtgtggtgtaaggatgtgtcatattgagacctatattttcatggattttgagacaacgggactttttgacgacggccacaacaacccgttgaccaaccccaatcggtccaatgagacggccagagaacgtgcccagaggttggacaacctcatcaagtcaggtgagagaagagattgggctgaaccgcttgaattgacaatgaatcattatg

SEQ ID NO: 105595 - DNA, 553 bp, Heterodera glycines
aacaaatttaatcgaaaaaataaataatatttcattgaagacagattatgagcatgaacattaattaaaatgattgatcttgttttttcataaatcaactaatttcacctgttaatataatctacttaattaatcaattaattcatgccttcctctattccgtttaatttaccaataatttcaggatttgtttgactaattaatggtttggagtagggttaagccccgacccagagccccccgaccccgacccccgacatttttgggacctattccccgacccgacccccgacatgtcgccccacgaggtccccggcccccgactttttgccccccgacactaattcgggggattgggtactccgagcgttttaaaaatttaaaagttatgcaaccaaaacatttaaattttacctatcactacgccaaaataagtttttttctcactcttttagaaaaattaataatatataatttgccaaattaaactttacacagatttacaattttccaggaatttaatagattttcacccaattgattacttttaatg

SEQ ID NO: 105596 - DNA, 372 bp, Heterodera glycines
tcttttttctttttttctctttttccttccttcgtttcttcttgactatctctctatctctctttcttttttcactttttttctaactttggttgtctctgcttgctctctccacgtcccttttttgctgtctctgctcttccttttctttatgcttttccctccggtgcccataggccacgcccactgccccgggggcgatcactttcgttggtgggggagaggccaacaaaaaggccgtcccgccgctcgacaccgctcactttcgacttgacgaccacggccaaaccgattcaagaattgctagggaacttattgaacaatttcagcctttcatttcatttcgtattcattaattagccgataaaaatg

SEQ ID NO: 105597 - DNA, 147 bp, Heterodera glycines
aaaattatcagagtgcggaaaatcgcatgtcatctaagcctagcaaaaaatggtctaagtaaatatcgtaattacgctcaaaaagcttctcaaacaattttagcgcttccaattccttctacaatcgcctttatacatcccattatg

SEQ ID NO: 105598 - DNA, 64 bp, Heterodera glycines
aaatttttagaaactttttttgaaattttaatttttttaaaggaataattccctgctaccgatg

SEQ ID NO: 105599 - DNA, 142 bp, Heterodera glycines
tttgagattgtaagaaatgattttgtgaatttcttaaaataagtaaaatgaaaaaaatccttaaagattttaattatttatatatttttaaaaaatttttgaatgtttttaataatttatttgagttttagggacgaaaatg

SEQ ID NO: 105600 - DNA, 977 bp, Heterodera glycines
caaacccgggaccgggaccttttcgggttgaaaaaccgggaatttttggctgggaaaaccgggaaaaaccggaacaagtcctggtcccggtcaaaaccgggacttcggtactcagttgtactcagttgtacgtgttcaggtcccggtcccgctcaactctaataaaaatacagagatggtcaaatgtttttatgaaaaggtgcttccaattggtatttgctttgataaaagttttcaatgaaaggttttaaaattattttttggcattttttatagcacttttttgggcttccaacgacatcgatcattaatttccccaactatgtaattttggactcagagcaacattgccttagtgtgccacacccttttttgggtggtcataaattaataatataaattattttgagattttgtatatattaattattaacattttattgtaattttatttgaaattttgtcataaaaatcttttttcaaaaatgcaaatcaaaaatcaattttaaaataagataaaaatctatttatgcttaattagttgattttcggcattttgtttttatccactgttctaaaaaatgaatttaattaaattatgatgccgggaattggtccaatttttaatactcagtttgtcatttttaagactgaatttaaagttctaaaaatgatgaattttttcaaattaaattcacgtgaataaaaaagtgggttccaagtaaaataaaattgaaatcattttttttatttgcgtagctttcattaacggatgcaacgtaaccaaagcggaggcgatcgtcactaaagagcagatgaataaataaatttatgtaatttaatgaaggttctattgtctgtttaaacaaagaataaagcgtattaaaatttaaagtaaaagaaagtgcgtataaaaagcgaaaaatgcatgcaatttatcaattaaattttttaataaaagaataattagcaaaatg

SEQ ID NO: 105601 - DNA, 1003 bp, Heterodera glycines
  unsure (1)..(1003): unsure at all n locations
taaatgtcatcgcgtaaaaaaacatttttatttcatttctattaaaaagtgtctgaattntaaagaagtaaggatttttggaattttcctaattttgatccgtagctgattttttggatatttttcaagacgatttcttgtaagattattttttttataaaacaactattcgcactgtatgacacgcccaatctttttaatttgcttttaaattgctttaaaaggtctattgaatttttttaataaaattttaaaaattaattaaatacatttgggcagggatttgagataaagctgaattgccaaagttggattgtgtcatagtatcattaaatattcatcgccgaaacattgaaatgatatatttttaaaaatttgtcgtagcaaatgtgaataaaaacaactcattacttcattcattcgaagtaatcaatttaaatcacccaattatattaagatttgcttcttatgatcatttattttgtttgatgtacaaaattaaagacatcatagtggaactttaatttaaaacccaaaatgtaaaatattatttgcctattttgaacaataaaggacaagtgtatttttgcaacattctacatttctttaaagactgctgatttttttatttccggaaattttagccatattttcagagtttcttttttgtattattaaagagaattttcggatattgtgcatagtatattatttttatttatgaagctttaatttacccatataagttaaaaaatatgtagtgatgtaatttctgcctatttaatgcgtattttattgaaagaaaatagtcagaaaaaatatcaataaattaaatatattatattcatatttttatgattttatttaaaaattctttctatattttatttgattttctataatttaattattttttaaaaattaaataattaatttttctgtgttttcaatttgaattacttcctttaataaaagtttaattaattttaattatttaaagatg

SEQ ID NO: 105602 - DNA, 321 bp, Heterodera glycines
aagtaattcatggggcactgagtcaaaaagtttctgaaaatcaatataaatacagtcaacatttttccattttattattgcctcgtcccaatctttctcaaatgttattagttgactcgtagtagacctatttctaacaaaaccaaattgaaattccgaaatttttttgttttttaatagaaattgtaaaatatttttgcttaaaattctttccattaccgtgcagagtgagcaggttaatggaaattggcgtatagttttcgagattatttttgtcacccttcttaaaaagcggaaaaacaattggattcctggcagatg

SEQ ID NO: 105603 - DNA, 134 bp, Heterodera glycines
cgtgggaatgtcgcggctcgaatttagccgcgactgtccgatgatcggacagttgtcgaatggaaagaaatgcggggggagaaggaggaaaaaacaggagaacgggaaattgggcgatgaaacgatgaaaaatg

SEQ ID NO: 105604 - DNA, 54 bp, Heterodera glycines
gaatggaagccttcatgtgcgcaatgtgtctgactttttccgacgacaaacatg

SEQ ID NO: 105605 - DNA, 112 bp, Heterodera glycines
  unsure (1)..(112): unsure at all n locations
tggaacgcaattccgcagtcacgaatttcaaaaattcacaaaatntaatggaatagaacaccttttttctgctccatatatgccgcaatcgaacggtcaagcctaaagaatg

SEQ ID NO: 105606 - DNA, 64 bp, Heterodera glycines
ggtaatttgtcaaatttttgttttttacaaacatacttatgttattagcctaacgatcaacatg

SEQ ID NO: 105607 - DNA, 406 bp, Heterodera glycines
agaaggagtgagatatagacggtaagagagggagagagagagagaggggtagacaaggaggtgatcaattggaagggatgagagagagagagggagaaggaaagggggagagaggggggggggggggcttggtcacttgcttgacattttaaaaagaggaaaagtgcaatttgaatagaaaaatatttttgacataatgcccgtccgggtagcaattgtcggactgtctttaataaaagtgccgcatttaatggaagtaatggtatgacaattcctgaaactattacaatacaggaacagctgaagattctcgaagagattttcaaaaagacgacggtatggccttaactttgctcatgtcgcggcatttcccttgctacccaagcaatatccggacgtgaacatg

SEQ ID NO: 105608 - DNA, 65 bp, Heterodera glycines
tctcttccgtccttcgattttcctcgcccaccaaaatcactttgccgacatcgccgccggcgatg

SEQ ID NO: 105609 - DNA, 1003 bp, Heterodera glycines
aaattttgcttatattttttaaaatatttgtggtttagtggttagtgcttcagcactaatagaaatctttgttatgagttcaacaccggttgacgttttccttaaataaattttttttttcctttaattaattttttttctgattaatacagggtttcttcgtgcccccgccaccgcccccgcgactctgacccccgccaacccccgcccccgcgaaaagccacccccgcccacggggctcgaaccctaatcttaagaaaggaaaaattcttcttatctgtaacaaaagcgcaaggaattcgctgtagaattttgtgtacagcaccaaaatatgaatttacttatttttctcactaatctcaaaaaaaccaaattcgtttccaatgttcaaatgtgtgtacaactttaatatccttttaccgtgtcaaaaaattctgctgcatcaactgcaaattcaaaatgggtccgtatcgttttggcgccgacgttttggcgccaagctataataaaaaaaagaaaacacccaaatttaaaaattttgtaaaacaacaaaaaaaaacgtatttttcgcgaaggtaatactgccgatggttggttgccccccttttttgaagaaaatttttttgttttcaaaagtcatgaaaacatgcttccaatggttttcagggtcgctgctcacgaaccaggcatccatttcgaccaattcggaacccggagccgaaattcgaacaaaaaatcgaaaataaaaaatttcaaaattctctttttgttctaaaatagattaaaacaaccaaaacgttttggcgccgacgatttggcgccatgtagggaggaggtagaaatgatgagaaatcgttataatttttctgacgaagtctatcaaagagccggatttaattcttcatttactctttttcgctttggcttatgttctcttaattttgtatttaagtaatgaatcgtcaaattgatacgaaaaaacaaaagcctaaaataacgcatg

SEQ ID NO: 105610 - DNA, 1003 bp, Heterodera glycines
ttttgtccccgtaggggatgaatgaaaacaattagcaaaacgtctccctcccccctacggccacttgccaccgaaatgttgtaaaaaatcttttctcatttcaacaaaatcaaacttaaagtgtaaaaaaattgcggctaatcgtttgggagtcgtgtcgtatccccacttttttaaatgatgaaactgcaaatttggaactccgaaatttttcattttcctttttttgccttatggccgaaacgaactgcaccctcgccgggtgcaccccaaaattcggctgctgaatttaaaaatttttttaaaaatttttaagagatttttggaaaaattttcaaaaaaacttactaattaaacaaagttttaaaaaaaaattagtcatcaatttttcaaaacttttttagaaatttttatggaatttacctataaaattttggattcttatatgatttctaagtttaaaaataaataaaaaattcggtgtgaaattttgtcttgttccgccctccccccccccattagtgctttttaattatcacttaatactcttaaaattaacaccatggctcctcatcagggtaaggcggtgctgcgctgagccgtgcgtcgcctggcaccgatgcattggcggcggcgccgcgtgcgacgtgcggatgacggcactgacggggtaaaatcgaatttggattaaaatcgaaaaaaatcgaaatgggggaaaaattaaaaggaagataacccgaaaaaaaaccgcggaccgcaagcggtggatgaattatgaatggatatggattgagttggggatgatccgtgccacgaatgcatatactttttaatttgctttttccgtgcctcaaggccgaaccaccccccccccccccgccccttcatacatttatttatttatacatttcaaaatacatattttcatatacctatgtaattcccctaacaaataaggtgaagtggtgccgcgcttacgtcggtgcgttggcggcgccgcatg

SEQ ID NO: 105611 - DNA, 733 bp, Heterodera glycines
gcagggctcggatctgttcttatttataagaaatgttctgatttcgggctattgttcttactttgttattatttcttaaaattcttcataaatttagaaatttatggcataaatgttcttattttacctataaattttaaaaaattaatcatttcgtcactgctcgtttcatctcttatgagaaaaattattaaaaattatttatttaaaaaaaaaagttctcagtcacgaaatacagaaaacacattaattaaaaatgagaatttgaaaaatggaaaataaatgaaaatttggaaggaattaagataatttaattaacaagacttcttactcctcttctactattcattttttaataaaatgattaaatatttgcatataatttagtcatttaaaacaaaaaacaactcgttgttctatcattgaaacaagtgcaacaagaaatttatattcagaagcacagatttggcttggaaaattaaaataaatgtcttataaatgaatgaaaataatttgaacatttttaaattaaaaaaaatatataaatcaattaagaatataacgattaaaatttaaatgaaaaaatgaaagtcgcaaaaaaattattggacaaacattggcaatggaaaagaataacaaaagaaaagaatggttgaattaaacaattacacaaaatatgaaaaaataatattaataatatttaaaataaaaataatattttatagtaaaaatg

SEQ ID NO: 105612 - DNA, 177 bp, Heterodera glycines
tttcttttacgtgttcaaagtatttttttatgggtattgattattagatgatgttcagccgtattatggcgttattaatgagacattcacacataaaaattttggcaatttaagcatttccgttttgcgaaaattcactatatttatcaattttcttttttttgctgatgaaaaatg

SEQ ID NO: 105613 - DNA, 84 bp, Heterodera glycines
aaaaagaattgcattttcttggacacattgtgtcatcacttccgtgggtcaagctccggtacgttcagaagcgatcagcttatg

SEQ ID NO: 105614 - DNA, 225 bp, Heterodera glycines
tggttttgacctgttttttcccggttttcccatccaaaaagtcccgttttaaatccaaaatgtcccggtcccggttttgcccaaaatatccggtcccgtaccactctaatttaaaacaatttattgtaaatttagaaaataagtgcaacaattaaccctttttatgtttagctctttcccggaatattgttcattttatcattaatcatttccttaccatcaatg

SEQ ID NO: 105615 - DNA, 267 bp, Heterodera glycines
attgaaaattataataaaatcttttttttaaagctaagatttattattaaattttgaaaaattttaaaacctgaaaattggtcaacaatttgcaatgttggaaaggatcacgagaaaaaagttactaatgaaccggattattctttgaaaaaagactttgtaacattgaaagaaattttattgcgccaattcgaccaaggaaattctctgaaacttgaaagatatattggcgttttgttaatggaatacaaaactcaaaaacaaatg

SEQ ID NO: 105616 - DNA, 95 bp, Heterodera glycines
ggtcctattcgtttgaaaatccaaataaaatgaataaattgtctcagatttcttccgactcgcaccgacgcgcgttgggagacatcgccggaatg

SEQ ID NO: 105617 - DNA, 214 bp, Heterodera glycines
tttgggtaactatcatgcataatttatgttaattgcgagacaattacgctaataaatttatgggttggcttttatttccgaaacatttaattgacttaaaatagcggctaaaactgctcatatttgaataaatattgcgaacggcccatacttctttcctttagctttccaccaccaccgccattttggccccacttctccgtcttccgccatg

SEQ ID NO: 105618 - DNA, 1003 bp, Heterodera glycines
caaaagcttaggctcgggaaaatacacccctaagaaatatttaaaatgaaagaaatgggctatttataagaaagtgatgtatgaataaaaaaataattaccaaaaataaaaatatttttaataggcaaatttttgtcattaatttcttttaattcgtgatcagcgagcgaccgacccataaaaccccaagaaattccaaagagggcgcgctatatttatgaaacatttcgcccattatgataaaatattgattgcgaatgggaattcgtgaaaataaaaacgaaatttgattaaacaaattttaacctttgaaaaattttgtgtaaatttcagaatttgaccccaaacccaaaattgctattaagaaatggcaaaaaatttgcgaaattttctcccgccgacgcctcttgtgaagaaaataatcgcattaaaattttcaaattcatcgacgccaaaatctgtcgttaccccaaatttcaatttagttttgttttaaaacgcttctaaatgggctaggtattttggaagcaaattgatcatgaaaaaatataacccaaaaaattatattttaacaatttcatggagttgaaatatgtcactgaattgaataagagaaacatgacatggacaatcattgaattaatcaattttgaagttgcatgataaaatcattttatgagataatattatttaggaccaattcacaattttagcagctaattaagaatacgacgttacttttttaatatcttttcggaaaaatcaaacaaacaaaaataaagaaagtcaactatattcaaagcatacgagaaaaaaaacgaaagatatttggaggaaaatgagaggaaaaggaagaagaaaatttggatgaaaaatcagaagaaaaaagagaaaaaattagaaaatttaataaaatgaaaaagaaaatctagcaaaaaggaaccaaatattcaaaaagaaaatggaataaattgaaggaaagcaaaaaaaaagtgaaaaaatg

SEQ ID NO: 105619 - DNA, 121 bp, Heterodera glycines
  unsure (1)..(121): unsure at all n locations
aattagacttgcatttagtagttaccaaaatacanaattaaagaatttatttttcgctttgaaatnntaaaaatataaaaatttaatcaaataaatatattaattataatgactgataatg

SEQ ID NO: 105620 - DNA, 488 bp, Heterodera glycines
ggtgggtgggacgaatattagcgcagcggttaccagtagaacatttaccgtggccggaaaagttattgagctacctaaattggaagggccgttggttaaagtccaaccctgcgggtgcgttaccgtttatattctacagtatataacaagaaatttggtgccattttctcttaaaggatatcatgcctgattaagccaaaaaatgatatttaaaatgctaaaatttgggtctcaagattccccaaataaacttaatcctctaatctaatacaacacgtgtgactaactatcaggagattatggtaattaaaatcatgttcctaaaaccgtgccatcgagcaataaattttgtgatttcctaacgactttcggaacgagatcattaattgagggataccgaaaaattaatacgatataaatactgtacaaataggcttgtgtcggcacccatctcactgcattggttgtggaccagcggcaaccccatg

SEQ ID NO: 105621 - DNA, 149 bp, Heterodera glycines
  unsure (1)..(149): unsure at all n locations
ttagcgtgggacgaactcagtttttcaatggcggtgggcaaagtgcggccccattggtgcagtgccatgcccggggcganagtcagacagttgggcagcaacagcacggcccaccatgcaccgctgcagtgcgtttgttcatgtcaatg

SEQ ID NO: 105622 - DNA, 166 bp, Heterodera glycines
agttgaaataccgagaatcccggaaattctgatttctgaaaaagaccatgtggaaaatgaggaaaacggaatagtcagaataagcataaattcggtaaaaaatgaaattgagagagatttatatgactttacattaaatacaaatccaaaagaatttatagaaatg

SEQ ID NO: 105623 - DNA, 837 bp, Heterodera glycines
cataatcttagcaaaattcgatgcgcattcgtcaattttgcgctctggttgtatgcacatttgcggttagaatacaaaaagtatgcagactatgttcaaaaacatcgtcgtttatgcgaaggcaaagatgtacataaatcccatcattactcttccattctcgaggataacaccgtgacagaggggtggctactgtacatttcattatacgatatggtatcaattaaaaaccagacccttggcttcggggggtactgaagtcaaaaattcgatttttagggtgtgtttttcttttttcagtcgatttttagggggtgtattttttgaaattccgaattacgggatgtattttacaaaattttcgccaaaaaattactattttttgccatttaggtttccatttttcaagaatatggtaaaatgggggtccagcgatgccgataggcgccgccgggaaaattttttgagtattttaatgcaattttgttaagaaaattgcttaaatttcaaaaattttactaaaatcttttactttttttgggtttcggggcggggtgagctttagcccactcagccccccctccctgcaaactgtttcaagcaggtttatttttgtgaaaactaagtctccgatggtcccgaaatactcgaaaaaaaaatccaacaaaaaaatacatattatataaaaaaatgggttttcaaaatgaaaaataaatagaaaaataaaaattttggtcacccaatgccaagttttaagttctgctaagtttgagctggaattgttccgacaagagccattgtggaattatgcacaagtgatcagaattgacacaaatg

SEQ ID NO: 105624 - DNA, 56 bp, Heterodera glycines
ggtgaaaagggcaaaggggagaaaatgaaaattaaatttggtaatgccatctaatg

SEQ ID NO: 105625 - DNA, 1003 bp, Heterodera glycines
aaataaataaacaatcccaaaactaaaacctattgatttaaacctaaacctattggatgggtgtgggagtgaacctaaatctattgaaggcttttattgattaataaaaaataaattaaattaaaaataaattaaataataaattataaataaattaaatacataaatttaaaaaaaaaattttttataatttaaaaaataattgaataaaaaagctaagattcattctctctctcactatctttcttttctttctctctctcactctctctcttatctctctctctctctctctctctcactctctctcttttttctttctctctcttatctctctcttttctctcactctctcactctctctcttttttctttctctctctctcattctctcttctctctctctctcactctctttcttttctttctctctctcactctctcttatctctctctctcactctctctcttttttctctctctctctctcactctctctcttttttctttctctctctctctcacattctctctcactctatctcttttctcttgctctctctaataccacacaaagatataaataataataataaattaattaaaaaattaaatttaattaaaattaaattgttaaaataataatagttaaaaaattaataaataaatttaaaataatagataaaaatttaaaaataaatgaaaaaaatataaaattaattaattaaataattattaaagtcaaatcgtattggagggacggacgtcagctgtcgtgccctttagggagggaagcgacgccgggtcatttgagagcacgcaggggccatttgagcgctcgcacgtgtcatctatgcgcccgcaggggctatctgagcgcccgctggtggtcatttaaccgctaatgactgaccgtggatggcataaaatgttagtcagacggcgactcattttagtgtagtgtggcatagcatgaacaatttagttggcaacctgtcaaatg

SEQ ID NO: 105626 - DNA, 114 bp, Heterodera glycines
gaaaacgaagagtctgtggacgacctcgaccagtttctacacgactgtgtggcgattgacgatagcgatgttaattttgatgagacagatgcaagagatgcggaagaccaaatg

SEQ ID NO: 105627 - DNA, 733 bp, Heterodera glycines
tagagtccggcgggatcgggactcccgcggggattttacgggagttccccgtccccccccggcccccttttttcggtgaacgggatttttaacgggagcgggatttttacgggattcccgttcgggactcccgtcccggaaaattttaactcccgatcccgctcccggaaattttttttaccggactctagtattgaggtacataattttttaaaattaaaaagattagtaaaaacatgtaaaaattgaaaaaaaattaatataaaagcggctgctcctccgccatttttcattattcattcgccattttcgtctcttcaatttttctccctgacaatgccttcaaaaatgacactttgtacattttgtgcatttcttcttggctttttcccttttccttctcattttttagtcggttcgttgtgccaatgtttgtcgggtgttgtgccattctttggctttattgggaccgcttcaaaaaatcaccaaaacaactaggcgatcaaaataagaaatttaaaaaaaatgggatttaatttttcagttgcatctccggcgaaaagagcaagttttaacgacttacatattacacaaaaatttgcaaataaataggacccttataatgggaatctgctaatttcaccaacattttcaaatgcttaaatttttctgttttgctaagctaattgaaatccgtcaaaaactgtgcttaataatttgccacaacaaaatg

SEQ ID NO: 105628 - DNA, 102 bp, Heterodera glycines
tagacgaaaaattaacttttgaaattgcgcttatctggagcttatgcttggcaacctttaaagcatatttggcctcttgttgctaagggaattgctgtaatg

SEQ ID NO: 105629 - DNA, 499 bp, Heterodera glycines
aagaaaattttaacgaattggattatgattcaaatttattttttttagcccgtaaattgtagaaatgtttagaaaaattgaatttttagaattaaaattgtcatttttatttgttaaaaatattgaaaaaataaaacgcaattctttgaacaataaaaaaaatttgctttatatttatcatgggattaattatcaataaatattaaattttaaacaaacttcatttttacacgaaaatatatattaaattaatcaaaaaaaatctttatttttgatgattttaagccgaatattgcagccttgtgaaattaatagatttttaacaaaagtttcaaaaaatttgtaagaaatacagtagtaattggggctgtacagtaatttaacggaatttcttatcctgtattaccattattggaagattaatataatcagaattttccgagaccaaaagcatttttatccctcccccctgtttaggccaattcttcctgacccaatg

SEQ ID NO: 105630 - DNA, 151 bp, Heterodera glycines
tgtgagtttgttttttgctgctatttataacgaaatttatgcgaccgaaaaaatagaaaataataagccgaaaattgagtatataaggcggtcttttcaacgttaaggacacatttcataacggacggacggctgctagcaacgcgcgatg

SEQ ID NO: 105631 - DNA, 61 bp, Heterodera glycines
gcaaagtgagggtgaagggcaaagacacgttgaaattgtgaaaggaaagatcacggcaatg

SEQ ID NO: 105632 - DNA, 945 bp, Heterodera glycines
ttttggagcagcaagtgaggcaaaagtgggaaaggatcagttggacgaaaattggttcacttggacctctcggagatcgaatctcaaaaaaagctaattaatcttccatttcgttttgttccgagtatttctctttctgtcccaatttctgtaaaccgttttcaggcatccattttcggcattgaccagaacattaggtcaacaattagcgaaggtgcactgacaacatcaaatggaaatggtttgaccacttttgaccaactgatggcacatcgtgagcatttctttcgaacactccgacggcaaaaacatcggagaatggccaagaaaatgtacgaaaaggcgcgggacagagcggaaaggggacgcgttttgttgagcaatgagcggggcattggtagggcgaaggaaaagccaatttaaaacaaaagaaacacattttggacaccaaagaacgttcctcaatcattctgatgccaattgatcagccaaaagtgctaaccgcagaaacttttgcgagcggacgaagtcgacgagtgaaaggcgaagcgcaagcgaacggtggccaaatgagggctaattagggagcaaatctaaattattaaataaaaaggtggggcccacacggagagaaagcccatcaacggaccatctgcggcaaaaaggccagcgaatttgcaaattgcgactgacaaacacgcggacgcaaatgcaaatgcatcgcaaaacaccgtagtctacgggccaatgtcagttgggcaaagggatacggtacatcgacctgtctcgagaagaactgttcgcggatcttatgttttcttgtgtttgctgttcagctttcccgccgactattggcaattgcccccagcgcttttagccgcgcggctgaggcgtttcagcaaggcggacattatgcgaagccttcggcaaaatgcccgacggatg

SEQ ID NO: 105633 - DNA, 695 bp, Heterodera glycines
  unsure (1)..(695): unsure at all n locations
agaaantcgaccccngctctatccaatggtatataatacataggcattttcccactcacagctcggaatgttcccttgttaacatgcactcacgcgaaaacatgcgaaaacatactggcccgaaaaaaatgatatacaccaccccaaaaatcgttgcaaagtcatgaaaatgcaaccccctaaaaaatgaaaaaaatgcggcaaaatttaattatatttaaaatacattaatcatatgacctaatcaagacaaagcccaggtcagaagagaaagtgtttattcaaaaaaaaaaatttttttttcctctctccaaagaagaaggacaaacaacacaaatatttatcgccggagggaaaggcacaacatcagcagggggataatgatgatgttttggtgaaatcaattgatttttgttcaataaaattataaaaatattatgtaaattgcacataaaattgtaaaaaagaaaaatatgcgcatacatttttccaaattgttgatgaggataaaattttcaaaatttttcttcaattacgttaaatttcagtgaaagccctctcaaaataaaccaaaatttaaattttgctatcattcaatgcccctaaatgttttctatttttctataaaatttatttcataaaattcgttactttgggaatatttgtgtcagtatttgaatgggacgcggaaaatg

SEQ ID NO: 105634 - DNA, 99 bp, Heterodera glycines
aattttattctattgctaggctcaatacttttgaaggttctaaatcatttcttattttaagctaaatcgcattaaagctattattctgtgccttcaatg

SEQ ID NO: 105635 - DNA, 209 bp, Heterodera glycines
agtgaactgttctttgtgaggacacggtgcgccaaatcggaactttgaaattgagtcgttgtcaagaacgcactcagtaccacgatgggacaattcgtccatttgttggccaaggaaaggcaacgttttcgtttggcaaccgatcagcgtttgggcatttctttctttccaaagacggatcaaagaatctgctcggattggacatgatg

SEQ ID NO: 105636 - DNA, 122 bp, Heterodera glycines
tgatgttacttgcatcgacttgacgttgagtgctgttgatcgtgaaaattgtttggagcaagggataggttaatgcaaaaacaatattcttttttggaactttttattcagaaaagccaatg

SEQ ID NO: 105637 - DNA, 72 bp, Heterodera glycines
attagccaatttgggtttttgattggtgtcaaggaatactctccgcaggtcgacgaattgttggcaaacatg

SEQ ID NO: 105638 - DNA, 79 bp, Heterodera glycines
ttgaagtgtaaattgcacctgccaaataatttattcaattataaaattaatatattaaagtaattaccaaaaccaaatg

SEQ ID NO: 105639 - DNA, 530 bp, Heterodera glycines
ttgtgttcaggagacgcacgccatttgccaacgaatttttgaagcaaatggcaaaagtgtggcaccgccggtggcatttggaaggacaaaaatattccttaaagtaaaacatttaattaaaaataatttattttaaaaaatgcaattttttgtttctgtcattttttgataattctaaattttattctccaaattttagtccgaagctcattttctgatggaaaatttgcgcaaagagcggctccgtcattgtgccgttttggcccaaaaaattcttcgcggatgggcaaaacttcaacagttcgcgcgcctccgatgggccgcggtcgtttttcagaagaattggcgcactttcacacagaaaaagaattaccaaaaggtgattcattcgccaaaatatttaaattcaattttaaatttaatttcattccattttattttattttcaatttccaatttaatttggaatttatttttccgatcattcgcggcttcgtccgcctccaatcgctcgtccgttcccaccaatg

SEQ ID NO: 105640 - DNA, 521 bp, Heterodera glycines
attttgaagattggacttttgagtttcaaaatatcgcttttatttaaagatttaatatttaattaaaacaaatacatttaattttaaaaaacatatttttacaaaatgatcaatcgaagtctttccctgattaactctttttgcctaattttttttctctctttttgaaaatattttaattgtttttcagtttaataattgatttaataatcaatttaggctaattttacgggtgttatccccctttttaattagcgaaaatgcaaatttacaagtccgaaatgcgtttttttcaaatacgtgcccagaaaagtttagaattcccatctgctggaaattcaaattatatacataagtttttatttttccattccacatggccgaaatgacttccccccccccccctcaaacaaatataattagtgtattttaattatcacttaatactcttaaaattaacaccatggttcctcagggtaaggcggtgctgcgctgagccgtgcgttgcctgggcaccgatg

SEQ ID NO: 105641 - DNA, 305 bp, Heterodera glycines
aacttaaattaataaaagtcaaaaaataaaaaatgtatttacggaaataaaatatataaatcgaatatgcttaaagagtaaattaattcactgccatcatttttttcatttagtcccatttgaacattcgcaaaagcttttccacaacagagagtcgaaaaatgacagtgaccaactgggcaccaaaattgaccaggaaattaattaattaaatgattaattatgacgaaatgttatttgtacatacgtgaattaaggtttcatgtaaaatataattaaaacaaaaacattttgaggtgtttatg

SEQ ID NO: 105642 - DNA, 728 bp, Heterodera glycines
ggtaaaagcttctaattcattatcaactatttaggtgtaaaacaatgtttcaatttttaattaaataaaaaataagcaatttgcgccgaaaattgacaaactaaagccattctcataatgctattttgaaaaaaacgaaaaaaaaacttttttatattgatcccaaatccgcaccgtccatataattttgcagaaatttgaattttatttaaaaaaatatatttaattttattgtcgaaacggcattgtcgaaaaggtattgtcgaaacggtcattggcgaaacggtcattgtcgaaatgtccgggagccattttttatttgcttgacaaaaataaataaaattattcatgttgcgaaacggacaaatgtgcatgtctaggaatatgtaaatcattgttggatttcaaatagatatcttttcgagtttcgtaactttttgattttaatttttaactttcgcgcttgatctctaactaaactgaaattatttaattccatatcattcgaaagctttaaattgaaaatattttcttaacaaatgctaagcaatttgatgcatataaagaagttcaaattcgtgctcagcgcatcaaataacccctaaaaatataggaaattccagtatatatttttcggggggattaaagtggaaaaatatccaaaaacttaccacaaacaattcaaaacatagttttaaggctcgtataagacaacattattaattatg

SEQ ID NO: 105643 - DNA, 527 bp, Heterodera glycines
atggacggtaaaaaacgaaaaaaatttccaaaaaaataatggcaaaaacaaaacgccaacacacgcaaaaacaaagtatatgcacttacactgttaaatgccttttttgtatttttttattttgatcagccataatacgcttcattcccaacaaaaatgaacaaatttggtatctaaaaaaagatttgaaaaggagaatctttttctaagtaaatgctaagcaatttgacatctcagaaaaaagttgtgagagtttcaaatgttcatcacgttataactcaagtcctaaactgctgatttcaaccaaaatgcgaaaactaatcattttctattgattctaagcgttcaaagtgattttgtagcctataaaccaaaattgttagaattagcgaatttgatgttttttcatgtgttagagacatgaaaatagtacgccaaaattagaggaaaagaaatgcaaaattttcatcatcccttaactttaaaataggatagaaattcattaaaactttatagaacattcgatg

SEQ ID NO: 105644 - DNA, 1003 bp, Heterodera glycines
tgctgaccgatccgatcagcgccaaagggggacgagaatgggaggggggaggggtgacaaaattgaactggtactgttggatgttatacagcgatttgctgcttgcttaacggcaccaccgacaagattttggtgaagggcttgtcggacccctttgagcagctccgaacgggcgggagttgctcgacaagattggttgtgaagggggcttgtccgaccctttgagctgctccgaacgggcgggagttgctcttcgctcttgactcgatgaaacgggttttgactcccgtttcctgcggcggatgctccggctggcgggagactgaggccgaaccgcgagactccggctgcgggaatctgaactgctcgaatacggaaatttaaaatttcgaatccgggttcgcggttcgaaatagagccaaaagaatgttacatttgtgattagcacctcgggctacccctaaaaataattttcacaaatttaaaaaaaaaaaatttttcgggaccaatgttctttaccattgcccatcaataatacaaagactttaaacctcttgctctggaattttactgtgtgaaatgtccttttgagagttactgtatgtccttgaatttttgtattttgaagtgacagtaagcacaaagttcgtatgcgttatgaccttttttactgtctgtcttgtgtaagctcatttaccaatttcgaaattcctttgtttgcttttttctcaaaaaatttaataccttggtaaaatgctttgcctttgtattgtcacaaactgtgcataaaaccattacacgcaataattttgttaaaacgatgcccccccccccctcttttgggataaaagttttgttctaaaaaatcgtgaaaacatgtttatgtggattgattcgcgggcggggggggggggggaggtttcttcggtaaaatgcattgtttttaaacattttccagcaagcattcttcctttcctgtccgttcttttccaattgacaaatg

SEQ ID NO: 105645 - DNA, 368 bp, Heterodera glycines
ttttgttattagaaggtgaatttgatatttgtcgaaatttcactacccttttataagaaaattcccatgggcagacggacaattatcggaactaattaaggcaatttgattggacagagaacattaatgagttttgtgagtcaaaggtgactctcactcagcagttgtgctcaaaattcatttttatgcatttattagaaatattagttgttggttggttgcaaattggttgcacataaatacttaaaaatcatcatttttatttatttggcaaaaaaagaagcaatttctttcttggcatattattaaaatgttttttttaatggcattggaaaggcaatgacataaaacaacgaaagaatggaatg

SEQ ID NO: 105646 - DNA, 94 bp, Heterodera glycines; identical to SEQ ID NO: 97954

SEQ ID NO: 105647 - DNA, 122 bp, Heterodera glycines
ggtgccattctctcccgccccgccccaaaatttacttgtaaatgtcaggcgaaatgaccaatttgtcgaggcggtcgacctcagttgccccgaattcgccgtggtgcgcgctcctttcgatg

SEQ ID NO: 105648 - DNA, 55 bp, Heterodera glycines
ttccactctctctctattaaattagcattaatagccagatttgaatttaaaaatg

SEQ ID NO: 105649 - DNA, 216 bp, Heterodera glycines
attgttagtccttttgttgaatttttagaaattctatccgtcatatcggcttttggaattttaatgagtaaatcagtaaccgtaaatgacattctatgcttcttttgttggatacacgggaagaaataatagttagtccttttgttgaatttttagaaattctatccgtcaaatcggcttttggaattttaatgagtaaatcagtaaccgtaaatg

SEQ ID NO: 105650 - DNA, 270 bp, Heterodera glycines
tctgattttttttttcaaattatacactttttaatagagatcggatacgttcggacatgaatacagattttacgggaccattgcccataacccgtactttctcgggctgatacggtttttacgggttaagggtttttagcccgtaaacattttgtgttttataattgcaatttaattgctgggaatgcacattttcatttgttatttcactttctaattaattaccagaaaacaatgctttttataattgtttttcaattccagaaaatg

SEQ ID NO: 105651 - DNA, 150 bp, Heterodera glycines
ttgttgttgatgaaattttgcaagactgatttgattgtgcgagaaaatcttggcttaaatagctttaaaaagtgggcgtggcctaattttccggggagtataaaagccccggcaatttgtcagctatgtctcatttgttctgctacaatg

SEQ ID NO: 105652 - DNA, 66 bp, Heterodera glycines
tttttaattacatttagatttaaaactctatatataacttttaattttgttaatttaaaaaaaatg

SEQ ID NO: 105653 - DNA, 559 bp, Heterodera glycines
aggaacggaacgggtatggatacgataatatttatttgagtaggcaaacttttaacaatgtataaataaatcatttgtcagcgtttattaaattggtaaacattttaaaccaatcttggcctgaagagcagcgcactgccacccatgaagcacaagacgacagggcacctaaacagctcggaaaattagttatgtaaaagcgcgaaacctcaagttctgaaaggcaaattacatttgctgccaggataaacggagctttgtgtaattgaagcaaccgccctggttaacagcaaatttaaaaaatatttatttggaaaaaaatgtgaggagagaaggattagaagaggcgtgacaaaaagaatgaaaaatttttaaaatgatttgccaaatcggtcgggtgtttgaatcgaataagctttccggttattgatggtaagccacgcccatttttcgactttaggtccctgcgtgcttgcacacttaagatttacaaaattgaaattccaactgaaattcggaatcattttacaatttactcaaaattttttttgataaaatg

SEQ ID NO: 105654 - DNA, 82 bp, Heterodera glycines
cctgaaatattgccaaaaatcaaatcagaatcatttgtagaaaaaaatgagcaaaaaataacgataccacaactaaataatg

SEQ ID NO: 105655 - DNA, 107 bp, Heterodera glycines
actcattaagaagcgcgtcaaacggcagcaacagcaatggcgttggagtccgcaacagcagcgctgggtgccaataaacattgcgaatgtgaacattgctcagaatg

SEQ ID NO: 105656 - DNA, 291 bp, Heterodera glycines
ggtaatacaagcttccttttttattgaatataaaaaaattcagaaaaaccaaggcattacaaaattttttggcaatgaagacccacaaaaaaaggcggatgaacaaattgcaaggctgatgataagaacgaattgctcttttttatttgttgaggcaccggaattacagaatttgttctctttagcctatccgaaactccaagtaataattttctcccatttttactagtgaaataattttttaagcttcgcagcaaagattattttcggagaaatgtaattcccaaaatg

SEQ ID NO: 105657 - DNA, 199 bp, Heterodera glycines
  unsure (1)..(199): unsure at all n locations
caactcctttaccttaattntggccaaaatcacaagtccataagaatggtggatgggtgaaaattacattttacccctggtaactccttttctgaaaggaaatgaaattcgttcacatggaaaaacggtggtaattggtgccaaagaaagtctggactctttctgttttccccttaaccagttttcagtgcgcttgatg

SEQ ID NO: 105658 - DNA, 338 bp, Heterodera glycines
taacgtcgtgctttcctcttcactggctcgaccatatgtgtgagctgaatcagtgaacgctttgacccaaattgagcaaaaattgtgcaaattttgcacgtacaaaaaattacagtcccttaaagttggatgggttggaagaaagggaatagaaaaagagtagagcattcgctatttcttaatccttctatctatgatcatctgctattattctttctgaccattggtcatacctttctccctcatctctcttcgtctctcttttccatttgatctatcttcacatcattttttgtattttttttaattggcaaagcaaacgtttctcagagagaatg

SEQ ID NO: 105659 - DNA, 256 bp, Heterodera glycines
tttttgctccccataattgtttgagtaccccaaacgtacacttgaaaaaatcgatttttttgttttcggggcagtccccccgaaccgatgcgcccagatttatggggagaccgaatccttcgggaatagcttccctatagcctgtactttaattctgcgttggatttttgctccccataaatgtttgagtaccccaaacggacacttgaaaaaatcgatttttttgtttcataaatatttttttcagaaagtcatg

SEQ ID NO: 105660 - DNA, 410 bp, Heterodera glycines
ccgaaattttcaaagaaacatagtattttgctgcgccggcggacccactgtccccaaagttttttggaagcgcgccacaaaaatgtagaaaagcaaaaaaaaaaaaagggtcatcgcccggggttacccccccccccaagccgaaatcctgggaccgtccctgagttcagggcctactggacaactaataataatagaacttaaattattccgactttcaactttaggattcctacaattaaaatgtttttagctggacttatgaaaatttttccgtataaaaatgatccccgcttgacttcttttaatcccttaaattttgagcaaaatccttttttttgtcagaaactgacaacagacactacgcccacgtggattgtccgggccatgcggactacatcaagaacatg

SEQ ID NO: 105661 - DNA, 114 bp, Heterodera glycines
aaaaatattttaaattaaaaaatgaatttatgcaaaatgagaaacattcacgaaaagaatggaaagatttagagcaaacattaagcaaatatttggatttattatagaacaatg

SEQ ID NO: 105662 - DNA, 136 bp, Heterodera glycines
gctttaacaaggaagtttggaaaaaaaacccttgagcgtaaaactaaaaatgtgcatgtagttgaatgtttgttgtttttctatttaaaaataatttttatttgcacttttaatagcacctcttgcgtgcacgatg

SEQ ID NO: 105663 - DNA, 1003 bp, Heterodera glycines
ttatttttaattgcgagttttcggccattgattgaaatggaaatgattttacctaaagtctcccgaatttctgataaataatcccgatcagtcgtaaagaaacgcagaaagtgatcagtgttccgatcgactcatcccctcctctgatcggcttacataatccaatcccgcccggaggtcccgacaaatctgattaattactctcaaatggctgtggaaatcactttcattaacttcagtttgaagatcatttagtcaattattaatttttaatttttaaccctcacagcccccaatttttttttcaaaaattccaacaatttttcgtctttttgtgccccccccccctcgccccccgtgtgttcgaccttaatcagcgcaagcgcatccgaagtgtcaaacaggcgccgattatttgcgcatccccaatttttggcgcggcgcctcaaggctgaggtgaagtccccccggggggggggggaataactaatgttttttttccaaattaaaaaccacacacaaatcgaatgttttttttttgttgatcagagaaatttttttttattacattttactattttttcaccaaaaactgacaacctaaaaatgtgcaagaaattttcaccgattttttaaaaatattttaaactaaccctttctgaggtctttggaaaaatatggaatttcaaaaaagcctcaaaaaacttagaaaggttagcgcatcaaatttcggtgtttcttcagggacaaaaaaaaaatttattatgactcaaaaatttatttgagaatttcaaaagtaaatttaaagcctcataatttttgaatgaaattctgtgcgaaatacttttgtttctgatcagttttgacactttcttaagaccatttgtgttctgatcaagaagcatttatcttgataatttttgacaaaaaatatatatttcaatattaaaatttacttttttagcggtgcaaaaataattaaaattaaattattttttaaatg

SEQ ID NO: 105664 - DNA, 1003 bp, Heterodera glycines
tgaagcaataatcagataaagatgatgtaaaattttgatcagcggaaaaatgcatatagcaaattatttctgattttctgtcctctaaaatttgatatcaataaagtgatcgtaaacatatgagcaccaaaaaaaagtgattgttgcaaataaaaaagtaaatatatttcgaacaataattatgcacacgattttgcctatttttactcagtggcttctgaaaccaatgaaaaaacaaacctttttgttggctgttgttaatctacttttcgaggtattagtgcccgttttctaggtttttcttttcagagtcgaaaacaaaaaattatctccataattaattaatttcttttcttcataagaattttaatttgaagaattatttgccccaatagtgacttgacttaattttattacttttgcaataaattttgtcattttacactgataaatttgagacttttttagtgcctgttttcaactgcttctttttgggttttaggacctactaactacatacttattttgcatgtttttagagcctaaaaatcgttttcctggaaataatatattatttcgtttaacgaatgccaccaatggaaagccaattaaaattttattactttcgcggtattagaaaatgcaatgcttataatcaatataagttaacaatttatcttaatttaaatgctatttcatttttatttcaagatttgttctaatattttttgaatgttttgcctttatataatatttattggttatttcatatattttggcgtatttctagttaatgtgcccaatcattggccattctcggtccatggtccataactttttgccatttagctaaaacataagagtaaatttaattgaaaatttagggcgtggcctattagccctgcgcaaaactgtgcgtatttatttccacatttctaccgatttattcaattttatttttttgcattatttaagctatcatttattaaaaatataaaaaatg

SEQ ID NO: 105665 - DNA, 224 bp, Heterodera glycines
gctgtagtctttgacgtttttttaaataggccaaagactcattctctaaaattaaaaagaaaaagacctaaattatcatttctataaagtagaattctccgaatggaaattttaaccagaaaattgacaaacaaacatttataaacattatgccaaagagattttcgtaggaaaaagaacaaattttgtttatatcataacccggtaaaacccggtcaaaaatg

SEQ ID NO: 105666 - DNA, 257 bp, Heterodera glycines
aattgcggaagcgataaatgaattccggaggcatttaatcaattcgcctacagattttacattcacatgaaaataataattattttaatttgggattttgaaaaataaaagatgtcataataattagttatagattttcattaagctgacgaaagctttgccttataaaaaagcattgaaattttaattaggcgccataaatataattctaatgaattaactgctttctccaaataattacacctattattacaatg

SEQ ID NO: 105667 - DNA, 382 bp, Heterodera glycines
aaagttctgtcttgaaaatttgaattaaagacattttgccaaacataattattaaatttttcaaatttcggccgtttcgctggtaaaacccaagcccgttttagccggtcaaattgactgggcccgggaccgggtttagccatttgaccgggaccgggccgctcgttcaaaaaagcccgttttaccgggcgtccagggctcgtttttttccaaaaaaaacggcttcgtgaccgggccgcccggtaaaagcctgccgggcccgtccgggctcgctctaatatttttacatatgtacgcctaaagtgcaatagagctctgttttctaaattttttaactttttgtatttaaagtttaaagctcaaactttccttattcgtgatg

SEQ ID NO: 105668 - DNA, 134 bp, Heterodera glycines
cgttggcggcgctgcccgatgacccaagcgatccggtatgatttgaataaagggattttttgaagaaatttttcaagtttccacgccatccaccggcggacagtgaacccgaggatgacaagcctattgggatg

SEQ ID NO: 105669 - DNA, 131 bp, Heterodera glycines
tttcccctttagacacttttatttattttttaaaaaatttaattgactcacgaggagtctcagaatgattttaattaaatattaatcaatttttattttttatacataaaatttagaagcacaaaaagatg

SEQ ID NO: 105670 - DNA, 876 bp, Heterodera glycines
ttacaattatcaaaaaggaaagttcaaaagaatatttctggtctgtctgtatttttgaaaaggaatttgtgattttgaagtgatagcactgatttttatctaccagaagtagtcatatttcgttcaaattttttaactattaacattatgccagattaaaaaagtgacaaatttaatttaaaaatacccattaaaaaatttttcaatttgttctttccctgggaattcatatctgcattttttgctgttggggcactccgaaaaaaaccacagggtgagggccctttttttcgtgaaaacttgttttatgggttttcgggagtagctaatcacgaatcttataccaattttgacaaatctcttacccgaactcgagtgaaatagaaaactaagtttttcggagtttgcttttttgcttgaatttaggttagacattcaaaattggatataatggatgtcagatccctggttagcgccccccgagaacccttcagaatttggggtaaccaaatatacaaagtattatatctaccgaatttgcaaaaattgaaagaattttattatgtagtgaaaatgtgtaacaaaagttggctgccctgtcagttttggtgtgaaatttttgtttaaaagacaaaagatattgatcatttatatcctaagcagtaaagcagaatgtttccttatactttcaattctgtttttgtttattgcctctatggctctgttttaaaacgcttaatttttaaattaaaaggtcgcagaaaaaatcagtaaaaacttataaatccgggccctaattaggtataatttatcccccaacaactccgcgttatattttcaattttctgttacaaaagtgggtgccaataaataatg

SEQ ID NO: 105671 - DNA, 416 bp, Heterodera glycines
gacccgtttcgagtagaaaaccactacccttttgcttttattacctagaaaataaactaaaaatgcattactccacgtccgcatctacacagactgatcacggcccgtcaaccgttccaaaaactcactgctgaacatgcccttgggggcaggaaaaaagaaaaattcagccctggtcaggctccagcccaaccctgggttttgtccatgaaaatccaggtccagatccaggcttttttatcaaaatatcattattttgcatccagcattcacacccacactaaaaaagcgcaattaattcattttaattcaagggtaatatatagtccaacccttagccgattacccatttaatgctccttctatttttagaagtacactgccgcgctcgtcaggcctgttagctgggcagaatg

SEQ ID NO: 105672 - DNA, 840 bp, Heterodera glycines
  unsure (1)..(840): unsure at all n locations
aagtacccntaaaatanctcanttatttatntaatgtttattgtaggccaattntagaatttgcatcccccgtttttaaatccgcatttgaagaaaaatattagaaaaatagaaaatgttcagaaaacttttttaagaattgtttttagacgctcaaatttttatgttgacatacctaactacgacgaattgctttcaatttataacatggagtctctccaaaaaaggagattaaaaattgatctaggacttttccatgaaataactaatggatttgtccaaattaaatataataaacctcaacccaatttttctagtagactgggtaatttaattaagccaactttttgctcaactaatgttagataccattcattttttgttcgtgcttctcgcttctataggttattacctaaagaagttaggttacaaaattcaactgttttttctaaacttcttgactcaattgatttggatcgttttacacatttatgaaccactctcatatgtgaccattttgctttatcttattgttgtttttattttggcggcgtcacgctttgcgtataaaattattatgatgaattaggagggatcaacttgccatttttaaggggaccagagcgtttgggccccggggtcgtttgggccccaacccaaaaatagaaaaatgtgcttttttaaaaattaagattctaaaaactaagcctgagggatccctcgccacttggcataagttaggtttaattaacactcgctcattttttacaattttacttattccaaatcctattattttttaatagttaaccaatttgatgtacattcttttcagaaatg

SEQ ID NO: 105673 - DNA, 73 bp, Heterodera glycines
ggtaagttttcgtctgccattattttccattaatcggaaaataataattgatagctgatttcagctgggcatg

SEQ ID NO: 105674 - DNA, 267 bp, Heterodera glycines
tcgctaaattaagaaaaaaaaggtagaaaagagaggaaaaacaaataagaatgacgctggaatgatatcatccataatgtttacgttctcgagcaatgacctacttttagttggcttggtccatcactcaagaacaacaaacatgagggaccattttataatatggagaaaatatctgtagagaataaagacggggtaatggccatgggatgggggaaggtatataaaagtcgaaatttatggtcaaactcattcatctaaaaaatg

SEQ ID NO: 105675 - DNA, 384 bp, Heterodera glycines
ggtaaggaaatggaaaaaagaacggagtttttgtttaccagcagaatttgtgagagaatcgtacaaaataaaacgggaggacaatcaaaatttggtgaccgtttttttcccggaagaggaaaattacgaagggatttaaccaaaatgtaacaacattaaaaagtcaatttagctcaaagtcagtgaattgaaagaaaaagttgaacacttcggaattgagaaaattcaaatggaggcgaaattaacggaaaaggacaaaatgttggctgagatgaacaaaacacttgcagatttacagagtgtgctcagagtacagttttacttgtgcaaaaatgcaataaaataagaagtaaatttaaggaattggcggaagaccaaaaaatg

SEQ ID NO: 105676 - DNA, 464 bp, Heterodera glycines
ttttccgatcacgatctataaaattaaaaattacattcccagaacaattacaaattatacatggagaatattttttttttacaaaatgataaaaattctataaaatatggcaaaatgcaattataaaatcaattattgatgaattaattttatttcattttttttttttgttattcattcatgtaataatttagagctagtaggatttttaggtgctacaaatactgaaataggtgctaaaaactctcaaaatggcaaaatagttgcgaaaaataaattttggatactgattttgagaaaatttttcatttcttaggggtgtattttttgttttattgcaattttgctaaggaatttatggaaaactgtcaaaatagttgctaactctattagtaatttgaaacgagcagaaatttcaaaaattatattttttttttttttgtaaatttttgacgcaaaaaatg

SEQ ID NO: 105677 - DNA, 65 bp, Heterodera glycines
ggtgtgccaattgaaaaaagaaattattaattttataaatatttatttttaagtgcttgcaaatg

SEQ ID NO: 105678 - DNA, 746 bp, Heterodera glycines
tgtttttttgggctgttgttaagctatttttcgagttattagtgcctattttctaggcttttatttttagcgcctaaaaagcctaaaaaaatttgaaagagcctatttttggctattttggcgttttgcccaaaattattaacaaaaatgcaataaaaacgaaaaatacaccccctaagaatcgacccgaaaattttcaaaaatacacccatacagaaatgaaaaacttttcaaaaattcatctccaaaatttattttttatgttcttgacaagaatttgtgctttaaaaattatttatctcaatactgatttggcctaatttttttttacttttttgaataaaattttgtcattttacaccccctaaatttgaggatttttggtgcctattttggggttttttagagcctaaagcctacctattttggcagtttttagagcctaaaaatcccatccctacaaatcactacaataggataatcgtaatttttttttttattaatatttgcaattaaaaaagcatataacatttttaggtttattttttcaaatgaaataaataattatattatttgttgaatagaaacttgaatgagatttaatttttgttttattgaaataaataatttattatttattgaatcggaaatttgacagtaaatttaaaaaaaattattttaattttaaataattttttttaccaataaaatgccgtaaccattcgccgatgttcagcctgaacatg

SEQ ID NO: 105679 - DNA, 310 bp, Heterodera glycines
aaaagcggggacggcacggatttctatcattatttattttttaaaaaaatttaaatgcaacttttattttttcttatttaataagaaaaagcggtagaatttaaaagttgcaaatgatttttatgtgcaagcaatttattggagctgataaatgctgttgaaaaggtgcaaataataattattctattaaataatttaatttcctttaatctttcgttgtgttgtaaaatttatttattcaccttaaataactttttgagaaaaatatatttgttataacttttttaaaatcacaaaaaataaaattatg

SEQ ID NO: 105680 - DNA, 879 bp, Heterodera glycines
gccaaatatttcatcaaaattttgtcgaattttgccggattcgattaaaagaaaaaaataagaaaaattaaacataaaaaatgcatttttacgatttataaattttttttaaataataattttattagtaaatttttttaaattttttttttttgaattttttttttacatgaaatatttttgaataaatgtaattttttttttatataataatcaattatttttttttgcacttaagtaattattttttaattatttttgcatctttacatatcctgaaaaatcaggacattttaatttttttgtgctctgccctatacggctcaaatccaacaatactcgaaaaataatttttctatttttaaaagatttttctttttacctattttatgttaaaaataatattttttaaatgcatgatcactttcgaacaataatgactaattaaacttaaaaaatgaaaaattgaatgaattaatttcctaattttaaaaatcaaaattcaaattcccatgtgtttgctatgtgagtaagtaacccattaaaagttttctctcgtcagctgtttgtcattttttgttcgttgatttgttcttttgttccggggtcaaattcacacttttaaatcatcgattaaccaaagattagctgcaattttcactaaaattcatttttttaaataaataatattaaactaatattataattataaaactaaaaagtgccaaaaatagcaagaattatatatgagtttaaaaatgtaaataatattatatttatttttataaatttttcaccaaaatattaaaataaaaatattttgaatcatttaattaaatgataatttaaaaagaattaagaattattacaaaaagtatg

SEQ ID NO: 105681 - DNA, 217 bp, Heterodera glycines
agaggaagaagaaattgagcagatgaatgatgccgagggatactcagaaaatgaaaaagtaaaaaattaaataaattaaaaatgcaaaaaaaaataataattttctttcccagcagaatttctcatctccgaagaagcaaatggtcgaagtgaaaacgccctttttcgaaggcgggcgcctcaaaacaatcatttcttggctttcctacgcaaaatg

SEQ ID NO: 105682 - DNA, 257 bp, Heterodera glycines
tttttatatacttaagtaaaaaatttaataaaattatacttctatagaaacacctagagctattgaattataccaagaattattaatttggttgaaaatggaccaagttatgaatttatatgtcttacatttttttgttttcctaccacatggcggtttttaggaaacgacccagcacgtcttagaagcatcaaatgctaaagacacttttacgtgaaaatgtcaaaccaatctaaaaatactatttacataaaatg

SEQ ID NO: 105683 - DNA, 85 bp, Heterodera glycines
tttcagtaaattaaacgaaatttaaatggccaaataaataattacaaaaatgaagaccccacggctttcctagaatttagagatg

SEQ ID NO: 105684 - DNA, 591 bp, Heterodera glycines
ttttatttgaatttgctttaatacacccaaaattgcgttctcacaggaaatctgttaagaaatctggccaagattttcaaacttttcccgacggtgcctacccgcgtagtcggaccctaccaataaaattttttttgaaaataagatggcaaaaaattcatgatggaaacaccgttgaaagggattatggacaaagaaaaataaaatatttaattattgtttacttgtttttttcataaaatgaatagttttttttcaaaatgttgattgattttaaaaaatttcatctggaatcccctgatttttttaatttaaagcaatttttaattgccagattttgcaaataatttttttttgttatttaaaaattaattatgttttacttccgacttttgcaaacgatagaaaattttatgacgtgaataaaatcatacgcctctgtctcttttatatgaaaaacaaaataagaaaataaaatcaatgtataaatatatttgttataatattaaaaacatatattttcccccatttttacattttataataatataataataatataacaataataattttcaatttagaagtatg

SEQ ID NO: 105685 - DNA, 783 bp, Heterodera glycines
  unsure (1)..(783): unsure at all n locations
tcggaagtataatttttaattattttgaattttnntanataaatttttgnagtgtttaaaaagatttaaatttcatccaccatcacccgccttttttttgtttttctttgccagaggcaccgtttaatctttggttctctggtgcttagctcttgtcctaataggacaaataattagcatggcttctcagaaagaatgttcattaaactgctcataattttcaaagtctcatgatttgtttcacttttttctttctttctcatttcctttttcatttacttaaaaatttactgcttttgtcacacttaccttttttctctcccatccccattctttcccactctttttccccctatctctctctctctctctgttgttgctttctctgtcagtctttctgcccaattgatccaatttctgtctttgatttgagccaatcttctcgatctcttcttctttctcactcctcgcaatctcgcgaagttggaggcacagagaaaaagaaagtgggggggggggcgagggatggccgggcaccacaacacagcctaacccccggctgaatctgctgcaatcggtcggccaatggtatcgaaggagtgtcccttcccctcccctttttgttgttgtttttccatatccctcccctttcccgcgtcattttaataacagtgaaaaaacgactttacattgggaaaggagtgtaataaataattaattactaattacgtcttcactcccatttttaaaatcatttttgatcattctttgctattttagatg

SEQ ID NO: 105686 - DNA, 287 bp, Heterodera glycines
ttgactcaattgctgctgaccgggccggatcgggatgaattccttcggcagaaacgatgtgcccagaaacttaatttggggacaaagaaatttgcatttatttaaatgaacacggagcccccagtcttggaggcgaccaaagaaaagttttaggagagcatcgtgctcctccaaagtgggcgtgcccacgataaaatcgtccaaatacccgaacactccgtgaaggccagcggtgagttcgtccatcaatttttgaaaaatgcttggcgcacttttgactccgaatg

SEQ ID NO: 105687 - DNA, 618 bp, Heterodera glycines
ttttcatacggtacagcactttaggaaatgacatccaccattcttaccaaagtttggtacttttccgttttggggcctaaatttcaattttaaaaaaaaaatcaaatctagaccccaaaacggaaagtacccaaaaattttttatcatcaatcggcagcaactgaaaaaaagagttttttttttgattcttcattgtttaaagatttttttattattattttggtttttctattttttatttttggtctaataaatattatttttttaatgttaagtgggttctgttttgctatcaaaattacaaaaattataccaaattcaaaaaaagagataaagcaaggacccggaaaatttttttttaaatttttacttgcggatcagtgaattttatgctgctccatggtggccaattttttatgaaacaagcatgcaaagggatgagtaaagacgaaatggaagagaaaaaggaagaaagggaaggaaacagagaatgcggaagaaaaaaatggacgaagaaaaaaatatggaagatcggggagaagaagaagtaatagtataagagaacaaggaagaacgggaagatgaagaaccggaagaagaaatagaagagtaaaatg

SEQ ID NO: 105688 - DNA, 69 bp, Heterodera glycines
atttcaccaataattaaaatcattgttgtttttgtcttacgttggtttcaggtggtcaaattcggaatg

SEQ ID NO: 105689 - DNA, 104 bp, Heterodera glycines
  unsure (1)..(104): unsure at all n locations
aaaaaatttttgcttaagacaatcttaaaaacaagcacatttacanagttataatttgtgttttttnttattttttttgtntaaattaaaggttttttacaatg

SEQ ID NO: 105690 - DNA, 1003 bp, Heterodera glycines
gtcagggctcagattacaaaatgccaaaccttcaaaatttagcgcttttcaatttatttttattttatttttgtacatttatttccagcggaagttcgctgcacctttttccccttgcagcaatccttcaaaaaagaacattaaaaaatagtaccccaagataagggggcttgagacaacgcttttacccgacaatcggaatttccccgggacgcgaaaatcccgcaaaatttcatgaaatttggcacactttcaattccggtcgctgtttaacgacaaaaaaacactagacggactttccctaattccgaatttcacttatcccccgaaaatgccgtgccctctccccgtccaatccgccgcccaatgcgttaccgtatggtccgagtcttgtgctgcacatgtgaaaagctccaaccctgagaaaaaaacttttaacttttacagattggctttttcattaaaatgccaaaatttgagtgccaaatttaaattttaaatgattgcccacttcaccgtaccgttctcggacggacatttgtccgtgttcagaaacaaagctgtaagtatttttttgctcaacacatcaaaattctgcaacagtaaaacaaccaattaattgctaattgccaaaaattaatgtgtttacgcatcgactctcgcacgattttggcactctcttggcacggcaacagctcaaaaagctttcgttcggattcttaacggagacgaacatttatgaattgataaatggacacaattaattatttattctgttggttgggccgctacgttttgatgtttagtcattttcacattgttttattttatttcgggtaaaaatgtcctgaattatgcacaagaataattaaaacctgaggagtacaaaaataaattaaggatatacaatgtaaacgggcattaatccaaaaatatattttttggtctaagtaaaaagaatttaagcgattaaaagtgctctcatatccttccttttgaaatg

SEQ ID NO: 105691 - DNA, 955 bp, Heterodera glycines
ttttctggagaattcttccatttcatcctcttcatattcggcacccttcgctttgatcagacaaagcgcttcaaacgggcattgtcaaaggagaacacgttatcgtccaatggaattttcacctggagaaaaagcggagggggccgtgaataacagaattaaaaaaaaatctttgatcatttttaaaaaattctaaaatttgtccaaaaaaatcgctgaaaattattttaatttttcaaaacataaaaatctgttataaaagacctagacatttttttctgagttttcttttatatctaagaaaaattatttaattttcaaaagaatattctaattgtttaaatgctgtaaacagttggactctactgcactttaagagtccaatcaattgacaatacctggtttttatacaataactttgttcatgtttgaaccagggacggtcaccagattgggtgtttgtggggggaggcctaaagactcctaggcagcaatgtcttttaaaaaattggggcttgtcaaaacccaactagagctcgaaagttgctagtcagtctaccaactactgaagagatctgagatttcctaataatgttctccatcattttgggacttgttttgctgatattgttttcctactcttcattgcttccagttgtatggtggttaggatttttttctagaaaacttgatcagcttatagaaagagcattaaattcggttaaattggatggaaaataattttctgaggtttttattttgttggagtcgaaaaagttgagccgcaaatgtcgtttttcgctgtggccgcaaatgtccgggccgcactgcgcaacgcgacgttgtagctcgaaattggcctcgcaaagtgcaccgttcccagcagcatggattcgtcgagccggttgtcatcaacgagatctcaacccgaagcgttgtcatccaattcgtcatg

SEQ ID NO: 105692 - DNA, 278 bp, Heterodera glycines
tgcgattgagcagaagcgaaattagccgatcgctttagtcaaaaattccagaagaaaccattcgagcatttcttctcacaaatttatataagccaaggtttaattttttgttttttcattggcatttccgttgatttgtccaagtttccattaatcctaaaaataattttttaaattgcagaggcggtcccttcaaatggcgttgcaatttggacgcattgtctgacaatttggaacatattttcgaccctttgatttcccgcgagagagttaccatg

SEQ ID NO: 105693 - DNA, 238 bp, Heterodera glycines
gtgaaacacttttcaaaataggtcactttccacagagcgccgaaaattcttttttttttgttttttttttactaaaaatattaattttgaatcatccaatgccattgcgttattttatttaggctcagtgtttgcaaatgccaaagaattgtttgccctcacattggaccaaattaatggcattggcggcaccaaagaattgttggacaaaatttgtgaaaatattaataacaatatg

SEQ ID NO: 105694 - DNA, 810 bp, Heterodera glycines
  unsure (1)..(810): unsure at all n locations
agcaaaaaaaatacgtataaagcntaataaactgactttattatttttgtttttaaaaattactgattcnagtaattgaaaaatcacagtaataaagggataaatttgcgtaattaaaaacacatatgcctagccctggtctcgacagccgattatctcacgcccatctccccaccctctctcaataattcgaacaacattgtgatattccgattgctggtggttcctcttgccacattttcaaatgtatttttttattaatgcatgcccctcaatcccaccccactttaagctataaaatttcacttttgcccttttatcaatttgagtgttcacagccgagtttccgagaaaggccatcacacttatctcttcagtaaattgctgtgcgtcacgtcgcctatcaacaggtcaccgcctcaaattactgacctttcccgactcctgcttcatatttaatataatttaaaacctaaacaattttcctggtgatgtccagccttcattaatttaaaaaaattgagtcctgactcgcaaaaaagttcttttaattacgctgtaaagtgattcgaaaaggaaagcaaaaaaatcagcaaaattttaacatttaatataattttttttttaaaaataaagccttaatgttatatgtgaaaactgatccataaaattgcctaaagttaaaatttctatattttattaatatggaattaaaatacatgctatttactaatgaatcccaaattaaatagaagattatgaaagtccgcccttgtcccgttcatttcaaaagtagaatattttacaatg

SEQ ID NO: 105695 - DNA, 91 bp, Heterodera glycines; identical to SEQ ID NO: 100405

SEQ ID NO: 105696 - DNA, 1003 bp, Heterodera glycines
tccctgcagcttctgagaatcaccttattcagcaaattatcttgtgattatttttgaattttggttgtcgtagaaaaatgacggaaatcatttgaaaatggcaaaattaaatttgcattagcataaccttttgcatcattcatagtcaatttttggggaataaaatcggatatttaaagcggagaatttatttttttaccattcacttttaaaaattgtttattaattttatatttattagtataaaattttctccatttgatttgagctttcgagaactttatacttcctcttttagcaatttcagtttttttaaaaacgaaaaaaacacacacagcgagaatcgacctaaaaattttccaaaaatacaccaacttaaaaatggaaatttttaatttgtatccctcgtcatttaatttttcttcaataaagttttattttttaaaattcttattcgtttataagaataaaatcgttaataagaattttaattaatatcattgggcttattttatctattttataatatttagtaactgttttgccactttcttacgttttttacctaaaaagcatagcttaataataagacaaataaatctgccaataataataataataataaataataataaaatttctaataaaattgattaatttcaacaattatttccgtaaacaaaaatttgtacatttttattaatatatccgtctgtatcttttagcataataataattattattcatttttctaaaataaaatggcattattcttcgcttcttcaattttatttctcggatttttttggctttttgccaacatttcgcttttttgttctgcgccaaatccaataacaaatttggctataaaccaaggtttggcatagcggtttcattgctaaaattaaaaagtcatttttaaaaaggtccaacattttttggaaaatcgccaaaattttcggttcaaatgaaatcggaagaacaaaaaagccattccaatatg

SEQ ID NO: 105697 - DNA, 91 bp, Heterodera glycines
ggtcggttggccgggattagagaactgcaaccactcacatgaataattaattgatcatttattatcgcttcgtttatttcagtcacggatg

SEQ ID NO: 105698 - DNA, 1003 bp, Heterodera glycines
ttcaattatttgtgtctaatattcgataaataaacattcaattatttgtgtctaatattcgataaataaacgttcaattatttgtgtctaatattcgataagtaaacattcaattatttgtgtctaatattcgataagtaacattcaattatttgtgtctaatattcgataagtaaacgttcaattatttgtgtctaatattcgataaataaacattcaattatttgtgtctaatattcgataagtaaaaattgtttttcttaaggacattttcaatttttgatttttcattttaatttcggatcgtggtaaagtggtacttctgctattaatattaaaatgtatatttttattaaatacaacatatttcttaaaataaagggtcgtctaagaagtggggagatctcctaaaaaacttttctgttgatttttttatttggaatacataaaatacaacaaaatgctgaaaaaaaaaattaattttcacttgttttcggctaatttagagtcagttttcgtgggtttaatcggtttataatgacgtcggattttgtgttataaaaacacaacttgattttttctacttaaatggtttaacttaatttcttttctcttttttgtaaaaggctttctaagaatttttggaagcaaaatcaatttttacctatgtgcctccatgcctctgtaaccggggggggggggggggcaaggggggcaactgccgcctccccctgagatgaaaatcgatatttttttaaatttacctaattttattaacaatttgagccaaaattttctaagttttccccagcggcgcctaacggcaccgccgagtctcaatttccttatagccaaaatttagtctcaaagtggccaaaatttggctaaatttcctgttaaaaaaacactggcaaaaattttgtgccggaaaagcaaaaaaataaataaattgttccattatcgcctaatcctttcccttcctttccttaagtcgaaaaatatg

SEQ ID NO: 105699 - DNA, 407 bp, Heterodera glycines
atcataattgccggggaacaatccaagggtggggggggggggaaccggaaaaaaattcggggttgagaacccgaagaaaaaaatttttttttctggcccttaaaatttgtgttgagtgcacaactgtaagccccccccccccccacccgtcttgtgtttccgctccgaaaaattaaaaaaaaaaattttcaatgccacactaacaataagtttttctaattttttggtaaaataaaaatgtaacaaatcggattttatgtgccaattttttgagggattgtaactctgtgccgttgtttttgttttttgtacaccttcactttctagtgtttgtccacaaattgtattgtttttcccctccgtctgcacaggtggacaaacagaagcgccagaccaagttggacatg

SEQ ID NO: 105700 - DNA, 780 bp, Heterodera glycines
ccaattcattatcatataatatataaagccaaggagcatttcatatttttgttttgaatactcactgatttgcatttgctgaccatttctcataaatgcaattagcattttatcgtctccctaattaaaatgattagacaaaattaattaccctgattgattatctaaccgatggatttgcagcagggatgggccaaattgaaaaataaaaagcgaaatgcgaaaagcgaaatttgcgaaactgaaaaatgcgaaatgaaaaaaaagcgaaatgcgaaaagccaaaatatgcgaaaatgcgaaaagcgaaatgcgaaaagcgaaattttttctacaaatttttaatagttaaaatcataaagcaaaaatcattttttaaaattttattccaaatttaaaaatcaataaaacgctttattgaggcgcgctttttccaaaaaaactttttgggaagagggggcaggcggcgccgggaaaatttttgaaaatttgattaaaatttgttgacagattttcaccaaaaaatcatcaaattttgtgatttttgtatcatttttctaatgagaaataagagttttggcgcgccgctgagaacagtttttcagcaaattaccaaaattttgatcatttataaacagtttttcactgaaaattagccaatttataggtaaaattttgaaaaattttatgggaatttaatccaattcttaggggtgtaaaagtcgcatttcgcgccaaaaagcgaaatgcgaaaagcgaaatgcgaaacgccaaaaaatg

SEQ ID NO: 105701 - DNA, 351 bp, Heterodera glycines
gggtccactgcgtttcggcgccagcatgtttttggctataacttttttctatctaatccaaatccaacattgttgatatcattcgaaagcttaacatgtttagaagctttcttttcgtttttaataaagctaatagagcatgttaagagctttcgaatgataccaagattgttggatttggatgccaaagaaaaaaagcttaagtggaaaaacgagctggcgccgaaacgcgtgggtcccatttattcatgtggttggaaaagagaaaaactttaaagtatgtttctaatttaatttataaataaacgggggaggattttgttaaaaggtcggtcatttaaactttagatg

SEQ ID NO: 105702 - DNA, 76 bp, Heterodera glycines
ggtgtgaatattcaaatgatattacattgtcagtgtctgtattcgttcgtttcagtttctggttggctctgtgatg

SEQ ID NO: 105703 - DNA, 697 bp, Heterodera glycines
tataattattattattgcatttaacatttttgttttgaaaaaagcggtgatttgtcaatttaattcgtttatttcaatatttgtcttattttttggattaatggacgaaagaatcaaattgcaattttcatcagagacgacggagtcgagaatgggtgaacaataattatttttatttattttttgaagatttctcgacgattttttgtccgggaagagtggtgggatcaacaacagtaaaaaaatgaattaattgcttgattgatgcgattatgagatcaattgtcgggcgttgttatgtatttaaatgttgtatttgatctttgttcattcacaaattaattaattaattaattagggctttttaccgatattttcatacatgaaaaatagagggtgggtttcagcgttttttttttgaaatccctccttagggtgcccaaatttctgctggtggggttacttgtaggttttgtcaccccctctcccctgaaaaaaaatttttttaaattttttctagcctcattttttgcgttaataacgcgaatttaacatttattttttaaccataaagtttgtcagtgatttacgtgaaaacgtgaaaaaaatttgaaaatgaaaaaaaattcaaaatttaaaaaagattattctataattattaaaacgcgcaaacagtgctaattacaacaaaaaaatg

SEQ ID NO: 105704 - DNA, 206 bp, Heterodera glycines
agtcagtcacttgggttcaagcgttcttcctcccgtaaaattaatttcgaaattccttttaatgggaaattttttaaaacgaaattccatgcgctttacttttgggtctaccgtcagttccgtattcttttcctcaaccttatttttaagccatttcagcaattcattcttgctttgtttagagccgtgatcagttcattgaaatg

SEQ ID NO: 105705 - DNA, 205 bp, Heterodera glycines
ttggttcaaatcctccagcggttattcctttattgtgcacggactaaggatgaacccacaaatgtttctgatcattttgatgatcaaaaatacgagctttttaactctgaagtccgttgcaattcattcccttttttaatttttttttaaataaatttttaattttgtttttttccattaaagttttctaccggtggacaaaatg

SEQ ID NO: 105706 - DNA, 597 bp, Heterodera glycines
ttccctccccccccccccccaaaaaaacactatatcgggggctattgaaatcctttaaaaagaactatttaaaaactatcataggaataaaaaatggaaaaagtaattaaacggataaaatgttattattaaatgaacacatcggatcggaaaagaataaatgccattccatttggatatcaatttgaaaccggagtcccacagtagcggcaatttttcacaaaattaatttcttatatttaatttcaaacttttatgaaatcttttataagccgtaattgtcattggacaaaacgtcggctattcagacaatttgttgcaataggatatgttaaacagccacgaagcaaagtcccatcgaccccccccccccgccatctccccgctccgatcatcacactttttcatttctcatttacatttaaatatgtgtgctgtgttgcgcccgctcaaccttccgcccccatcgcccgtcgtcccacccttgtcccagctatccaccagctgctgaaggtgtattctttggctgttggggttgttgacgggtagcgtcggcagcggtggaaattaacaaatgcacattgaaatggcaaaatg

SEQ ID NO: 105707 - DNA, 68 bp, Heterodera glycines
tggtcgcaaagcagaccggcgtttgcactacatatcatggtcgctaagctgaccgatatgttgccatg

SEQ ID NO: 105708 - DNA, 230 bp, Heterodera glycines
tttggaccagcaaaatcgctgagttccgagaagaacttttttagaaaaagttctttggaacaatccttggttacggtgaatccatggagttccaaggccgaggaggcccacatgcccacattgtggcgcaaacagacctggacgcagttccatatgtcattcaggaatacatatgggcgcacattccatctttgcctgataaagatgacgacacgcccattgcaaaaatg

SEQ ID NO: 105709 - DNA, 174 bp, Heterodera glycines
aatggccgagttgtgagagcattatttgatactggggcagacgtcacatacattaagtcatcaactgctgataaataccttctgaaggtccgccggggggattttcctcaagctcgagcagctaattcgacagcaatccgttttattgggtcaacaaatgtagacatcaaaatg

SEQ ID NO: 105710 - DNA, 234 bp, Heterodera glycines
gcccgtgtttgttgagccgtccacttcggtgaaggtccaacgggtgcttcattccgaggcttatgtaaggtcagccagcggtggagaggcgggcaatggatcaatgatggcattggcattttaaaaactcaattttcaaggtacattgagtccatgtacagcaacaaagtgcagcggacggtcagcaaatgggacaagaatttgcaggcgactcaacggaacaccacggcaatg

SEQ ID NO: 105711 - DNA, 112 bp, Heterodera glycines
cccacccctgtgaggtgtagatattcttcaattttactctctctagctctgtttatgaacagtctgtatctttgttaggttcattttttagttctacaatattgtcttaatg

SEQ ID NO: 105712 - DNA, 262 bp, Heterodera glycines
aattgtgctcaaaatggtctaattatttaattttggaagatgataaatttacaaaaataatatttgaatgagaattaaaaaacaaaataaaattacattaaaaaaaattagtgaaattaatttgaaataataaattatatatttgcttgattatgaaaatggcaattttgaatttaaaaaaaaatcagaaatatgtcattcgaaaatgcacataatcttttttttataaatattatgtgtatgttcttttttttgcagtatg

SEQ ID NO: 105713 - DNA, 119 bp, Heterodera glycines
tataacttttttatttgtcagtcaactttagccattctggcatcatttgaaagctctatgtgtgctctatatttacatgccaaaatagaaattaatgattcaacaataaaaaagttatg

SEQ ID NO: 105714 - DNA, 308 bp, Heterodera glycines
gcaataattttttgcgccagcgccggcagacggcccttcgctggccgactgagtaccaccggcgccggcgccatcatttgctgtggccgatgattgagtcaatgccttaggcgagggaggatagcaatttttgaaataaaattgccgaaaattttaaatttcagtttaaaattattgaaagaactaagccaatggaagaaattgagggctcgaatctatggaaaataaatttttaaactgcatatggagacaaaattttggcaaattttttataattttggaaaataaaaaataattttaaagagatg

SEQ ID NO: 105715 - DNA, 217 bp, Heterodera glycines
ggtgttatttgagactatgttcaaatcccccaaattaattactaatttcattaattatcattaatttattgctgtcagtcgtttttttatacattttcttttaaaagttcagcaattttccatttaacgttgtttttttttttgctggagttgtgccaattctctccccccacccctcttaaattttttcatgtgactttattgtgttgttcggatg

SEQ ID NO: 105716 - DNA, 187 bp, Heterodera glycines
tggcctatttcgcgattttttaattacaagccctagcttctattttactaattaacccattaagaattaacaagtttcggtcgaagcatctttttggcaccatttgactccgagccaaaaatagtcaatttttagagaatttagttactcttattaaaacaacctttttgcatctgttttcctaatg

SEQ ID NO: 105717 - DNA, 456 bp, Heterodera glycines
  unsure (1)..(456): unsure at all n locations
tttcagagcagtttgtgaaaaaatatttatgaattaatttntgctaaaaaaataaaatagtgaagctttaaaaattaataaaaaattttaaattcagaattactggagttagcatcatagcagtgcttttccttgtctttttgatgccctcgcaaaatctggttcgcttctgatcagtttataaaaaaaaagttaagcctaaaatttttcgcaaatttaaaaagcaattaaaaatttttagattttttattcatctccctttttgatagtgaaagcatcagagagccttatttaacttttaattaacatttggtgcgtttcagagcacgttctaaaaaatatttatgaattaattttgcaaaataataaataattaatgaaaaagtcagaatttcgaaaaattttaaaaacaacaagcgttggcattttttcaggttaagttagtcctttacaatg

SEQ ID NO: 105718 - DNA, 214 bp, Heterodera glycines
  unsure (1)..(214): unsure at all n locations
ttgtacgggatgaaaaacataaacaattgatgcctgatgctaatgctattttgagaaaattacaaaatgctgatttcaaaattttacgtcccccccccnccctcctccatttgaattgatgacattttttctctctctttttttcgaaaaaacaaattacggcaaaaacccatcatttttcatcattgatgtgattttcagtgatcaaaatatg

SEQ ID NO: 105719 - DNA, 129 bp, Heterodera glycines
  unsure (1)..(129): unsure at all n locations
aatatcgaaaattctctaaaaatnttatgacnncaatcaaaaaaagaaaaaaaatttgcagtcaaaaaattattcgaatttctccaattttgtttccataatttccgaaagttattcggtatcataatg

SEQ ID NO: 105720 - DNA, 734 bp, Heterodera glycines
tttcgacatctattaaaaaaacatttaagtaaataaatgattcaataaattttaggacaaaaaaattataaattatttaaaacttaaatatttcataataaaaatattttcaacaaaaaattcgaatatctctgactgataaataaattcgtaaatgttctcatttaaactgcacaattagtgttcggggcactgccgccgaagtttgaatgacatgacataatgccaatcgatttctgttccatttcatgttccttccctcgcccataaatatgctcccattcccctttagattgtcttcccttcattcattttgcatttatatttgttccccaaattattgtgactttcttttccttctccaataaataaatatttaattggacttaaacaaatccctcggaccgaacaattggcgcagtcagctaaaaagcaaacgacataaagcgcatttgttattcatttattacatctccaggcgagagtaatttttggatttcaacattctgccgccggtcttcaagtggacgaaaacaaaccgtccacatttcgaccgccgactttcatcgcgtcaaaaaaccaatagaccctaaaagggtgaggttccgccaggtgcggttttcaacgcttcaaaaaaccaatagaccctaaaagggttgcggttccgctatacgcggttttcatcgtccaatttcaacactcaactgaaaagcgatcgataaccaccgacaatg

SEQ ID NO: 105721 - DNA, 1003 bp, Heterodera glycines
tctttccacgttttgacgtcagattttatcataatactcaattggctttttttggattgaattcagagtgtctgtggatggatttggctgcctaaatttatttttatctaattatttttggagacccaaacataaaagagtcggttttgttctgccaaattcaaaaatagcatttttttaaaaatttgtttacgaagtcgacgtttgtgctgtccatgggcaatctgtgctcagtcccttgttcctccaattcgatcattttttcaatttgtcacggaattcgttcatcaccgatttttttcgcatcaaatgattgtgtttttttcttttgggtttcgcctacgctcagccacagattaaaaggattattaaatctgcgttttgtgttgccattctcacctccaacaaacaaagggaagggatgagaatggcgtcgtcctcccctccctccccgcccacttacaatgcttttcctccgtccattttcctctcatccgatcgatcattcccttcccccgtctgtttcagtcccacacttgcgcatgtgggaggggagaccgaccgcgggatattcccattcctaccaccagccgcgcatctctcgccgaacttttgcctgtttatttacataagaactgaatgcggggggggggggacctccccggcgaggggcggacaatcgctcgacgagtggctcaagcggaaagtgcgcgggggaggcattgttccccctcccaccgcttttgctgctgccgatagttcgcggcggttcattcgacctcaaaagaggggaaaccgggggagaagtcaattccgaccgcaaagacccatcgaacgcagcgcaaacggaaggcgagtcgcgacaactcgggttttgccgcaattctttggcacattttgcctcattttcgcttcacttccccctattattgttttttttcttttacccgttcattagacaaaacgtaattatatattttagaaatttaattaagcgaccatg

SEQ ID NO: 105722 - DNA, 1003 bp, Heterodera glycines
tttgaaaattcattgctcagtgaaggtttggtcaatttaagtgaattaaagctctaaaaatagagaaaaatcaggagaattttatgggatttatttgggttttctaacatcaatatgaaagaagttattccagaaattctggaaattttagatttttcagaaaataattcagaactcgcttctgaaaagtcattctgtaaaagtaataaactacaaaaatccgcaatttttttctctattatataaattttatttcacaattttatcactttcttacgaattgttacaaaaataaaagtgattttgggattcgggaccaaaggggggtgcacatgatttttgagtgaaaaaattttttcgacaaaaatcttccaaaaacatgtctttaggggttatttgtgccgctgatcacgaatacgtgatcagattttacttttgacatcgtttagacctcagaatccctgtgtgattggggattctgaggcatcatttttggggggaggaatgaggcatcacaatttgtaaattttttgtttttttttctaagcaagtcatggtttttacggcattttaaaaacgcatggtgaagtttggctgtacctgagaaggtatgcgctctctacattgcgaaacttgggcatgggccgaagccgactgagtgacgaagtgaatttattaatttttttagctttatccacgacccgaggccccggattttttttttgccattttttttaagctcaaaaccgactgtctatttccgtcgataatacccataacaaatgaacggtataaactattcaagccgacctcattaaccctattttccgactttggaatttggcaatactatcgaccctgatattctttttttggcattatgcagaccgattgcaaatgatttcaaataccattagccaaaattccggaaccccgaagaagcttcctacaaaagggcggaatgcacttaatttaaaattaaattttaatgcttttttagatg

SEQ ID NO: 105723 - DNA, 771 bp, Heterodera glycines
aagtccgcgaagctgtcttttcgtcaacggggagaaattggagcgaaaatccgtcggaaattcgatagcgtcatcgcaaaaaaccccgggatttgatacaatttgcgatattggaaaaattctttctggtcaaaaatcaatttcggtatgccccccaatctgatttcactttacaaatacgctcccttgacttcatgtgatgttgaacgatcattttcaatttacaaatctattttgactgacaatcgctcacgtctatcgtccgaaaatcttgaaatgttacttatttgcaatgtgaatctcaataatgatttggcataatattttttgctttttgaataaaattttgtcattttacacccctaaatttgaggatttttagtgcctattttccattttttagtgcctattttggggattttttagagcctaaagcctacctattttggcggtttttagtgcctataaattgcatccctatttattatatgctgtttggatcttaatacaaacattcgaataattagatttttaagtcaaaaatccgtcctaataaatggaaattcagagaatctatctttgaaaatccaatttttatttatcaaccttaagaaactaatttaaattaatgaattttaaaattattactataattttaatgcacattttttgtttttcctttgaaatgtcgacgagtaaaggtagaatcaggcatataaaaataaaagtttcaaaatttaataatattttgaagaattgaattgttggatg

SEQ ID NO: 105724 - DNA, 96 bp, Heterodera glycines
ggtcggaatgtttggcttaacaattgctacacaacagtgcttttcaacgtcttcccttttccaactctttcagaccagcctttgctgttgtacatg

SEQ ID NO: 105725 - DNA, 145 bp, Heterodera glycines
ggtacatcatcatttcaagtcttgtttgttcagtttcgacttaatttgtatgctattttaccaaaagttgtaacgaaaaacgaaatttggcgaaaagcgtagattatttgtctatctgccataatgaacaagcattttgcagatg

SEQ ID NO: 105726 - DNA, 606 bp, Heterodera glycines
  unsure (1)..(606): unsure at all n locations
ctgatttgtgacgggaacatcgtggtgttggacgaggctggtcagggaccattcgtgcaagtctgctcaacttgtcgggctctctgtgagataaaaaaggtttttgttaccggggaccggtaccaattggcggtcaacatgcaaagcgttcccgagccggttagggtaggatttgggtttgacacagttctgataaattnggacaaggctaaagcggtggataggacaacactgctgacaaattaccgttctcattggcagattgtggcctgtgttgagcacatggcgtacaaaccccacggggaacgccttcagcctgggccgggttctttcaggatgctaatcgatttttggaaaatgccggtggcggaatcccctcttttattgatccaccaggaatcactaatggaaccggaactgacgagcttttcggcaacaaacagcggacaaactcggacagtactggacctcttggccttgttggacggattccccggcagcatccgcataatttcctttcatgctgggcaagctgcgcagattggcactgagctgaaagagcaagggtttagtcggtccattgtctctgccactgcagacgcaatg

SEQ ID NO: 105727 - DNA, 353 bp, Heterodera glycines
acaataatgtgcgtcatgtttttgataaaacattagtcttttttgtgtgactttcgtgtgacacaataatgtgcgtcatgtttttgataaaacattagtgtttgttgtgtgactttcgtgtgacacaataatgtgcgtcatgtttttgataaaacattagtgtttgttgtgtgactttcgtgtgacacaataatgtgcgtcatgtttttgataaaacattagtgtttgttgtgtgactttcgtgtgacacaataatgtgggtcatgcttttgataaaacattagtggtttgttctgtgacttttgtgtgagagataaataaatgtttttgacttttaattttttaaagcaatg

SEQ ID NO: 105728 - DNA, 60 bp, Heterodera glycines
acttttttgaaaagcatttttgggcatattttgccagaatggaggaagaaatttgaaatg

SEQ ID NO: 105729 - DNA, 141 bp, Heterodera glycines
ggtgaattttaattaatttcactttaattaattcataaaacattgttttctcttcaaaaggtcttcgcactgtcttcgcaaaatgcgcggctccattaaatgttgctggaattttctactatgaaattacggtcacaaatg

SEQ ID NO: 105730 - DNA, 259 bp, Heterodera glycines
aaagtatttgccaatttttcaccaaaattttcaatttgagcgatgtccaaaattaatgtgcgaattcgttccaatttctcattttgtgccgtttccatcgtaaaaattttccaaattaatgcatgtaatgtgtctttgtatcggaaatgagtgacgtggacattaaactctttgatggccgaatcattgatatgatttattaacacttgtttgtaaatataagcaaaattatacaggtcactactatcagcgaacaatg

SEQ ID NO: 105731 - DNA, 237 bp, Heterodera glycines
attaaaaagttgtagaaaaaatttcgcttttcgcatttcttattttcgcatattttggcttttcgcatttcgcttttttttcatttcgcatttttcagtttcgcaaatttcgcttttcgcatttcgctttttatttttcaatttggcccatccctgctgtcggcacagccaaccctaagcacatcgaatttaattttaattccacatttttcaaaaaatatttaatttatttagatg

SEQ ID NO: 105732 - DNA, 286 bp, Heterodera glycines
aagaatggtaccgatgactcacttttaatgaaaagcatttagcaaagtgaattcgtagagactaaaaacacctcttctctctctcatttattgttgaagagcagtgataaaaaacatcttttacataaaaataatttattaatttaaaaatgaggctaaattgttataaaaaaaaatctaagccaattatcagaaggaaggatttacccaagggttttcaactgaaaattttcaaaatcagcacttaaggtaaaaaagctgcttttagaaaattatattccaaatg

SEQ ID NO: 105733 - DNA, 287 bp, Heterodera glycines
taattaaaatttataaattatgaatttacttagaaaaatctttgacgtacaaaaaagattaaaaatgtttgggttttaatcgaaccaaattttgcccattaatagtatcataatttaattgggtaggtaaaaagtaaaatgattttttacagtaaataaattcaatttttttttgttaaagtaaaacgttttaaaaaatttcttttgcactgtttttttgacttaaaaatttatcatttaattaaaaatgcattaaattttattgaacccggaatcaatattatatg

SEQ ID NO: 105734 - DNA, 1003 bp, Heterodera glycines
cttcacatacgagtattttttattgcaagcatattaaaaacaattatgataaaattaagcgggattatcctgcgacctagcaaatccaaaagaagtctgagtgctaacaatttcaattttgtctctcttagccacgtccatgggaattgcgcatgactcaagtttgcaaacagcgagcccaagttttttgcaaggatagctgtggctgggcaacatgtgtatgaatttcgaatttttaggtctatggttaagccccgttcctcagggagagaaattacttgacaaaatttttcatgataagctggtgaagttcatttattttggagtgcaacaaacgacatttacaattccccggattgatcgggggatgaattctattttggactattaattgctttatttggaaaaccttaaggaaaagtagtggaaaaaaattatttttcaatttctttcaaaacatgtttgacagacacaatgttaaataggtgtacaaatatttattatttattttgaaaattaaatgaaaagaaaaaggagcataatatataattttgaccattatttgcttacagatttttaacccaactgctcgttttcgggaacgtaatgaactcttatacgcttttgaacaagcaggaagcgaaataaatgctatgtttgaaggcaagcagcgtttttttgacgaagatcattgctgtcctggcagcgactaccttttcaaatgttgtgaaatggtatgcacaaattagcagtaaatgtttttttttaaattaaccaaaatttgaaacattaaatttttgatagaccgtaagaaaattttcaatcattggaaaattcaatttttaaacattgacattcttttttatagttgttttttgtaaaaataaaaattgtcaaaataacagctctatttatacatttgtgcaaacgaaaatcttctgtttatgaccatgaaagtatactactaattttaattttcttttgtattttttttattaagatg

SEQ ID NO: 105735 - DNA, 384 bp, Heterodera glycines
ggtaaggaaaatgccaattgggttctcgaaaacctcgagctcggcactcaattctttcaagatttttttttttagaatttgacttttttgatagatagaatttttttttacagagaacaagttttttaaataataatagcattaaaacacaaaaattcaaattatttaaatgaaaattaaaatatgggggaggagggcaccaccggggaatatttatttaaaaacttcaaaattttagtattaatttagacaaatctgaaaaattcttggcattgaaaaattttcgcatttaccgaaaattcaataaaacatgaaaaaccaaaacatttgggagccctgtttttataaaaaagcaacaaatgttaggttttgtcctccaacatg

SEQ ID NO: 105736 - DNA, 465 bp, Heterodera glycines
ttttgatgttttagtggacaaacatttcaatggcacagaaaagaaaatttggaggactatcgaaattcacaaagattttggtgcgaaaccaaaactgtgtgtggttattggtgacgactcggtacttgtttatcaccagtttactcggaactggtttttttgggttgaaatttcaaaaaaaaaaaaattatacgataactttttagtccatttcaaggcccctggtaacgaatctgacattcctttcgactaaattttaacccacaaagtcgagctcaaatttcccaaattcgtatggctctttttgatcaaaaaagggtcctcgattgctgaatcgggtccgtgattaggacatcggcgaaacagatttcagatctataatcagcgggctttcaatttttttaaaaaacttttttgaaaatttaaccaaattttagtcttatcgagattctactatacaatatg

SEQ ID NO: 105737 - DNA, 1003 bp, Heterodera glycines
  unsure (1)..(1003): unsure at all n locations
attttttacttttttctaaattttctaaaattatttaaggattgcaagcacattctgttcaattttgatgaagtaaaaaagaaaaaatgataaaaacataaaataaatatttaattattgacatatcaaaataaattattaactaacagtaaataataaatcttgaacaaactccaatctaattcatatattttttaaataatttaaatgctcatttgatatttattaatatttcctttttcatagataaataattaatattattttatgctagtctatttttaaaatttacatttgtaagaaaaaaggcttaatatatttaaataactaagtattatcatataatcatcaaaattatggaataaaaaatagattcacaatttttttatcattacgataaagaagttaataatagacctagattggtaaattaataaaaaaagcagtgagcgtcgagctagaacagcgtcgggaatcccgacatggcttcacggacacccgcactatgactataagaaatttataatanaattcacaaattanataatcaaaacgttgaataaatgcataaaaataaagattttataaataagaanattaactaattanaacaaagaaaattaatgcaaaaaaataaaggtgtttttcaaaaaagtaaactcaaaaataaagaaaaaatattttaatacattgatggaattcagatgcaaaaatatggaaaataaattgttacaaatacatattaaaacaaaaacttctgaaagcaagaatcgagattgcttggcgtcaacactaaatgtcaagattaaaatgaaaaaatagaaagtttattaaaaatattgataaaatatagtttcaaaaaatgtaacaatacctaaattttccattcctaattattaaattgaacaatatataaaatcatttagcaaaccaaatttaatgtgctaatttaaaaaatattttaaataataaaattcatgcttccagctgataaattgacatg

SEQ ID NO: 105738 - DNA, 502 bp, Heterodera glycines
aaataaaaaaatgggataaatattgaagtagtttgtcccccttagtcgccttcagcgcacatttgtagtgggattttgggcggacaatccaaaacttttgagccgcaaattgagggggcccgtcgattttggtgaatttgcttaaaagcgaaacttgataatgagccagtttttcattgtttcacctgctgattgtccaatattggtctcccttgcccttcctcttcaacaaatccgatagttttgttgaggactgagcgccaaaactcagatgaccgaaatgacttttggcgatttggttgttttctggacaaaagagcaacggcagaagcgacggaaatgccgaaaagcaacgattgaaaatggggaaaaggtggcggagaacggcaaatccatcggcgattttgggcctggcgaaaaagtgcttcggaggcctaagacagggtaaattttaaaaagaaaaagcggagtgaccaaattgagcagatacggcaccaaaatg

SEQ ID NO: 105739 - DNA, 913 bp, Heterodera glycines
ttatttatgtatgtatattttggtttttccgtgtctcattaaaacattgtacccccccccccccgaattccaaggagtctccgctccacttgctccacccttttggccattggttctttgctcgacatcgtttctttgctcactttctccgtcacttttgtcgtcactttgtctggccacaacttcatctcccttttcacctgttacttcctccaacttctgccaaatttgagcattttctcctccgtttggattgttttctttgtcggcttcgaccgattaatcgccgttctctttccgttacggtaattttgcataattaatgtgtaattattaaccaattaatggatcaattagttgcaaccttttggagaaacatctccttctttacatctctccgatgcttttcgtcactttcggttacagcatttatatggttgtgatggctgctaattgggcactttttacatatccggattggtcaattaaatcaatcaattaattaattaattattgttttttattaggcccgttttgtgcactaacagtgacgcgttcgcctttggcatggcggcggaaacagcgttgcgaaatgggctgctgattgactgcacttccttcttattttatattttggttgcaattgtgctcgttttccgttggaaaaaaatgagtggtccgtaaatccagcgttaaatcgcattaaattagtaattaattaaataattaattaatagtcaattttaggcacaaaattttttataaatatataagctcaaaactaagtgaaaattgtttttcttgcttattttagcattaacacttcctgaaaatgtaggcatttgcctaattttgcttcctaattatttaattaataattaattgtcgtctttttactaaaggctccgaaatg

SEQ ID NO: 105740 - DNA, 970 bp, Heterodera glycines
ataagtttataaatatctacgacaattttttaaaaaacaattcaatctattattggcatttggggacaaaacggcggggcacagattggaagccaaaccaaaaagatgccaagccttccttctcttcctcttccattacactctctctctatttacatatttatctattggttttatctcactcactctatttatttggtcttcggttggtctttcccattaccactcacagaagagatgactcatacaaattatttttaaaattttatttctaatttaaaaatacttgaaaattttatagaagattttttaattatataaaatttatttcccacctgggtgtatacaaggctcgttagatcatgtcctctgaatttttcttttaatttttacttgattaatttgaggcgctgaacatctaagactaatgagcaaagaataaattcaaaaagattaatataaaatgcaaaaataaataaataaaataattatctgtgactgaatttgatcggcaatgaatggtgtatgaactgttcaatttaatataaaaacgtcgctatgtatgacattggtaaacaatttgtcatattcagcgccaaaaattataccaaaaaacatatttattttaaataatttgaaaagaataaatgaaaatttgaaaatttctcccaaaaatcataattcggaattcccgcataactttagcaagtatcacaaattttctatcgaataagctaaaaaaacaagcatggttttgtaaaaacccggcactgaaatggccattttttttttttttttgtaaacttttttagatttatatgagaggtattgttttggtacaaaaaagtgtctgcttttcctagccctataaaaaaagattgatttgaacttattaacattcaatttaggttaattgtcgcctgtgactcaattttcaccaatttatctgatcgattgtcttttgatcatg

SEQ ID NO: 105741 - DNA, 154 bp, Heterodera glycines
tttagaggctcaaattgtttcgctaagcgagaaggtaacaaacttagaggaacaaagaaatgactggccttcggatgacgaaagtgtagactcaactgacttaggcggaaaaccaaaaaaaagtggcaataaccaaaacacctcactggtaatg

SEQ ID NO: 105742 - DNA, 750 bp, Heterodera glycines
ttgcacctttaatttaattcgacataatttttataaaaattcttaatttatttgttagctcatcatttaggctatggctaatcattattgttttttgaccttatatcaaataatttcattaattcgttttttaaatctcttaaaattaattaatttttcctaattattttattagtttattaattcattaattactcattttgagataggggagagttacgtcgagaatatttgctcacctaacttgttatttcaattattttttcagattttttgggttgaacaattttgttttttagtccattcatgatgctttgattaactaatgaatgattagcgttattgagtttacaaactaattgcagaaaagaaatgcatttaaagaaatgaacaattcaaatgaattcactcatttatttaaactcaaaataacctttatatataaaaaatatttcttaattgaaattatactcaatttaaataaaatgataattttcaatttcaaaatctatcactcatcagatgatagggaacattttgaattgagcaattaaaataaattgtccataatttaagaaaattgaaaaatggtactgacaattttggcaattttttgcttggcatttctggcaaatacgatatggcaaatatggtgctggtccccctggtggctacccacatgacaacaacacaacaacaacaacaacaacaacaacaacaacaacaacaacaacaacaacaacaattatg

SEQ ID NO: 105743 - DNA, 456 bp, Heterodera glycines
  unsure (1)..(456): unsure at all n locations
aatatggtaatgtgtctgatctcagtggggcggtcgctgatcattctgtgcccgatcagcccgaatttgtcttttacttgaaattattttatttatctttcatttntagttgaaaaacagtggaagagtttaatataaattcacttcaatcaattttaattttcattattttacaatttaaaataaaaattcaaccaaatcgattatgattaaaatcccgaaaaaactgactttctcggctagattttatttataattgtaatttttgaatttttctttttatcagggctccgaactgaaaatggccgacaaaaaaccagcatttggggtcaaaaataattattttgcaaaatactccaaataaaatcaaaaaaatgttcgttttttgcgattttgagccagtttttaagaaaaaaaaaagttttggtgtccggcggtgccgataggcgaaaaatg

SEQ ID NO: 105744 - DNA, 1003 bp, Heterodera glycines
aatgggcaaaaaactatagaaaaatgtaagttattaagattacaaaaacaccaaaacaattgaaattgattgcggaatgccaaatgaagcattttcttggccccgcccttatttttggtttttttgcacctaaaatagggacccctaattttaaagaatttcaccgaaaatgggcactgaacggaatcgtgtgaagaaaacaattggaacttgcaaaaaatattttaccatttttcaagttaaataaaaataaattatttattttttcttcagaaatatttcaaatcatcaaatcaattatggaaaaatttgagaaaattagcgcagttttttgctgccttttttaattttttgcctttttcatgcctttggaatttttgattttttcggcccttttttggcgatttttttgtctaaaactgtcatcccatagtaatactaacaatgttcaatttagttgacaatgaaaaaaaaacttacccaaaagctcgtccagcggcatctcaaagagtgataaaaaaaaattacaagaaaaaatggcaattacgtgtaaatatggcattttaatagctgcttaaaaaattgccacaaataatttaatgaaatttggaatttaatcatttaattaatgatgactaataactatttaagaaattcggaaacataaaagaaaaaaagtgtttgcttaacaattaattcacattatttttggcttatcagtgaaatcaacagaaaatgaaagcacaaaattgcttaaaatcacaatggcaaaatggcaaaatggtaattagtgataagggactaattgagaatgagaatgctttcttcattcactgtttgactcttttaatgagaattctccgccgtaccaaaacgagagagattcctcctaagaaatatggccattttcttccaaattttgaaatattatttattaattaactaattaattaattatttttggttgataatttcccttttatctttttttggtgattctatg

SEQ ID NO: 105745 - DNA, 182 bp, Heterodera glycines
ttatgccgtttagctcttgtcccaaaatataaactaaaaagacatttgtactcattatatatatatatatatatatatatattaaaaagcaacttatccttccccctcccccctcccgcacatttcgcatattgacatatataaagtttttagcttccgaatttttgaataatcattcaatg

SEQ ID NO: 105746 - DNA, 69 bp, Heterodera glycines
ttgccgcattttattggtaaaaaatatttaattatttgaaatataaataatttattgaattttaaaatg

SEQ ID NO: 105747 - DNA, 326 bp, Heterodera glycines
ataatttttgttttgataattttgtctcatgtttataacatttaatattttaaattaatcaaatttgtttcattttttttagaatgtcaaagaaaaatttccaagaaacttcaaaagaaatccgccgctcgaaaaatacaaaaaattatttcaaaaacagtcctaatttggaaaaatgtttcgaagaagtggagagtcacataaaggaaaataaaaaatttgggataaaagagcacgtgacaactttctattttaaatgccccgaaaatgaagatcccgaaaaaatgtttaaaaaaatcctgaaaaaattaatgggggatgcaatg

SEQ ID NO: 105748 - DNA, 120 bp, Heterodera glycines
ggttttgattttgatctttttttaaaaaacatttgaaatgttcatatcgccaataattaaccaaactttgccagtgtataattatttttacaaaaacaaaattacagtatccatgacatg

SEQ ID NO: 105749 - DNA, 248 bp, Heterodera glycines
tcgacagtaccagtgcggtaaatggacagctattggcacattggctgatcaaggcgcttccgaatgaaatccctaaaattgttcgttgttcaattgagtcatccgaaacggcgggtgatttgccagcaaaaattggcgcaattaaatcggtatataaaaaattgaaattatttctgtttgtaactaactgttaatccctttaggcattttcaaaatcttctttttctgccaatttcataatccaaatg

SEQ ID NO: 105750 - DNA, 571 bp, Heterodera glycines
atattttaaatgtctaacaaaattatttttttatatttccccaataatttttatattatctccaattaaatttatctttttgaaatttttgactaattacctaattaatataaatttgaaggtatgccctgcgtaaaccatcacgtctctattcgtttttttcgaaaaattgtttaaatttttttaattaattagaaatattaaagctgataattttaacaccaagctgatgatgaatgaagaaattttgaatgcttttatgaaaaattaccaagaaaaattattgccaatctctgagataatattgcattttttgtgattagctaattgttattatattgattagacaaaaagttttcgaattttcaaataatgaatttgtaatttatgtgaaattattaccgagatttattcacaaaatacataatgaaaaaatacataatcaaataatttcgtatacaaattaattaaaaatcataaagtaataatttttttttggtccattagacgaaaaaataactgacaaaataacacaacaaataagttttgatgagttatttggccaaggatg

SEQ ID NO: 105751 - DNA, 239 bp, Heterodera glycines
tagttggtgggcatgccctccaatgtgatggcttgggccggaaggttaaaaaaacacgtgtagggggtgacctatgcgcgtttttaaccctccaaaaatggcccaaatcattgctcaggagaggggtcatgcccgattttttattgagtggccattttctttgtatttttttatcaatttcatttgttttctgttttttaatgaaataatcaaagtcaatttaagaaaaaaaaacaatg

SEQ ID NO: 105752 - DNA, 336 bp, Heterodera glycines
  unsure (1)..(336): unsure at all n locations
tttcagcancaatagtcgaacttagaaattattaaaaaaaatcttcgaaatttttataagaaaatttcaagacaaagacttagaaaaaattttcagcgattttttggaaaagtgtttttcaaaaaacatagtaagtaattcatcattaaattatgaaagaatcgttagactaagattttttcaaattacgtaaatttgaattatttattttttaattttttggggtggaggacggcgggagggaatgagctgttccccctctaatgaccccaattatgcatgcgactagtcaattaagcaagccatcatattatgaattaattacctatcgccatg

SEQ ID NO: 105753 - DNA, 145 bp, Heterodera glycines
ttttctggacagaatttcattgagcttcgtctggcagcaaaaatccttttgattcctacgtttggaattggtaattttttttaaatcagcataagtttcaaatattatttgaaaatataattcaggcggaattactccaacgatg

SEQ ID NO: 105754 - DNA, 328 bp, Heterodera glycines
ttcggaagtgctaaacgcttatttattgcctttttaagagggaagagaggagcttgtgatttattaaaaagcagtgatggggttgtacatagcaggaaaaaacaattacaaagcttttttgcattagtttatttgaccctgaaacgtaaactcacgaggatatcgaactttgaacatattatcaaactgaaactttgttatctatccacaattcttgtttaatatagcattttcaacaattttcttacattcacttttctttttgcacatttacaaacacataattttgatatttcacaacacatgcatttgaatgcgtttggccatg

SEQ ID NO: 105755 - DNA, 95 bp, Heterodera glycines
aggagattgaaaaagccaaatctccaattggccaaaatcaaaatgcgccgcgaagatcagcacgcgccaagagggcacctcagcagctgaacatg

SEQ ID NO: 105756 - DNA, 60 bp, Heterodera glycines
tcattagctgctgggatgaggccaaaatcgggtgatcatttcgacgtcacaaccaaaatg

SEQ ID NO: 105757 - DNA, 140 bp, Heterodera glycines
tttcagaaagacaacaattgtgctagatgttaccctattttatactcaaaaatctgggccacgcccatcaaaatttgactccgcccattttaagcaaattgaaattacccgtccgaagccaaattcatttcctcaaaatg

SEQ ID NO: 105758 - DNA, 401 bp, Heterodera glycines
aaatttcttcaaatttattgggttgaaattgcatatgagatacatttccaaattttttggctcggtaaggcgctttgacaaagacgcaattagtcggtcaacattcggaattggtctcgaattttttcggcaattacgtgcaatcattttaaaagaaaaaaacataaaagctaaaatttattaatttttttagcgcaaaatcaaccacaaaagcgaaattttcgcttttttgcttatttttgacataaatttattaatttttaagaaaatttaaatttattcaatattctcgagaaattttggcgaaaaaatgattttttgaaaaatttttcggtttttgggctcaaaaaggctaatttagctgctgggggccgttctaatagaggtttttttgaaaaatg

SEQ ID NO: 105759 - DNA, 185 bp, Heterodera glycines
aacgcagtttatgtgactaatattttgtacatttgtaaatgcctcgtcctaaattaaataaaaaaaaaaaaaaaatctttacattaaacattttggttgattgggcccatccacaaattagtaaaaccttactttcctcttttagaatttttttttccaattgataaaacattaatttcgccatg

SEQ ID NO: 105760 - DNA, 184 bp, Heterodera glycines
cgttcggttggaatgccaaagtgtgaggtcggtcaaggcgaacagggattttggtgccattctacatgtcgcagaactcgatccagcgcttggaaatgctgaattgggctcaatcacagtgaagacaccactgcaggcacttttggcggtgttccttttgaaggccgggactgtcaaatcaatg

SEQ ID NO: 105761 - DNA, 256 bp, Heterodera glycines
caaaacagaaaatttaattgaaggtgaagaaaatttcttaaatttatatgaaatatgatactagtcgtcgaaaactacaaaaaaaaaagttgcacaaagcacatacctatgtacctacctatgtaggtatctgttgtcaaaaaataggacttacctactcctctcaaaaaattagcctggtcgaaaatttttaaatttggcattatgttttaaaaatctctaccttgttttttttatgttcactaagtttaggatg

SEQ ID NO: 105762 - DNA, 1003 bp, Heterodera glycines
gaaattgggcaaacctatcgggccgcttactcaagcccgatttaggcattggagagttggccaataaattaaaagaaacaatgcgagacaagcaaatagatttggaaaggccgagacccaaacagaatttagagacgaatttattgcttataaaatgtcctggtgaaaagaggtgaaaaccaaggaaatatgtgaaatgtccaggaataagtggtgaaaagaggggcaaaatattccataacaggtgtgaaacatatgaaaaaatatgtcataacaggtgaaaatggtaaaaaatgtttcgtaatgtaattggtatggggtgacaggtattgttgtgttattatgtgatttaatggtcagtttttcccaatcatatttcaaaagcggcattttgcgcccgtgccaaccaaaaaaattggtgccagccaaaaaaatacgcagcagtgaaataatgtgacggcttccttttccatttcgtcgccgaccaaattcaaatttgactctagcgtaccgttttccctctcacctgtcaatcaaatttcaatctttcgggactctatgcgcttcgttttcccttctggcggaagtcatgcaccaaaaaacgtcccctctcggggtgccatccccttcccacctgtcaatcaaatttcgtagccagccaaaattcaaattttggttctctcgcgtgccatccttctctgctggcgttcaaattgcttctttcgccggtcttttcccttctttcaccacacacaccactgaaaatcgatcacactcttccgctaattactccgccccttcgcatttgtgccagaattggcgtcctttcattcactcttctactctctcaaaaaatcagctttttcaaccaaccttctcgcccagctaatttcttttttattatcttcaatttcctaatttaattcgtgtcagcgcagcacgtacttgcagtgtttgtgagggagaagaacgggaatgtgaaatttgtgaagggccaagaatg

SEQ ID NO: 105763 - DNA, 278 bp, Heterodera glycines
aggtaaattcttaataaatgttcaagaagaaaattatattaggcaaattaaaatcaattctataaaaaattgtgaatgtccatggatagctaaatggttgagaaacatggctgggcgtgactggatttccagttatggaaacccgtaatccgtaattattggcatcagtttctcaattaccgaattccgtaatccataatgacgggggggggggggggtccaaaaacgccgtaatttccagtaatccgtaattacgccaagcagccctgttgggaatg

SEQ ID NO: 105764 - DNA, 342 bp, Heterodera glycines
  unsure (1)..(342): unsure at all n locations
ctgtgggcaaatagccanntttgtgggcaaacctcttcgatgtttttcaacaaatttcgggtggtcattactccgtgcgtttgtggcaccataaaattgaattttatttaaacattatttattttttattcaactaaaattaattttatttcatttttatattcatatttttaatacttgaattttcttaattttttaaatttaatatcgcttttttaaatatttttcactaaatgaattattttgaaatttttttttccatttttttttgtttgttttcaaattatttttaaaaataatattttccatttttaaaactcattttaaaaaaatgttcagatg

SEQ ID NO: 105765 - DNA, 102 bp, Heterodera glycines
ttttttccttttagccttaattaaacaattttttgaataaaaaaatgacttaattgattgaaattgacctttttatatgcagatttcacatgcaaccgaatg

SEQ ID NO: 105766 - DNA, 147 bp, Heterodera glycines
atatttatcaaacacactgttactggtagaaccaatcaaacgcacgcactaataaccaggagctcgcctgatcagctggagtacaaaggaatttaccgcgttcgtgtgattccgccacgagggctacgcatccctgtgctgcccatg

SEQ ID NO: 105767 - DNA, 66 bp, Heterodera glycines
gaagaaagaagcagaaacagaagagacttttgaaaaaggaaatacccatctttggccttcgagatg

SEQ ID NO: 105768 - DNA, 79 bp, Heterodera glycines
ccaacaattctattcgacttggacattaattcaatcgaatcttgtaacttcgaattttatctgctgacagataaaaatg

SEQ ID NO: 105769 - DNA, 616 bp, Heterodera glycines
ttttccgacttacagttcgggtggttcccttgtaagaatgtttaatttggatgcttcttgaaaaagttatggttcactaaacttgcaaaaaaattttatggtcgtgtcttttttttatggtcgtgagaagtgcaatagagtcaaaaaatgtttagccctgtcctgaaaatttaaaatcgagtctaaaagtcgaaatttccgttctctgctctatagccggtatgcggtaacatgtgatttcgtcagaagtgatttcgtcagtacggggtttcgtagtgataataatttttttacaaaaatttcaataattcataaattaaattcgttcataatatattaaataatatgtaaattcaaaaataaagattatttacttgattattaaagacaaagcgaaacaagcagaagctgtaacatgagggtgcactttacgttcttcaccaactcagtgaagatggacttcggaagtattggcgatgcgagttttttgggcctaacgacaaatgcaaaggtgtatgcaaaaataaaataaagactatttttcaaatttagggcgccttcacactgatattaatggtaatgtcctcaaataattagaagccacacatgcgacatg

SEQ ID NO: 105770 - DNA, 1003 bp, Heterodera glycines
aactcattaggaaagggaaggaatgcgagggaaatggcacggcgcaatgccattgcatccacccaaagtcccaacatccatttcttaccatttcattttgtaagttgttggccaatgcaacagaagaagagaagttggagatgttgcggtgtcgtgtgctcagccgaatctgtgccttaatcacccgctacagtaacgtcgaagttgcggcgcccccgggcacaccgaaggcgcggagtttgagtgtgtcgagagcggacttggaaaacgtcgggagtgaggcggaaaggaacacggaagagggagatgatcagcagcagaagagtgggagtgatcggagggcacgaaagacggaggacggatcaatgaaaagggcggacagcgcgggttcgacgcggaaaaaggagggcatcggctacggcacgggttcgacaaggtcgcgatggaagtaagtagcaatggcatcaattgcattgtgccatccgatgaaacgcggacaaattcagaccaataaaatgggtggttggaagcttttagctaatttaattgcttacatttatccccctccccctaaaaagctaagtttcgaaacgaattcatccgttgtccgtttagcattgcgcgtacagttgaggagcgttctctgcacgagcagcatctgatcagtcttctgtccgcgctggtcgcctttctttggggtggtcaactgtccgatcggctgacagattgggaaatggcacaagcgcacaaagggggcgaccggcgccgctcaaacaccgcacttctgctggagaaaatgcctgcccatttgctggacgaggcggtcgctcgacagatcagcgcgtcggcagtgtttccactgatcaacgcccatttgagtgagttggccaaattaaggcatcgatcactgatcggttgccatcaatgggaataattttgtgatctttaaaatgccgtcgctctcttaggcaatgattcggtgttggacgtctcccaacacatg

SEQ ID NO: 105771 - DNA, 385 bp, Heterodera glycines
ggcgacgacgatccattcgatgacattttagctcaaattcccgcttttatgcctcctaaatattttttgcggtgctttaaaggacgatgacgatacattcgatgacattttagctaaaattgcggcttttatgcctcctaaataatttttttgcacaaaactggcgctttaaaattttggggtgtggccgcataatggaaaagtatcctgttctcattatctccaaaatctccggaaatttatatatttttttatttgtccacaagtataatagttatgcaatttgttatcagattcggttttccgggatttatttttaatggccggggcattgattaaataatagcaattttcccataatttcagaattgggccggtgcccatg

SEQ ID NO: 105772 - DNA, 1003 bp, Heterodera glycines
aatatgttggaaacgatgtgatagtgttcattccgttggaattgcaaatgtcaaaaccgatttaatagatttttggatttcttaaaatattataattcaaaaaggtttacgacattcaatttccgaagttttaatttaacttcattcctttagattttctgtttagtcgtgttcagtttctgtttcctcccagaaagtttccttaaatcattttttattccaattaataatataatttaatattgtattctcaagcacatgcttctttttcttgactgtttaaagcctgcgcattgcattcacctgaatttatcttttacattgtatcatctaaatagctcatttaaatcccagtttttcctcaatatggagagccactaaaaatgatttctgatcaaatactctcatatcttcattcattatctgattagaaaatataccgtcttgaattagaattcaccttgtggcaattttaaaagaaattgcagcttcttatatttcttactcaatgaaattatgcgatttaatatataacctttaacttgcagcgaatgtggtcaaagttcagcttttaatttcactgatgcgtctttatatattaattttcttaaaaacactgcataccttttaccattcttagaccaaaattagcgcgtggccagtaatttcagcgcatttcaatggccaaaatgagaaacgacgcaaaaaacaacaacgcctttggcttcagccagagctcatttatgagctgctcctttttatgctgcctgacaaagtttggagtgttagacgcttgctgagaataagcgcgatattttatcggttaatcgccggctctaaaaatgttgaaaattggcgaaagccatataaggtcctaggccagtgtttaatggtaatcagtattataatattgtggtgttttttaatttttaagcaagatgatcaattattttacaaaaatccagtgaaaaataattttaactaatttaaatttaagagcatg

SEQ ID NO: 105773 - DNA, 900 bp, Heterodera glycines
aggccaaactgacagagtggtttcagaaacgaagcatttcaacaggaaaaccaaaactttccttctaatcgaaattttgattttcaaaacagaaattatattcccacaagtcaaaacactcaaaatttcgaagccacgggtgcaaacagaacccctctgtttcagtcaaacaaaagagctcaaaacaaggaatcgaatatgatcatggtgaaagaagtaatacctgaaaattcggattcgaaaaccgtttcccttaatcacgtgggacacggagaaattccaacatatgaaaaattttttaattctttgattttacattcaaacgaatttccatctcaaaatcccgccaacgctgaatgttccgaaagtccaacgacggaagtgaatattgtcggaatgaaggcgatcggtctaatcgattcggcagcagaaataaatgcagcaaaccccaaatttttacacaaaatcgccaacgaaaaaggcgtggatttgctaaaatggggtttttgcccaaacaaaggaaattcaaaattgtcttttgaagttgcttcttttaatggtggaaaaatcccaataattggagtgcttaatgttccaatgagaaggggaaatttcgaatgtgaaataaattgtgttgtcacgaataattcctttccttacgatttcgtttttagcctgaaagcattaaactcactaggctattacatcggaaacacacttacaaatgaaatcttaaatttcaacgaaactccgaaaaattacaacaccactttactgaattctgttcgcatttcattctgtaaaattattccacctttttcatcatcttttgtcgattcatttattgaaaatgtgtcgcatttgcccgaaaaacccgaattcattatagaaaaccaaatg

SEQ ID NO: 105774 - DNA, 213 bp, Heterodera glycines
ttcgaaataagttttttgttctgaaattattttttttttttaaattaaaattttaataattttcgaaatttcaatccatattacttatctatattaaataatgaatttgttataaatataaatttattactttttacatttgcatacttgcccaaaattataataataatattaaaatttagccgtctattcctatttcagcagaagaaaatg

SEQ ID NO: 105775 - DNA, 268 bp, Heterodera glycines
tgtagtcagtttgtgatgaagcattgcgcacaaaatcattagcattgattttcacgtctcatcgacggagaaataaattgcgaaagaaaagaatggatgagaagaaaagaaaagaaaagaaaagaaatgttgcacattcaaaaatattaattaatgataattatagtgaaaatattaatttttaaaataataatactaattaaatgtttaatgagtaattacgaccggaaaattgcaactgcttttgtaacttttcatgtgaaaaatg

SEQ ID NO: 105776 - DNA, 416 bp, Heterodera glycines
ccttaagtggtaaaacaacaaaccaattaattaattaatcaaacaattaattaactaattagccatgtcgtggcactgctattaactcacatagtaaaagctttgccgtcccaccaccaagtcaatgacgaccatttcccagaacagcggggggtctaaatagtcgtacagaaagccatccgaagtgatgtgactttgagccttaagcaaaaggaggggagagagtgccaaaggaaaaataaataaaaaagcaatggcccaattaaaatggcttggccaatgtccaaatttaaaagagacaaaatgccaaattgcgttggacggaccaggtcaagttgccattcttggttgtcgtagaagtctatcaaggacagattcttggaaaacagtgagtatttgatagagtcatttgaatg

SEQ ID NO: 105777 - DNA, 120 bp, Heterodera glycines
tgttggccttattttcaggatccggcaaaaagaagtacatgctggagctcaagaaaattggtcctcatttgttggcagccgctttgcgcgcgcctcatttgtttgaatagctgaaggatg

SEQ ID NO: 105778 - DNA, 140 bp, Heterodera glycines
aaagcattgatcgaaacatttgatcaaatgaagaagaaatttagaaaaaaatatcattttgttgacagaaaaataatgtgaattttggaaataaaattgcaaaaagattgggcacttgcagaaccaaattatacaaaatg

SEQ ID NO: 105779 - DNA, 171 bp, Heterodera glycines
cgtaaggcgttagtaggcgaaatgaatgtttttggggttggtaggcgaaatgtcagtaggcgatatgtccgtacacccttaattgaacatgaaaaatcttttttttttaaatttacaaaaatttaaaccagcggaagagttgggaatttgtaaaaaaacattgaaaaaatg

SEQ ID NO: 105780 - DNA, 914 bp, Heterodera glycines
atcgcagacggcaatggtgctggttgttcaagtcaccaagaataaacaccaaaatatgaagctgtaattttcataaattttatttttctataaatttaatttttctttttcgtctcaaaaaagtaaaaatttttgaatttttcaaactttttttaaattttcaaaatatgtacgtacttttatgcatgtttgtataattaagttatatgataagtgtgtgataataacacatttgtttttgctgtagtgatattttgactttgaccattcgatattattttaatttattatttttggcattttgtttagttatttttgttgagctttttcatttgcgttttttttagtcgttaattgtagtaatttgttttaataatgattcgtggtaattgcggatatttgtgtgctgtggaataatcttgtttgtgttttaattgtgcagtcaattgcatttattgcgaattgactgagtcggcataattggaaagaagccgaacgaattggtcaaagtccctaataataatattgtccccaatctctcctgtcctaattaaagactgttcccgtgcccctgccctaattaatctaaggcaaataagcagcgaacggcgagaagttttactatttggcgctcctggacagaacacaaggtaacaacgacatcggttcaaatttttggaggatttcggcattttatcgatctctgggggagacgataaacttttcgacttttgatattgttctctgggggagacaatcaacatcaacaatcgttctctgggggagacgaaacaaaaacgcttaaaaagaacaaacaaaaaccaattgtttgttaagttctctgggggagacaaattcggaaatttttcgacactcaagtcacctggggggtgcaaatagtcgattttgaaatg

SEQ ID NO: 105781 - DNA, 53 bp, Heterodera glycines
tttttgaatctctgcaggtccttggcaagtcgtgcaaacccatccccatcatg

SEQ ID NO: 105782 - DNA, 406 bp, Heterodera glycines
cgttttgcgctcgagctatttatcatcgggcttgtcaatccaaagcgaaacaacaaagatgctgttttgaacgaataaagggcataggttattttgaagaagtgtcaaagaacatgcagcaataagcctgcaaaatctaataagtggaaaatacatgagtatagaatttattttcagaaagtgtccacagacttttggaaaaatatatttgcaatttatcaacaattttgagaagtgagatagaaatgataaacttcacgattcaaaccaattttcggtgctctaattaaccgcgataaaaacatccgaatcaattaaatagcttctgagataataaggtttatcatataatttcatttaaaaataaaccctcaattattggtatgaacgatactttccaaacatg

SEQ ID NO: 105783 - DNA, 53 bp, Heterodera glycines
aggaaaaaaatgggagaagaaaagcacaaccaaagcaatggccaacggcgatg

SEQ ID NO: 105784 - DNA, 146 bp, Heterodera glycines
tatatcatttcgccaaataaaaaaagcatatagaaccaaagcaaaagctacctacctaattcccatttaatttcgcagccaattttctataattttcaaaaaaatacaaaatttaaattttaaaagctaaatatttataaaaaatg

SEQ ID NO: 105785 - DNA, 552 bp, Heterodera glycines
gtgttacattattacaatattatgcaaatcaaccattttacaattttggaatatttttttaggattttgctgaatcgtcggaatggaatgcacacactttgcctgctcggttcgttgtttatttgttaccaaaaattcgtcaataattaattgtaaatattttttgtcagatatcaaagtgaaggaacaaacggcagaaaatttgatcaagtactccaacataatattttatgttttttgacaatggggaaaaatgcaatttttaaatttaaatccggtcaatgagtcccatcaacggatttgttttgggttcggtgttttggacggaaacccgcaaaagccacacaatgccgtgactcgcatgcatttttgtccaagaaattcacatttttatgaaagattcaagcgtttttttaatatttgatacaaattcccatgccaaaatgtcgcgaaaaattgtttgttcgatccgtcaccaaaatttttgaaaaaaggaaaatatttaggggcaaccgcatctttgaaccccctcattttttgacgtgtccaatg

SEQ ID NO: 105786 - DNA, 294 bp, Heterodera glycines; identical to SEQ ID NO: 99762

SEQ ID NO: 105787 - DNA, 241 bp, Heterodera glycines
cattggcattccagtgttgtgcatgcgctggtgtttctgcaaattggtccagggcatccgaacacgctctggattgttcatgaatcatgttgcacattttgtgggtgtgtttgtgcccccgatggtgggtttgtcatttgctgttggtaatatgccctccacggctgttgatttacattattccatggattcggccatttcccggattgcatattagtttggtgttggtgagtccaccatg

SEQ ID NO: 105788 - DNA, 137 bp, Heterodera glycines
gaagcagtgagaaaaattcataaggaaatagtgcactgtctgactgtctggttacgcttttttaaaatttgaccaaaatataggacccaaactgaattagtaccttcaaaaatattttgaacttacattccagaatg

SEQ ID NO: 105789 - DNA, 382 bp, Heterodera glycines
tatttggctttatctcgtttcattaatctgattaagggtgccaaccccgaccccgccccgaccccgaaccccgacattttaggccatttttcggggttaaccccgaccccgaccccgacgcttccaaccccgacgaaccccgaccccgacccttaaccccgactcggggtcggggttaaatatacacccctaagaatggcattttcgtgggggaaaaggcaaaaaagttataagaaatttgaatgttgtctttgaaatgacaaaaaattttgaaattagaacattttgccaatattaataaaattatctaaaaataaatagaaaatttttctcctttctgcatttttcaggttaatatattgtacctaatttagataacatg

SEQ ID NO: 105790 - DNA, 1003 bp, Heterodera glycines
  unsure (1)..(1003): unsure at all n locations
aaggttttctatgtaaaaatgcacataattagtgaatgtgaaagtgcttattgttagaaactaatcagcgnaagaagttgaattaaatttataaatataattaatattattgtttgcgctaattgatctgcagcagcagntgatcagtgagcaaaatggggaggattaattgtccatcggcggagtgtacaaatatgaaaatggcgaccaaaattatattgtacgctaatgatatggatgaaatgccattttgacattgtaaattccctcccaaaatgccgtttgtacaattgcaaaatgaccggttcatttttcctcctccgctacgagtcctgctgaaacacattaataaatgacaaagcattcactaatgttcaaatatacacaataaaaatcttttgaaaaaccgaggcataacatggaaaattcaaacaaaaattattagaagtaaaagggagagagagaggagagagagagagagagaaaatgggtaagagtgcgagaaggaggtgagagtgagcgaaaagagagagagagaaaggggtgagagtgagcgaaaagagagagagagaagagagagaggagagagagagagagagagaacacagagagtgccgttacaagtgctgaacaaggaaaagaatagagaagcaaaggcaaggagtgtgcacagggaaaagcgagacagtgtcggcagacacagcacaatacccctccggggacgacgaaaagcgttgagaacgcaatgaatagagaaaataatgagtgagatggagagaagagagagagagaaagggagagggagaggagagagcgacagagcaaaaggaaaaaggcagacaacacgacaaaggagaggagaaaacggccatttgctgttgttacactgccgggggacgagccaaaccaagtttcaaagtgccggtgcgcagcggcgttttcgttcaatgctaatcagctaattgctcactaattaccccaaataacaaactgtcccctgatg

SEQ ID NO: 105791 - DNA, 163 bp, Heterodera glycines
atgcaacggtcaaattgaggacgatgggtcgcacacgaccattgccgtgcccaacgcacaactgatcaaagcgccccttatcactggcgaaagtgcgcttttggctcccgtcctttaccgcggcattgcgctggtcgcggatgaactgggccctttgcaaatg

SEQ ID NO: 105792 - DNA, 347 bp, Heterodera glycines
taaatgtcaaaaaaatggtaggacaattaaaaagtgacaaatgaaggaaaatggacagaagaaaagaatgaatttgatgaatccgaaccaaaaaatggacaaaaaaaaagttcaaatttctgtatgactgagaaaaaatggcatttttctccgtatttaagcggtgaattccccatcaaaatcatccattcattcaattgctgcactcacttccattcttttcccccatcggtcgaatcttcatcctgctgctgctgtacaataaagataattcccgtcagtttttttttgttttgtttatttcggttttcaaaatgtattaaattttgtgcccttttttcaggatg

SEQ ID NO: 105793 - DNA, 180 bp, Heterodera glycines
tcttcggaacaatccttggttacggtgaatcaatgggagttccaaggccgaggaggcccacatgcccacattgtggcgcaaacagacctggacgcagttccatatgtcattcaggaatacatatgggcgcacattccatctttgcctgataaagatgacgacacgcccattgcaaaaatg

SEQ ID NO: 105794 - DNA, 394 bp, Heterodera glycines
  unsure (1)..(394): unsure at all n locations
aatgtgcttttntaaaaattaagattctaaaaactaagcctgagggatccctcgccacttggcataagctaggtttaattaacattcgctcattttttacaattttacttattccaaatcctaatagttaaccaatttgatgtacattctgatttggacatttttcagaaatggctaacccaattgcaaccaaaaaacaaaaagtaaaattgtcttacgaaggccacctttaccgggaggggtcggtttagtctgaccgttttagtcagagggtcggtttagtctggttagctgttttcacccacaaattaattactttttataaatttcttttgtttgtcaatcatatacataaacataactttaaaatgtctgtttagctacaaatcaaatg

SEQ ID NO: 105795 - DNA, 542 bp, Heterodera glycines
  unsure (1)..(542): unsure at all n locations
tttttggcaaattttccccaagaaaaaagcaaaaaaaaggggaaaaaaacccccccttaaggttcgatctttttggaaattaaaaaaatacaccactaaaaaagagatttttcaaaatttcggaaaatattntagttattttgtccagttccgaaaattttcgcttaaacagaatgaggttattacaaaaattttgggttgtatttgatttgcaattgtgaagctagatttaataaaaaattggcattttttaaatgttaaatccattttttggcagtttatagcgtatttttaagtctgttttagcaaatattgaatataaatacatttttcggaattttttaaggtttaaaagatatattttggcagtttttagtccatattttggtacatatttggccattttttagatttttagtccatatttcgggcttttttagtccatattttatgtccatatttgacgttttttagtccatataatttataactctagtaataagtagggatgatatttttatgtgctaaaaactgccaacatg

SEQ ID NO: 105796 - DNA, 919 bp, Heterodera glycines
atctatctcacactcctaaatcacaacgaaggcgaatctatacccctaatttttttgaattcagtactgaggcatgggcatgtaggatagtaagaaaatctgtgtcaaaatttacctcactaacgggaatcccaatcgaaaaatttcacgaatctgaacttcttacggttggattagatgaatgcaaactcatgattaaccataagaaatgctatttgggttcactcattcacctcgatggactttatcataccaataatcagattgaccttacccctcgctcttggcttttcggttcattctcatgggaacgaatctttagcgataattgttatcttttcaaaacgctagtaacttctcgctttggcgacaaatccattcattctcctattggtgaactttttaactgtccttacgaaagaggcaattgcttaatgagtgataaaactcaattaatttgggaacctgaatcgggaaaaaattgtgaatatcgtttttatgggtcattcaatgggcgtgttcttaacaatacttggctagcagacgaaactcaattagctttaactgacgcaccagggaaatcgacagtgcgtagctgtaatagtactctgaaattaacagaacaaaacttagcctattttattgtaaagaatggtcgtcagaccaaaagaaaaagagcattgtatgggcccacgcattgtagccgaaaattgtccgatcattttaatccatcaaaaatcatcggctcaaatggaaagtatctcattttcctctcacaatcccgagcaacgggaaacagctcttggatttttgggaataatccagggaacctttccaggcttaattcaagttgtgtgtttttaccaagcagagaggaaacacatggtaagtgaaatcgaacggagaaggtggccaaatg

SEQ ID NO: 105797 - DNA, 452 bp, Heterodera glycines
tgtgccgcccccccttagccccccgctaattgtcccttattccagccttaattactccctaatccttctcccctccttattccctttgcccattttcaccaattgaaattgcgagcgttgaaaagagtcgcgcgttgcgcgacggcactttcggctgctgttcgttctgacactgcgtcaactcgaggcagacaatgcgcgagtgaatgtgcgcattgagcagtgccaatgcggcggaagcggagagaagcgcaaattgaaaagtgaagaaaagcgcggcggaggaaggccaaagggaagggagcggaagagaaggcgcggaagagggggacaaaagcgaacggagcaaaaagggaacatggaaagcgtggagaagcaattgggcgaagagcaaagcgatcaatgccggatcagaacgcctgggcgagatgtaaaacgacgacggcaaaatg

SEQ ID NO: 105798 - DNA, 106 bp, Heterodera glycines
aacggccatcattatcattcccaaagttttgggcaataaatgtgaattcttgtcgaaaattggatttttgagtttttgttcgaattcgggttcgggattcgaaatg

SEQ ID NO: 105799 - DNA, 624 bp, Heterodera glycines
tccggtgctaccagtgaaacgtggggggcccttcccaggatcgctgtagtccaaatattatccagaaatcctttattgttccatctcaaacttgggtaattaaacctttgcttgtgaaatgtgaaatgaatggaaaatacaaatgacggatcgaaatggggaaggatggaactgatcgaaatgggaaaggatggagaaatgatgaaatgaaatgataaaatgctcgggaaatctcggaaaaggatttagcggagaagagaccagagaccaaacggggaagtgatcggaaatccactttacaatttcaaaaaaaaattatttgttaagtttttctttgaaaatttttcaaaaaaaccagtaatttataataaaatgttcaaacattttttctccttttaattctcttatgaaaaattttctaagaattttttttcttgaaaaatttctaagtttaaatttttcttttttttgaaatttctgcggcgagattttgtccccgaaggcataatgccaaagaaattctcaagctttgtgccataaaatttttcgcttatacctaatttattacaatcttaattttaggtggttccattagccgttgcacaagcgggttccggaaacatg

SEQ ID NO: 105800 - DNA, 376 bp, Heterodera glycines
aaatgttttgtgccccatttcgatcagtcctcccccctcatttgattcgatcgaaagtccgtgtcggcctttgtggtccatcaatcacttctcgcccaatttggcgagtcttctcgacgagttcttccccgcctctttccgtaattgtgttcaaaaaattcactcatccttttttttattattattttctgaatgaaatactaattaacttcctcccaatttctttggttttttccctctttttaaaccctttggtcaatttttttaacacccccgcggggcatggcattgccattgattttcaccgtttccccgggcaatatttgccgattcgttaaattttaaagaatttaccgaaacatttttagcctaaatg

SEQ ID NO: 105801 - DNA, 61 bp, Heterodera glycines
tctcctcagctggttcctggttgctgctgatccgcgctcatttcatcgtccggtgaaaatg

SEQ ID NO: 105802 - DNA, 298 bp, Heterodera glycines
tttagtgcgctaggttcgatgaaactttttaaaatataagcctaaactttttcgcctgttaaaaaaggaattaaaaatttttaaaaattttattcatctcccttttgatagaaaaagcatcagagagccttatttaacttttaattaacatttggtgcgtttcagagcacgttctaaaaaatatttatgaattaattttgcaaaataataaataattaatgaaaaagtcagaatttcgaaaaattttaaaaacaacaagcgttggcattttttcaggttaagttagtcctttacaatg

SEQ ID NO: 105803 - DNA, 641 bp, Heterodera glycines
atcctccccccccccccccctccattcatattttgtctatttatttcaattgtgaactatggcacttttatggtatctctttttttcatgatgtgaactctgaatttagatgtatatgaagtaatttgtgcctgatcaaaaataacaatacaaaaaggcagcgaccagtaatatttattgaaaattatgtaaattggcgttatgagtcattttgtctaacacagggcttgacacatagtacggttgaagaaaggtgttcatttttagaaatgttgtaaaaacaaattcttgataaatattgaaattatttgatgcatcttgttatttagtagggcactcatttcttgaattttactatctaaaaatcatttggtgagatgagtcattcattttgttttgtaatatgtgtttatttttaggtaaaggcttgctgataatttccaattttaacgcttaactaatcattttgactttcgttccaatggaatttctttttggtaagttagcaatcttctttttttgtaaattaataaaatacattaggaaagcgcaaaactccgacggaaatgttacggcaaaaccaacgtgcactgaataaagcaattcgggaattggacagggaacgccaacggttggaaatg

SEQ ID NO: 105804 - DNA, 433 bp, Heterodera glycines
gtttaggcctttttccagaaaagagttaaaatccaagttttctaattttcctttgtttaaacttaattaggaattgatttgaacattgtcagaattggaaatgttcgggagctataaactggaaaagggtcataattttttaagcgaatgattttgataagctttaatttccgtttttccatcaattagcaatttatccgtgccaccacttccgccaactacgaaattcatttttttgttgatgagtcatatgagtcaacgccattggtgccatttgaatttgtgaacgaacggacaaacgaaaagcttacactgctaacagaaaaaatagatgtacagtgtatcatagggctaatgaagcgatatccaattggggataatacggtggcggatcagtgggaaaaagaaggaaattggaacaatttaaactatg

SEQ ID NO: 105805 - DNA, 143 bp, Heterodera glycines
ggttatcctgtcaaactttgttgttatttttttcttttgtaattttcctaccgtatttttttgtaccgttttactattttccctcttctctctttttacagtttctttggtcgccaaatgtttgtttggtgaacacaaaaatg

SEQ ID NO: 105806 - DNA, 534 bp, Heterodera glycines
taattgaagaattaaaatgtgaacggacgcaatgaatgagagaaaattttgcaatgctcgcctttatatagacaagcaaaaaaattccgaaattaaggggaaaaaagttgtataaaagggcgacatttcctcacttttcctcacaattcactccatcgccctcatattatattattattattattattatcgtccatcgtctacaacacttcatcacacacgaagcggacgtgcccggcccaacaacttcaatggaggattactgtttcgacgcaacggcagcagcagcggctgagcagtctcggcgtcaatcgggagcggcatcggaccttgtgcaaggagacggcctgtcaaccggcttcctggacgcgatcatcacgaaggtcaaccgctcgcctcctcagcgcttcacggatgaggtagaaaaattttttgagtttttcaaaaattaattttccccccctttttccccaacagatcagtgacgatgaaatccgccagctctgcaaagcggccacggacgtcttccgaatg

SEQ ID NO: 105807 - DNA, 505 bp, Heterodera glycines
gtttttattgttgagaaaaatttaccgctttttattctggtttttattactctaatgcttaaattaaaaaaggaccattaaagctttaggtagcagtaaattgtcattccatctgttttaagcgatgtttttaagaatttcagactatagccaattgtaaatttaaaagtaaaaaatgaaaattataatgagaaaggacatttaaaaaggatttatgggaagagagaggattcaatatgatgaatggcaagaggcagggctggttcccaggttttgaaaaaatattcttctattttcaaaattttagaagtcaagatttcgtgtttatttgctggggtttttccaaattttttgaactgtgggaggtccggcggagccgctaaaacactgctgaaattatgaatttagggtattttggaattttgaaaaataggcattttcaacttttaagcctaattatgaaaatgtaaaaagttccggaattttgtgctaaatggtcgaaatg

SEQ ID NO: 105808 - DNA, 602 bp, Heterodera glycines
tccgtttttactgaaaacaaaattttataaaaatttaaagttagaaaaatatttttccaaatttcaaaatggactaaaacacagtaaaggggtgggtaaactgtaacccaacttaaaaacattcgtaagctgcaatttttcttaaatatttaaaatttcatcgattcaacctcgaatttttgaatttctacctcaaaaaacgaatcggggtaaaaaaacgatcggggtaataaaaacgaattggggtaataaaaacgaattgggtcaaaaacgaatcggggtaaaaatgaattggccaaaaaacgattcttccctttaccagggcaaatatatatgacaaattcaaatttatttttaatgttttcttcagcaatatctatcgaaaattgtaaattttaataattcaaaatgatttcagaaattgctattgaactattcattaatcccaaaaaatgctcttgtaaattttgattaagtataattttagtgcttatatgtggaaaattttgtttaaaaaataaaaatcaataaagttaaattttatgggagattttatgaggaggcgcacgcggccaaattgtatatgcgtaggaagaggaatg

SEQ ID NO: 105809 - DNA, 369 bp, Heterodera glycines
  unsure (1)..(369): unsure at all n locations
atatatatatatatatatatatatgtaaaatttatataatctttcatttattataataaaaaaatataaanatatttttttcaatcaattttaattcaataaatggcccatatgcttacgcaaaacgttaacacgtaatcttacttttatgtttctaccagtatttcattcatttattgctcaaatatataaaaataataaatttatttataataaatattgtaaaatgtataagcaataaaattattttcaataaaaatataaaattatttaagataatttaattcgtaaataataaaaaaaataaatatattaaatatttgttaaaaaagtccatttttaaattatttgtctcacaaaaacagaatg

SEQ ID NO: 105810 - DNA, 167 bp, Heterodera glycines
ttttcactgctcctcccaatgcttatccaccacagagcatttgtctgtcactgaccaaatttatccaatgccataagcttcccgtcatttccatgcataaaacaaatgccaatttcgtattattttaggaacatttgcatttttatgctgctgtaattctgcaaatg

SEQ ID NO: 105811 - DNA, 197 bp, Heterodera glycines
  unsure (1)..(197): unsure at all n locations
agatagatcagatcagcggtgtaatcgcagagaagccaaagcgaaaggttggacgaagtctgaacaatgagggnaagggggagggatgnggagaggaagtcggacaaaaaagggacacgaaaagcgatggaaatggacccaattaagcgatgaaaagcgacattgcctgataagggtaggaacagcggagcggaatg

SEQ ID NO: 105812 - DNA, 68 bp, Heterodera glycines
ctgcttggaatcatctaaaaagaaagtttgaaaatgagaacacgcgctcaattgctcggcaagcgatg

SEQ ID NO: 105813 - DNA, 122 bp, Heterodera glycines
ttgtggatatgtttgtcacaagtacggaaggaaaaaattgggcggctgcgttaccattaatttgcttcgcttacaattcttcaattaactaccaaatcggcaattctcctttttatgtaatg

SEQ ID NO: 105814 - DNA, 624 bp, Heterodera glycines
agtaaaggaaaatccgagcattaaatgaaggttgggcaaatggtagaccttgaaagggatcgaaccctcgtctccggtgcggcgatcggcttctcacccaaatcactgttcttaccgtctctttatgtctccgttttaaagcgatttaactgcccgctggctcaatccatacatttgtcaattaaaaatcattttgaattcgtattcgagatttgggagcaatcgaaattatgtaatattttgggttaataatcttaatacataaagaataatgtcttccaaaattagcatttaaatttttgttatttttaggtgtaccgtaaactttaaaagtacccaccttcaatcagctgatccatcccttcattcattaatcaaataataatttgaattaaacttggcattatgttttttcgggaaaattatttcgcttactcggaaacttttttcattttctgtccacacttaggtaactcttttcggaaggttctcctttcttgcatttcatattttcgagattttattcttgggcattattgttcagtcactcaaattaaataaatttaaaacaaatttttgtaaccgtttttagatttttattctcgccttttcattttcataatg

SEQ ID NO: 105815 - DNA, 233 bp, Heterodera glycines
tgcgatgccgataagcgccggccttatccaagaaaaatcccagcctgggtccaggtcgaactctagttattataggtatatgaactgtctaatgttatctgcctcccacataaaaaaatacgaatcgggacagtaaaatcggccaatacgtattgggtttttggtaaaccgggtttttaccataaaaacacattaagaaaacccattcatcattcataagttgtaaatatatg

SEQ ID NO: 105816 - DNA, 536 bp, Heterodera glycines
cccttgcccaacttgtttcgtttccatggcgcaattcgatgcgtcctccgcttgaaccctcccacacaatttcccattcaccgaaacgactgccgactttggtcattcactgatcggaaaaggcatccgatggcacttttggagcttataaattgtggacccaatgtgataaggaaaagtttaattggttttgcttgggagaatcaaagtgacgaagaaggaaagacggacaaatggccaaagggacggaaattaacaaaaaaaagtgaaacgaattggccaacggggaaatgcccgcggggataatcagcggaagaaatgccaatgccatggcaacgaaaaagggcattatttgaaaggagaaacagctgaaaaagacgagctcacaatcaaagaaagtttaattgttatgcatttattattagcaaatttaaagtttgaatggaacaaaatttggaaatcttttgggttggttaaggcatttaaaggggggaggggaattaaggagaaaatgaggggaaaaaggaaaagaaatg

SEQ ID NO: 105817 - DNA, 120 bp, Heterodera glycines
ggtggccaagaaatgttccaatcagcgaaagaagtgcgtcccattcagaattacgaattcgtacgcattgctccgacggcaatttccgccgttgaggcggtcggaccgcgcgcttttatg

SEQ ID NO: 105818 - DNA, 821 bp, Heterodera glycines
ttaagatttttgactcaaaaaactgttatttgagccctaagttctaattttgtcgaattatttttcgatggcacgactttttcacagtttatgcaaaaaataaattaatttaaatcggctggaaaactattggttatagaaagtgatttcaatcacttattactcaaattcatagctaaattttggtacattaaaataaaatatgttttttaaatcattaaaaaatgaatgagcgtcaagcatattgaccatatttatttataatttatttattttaacttaaaaattttagtatgaatattaagtattttgaccaattttagtaatcaatttttaaaagaatttgttttttaatctttaacaattttgccataccgtactttagctggctgcccatttgcctgtgtctttttgctattaattaattaattaattaaaggtaaacatatccaagggatcttgtaattagctaattaattaaggaacagaacattgcgacccaatgtttacaattttttgtttattttcactcccaaacatttttctgagcatccgaatgcaataaacacaatatttcgttgcataaattgtgctgaaacttctctatgatattcacaaatgcatttagcatcaattagctaattcatttatttttgtttaaaattttatttatttatttttaattaaatttaatttattgcaaaaaaatagttgtaatattttaaaatatacggccttttcttggcgaattttagctatttgttgtttaaataacaattttaaaaagtttgccctattttttaattgccaaattcgacatg

SEQ ID NO: 105819 - DNA, 153 bp, Heterodera glycines
  unsure (1)..(153): unsure at all n locations
tttaaatgagtgtgaaanattgtgagtcaaaaaatatttaaactcagaatgaactgaaaaagaaacgacctggccccgtacaggtctattgaaaaagtctataattgggcgaaacgcaaaatagttttttttcaaaatgcaaaagcaaaaatg

SEQ ID NO: 105820 - DNA, 62 bp, Heterodera glycines
aattttttgcaaaattttaataaaataccaaaattttaaatgataggatatgaaaagggatg

SEQ ID NO: 105821 - DNA, 717 bp, Heterodera glycines
ttgtcagagagaaagtcgaagagagagacgaaataatggggaatgaataatttttcatgtataacttttttggtaattttctaatcgcgaaacaataggctaagaaaatttctaaacataataagctttcaaatgataccaagatattggatttggttaacaacgaaaaatagaaaaacttgggcgctactgtaaaagttaccgattttgaaacaaaaggggggaggaccttttgttttgcaaaatttttttaatataaaaaaccatgctaatttgttatccggggttttaaaggtcgctaatcacgaatctgaaatgtattttgactaatttctaatccttaacccgaactcgaataaaaatcgaaatttttaatttttcaaattatgattttttgttcaaatttagattaggaaatcggaattgatcaaaataattgaaagattcgtgattggggacaccaaaaacccttcttatttacaccgctgaaaattatgtcaccattcgtcactattttggcattttcctcactaatttcgttaaatattttgagattttaactaaaagttgcggccatactatgtaatcatcattctttcatgacttaggtatacgcaaatatttatttttatataaatttttgaagcttacaaaatcgttgccaactgattgcaaaagtgccgaaattctgtcttaataatttacctcaacaaaatg

SEQ ID NO: 105822 - DNA, 630 bp, Heterodera glycines
ttcaaggcttcgttttcatccgctgcgataagggcaaaacccaaaagccctttcctcctttcctttgcttcttttcctgctttcttttcctttttcccttcaatgcttttcctttttttctttgtttgttctgtgccccccttttttattgtcctcctccgaaaggattaaatgtgctgacgcgggcgcgaaacccttcacggttttacgtttcctttgggtaaaagaattttttatcagtccatggcaaaatttatgggccatttgaacgaacggagggcaaaaattaatgagaaaaattaaaataaaataaaagaaacaaataaaataaatcaaaatttgtctaattaaaaagaaatatttcgaaaatattacttattaaatcaaaatatttccgtttaattttttcttctttttcctctttttttttgtttattgtaattcatctgacttttgctttctatgttaagcacttaaaaatgctaacgcccgggggaattttccgcttgaaaaatcgatggaataaatttgcccccgggagtttatcgccatttgcggcactttgaacatggaatggaacaaaataatttttataaaggaaattattttagtttaaataaatatttgatg

SEQ ID NO: 105823 - DNA, 716 bp, Heterodera glycines
ttgtgctgtttgattgtgcgtgtgtgtgtgtgtgtgcttgttgttttgtgtctttttccgagatcagtctggccttggtcctggaccttctgtgactaaacacctgcctcggaggacaaggtgtttgccttttgccttatggctaaactaaagcctcggaggactgttagtttgccttttgccttatggctaaactaaagcctcggaggactgttagtttgccttttttccttatttgtcaatggcctagtgcgcgaaaacaccctttttgcacgaagtacttcctcgaagggcaagtacttcgtccactacacaacaccttccaaccctctgttcggacgaagtgcttcctcagagggtaaacacttagtccgctacgtccctcgtgaagttatgcctcggaggacaataactacacgaaactatgaacactagacaagcctcagagggtccttgtctaggctctctaatttgcttttcccttcccctgtgtcaccgggattcgttgagtcaatccgtggttcacagatccacccaggagcgccaatttgtcccgattgcgttcggggccaaaggtcgggcactggggtcggggtaggcagggacgagacacagaattaataaaaaatttattccgggaaatgacctcaaacttgggtaattaaaccaaaattttgaaatggtgaacgaattatcacaaattgatcacagaaatg

SEQ ID NO: 105824 - DNA, 150 bp, Heterodera glycines
tggcatcgaggtgatttttctttacaaaatttttgatacggtaaccatacccccccccccccccacctcgctggtaaatttttatgaaattattttttttatatgcattttaaaaattatcattttttgtattaataaaataaaataatg

SEQ ID NO: 105825 - DNA, 1003 bp, Heterodera glycines
gggtttgtcacacgctcctcccataggcacgggtttgtgcggggcggcaacatcaaagggatgcacccctcccataggcatgggtccacgggcggcaacatcaaaggactgcacccctcccataggcatgggttcgtgcggcaacatcaaagggctgcacccctcccataggcacgggctcgtgcggcaacatcaaagggctgcacccctcccataggcacgggattgtgcggtaaacacccatgcgaaagtgcgcttttggggttctatactactaacctttccctaaatttctacttgacaaatggttgattgatgactgttggatatattttagaccactactctcatcatatttgaatggcaagtacgtacttgaaaatcggcccttgtgcgggaaagtttaaaaatttgcttatttccaaaattatactttaaaattagcatttcaagattgtacttgaaaatagcattactacttgaaaatgggcaaaaaaaacatttgaatttttacattttttgagattttataccagtatcataaaatccaaaaatttagccattttttgggcagaatctgttaacaaattgtttcaaattttcagatttttccccgccgaactcccccccccccgctccaaaaaataggaaaaacccattttggtgaaaaatataaaaattatatttttcttatcttttcgcgtttgaattttataacgttttcgttatgttcttgaaaatcagtctaactgaaccaatgagagccctgacttagatggtttgaaggttgatctcgaggtcgttacttcggaccatcgagactctcgaggatgaataattaccctccccttttcgcccattaattaccgatttgcatattcatttatcgcattcatccgattcgttgttaatcctcttattgtgcttttattcagttatttgttttgcatttttatttctcataatgaattatcatttctctcacagaaaaaattcacaaatg

SEQ ID NO: 105826 - DNA, 195 bp, Heterodera glycines
  unsure (1)..(195): unsure at all n locations
gccgaagcatcacaaaccaatgagcagcagcaggcggtaattgaattgnaaacttgggaatagctactcgagagaaaagttgatcaagtttcaaagttatcaaattggtaacaaacaaatgattttgccataaaaaagatttgtcgcccgtgcgcatgcgtttcggtgccaacaccgccgctggcggcaccaatg

SEQ ID NO: 105827 - DNA, 322 bp, Heterodera glycines
tatttcctttttgcataaaatttgtatgccattatttttattaaagtgccagcaagttcgtcgggcactgtaaattctgtgggcaataaaacggtataatactaacttttattgattaaaaatgggtaaattcgacaaattgttcaaggattccaatttcattgtcgatgagtaaaaaaaaaatttattattgtatagcattgattactgtaatcccgtaattaacgttttcggaaatatttattatgcaaggctagtgataatatgctcataatgtaaattatccatggttttattgaatgaattcaacaactagtcaatg

SEQ ID NO: 105828 - DNA, 791 bp, Heterodera glycines
atcactgggactcaattctcctgcatttcaatcactgggactcaacccacctgtagtgatattttgactttgaccattcgatattattttaatttattatttttggcattttgtttagttatttttgttgagctttttcatttgcgttttttttagtcgttaattgtagtaatttgttttaataatgattcgtggtaattgcggatatttgtgtgctgtggaataattttgtttgtgttttaattgtgcagtcaattgcatttattgcgaattgactgagtcggcataattggaaagaagccgaacgaattggtcaaagtccctaataataatattgtccccaatctctcctgtcctaattaaagactgttcccgtgcccctgccctaattaatctaaggcaaataagcagcgaacagcaccgaacggcgagaagttttactatttggcgctcctggacagaacacaaggtaacaacgacatcggttcaaatttttgaaggatttcggcattttatcgatctctgggggagacgataaacttttcgacttttgatattgttctctgggggagacaatcaacatcaacaatcgttctctgggggagacgaaacaaaaacgcttaaaacgaacaaacaaaaaccaattgtttgttaagttctctgggggagacaaattcggaaatttttcgacactcaagtcacctggggggtgcaaatagtcgattttgaaatggaaaacttggaacggacactcaatcatactcgtttgactagacagcgagctcaaaatg

SEQ ID NO: 105829 - DNA, 133 bp, Heterodera glycines
attatttgtttaaaattgtcaggacaaaattctcgaattggtcgagagttgctcccgactgctcaattacgtgccctacaaggagctctcctcgctgaattcacatctcaaaacggcgatggttgtcacaatg

SEQ ID NO: 105830 - DNA, 52 bp, Heterodera glycines
ccttttagtgctttatcaacaatttcaatggccgtgccaactgcttcaaatg

SEQ ID NO: 105831 - DNA, 175 bp, Heterodera glycines
atttgtataagtggtgttgtcgcgttttcttaggtcgacattgcgcgcttgctcctttcacgcggtgcaatcgttgaacagactgatttctcgggtgcattttgtctctaattgcccaaaattagtggattaatattccttttttcgacttttaggaacgagatttgcgcttatg

SEQ ID NO: 105832 - DNA, 414 bp, Heterodera glycines
aaaagcaaaagtaataaaaaaaatagagcccataaaattttctcaaaaatgccgacccctcctttgtaagacatttaataatttcatttacaattgaaatgtaaccaaaattattatatattttttttgactaattttttgtgttttctaactacataaaaagtgttaataaaaatgtttatttgtccatttttctgcctattcgagatttttgtgcctaaaaatggagtccctattggtcacagttaagacattttgttttctttttgaaaacattggcatttatatattacgccaatgatttaaaataatgtgattttttttttcaaaaaatcttcggacaaataacaaatacttaaataccccataatttaagctatttgccttttttaacattattgggccaaaataatg

SEQ ID NO: 105833 - DNA, 561 bp, Heterodera glycines
tattacacattatttagttttcaacgagaatagaacgggaccggaatcggtccgggaattcccggttttcccatggcccggtttttattaaaaaaaattctaaaaattcccggcttcaacttttttcgtgccaaaaatggttttttttttttggaaaattcttcaacatatgagattgccttttatggttattggacagttttttttcttaaatttagacacaaaaaaacggtgctaaattttatggaagcaaaactttttggctacttataattttgggcttttacgcgtccttttttcaagaacactatttgacggacttgctcagttgggccggcacgggttgggctccagcatttccactataactttttttctctgtcttccaaatccaacatttttggtatcattcgaaagctcttcgcatgctctattagccaaacaaaaagcgaaaagatttttcaagcctggaaaaaattattaagaaaaaacttcaaaaatttcgacttttcgtaattgtctaagctcgaaaaaatggcttaggaaaagcatctaaacatg

SEQ ID NO: 105834 - DNA, 53 bp, Heterodera glycines
  unsure (1)..(53): unsure at all n locations
cttttgcatttgcgaatgctgctcaacaantttgcaccgtttttctccaaatg

SEQ ID NO: 105835 - DNA, 338 bp, Heterodera glycines
taatcatttgttgtttgtttactacttaatctatccgttcatctgactgcattgcttgttttcgacaacattgttgatcaaatttcccattattaccccgtgaatgcgtgatcaaatgatcgcttatatgcagcaaaccacatttatttaggcatattatatgcacaataaaaacaaaaatttttttttgaaaatatgttcgaatccgggttaggggttcagaatttgtcaaaaataatgccggattcgtgctcagcaccataaaatagcgctagaaaaatttttccaggcttttcaaataaaaaaaacgggaccagtaaactagtttgccgcaaatg

SEQ ID NO: 105836 - DNA, 116 bp, Heterodera glycines
ttttcccttcttcggttttttgcgtccctctgtatttgcacacacacatatatagatataaatatgtagataaaaaatttcttcctccattctactaaacccccacccccaaaatg

SEQ ID NO: 105837 - DNA, 527 bp, Heterodera glycines
ggtccctccccccttttgttgttgataaaattcaaaaccgcccttctttagagtagcgccgatttttttgtgctctattgcttatgagagtccaatcataattgtttttccttacttgatcaatcaatacctacattcttggtatcaaaagaaagcttatttgtcccgggaattcataaatccaagaaaagagcaaacactgacaacaagaaaaaaaatacaacgagaaacacttaaatttaacttatttttttgagtatattcaaaaattatttttggtctgttgcttcgagcccagaattttggtatactcaaaaattctataggcttagatagctttaatttaatattaaaaaagtaggtattgattgaccaagttagaattatggccaaagaaactgaagattgggctcataaaagtcgattggactcctaaattgaaaatggagtcttggttttatgaattcaaactactttttcctgtatttaaagcatttttttttgttgttaaaggtccaactggaatg

SEQ ID NO: 105838 - DNA, 224 bp, Heterodera glycines
gtgttaaagcgcgtgttgaactgtcaacgagccgttctcgtcgcgatcgggatgagcggggccggggaattagtcgcgagaatgaggaaaaatcacgcaaaagggaacataagtcacccaaaaagaagaaaaaggagaaaaaacacaaacggaaaagcgaaaagtatgaacttttttaaagattaaaactcacaaagttttgacggaaattatttttaggaatg

SEQ ID NO: 105839 - DNA, 57 bp, Heterodera glycines
ttggtcaacgaaaaaggatcactggagcaaaaaaaggcaaacattaactaacgcatg

SEQ ID NO: 105840 - DNA, 1003 bp, Heterodera glycines
tcatttgccactaaaatgcctcaaaaaaatactcatttggaatgaaaaatcctcatttttttaaacatcataaaattgcgaacaaatcagttaactgtcatatttttcgtttgaaacaatcaaattcatcaatttcttgtcatttataagcattttgtggattccaaattgcacttgatctcttaaatttttttgcttttaaattgctctttttgtggcgcggttttccaaaaaactttttgggaatattgggggagggggtccggcagtgccgataggcgctgccggaaaagatttgtttgttaacaaattttgtcaaaaaaatgattttgactgaggatttttcgaaaaaatgtttaagatttgaagaaaaagttcgaatattttgccaaatatacctaatttttaaaaaatcatgcgttttgtcacttttttatcaaaagaccacaaaaatcctcaaatttctcaaaagaccacaaaaatacgcaaatcctcattttccaaaaaattctctttgaccctctaaaagacaacaaaatgagtaaaaaatactcagatatagaaaccctgtattatggtgattgtgtccatctaaaaatgaattggtttgcttaaaattaaatggaaaaataattttccaattgtattttgtgcccaatttatcggtgccattctttgctcattgatattgcgctatttaaagaatacaattataaaaacgtttttggttttcattaagtatttattaaaatgtgcatttttgctaaaataaaaaattcaattattttcattgctaatgatatccaataactaataatattataacaccttattcgaagcaaacttacgctaccaaaaaagtaatctatttaattctgtgttgaatgtataaatttaatttacgcctttttgccacttttcattgttacgtcgttgtaactttggcactcgtgccattcattttctgtccaaaatcattctatcgttcccatttttttcgatg

SEQ ID NO: 105841 - DNA, 787 bp, Heterodera glycines
ccccccccccctccctctctctctctcggttggaccgcttaactctttggccattatccggcaatggagaagagacttttggcgctgtccgccctcaaaaaaagagccgaaatttgttgctacactttgtttttggctttttgttggcttggccaattcaaactgcttgtgctttctcacggccgccgtttgaagtgctgcgcgttcttcaatcagcagtaccaccgttttcccccatcgtcgccaaatgatgcaaaatgttttggacagacgcataaaaaacgcgattggggcgggcacttcgctttgtccgctgtttcggtgggcccattgatcgcccaaagctcaaaaaaacagcaaaatgtagcataaaatggagcggatgttcgttctcggcatcagtgttctctcagcttctcctccgctgtcttttcttctcccattgcttttggctgaaaattgagccaaaatacaaagaattaaaatttcttatacatattttgtttattttaaactgctctttcaatgttggcacattatttagagcacacaattaaaaagtggcatttgattagcaatggcttaatttaatattttcgataatcaaaagcactatggcaaaggagagatttcaatgagctctttcgattttcggatcaaaatcttagcattaatgagtttttaatgaggttcccctggtttaaaaaaatctgatcggaatttcaaagcatttaatgccgatgccatcatacaaattccaagaaatttcagcctgattctccaaatg

SEQ ID NO: 105842 - DNA, 186 bp, Heterodera glycines
ttttcagggctagttgattcggcaggtgagttgttacacactccttagcggattccgacttccatggccaccgtcctgctgtctatatcaaccaacaccttttatggggtctaatgagcgggcactttggcaccttaactccacgtttggttcatcccacatcgccagttctgcttaccaaaaatg

SEQ ID NO: 105843 - DNA, 637 bp, Heterodera glycines
ttgatttctgccaattaaatatatttttaaatgaagttaaatacattttaaaataatatattgtttttactatttagatacaaattcgagaatgtgcacgtggacatcatgcacagctgtgccggaggagagccaaaaaaagtgcaattgtttatttggaaaattaaattttataaaaatgtttgttatatactgagctaatttttacggaatgatccatcgagattattcccaaagtcacccgaaaatggatgatttttgaccgtgaccggaaaatcggtcagtggaaaatgcgtcagtggaaaatgcgtcagtagaaaatgcgtcagtgatgcaaatttttaaaataaaattctatggcattagtattgtaatatagaagtaaacttctataagaaaatcattctcaattgcgaaccccggacccaaactcgaacaaaaaatcgaaagtcaaaattttcgaaattagtgtttttcttcaaatcggtttaaatacacagaaacaaactgaaatacatcaatcctgcaataggagatcatttatgccgtttttgaacaaaaaatgcttaattcgaaaatttagacttgcaacttttttgttcgaattcgcgtccggggttcagaattggccgaaatg

SEQ ID NO: 105844 - DNA, 298 bp, Heterodera glycines
  unsure (1)..(298): unsure at all n locations
aaaaaagaaaaaattaaattntcgtacaaactcacgtttaaaaacccccgaaatttacagaagctcaggccgaccttgctcaactggtggccaacgagggcataaaatgtccccaaaccatcaaaacaattgacggattactgtacccatatttttgtatttcaaaaaatcattcattttatacactgtgattccatttttacgcaacagctatgtagactgcagttctacaaattgccaaaaattggccattaatgaccagacaacagaaaatggcgccatttttggccaccaaatg

SEQ ID NO: 105845 - DNA, 214 bp, Heterodera glycines
ttgtacgctttgctatttttaatgctaaataacttttcttattataacttaattataaaaatttcttaattaaaggattaatatctaaccaaaaatctggaaattcaaaaaaaagagaaaataaatatttttctaattaataaaaattcttaacaatatatatatattaaagaaatatagaattttgttttattttttaatactttttagaatg

SEQ ID NO: 105846 - DNA, 406 bp, Heterodera glycines
ttttgttcgaatcgttcgctttatataaatggacgaaggacgatttgtttatggccaattcgttttattagtagccaaatttttgggccaaaacgcgaaattcaagatccaaccgacgaatttcgaatattttttgtaacgtcaaaatgtgccacaataatttagtttttctctattaacagagagacaaagaaagagtacatcaaaatgagaggtatttttttctctggcactctctatttattggttcatctctcgttttttgaaacgctgtctaagtgtataaatatgcaaaaatttgcagtaatccatcattattttcttcacttacaaattctgccttctgtgactgttgttcgcctcccctttgctcatctgtgacgacgacacttcgtgaacgaacatg

SEQ ID NO: 105847 - DNA, 180 bp, Heterodera glycines
aacaaatcagcgagaaaattctgtgtgaaaagtcaagagcactgacagttagagaaggacaagaaaaaagtgatcagagtcttactctgtgaaaaattcggcgatacattgaaaggaaagttggcgatctaagaaataaagtgataggaaatgttttaagaatgttcagagtcataaatg

SEQ ID NO: 105848 - DNA, 242 bp, Heterodera glycines
aagaggagcgggaaccaatcccgcctcagctgggccaagccgcatttggccaaagcccgcccgaaaaaaagattggcgacaaactggtgccgttagcagggggcaactgcagccaccaacaatcggtctacgagcgaccaatcggtctacgagcgaccaacgagcacgaattcgagaagctaacggcaaactggtgccgttagcagggggctccagctcaacatttcgagagacgacaaatg

SEQ ID NO: 105849 - DNA, 142 bp, Heterodera glycines
ttattgatttatgctaatttttttaagaaaaaatacgctttttgggggccggtggtgccgataggcgccgccgggggaatttttttttatgaattttgttagaaattagcaaaatttttcagaaatttcattcttttggatg

SEQ ID NO: 105850 - DNA, 66 bp, Heterodera glycines
tttttaattacatttagatttaaaactctatatataacttttaattctgttaatttaaaaaaaatg

SEQ ID NO: 105851 - DNA, 722 bp, Heterodera glycines
  unsure (1)..(722): unsure at all n locations
gattgtttaaattggataaaatgatgcgtaattttgaaataactttgacattacaaaatcattaaactaataaggaattgttttgaaaagtcncaattaatattcattacatccatataatggaacgtacgttttaaactctatttaataaacgtaatccggcggaaccatttagttgaactcacgccattttcgtgggtagtgctaatttgaaaaagtgaagaacggcatgagattttaatgagcgggtgggcgccatgaaaagccttttggcatttttcttcgctttgtttcccctgaatttacctagcctttatctgtgtccattttgcgttaaccttttggctttcattggccttaatctgttttttcagcttccacttaattcattttttaattaaaaattgaatggaatgttaaattgtcagttttgcttaataatacaaataatctttgtgttaatttttaataagcaatcaaagatttatttaatgttatcctcaaatgccagcagacgaataaaataaaagacaaaatgtaaaaaacatctgccaccaattgcttcttttcttctatttactaaatttatagcctttttaaaactaattttttataaaatttagaattgttcaattctttttgccaattccttccaatccaatttttgaatgaacattaatagttttagaaaaggcattaaaaactgaactaacaccaaaatg

SEQ ID NO: 105852 - DNA, 818 bp, Heterodera glycines
  unsure (1)..(818): unsure at all n locations
atttaactaattaatgttnagnngtggaaatgttnaaatnagtaaatgagntggtgganaatgtattaaaattgnnaatggagaaanaaaatgnnaagaaaatgtttgaanaggtnaaanngaatntgtttggnattgtgtgtaatgtaaaaattgaaagngnaaaaattggagaaaatttanaaaaaatanatgaaaatttntgnagaaaattaaaagaaggnaaaagnattgaagaaatagnanaaaatatgaagaaaantgttgtaaatanagaaattgntanaattaatnttgaaatttttgaaaaaatgnngnaaaaaattaaaaaattgnnatttntngatggaanaagnaaagaaatggtnagagnatttgttgganatttattggtnggaaanaattttttgangaaantngnaagtaaanttttatagaaaaaaaataaanaaaaataattagggttanttannganantngggnagagaatanntggggatngggtaggaaatnnngganaaaatttgtnagggatggntggaaaaatttgaaaataatatngggaaanaanattntcatnagtaagganatttttngaaattttnataaagaatngaaaatntttgaaatagaaatttttttacacaaattcttagaaactaactcatctaaagacactctcatccgatttggagtgcaacagtggacattcggcaaatcccccgagtcggatcggggagtaaccctaaaaataattcattaaatccataatttatgctaaaatatgtgtccaataattaagcacacattaaaaatg

SEQ ID NO: 105853 - DNA, 117 bp, Heterodera glycines
gaggagggaaataatattcaaatggaaatgcaaaagactaataaattaattaattttaaggaacattcgaaattcgttgctgagtcattgcttgcgccgaacattcacaacaaaatg

SEQ ID NO: 105854 - DNA, 255 bp, Heterodera glycines
agtaataaaatcaactttttcaaattttgtgagttttaaatcccttccctaataattactaataatggaattattaatttgaagccattttctcggcaagcctatcatatattgcttatgtaataaatgtttgttcatctgaataagtgagacgacaagaaaaactgcatgaatatccaattgaattgctcattcatttttcattccgatcaataaaaatataatattttttttatattcctttatttaaaaatg

SEQ ID NO: 105855 - DNA, 262 bp, Heterodera glycines
aaagggcgggggatggcaaaacgccggcccattgatcggcttgaagggtgctaaaaaaagacccaaaaggcagtgacgggaggacgaatggcgcaaagtgttgtcgccgggaggcgtttgaagtgacgcggcattccggcacggaggtgggccaacaaaagggggggggtggggagaaatgcccatgccagaacttaaaagcaaagccgagtgcaccgtgaaaaatcatcgcatttaattaaatattaaattagccgaaatg

SEQ ID NO: 105856 - DNA, 1003 bp, Heterodera glycines
ccgtatcgtttcccttccccacgaaaattttattttaaaagaaattaataaacaattttcaaaatttttgttatttattgtttcccccacacctccatttttcgaaattaaaaaaaaatgtaaaattcaaaggaaataaaatgtttgatcattgatcatcatttgccggggttggtgagcgccgccgagaacattttgaaatttgagtgcgggagttcaaagattcgttccttaaaaattcaaaaaatgcaattttgcattctaaaacaaaataggcagtcaattagtatagttgtgttaggtaaattctcaccgctacagtgtctcatttcgtccgtttatttgttatttaaaataatgcttgattggcattttgtttgttttttattttttgtcaaaacatttttctaagtgaaacaagtgcaggtgcgtgccatttgcgaacacaatttcttcatgttttgtaaacaataacatttcttagtctttaaaaacaacaacacaatcaacattaaatacggttaaatgttaaatggactagcttttttgggtccaatgaatggccattctcaatttcttaggccatagttttttttttcattttcgatcgattcctgcgttcttggtatcagtcaaaggcttaaaatttgtagaaggattcttttgtaataaattctgggctaaaacagcagacaaaaaatatcatgaatatattcggaaaaaccccagaatttcgtatttttttttgtaatttttttcttaatgtcaatttttgctattttcttgcatttatatgtaaattaaccagattttaagcttccatttaatacaaagaaatagtcactgtgaccaaggaaaaaaatggtctaagaaaatgaggatggtcattgattggacccataaactgaacttgagccgttaaatgcggattatttttaaatcgtttttaataaaatataaaactgtcaataattttgttgcccattttttaagattgctaatg

SEQ ID NO: 105857 - DNA, 253 bp, Heterodera glycines
aaacataaattaatttatttaattaaataaaataatttaaaaattttgtttagtatttactgaactgcgcaacaatcaccaggggctgaccaccaaaatagaaaacggtagaaaatattatttattttcttgaaatgcgctttaggaatgcgcgacagccaaaatttgttgtccaacaaattggaaaatggtgcaaaataatatttattttaatttaatatttttattttgggaatgcgcgagaatcaaaatg

SEQ ID NO: 105858 - DNA, 798 bp, Heterodera glycines
aaaatgccaatggccaaattatggccctatttttccagcagcgactgacggcacaaccgaaaatggcaaacggaaaacgcttttcatgcactctttgcacaaagagctttgaccggccttcatgcttgaaaagacatatgctcatccacacgggcgaaaagcctttgggctaaacaaagatatagcccaaagtgtaagcgatggattaaaattttgggatttttttcacatcacttttttgtggcgcactttttcaaaaaaatttgtgaaagtggacggggtccgcgccggaaaatttcacaaattttgaatgaaatctgcatgaaaaaataagtttaactttaataaaaatgcgggattgcagactgggatccagcaaaatccgttttttcccgtgtgctaatcccgacaaaagttgtctttcagatgcagaattaaaaatttaaacaaattttttcgttgtattcgataaaaaagtacacattgcacttttttgcggcgcttttccaaaaacttgtgggatagactttcattaaaaatcctaattttgtggattttcggaaaaaattgataattttctggttttatgaaaaatttttcgaaaaatttgtgtttatctttagtttttatgctctaataaaacacaaattaaatgattttcaaacattatgccagtttattaatcatgaaatttaacagattgacgattttcccaaaaagcctcaaaattctaaaaaagctcaaaatcctcatttctaaaaaacgctcattgcgaaggggaaaagtgaaggaacaatg

SEQ ID NO: 105859 - DNA, 1003 bp, Heterodera glycines
aatatagcttgattagcttaacaaataaaaataaaaatgctaattaaaatattttttatactgatcaaaatgaaatatcggtgaaataaatgctatatatataacagtttgaagtgcctcatatccttaattaaaaattattaattttcattacggaaattcattacctaaatatcggcggctaaaaccatgagcagaaaatcttcaaaatcttaaaataagctatattataaaatgcacttactgataaaattttacggatattaatgcggcctgtggcacaaacatcgacagtacgaaatgaaggcataagccgctgaagcataatgcacatatgcataaagtcgtcaaacaataaacaacatgaaaaggtgacgaagtcaaaaatactcaagaaaaatctaccggtacgcgtccgatcgaatcggcgcagaagaatttgaaaaaatggcgtagtaaaattgaagcctgaaaagtacaataattttttttaaataaaaaataccgtattgggctaatgcattttgaagctgccgcatagacaaaaagccaaggttctcgctcaatttgacgaaatcatatttccaatcgtttacatgctgtaaattcagtaaacaacaataaattcatcatttcctacattccaaagcgccttaaaatcttcatagccgacatatccatttcttaaagtgtcaaattggactactaaaagacggcatgtgtcgagattaaacggccgcgatgtcccatttgttagagcgcgctgcaatttaacggctgttaactgtccagaaccgtcgttgtctattttgttgaatttttgctctataaggagcgaggctgtggattttctatccattttagacaatataatctaaagtttccaaattattccgaggttttatttctcgaaattagaaggttataagcaaattaaaggctggcatttagatttagaaaaatatgagataactacacatataatcaggtttgattttaaatg

SEQ ID NO: 105860 - DNA, 457 bp, Heterodera glycines
ttttcgcatgagctaacgtagtataagtccgcgtttctcctcacaatatattgaactcgaatggagaaaatatgcaaatcataccccacccacaatgtatgtgatcgtgagtttataactttcctttcaagtccagaccaacaccccccccccccccccttctcccacttgtcgcgaccgctctcaactctctcttgccccactttacatagtttcaatcagagtagacgatgaaaagtaacgaatgacacaacaaataaaaataaaatttaaaaacgaacgagtggatagaaagaagagagcttcggatggagcttgaaaaatgatcagaaaagaaaaccgtccattactcacacacataaaaatcgatgctcaaaattcaacgctcacatttaaaaaaaataaatcatagatattatagaataataaaccaatctacggtatataattcaacatg

SEQ ID NO: 105861 - DNA, 862 bp, Heterodera glycines
aatactttattttctttttagatgatatctgggcccaaccaaaatcaccatgtgacagagcttttgaatgatttatagaatttagtaaacaaaaaataaattatggcaactaaaattttgctcagacgcagtgacccccatcgatttgtacaatattataatatttttattcttatatatttcattgatataatttaaagaaagttttaattaaataaaataattttaatatttttgttttatcaaattcttacaaaattgtagtcaaataaaactaaataataaataaataatgtaaataaatttcgatctgctgattgtgtattttggacattcgtccgtcgcaactaattttgtctttgctgtgagcaaatcttttgcgcgtatttcttttttgttttgtgttatttcttttctttcttttcggcgtcccctcgggcgccgatgctcccgcaaattggtcccggaacattgggcgatgtccgcgcagtccgtccgtccatcggtccatcggcgtttcatctgtctgcgcggcggtgttcgctgtgttctcttcgctcacaaaggccaccttgggggacgagttcattagtcaaatccgcttcttccctgctcacccccccttttgacgggttcttctttcgccggccgatgtgttccatcgcaacgcacaaaattcaaagcacaaattcggcgacgactgcggcggcgattttcatttggcgtaatcgcgtttttgcgttgctaatgaggcttaatcgctttttattaatggagattggattggtcaaagccggtaatttttgattatgaggtgaggctgattgagaaatgatcatcacatagcagcagacaaacgatg

SEQ ID NO: 105862 - DNA, 628 bp, Heterodera glycines
ttttccaatctataacgttgaaaagagaatccattgaatttataattcatattaagcatcaaacagttgaaacctatctatttattgaattttacctgaaaattttcgaaaaatttttggtatggaaatggcctaaataccttagtatggaaatggcggtatggaaacggtggcatggaacggccggtatggaaatggctggtacggaaacggcggtatgtaaatggcggtatggaaacggcagtatggaaatgggtcgatcccatcttatagtattcgctgacccacaaaatgtccagcccacgaaatgtccaagtctcgaatttgagttttttattattcagatgggcctaaggttaggcaaggggtaatataaagggtatattcgtattcagcgaccccgaaaaccttaaaaatcctaaattagactcattttgtttttataaattttgaaaaattttggacatttcgtgggtttttactcttttggacatttcgtggcttggacactttgtgggggtgccatagtattaccgagttttgtcctgcttcgctcaacagcacccggagtcctgttaaaaaaacaaaaaaaattaatttaggctttttggttattaatgtaagaatg

SEQ ID NO: 105863 - DNA, 82 bp, Heterodera glycines
tttggcaatgcgaaagtgttggaggtgaacagctgagaacaaatggaaaaaaataaaatgaatattttacgtttttagaatg

SEQ ID NO: 105864 - DNA, 266 bp, Heterodera glycines
cccccccctcccccgccactgcgcagtgcgcactctccccccccccatcgccggagggttcatcagcagctttttgcagtgccgccattgttgttatcccgcgagaatgtttttcttcatcccttcccatttatcttcctcttccaaatgattcccacccaatttctctcctcccccccaccaatcgcttctctcttttctttttttgttatgttcaaaatgttttccgattaagcaaaaagctgccaaaatgacgacgacaaatg

SEQ ID NO: 105865 - DNA, 96 bp, Heterodera glycines
ggttttcaataaaaattttgggtaaatatgtaaaaaaatgcaattttttagacaccttccgatgaagcgagacgttttttcatttcattggtcatg

SEQ ID NO: 105866 - DNA, 400 bp, Heterodera glycines
tccttcatgcttgctccttccactaaagatcaaggggatagagccgtctagatatgtataacctaatgggctgaatctttattgcattaatttgatctttttcgaatcttatttttgaaccaaaattaaatcagaggtttctcgttgccataagaattttgtgagggctggtggtagagatcgccacaggagaatggggtaatataatgaaaggtagaatttttttttgaatttttaaaagtcaaacaagggcttgcgagagcaaaggtttgatcgcaaaaatcaaaaaatccttcaaaaaaccacttaggtcaatttaaaagaaccgagaaaaggcctgctttaccattaataaaaacaaaatgaaaaatccactcttcccagtaatactgaattcatg

SEQ ID NO: 105867 - DNA, 1003 bp, Heterodera glycines
tttccaatttttttgcccattcacatctgcctccgattttgattcctttgttcacactttctccgatcgccatttccattgggccgtttttgcattcatctcattttttccctttgtttggcatttttctccccgccgatttttgtacccttcggcgtcgctcttttgcatcttaatctttgcccccccccaggggaaattgtttttggtacttaagtattcgattatcgtctatttggcacacacacattcacctcttgctcttcacttttttcactcctcaccatctttttctttttgctgaatcattcccaatttttgaccccctcaataatccttatcgcccttcccttcctccaattttcaccatataatccatcaacatctcgcatataatcatccaccaatttttgaccattttatcatcatcatcaccaataaacattttgtcggaaaagtgttgaaagggtcagagggcaaaaaaggggggaaaattcgctcgggaacgaagtgaccaaggggagccaaagccccgagaatcgaagcgggggacaatcccccgcagagcagcagcaaacaaggacgggagccagttcccggcggttgacgcagttcgcggccggaagtccaactcttctcccgaacctcaaccgggagcgccggcagctcttcaaaaagtcggtggtgccgttacagcaacaaccgcaaaccccatcttgtttgtcctccccaccccctccccagttcactcccttgggcacggacccaacggcagcagtagcagtttcaggaaattgagtgaattgggcccgagggacgggagagaaactcccgcgcacagaccccctagccgtcagcgccggccgagtttctttgccacaaacaatttggtgccgttagcagggggaccagcaacaacaccccggtcgcaaaggaccagcacaaccaccagcaacagcacttcggtcgccgaggaccaacacaacgcatttgaacaaaaatg

SEQ ID NO: 105868 - DNA, 1003 bp, Heterodera glycines
ttaaatggtccattttagtgaattacctaaaataaaataaaattaatctttatttaattcagaaatagaaataaaatattcgttttatgaaatagaaagttatgctcttggatattattaaattaaataatttgatggattaaaggcctagagctaatttcaggggagcttattaatagaatttagaaaatggccaaattggaagaataatttgctttttctacgcccaaaaattattcctttgtattcaaacaatgacgcattcgaattgatttattgaattttctatggtatctattaaatgcaatttaaggacggactctgtgagtcgagtgagagggcttctttttatttttagaaaaaaaacctatgattttttcgttttttttttaatttgccgaataggattttctccagatatttttacatcaaatctttgattccattttttcaaaaaaaaatttttataattttttaagaattttttttttattgaatttgtccgcaaaatgtccgtccttaaatttcatttacacatcatagaaaattcaataaatcaattcgaatgcgtctttgtttgaatacaattaaataatttttcgtgcagaaaaagcaaataattcttacaatttggtcatttttctaaattctattaataatctcccctctaaaattgaaaaatgagcatttaatgcctttaatctccaccattttctttatttaataatatccaaaataaaattttgcatttcatataccgtacttcttcgaataaagccccagtggctctattgttcagtcccttcaaaaatggggctatattcgagggtgggaaagttttgttcagtcccttcaaaaattggactatattcgagggtgggactgttttgttcagtcccttcaaaaatggggctatattcgagggtggcgttctattcgaggggggggggctctaatcgaagaagtacggtattaataatatttttaaagaattcacaaaatg

SEQ ID NO: 105869 - DNA, 483 bp, Heterodera glycines
  unsure (1)..(483): unsure at all n locations
aagagaaatgggaccaacaaagcagggggaccacnagcagcaacaggaggggacagggtgggaaaattgaaaaatacaaaaaaaaaaaagtagaagatgcaggccctgaatttctaaaaattttgaaaatntaaatggataagaggcgataatacggtagcaatgtatacacggtaagatggtattcaaagtcatagaaatgagagaaacagggggtgagaaatttataggaaggacctgctagaatagcaggaaggctgttggtttaagaatattacgattaattcggtaagaaggaaatcatttttatcaagaagtatagtaggcaaaggcgtactgtatatattggtacaatacaacattagattaatacatggtgtgaatgacattgggcgataaaatgaatgatgaatattggttgcatagtgtacaagagcattttgtacagtatcccctgtttttgtaaatatattttttgagatg

SEQ ID NO: 105870 - DNA, 485 bp, Heterodera glycines
tcacgacatttctttaatttttttctttttccggggcggaggactcttcttttcacataaatatccaagagattaacccattggaaagtcttaattgttttgttcaattttttgccgtacaaaagtaatgccccaaacattttacgcacaaataactcaattttatatagaaaaaattctgtaatagggtttggaaattttttttaaattatgataaataagcctgccagaaagagaaaatttttataccaaattcatttgggatggttagtttacactaataccagcagagcattagaccgtgaaaaaattattagactgtataataatttgtcagtattaatttagtttataaaattcacttaaatatagattgaattaagcacccgaagtaaaacgggagtgaaaaattttttcaaaatataaaaaataaaaataaaaaattcgcttatatgcaaccacgcgaaaacggccacgcgaaaatg

SEQ ID NO: 105871 - DNA, 338 bp, Heterodera glycines
gcaaaatgttgtataaaaaagtggatgcgtcaagtgctgaggtggcaaatgcggggctggacttcttcaccatacccccaacgagctgcgctgtgtccaactccagctacagggagtacctgacgctgaacccaataagctctaggccctttcattttaaggcaggtggttttcacatacaatagcagacaaatccgttggttcagatccacccaatcaccagctatgtagaccttagcaaggtgtttgtgtgcacagagttcaagctcaaaaaagtggcagatgatggggttgtggttgatgtgccggcaaacgcagcggtcggccttatccaaatg

SEQ ID NO: 105872 - DNA, 368 bp, Heterodera glycines
ggccagggatggacgaaatttcgtttcgttttcgtttcgtcctacattttcggcactttttgagtttcgttttcgtgtttcgttttcgtctaccaaagttttttcgtttcgttttcggtttcggttttcaaaattttgtttttcgtttcgtgtttcgttttcgtcagagcaaaattagacgaaaaaagtacgaaaaagcactggtaagaataggccccgttggtagatttttcattggcattccgtttttttccaaataaagggggggggggggcaaactacagaattaccatttttcttagtccgttttttccgtgttataatttccgttttactacacatcaaagtcttttttaggcctattaatg

SEQ ID NO: 105873 - DNA, 580 bp, Heterodera glycines
aggctgtgcaggaatttgctgtggcacaaaaggagttgcggctgactgcgcaaagatcgggtgggcgaaaccggcaaccaccgggggcaagagcttgccacgtaaattgcggattcattgcgttagttataaaagctttaaattcataaagaaaaattgcactaaatcaaaattattattggggtgagaataactttcgtcatagatgagaattctgtaattttttgctaatttttaaaatataatatctcgggaaattctttgtttttttacgattttaaactctacactcgaaataattttaaaaaagaatcctgaaatataagtaaaccatttatatttgttagggctacatatttgtttttatctcatggcacattcagatttgatcaaaaaaaaagttccgcggaaggcggatttggtatttcctatcagttgtcttccatgctccaacttttcaatttaaaaaaaacgcaagtgaacattatgccaaatcgaaattggagatcacatctttcgcttaatcactttaaagccgttctctttgaattttcactttcctgctcattttttgataatg

SEQ ID NO: 105874 - DNA, 143 bp, Heterodera glycines
atcaaagcccactcctacagaccgctgaaatacatcttggtgtttgtcaatggccaatggatctttggcatgttgtattcaggtgtttatcatcttgtgcatatttttttttcatttttttgtttacatttacaggttccatg

SEQ ID NO: 105875 - DNA, 80 bp, Heterodera glycines
tgtgaggagaagcgggtacaaaggggtggcacaagttcagctagttcagcagaagaaaaccaacacactgaagaccaatg

SEQ ID NO: 105876 - DNA, 95 bp, Heterodera glycines
attttgacttttggtatttgagcaaattttactaatttattttgactaatattttttttattttcttttttttacagtcaatttccaataaaatg

SEQ ID NO: 105877 - DNA, 82 bp, Heterodera glycines
  unsure (1)..(82): unsure at all n locations
gcctgcannggtcgttttcttaaataaaagattatttaaaaagaatttcttaaattttgaataaacaaactttgtttagatg

SEQ ID NO: 105878 - DNA, 1003 bp, Heterodera glycines
gcatgtttaaatgggtcggggtcagttcggcgcggactgtttcggcgccgccaattttgaaatgttataactttttttttagtcagttaaagttagcaaatctggcatcatttgaaagctctatgtgtgctctatatttacatgtcaaaatagaaatgaatgattcaaaattaaaaaagttatggcacgcggcgccgaaaaagccaagaaaaagtcaatttttgagtttttttttttggacataacttttttataaactgacgaaatttttttaaattttgcatgcttatagagaacttaagagctatcgaatgataccaaaatatttaatttggtcgataatgagaaaagttgttagcaacggcgccgaaaaaattttcagaaaattcctttctttattttttactcgactttccttcataaaactatcgatttttcaagaattttccgctccgaaatgagactcagttttggaaagatctcttctgtttaagcctcaatatttggacaaatttaatgtccatgataaaggtcacttttgaatgttgtaaaaaaaatttgaaattttataagggtatttaatttttcttcaaaaaaatttgcattctgttgaattaaattttctggagaaaaatgattatttattaaatgaaacggaattattttctaaattttgttttttcattatattaccaccatctcattacactcttgtaattaacaaatgttacctaataattattattgaaattttttttacaaaattttgattttaatttatttaagaagttcgcataaaaaaataacacataattaattaggtgtaattcgagataattggttatgttattatttccgatttaaatatatttttttatcataaatatattgtattcatgcgcaattattcacgttgaaaatcaatttttgtgttataaatgcgaaaacatacaaaaaatattcattattatataataatttgttttattgaatcaaaaaaatg

SEQ ID NO: 105879 - DNA, 182 bp, Heterodera glycines
aaatgatcagcaaaagagagaataattaaaaaattgaaagcaattaaagaaaagtgaaggaaaaaggaaaatacaaatggaaagaccaatgcaaaattgagagaaaaattggaaatttattaggaattggtcgtcataaaatatacaaatggaaaaaagaattaaatataattaaaaagatg

SEQ ID NO: 105880 - DNA, 122 bp, Heterodera glycines
ttttcccttattcggttttttgcgtccctctgtatttgcacacacacacacacacatatatatataaatatgtagataaaaaatttcttcctccattctactaaacccccacccccaaaatg

SEQ ID NO: 105881 - DNA, 57 bp, Heterodera glycines
gaaaaaggagttaaaattgagggggggggggggggttacgacgaagaagaagaaatg

SEQ ID NO: 105882 - DNA, 148 bp, Heterodera glycines
cagcatgcggatttggatgtgccgccaccgtcccaaggcattcggaaacaaaatatttagttaattgacaataattatccactgcatttatacagaacaacagccgtttaattcgcaacatttcgcggagcaaggccaggccgggatg

SEQ ID NO: 105883 - DNA, 535 bp, Heterodera glycines
taaggtcgggttccgccgctgagggtgaagaccctcaaaaaagcactaaaaaaagcaaaaacgcaccgaaccaaaaactcgtcgcaatattagagcatattaaaaagaatgcggaagccctaggtgttactgcggatgggaagattttgagaagggtttcaaccagtgaggtagggtcacaaacaccgtcaacatacaaaacaagtaatattgaacaaattgtgtcctatctattgaaccagaacatcagcacgggtatcgctcgctttaaaaattttccagttggattaaaagattttttggatagggcataccaggatgattatcttaaaacaaatttggtttccgacagaccttatcagtttgggagtggagttgggagtttaattggtttcaaagagaataaaaagtgtgaaaaggggataaagagttttgtcaattttaagccatcattatggtattagaaaaaaagaagcgaaccattttggaccacctttacaaagatataaattcgccggtcagctatacaagcatg

SEQ ID NO: 105884 - DNA, 105 bp, Heterodera glycines
agtcatcgcccgaaaatgacaaaaaaaaattgggaggaaaagcaaacaaaaagcacaaaatgttatcaccaattggttaattatcatcaatcagcacaaacaatg

SEQ ID NO: 105885 - DNA, 297 bp, Heterodera glycines
aagtatcccgccaattccgccgttcatcaatgacagagcaccattttgccgccgtgtccgggtgaagaaagaggcgaattgctaggattttttaatcagcaattttacttttcgaatttcaacgaagcgtatgaattcgtcatccacggaagaacctaccgatgtgtggagcagtattactgtgcccaaaaagcgttgtatctgaaacgtttcgacgcggcggatgcgattatgctggggacaaatagatatggcaaaagaataagcgcatttgagatgaagaaattcgcaaacatg

SEQ ID NO: 105886 - DNA, 240 bp, Heterodera glycines
ttcctgaaaacccaaaaaatgatgaaaaatggttttaaaacattgatcagcactagagaatggcaaatcaacctttttattagtttttgcggggtatcaatttaaatgttgatatttaattaaatcaactaacattatgccatcaacgcaaatatcaacgtaatttttaaaatttgcgaaaatttgttaaaatttatatgagcggtttataattttagtgcgagagataacgcaaaaatg

SEQ ID NO: 105887 - DNA, 214 bp, Heterodera glycines
tacagccatcaccaaaccaattcaattttcggcacaaatttttgttgagattttgtccgtttttttgagtccattttgaaggcggaaaatttaaatgataatttatgaaaaaagcgcggacccaaattcaattaaaatagcgaattttcattttttaattgatatatgcaattaattcccacccctttttttacaggaagaattttcacaaatg

SEQ ID NO: 105888 - DNA, 89 bp, Heterodera glycines
tgatggttgcaaagcttgaatgggtatcctatttctcatattcaattgttgaaaagcttgattagctgttgattctcccaaattcgatg

SEQ ID NO: 105889 - DNA, 294 bp, Heterodera glycines
agtccattcaatcccagaatcagcgccaattcatcttacagtctgtggaagaaatttatgacgctaattttatcttattttattagacgaaagtcgtcatcaattcacaaatcaaatacgaatgcatcagtgatttactctaataagaaaggtgtgtttttaattttaagattttttttgatttttccctttttatggtccaattccgtctgtgctgaaccgtctgtgtcgagtggtggtactgctggagggtttccgcttaatggggagccgtccgactttggcgcggcaatg

SEQ ID NO: 105890 - DNA, 1003 bp, Heterodera glycines
tcaagaattaggggggatacgcagggattctgaggggttgatgagtaattataaaaaaaaatttacactggaaatacttaaaatataatattattacgccctacgtgcatttgggcattacatgtcaaatactcaccaagatacttcatgggaaattgtgtccagaatccgaaaaatttttttttaaaaaagaataaaagtattacatcagaaactcataaaacgatgtaaaaagatgtttgacgtttaaattttggatataacttcaactctcaccaagatactgcatgtgcatcttggatatgtaaaatagacaacttttgaacaactcccgaacaactaatgaaccactgatgcacaactcctgcactactcttgcactactcttgctctaataaaaaatttaataattctgggggtgaaaaattttttggaattgtaaagaattttttacactggaaatatttaaaatatagtgaaacacgccatatatacatttgggcattacatgtccaatactcaccaagatacttgatgtggaatcgtgtccagaatccgaaaaaacttttttttataaagaacaaaataatacatcagaaactcttaaaacaatgtttaaagatgtttgatatttaaatttctgatttaacttcaattctcaccaagatactgtgctcctttgtatataaaatagtcaacgttaaagttagaggtccctgcgtgcctgcacacagatcccagcatattgaggcctagaggtccctgcgtgcttgcacttttcactggcttcacttttcagcgtgttctctcctacgcagagaaacacgtaaagagtataaaaggactcttatttagtgcgtttgtcagttcactttgaccaaacaaatatatgttgctccaattttttcattgttacagtttacgacctttttattttttttagtttttattactatttcttttagctttaatatttaattattttgcgattatttaaattatg

SEQ ID NO: 105891 - DNA, 139 bp, Heterodera glycines
aatctattaagttctatttcaaaatttgaaccaaaaacatttcgccagaatataactagtgttgtataattttcttatttttgttgcttttaattttctttcttttttggtgcttttcttttaataggtaaatacaatg

SEQ ID NO: 105892 - DNA, 1003 bp, Heterodera glycines
aaaaaacgttgaatttataatatcatattcacaaatgaacaataagcacaatggtgtgttaaagaaaaaaataataaaactcacacgttacctaattggtattggaaaatgattacgaacaattattaatttttgaggaaattatgaaattacttggtggtttgtgtgaagtataattgtctccacggcaactttggcacggcaatgcacattgcattgaaaataaggccaaataggcaggcattaaagcagttaaacaaatcaactctttttttgaggcgagaggataaatgaaagaatttaatttttcatttggtcagttggatataatttggcatgctgaattttttcgatataatttagttttttcaattttatactttcatttctgttggacaatgaaatataaggagtttaaaagaatacccaaagtaccccaaaacagttggagaataatatattagaggatgtaacccaaaatatcaaaataatgacaatttgtgaatcaaggaagaacaaacccaatagtaaaattaattagggtagtataaaagattccccaaagaaattatcctgtccaaaatctggtgaataacattttaggcgatggtgcccaaacgaaaagtatttccaattcgacaatttaaaaaaaatatataaatgcgtaagggttggcagataattcagggccggctttatttatcaacccccctcaaaagggtggctttatttctaattcagggacgcactatattagaggaaatacgataattggaccgtaatttgtttaatttcttttcgtctgtttcaatccaccaactttttgtcataaaaactagtaaattctagaaaaaataaaacttaattttcaacaattgcctactcgtttagtacggacagatgaatggcagaaattgatgaatgatttcgaccgactcaggcaaaagtatccctttaactctgatgctaatagcggattttttgtgaattgatttagatgatg

SEQ ID NO: 105893 - DNA, 127 bp, Heterodera glycines
aaaagtgaatgacttggaagataaattgacaaataaacccgcaacaaatttgccagcggggataaaaacgccgaaatatgatgctacagtcgactttttcaaattcatacgagaatttaatttgatg

SEQ ID NO: 105894 - DNA, 292 bp, Heterodera glycines
agaaaatcccatatgaaacatttgaaaaatttaaatccgagtctattccttatttctcttaaattaaaagcaaataatttttaagaaattgaaaacagtctcataataaaaatgatttgaaatttcgaaaattttcggcaaatcacgcgatgccgaaaactcagaaaaacgatattataattgtaatatttaaataatttccctaaaaattaaggctttaccgcaagtttttgggcaaccaaaaccggtgatcgtgttcagcatgagttctttactagaaccatccaaaatg

SEQ ID NO: 105895 - DNA, 291 bp, Heterodera glycines
aaagtaacgcacaagacaaaaaaaaaactttttttgatcatttttgagtaaaaaaaatccaggtttttttttcgtgttttgcctgaacctggggacctgggtttttcacatttgacctagacttggatttccggacaaaaatccaggtccaggaaaaatccaggcctggatccaggtccaggccgatctatacaagtgatgaagcaagatcccccacattcatttattcattcatttagactaattacctcactcccattactgaagttggcactaaatttgcccaaaatg

SEQ ID NO: 105896 - DNA, 57 bp, Heterodera glycines
ttggccaacgccggcggcctaatcgtgggaggagaagcggcagaaaacaacgcaatg

SEQ ID NO: 105897 - DNA, 72 bp, Heterodera glycines
tcttttcactattcaaaaaattaatatacgttagcagaattgtaaaaaaaaattctttcttttagctaaatg

SEQ ID NO: 105898 - DNA, 497 bp, Heterodera glycines
tttgcgttcatctgtattttcatcattgttttctatttgcccattgcgtcaaagcatcgttctgtttcttcctctttcatagcaaacggaagaagtagtcacacgcgacggcatcatggagaaggtcgtctacttaaagtttatgcaaattgtgctcagttggcattcatttggcaactccgttcacttcaccaattctgcggcacttttgctgacccaaaagtcaatgcttttcatcttttggcactgcctttgtgacgctccaattttggcataaaaatgcgcaacggaaaagcccatagaataaaaaaggaagttaaattccaacattttattgtataatcacaatcataattaaacaaaacaataacaacaatgatatgcatttgtattcgaatcacagaatctgttgattttgttggcactttcatgccgacctttccgccggttataacaatcgttttggctcgtaaccataaaggaaagtggacaaaatg

SEQ ID NO: 105899 - DNA, 270 bp, Heterodera glycines
atatgaaattaatttcactatttcaaattattttcatgtatgggcaggcgaattctgtgaacaccgttctctcagctgttttcttcccccaaatccctgcttaaacggtgggacttgtgcttgggaggtcaaaaagtaaaaccatgctagtcattagcttgattaattgcccttcattgcctttgtcccttttctgttcgtccgctttgtccaccgtttgtctgtgtcccattggttttgatggcccccgttgtgagaaagccgcccatg

SEQ ID NO: 105900 - DNA, 116 bp, Heterodera glycines
gaatcagttccaccgcatcattttcccggcaaaaaaaaatcgaattcatttttcttccccctctatctcttattacctattgctttttccgtttcagttcactttcttcgattatg

SEQ ID NO: 105901 - DNA, 218 bp, Heterodera glycines
ttaataacaagcaatttgcattttaatctagtattgggattgattcccagtattcctatcccgtcctgatgccaatcccaatccagatttttccaaaattccaggctctaattttgtatggcaataactgcttcagcttgccaataaggccacgtagccagaattcgtggatttaccattattctcattcgaatgaatatgtacatagcatagtaatg

SEQ ID NO: 105902 - DNA, 366 bp, Heterodera glycines
tttttccagaaattgaattaagaatgatttcgatttcttgctgggaataattttggtgcgcaagtgggcgtggccaaagtgcgcgtatcgtacaccctgtcattttccagattcattttaaaaattttgcactttttttttgcacatctgctgtttttctgcgctttatgggcaccgtattatttaattgggaatttagggaaccgtataattaaattttattaaaattatatgagcatgcctaaatgtttattcatcttccgtctttcacctcctttattcttcacactatttccatgctttgcgcatataaataccgaaattttgttcactcctcctcaatccctgcacagatttaaaaatatg

SEQ ID NO: 105903 - DNA, 257 bp, Heterodera glycines
aggtttattttaatttttgggctgatattactgattcttcgacttattcacacaaaaattctcagaaatagggtcaacaattaaagtgtctaacgctatgtaccatgcatgttacaaattaacaagtggttaagaaaaaaccattcttctcaagttttcgttaattatacacatttttttcgtgtgcatttggcgacggttttatgtttgaccaatttgaaataattattatttaggcactgaacatcgccgaaatg

SEQ ID NO: 105904 - DNA, 72 bp, Heterodera glycines
taattagcatctgctaattgttctgctgttgtggaggtccccgatgttgatccatcagcattcaaagtgatg

SEQ ID NO: 105905 - DNA, 817 bp, Heterodera glycines
tactgtaaagaataattcaaatttacaatattatttatttcaatccaccatcaaattgtcatggaatctcacttaaaccctccataatgctattgattggcttaaaggcaaagcaataagaatatttctaataaattataatatctattaaggaaataaatgttttaagtgacaaaaaaaaaccctcaaaacattgcctaaaaattggaaaacgggtctttaaaagtttataatttacaaaatgtacataaaatatgtataataattagggatgatatttttagttttttacctattttttcaaatttaatttcaactattttggttgatcaattttttgaataaattttaacattttacacccctaaatttgaaagtttttaataactattttcccatttttagcaactattttgggttttttagaacctaaaaattaattattttggccgtttttagcaactataaatatcattcctaaaaataattatatattaatgttaacaccagttttttatcaatatataaagaaatcctttctataattatatattaattttaaacaacattttttataaatttatgacagaaattctttttattttttggctaaatatttatgtaattttttttaattaatttaattttgccttaagccctcacatcattggatcaatttgtccgcatgttttatattataatattatctaatttactttgtctgaatttcaatttaattttctgcacaaaagaaaatggaaacgatttgtttagcgaattatggaaaaatgattttgccgatgctcaacaaaaaatg

SEQ ID NO: 105906 - DNA, 436 bp, Heterodera glycines
  unsure (1)..(436): unsure at all n locations
taaatatggagtgaccatttaaacctatattttcttttaaatataanttaagagaagcattcttaaactgaaaaggtcctgaatttccagatgtttgcattttacggccatttttcatgaagtcaattaaatcagcaacacgttttaaattaaattaattattataaataatatttggacattcgcataatgttgaaaaatgaaaaacaaatgccaattggttttatatttaaggagaaatagccgcgtctattataaataaacgcatttttgatgttttgttttcacttttgctctgagttttcttatgattcgtaacgtatcgctcttcttctgaagcggtacgtttttcttttttttttttttaatttaataacaattaaataatgaatgttctcatttatccattttcaaattaagactcattgtgagaatg

SEQ ID NO: 105907 - DNA, 296 bp, Heterodera glycines
tggaagctgggacagaagtgatatacggtatcagtatttttattcttctattcattctttcctgcatactctcctttttaaggtcaattgcaaaaactttacattgcatttttaattgtttctatttaccatttaaagtcatcaaaggatttataaaaagagacataaaatacgatgacgagttagaaatgaatctattaaataataaacgaaaaagaaatgatttaaatgaatcaataaagaaaaagagaaacagaagattaaaaaacttaagcctaaaagcaaccactagcatg

SEQ ID NO: 105908 - DNA, 215 bp, Heterodera glycines
taaaaattatttcagccatcagcagaagtgcaggaaggatgaaaaaaacaaacgggcggctcagccccgtccactcagtcccgccaaatttagggcgcgaagactttttttagttggcacttggatctttgaaattttgaaaagcctgcgattttgaatttctcagttttcctacggtttttttctttgtcccctttttcaaatttgttaatatg

SEQ ID NO: 105909 - DNA, 73 bp, Heterodera glycines
attattagatcgcttttgctatatttgacgaatgagaattttggtggctagggatttatcctgctgcaacatg

SEQ ID NO: 105910 - DNA, 135 bp, Heterodera glycines
aaaaaattcttctttaaaattttttttgaaccccaattcaaaaaaaggaaaaaaaatttgcagtcaaaaaaattatttggaatttctccaattttgtttccataattttccgaaaggtattcgggtatcataatg

SEQ ID NO: 105911 - DNA, 127 bp, Heterodera glycines
ggtagcaacggtatttctagtgcattttcaaattgattttatcggtaaatcaaccttttctgtttttcaatattcgggcttcgtccaaatcttatttgaaatgttgttgggttttcctcggcagatg

SEQ ID NO: 105912 - DNA, 85 bp, Heterodera glycines
  unsure (1)..(85): unsure at all n locations
gcaatgcgcaaaatgattacggtgccatcactgcngccngcacaaatggagggaaaatgacaagcagctgaagaagaagcaaatg

SEQ ID NO: 105913 - DNA, 162 bp, Heterodera glycines
aataatttattatttcgagtaatgaatcaactaaattattttccgacgatttataagcataaaaagcggggggggggatgtctgagtccgttccgtgtcatgcaaacacagaaatgaattttgccgaagaaaagcggctggggcggaacgtgcgcaaaaatg

SEQ ID NO: 105914 - DNA, 1003 bp, Heterodera glycines
tgatgattcagaacggggattgcaccagtaaggaattagctatttaaattattgtaaagaagttgaaatgggcggtaaaatttcgaaatccataaaaggaatggagggagggcgtgccacccggtagctcaatggtagagctgcccacaaactcggtggaggcgtgggttctattcccatccgagcctgagagctagagattaggttaatctcaagaatggattaaaacatggcacagacgccgagaaaaagaagcgaaattgtgaaaaaaaataatttaatggcacaaattcagagacaacatctctttaaattgcggggtcatcattgtttaaatagttaatttatacatgtgagaaaaagaattttttgtcaattagatgtcatattatgacttcgttttatgaatagaacagaaaagtgccaaaaaaagaatttttattaaaatttttagttaaaattaaaattttcttaaaaattttcgttctgagattttttattttgttagtgcaacgccaacgcgtcaccggctcgctggagggcatgatgctttcattgaccattgtggtgtcatttcatggcacttttgtcacacgttcggaccgtgcctatcgctgcatgtgcttcttccgtaacatcaaaacattgacaaatgcaattgacgtgaacctggcggccaccacggaattgttaggtaggcaattttaaaaaaaaattttaaatttttaaaatggcgcgctctggcattttgcagaccctgccaagaccccgtcaccctttctttccttccaccatcagtggtggcctggccctcctccctagtaaccatttgaatgttatcccaaagggttgtccaggggaagaatgaaaggcgggggaaggaatgggctgcaaactctcaaccgcctcgccattgccccacggcttctccccccccccccgcaacccattttatcttcgccttctccgattcacaaaaattgctgtcccttggcatggaatg

SEQ ID NO: 105915 - DNA, 1003 bp, Heterodera glycines
atccctctgaagaaagcggcgctgaccatcgatcaaagagtgcggcgttcagaacgaacgttggggtaagcgaaaaactgacgatgtgattttcaattggataatttattaattttgctgtaaattaaatccacttctgtgtaggcttgcaaaatcgcaaaactcgaagtaaacggctccgatgtgatgaaattttacaaaaaacagcctccgttggtctgcaacgacagaaaagacaaggagccttgggttttcattgatgaggaccggcggataatggcgacagaaaaggcgcaaaagtatttaaattaaaatttgcataatttattgccaaataatttgctattccttagcatcggcgtggacaaaatcaaatgtttgtggagcttttatgagaggataagtgacacggaattgaaatggacaccgcgggaggcgttcaaatttggcgatttggtggagaagggcgactttgtcaaagtggactgttccggaccagggagaaggaaatggttagtttcaaaggagccccgacatttgcgcctatgtccaaaatcggactcaaagttgaattttttcaacccctgatagcctaataagcattaaaattaagaaaacacggttttatggttcattatgatcaataattttttgtttgaaaattttattattttttcaacatttttttgtgatcaaatgatcatgcacaatcacttttaatcgcttatttaaagctaattatgcgattagtgattgaaaaaacttagttttgaaccagattttggacaaaggcgcaaatgtcgggccgcaaaagtcggggccgcaaatgtctggaccggccaatgtcgggacacgtttaatttcgtcaaaggacttggataaatttatttacatttcaaaacagagcataacaaacatatgtttctaagtttcgtcattttaatttcacttgttttttagaagtaaatgatttgggtacaccaattaaaagcatccagaaatg

SEQ ID NO: 105916 - DNA, 585 bp, Heterodera glycines
ttggtttttacagtatccttaaaatttttgacatttttattttaaatttttttaacaaattaaaaataatagaaatataactagatttaatttttcgatttatttttatttttaaatttattatgttctattttttgaatgcattaatttttattaatattattaacattcattgaatcatttattacatgcttatttttaatgtagtattttgttgtagttaatcgtaccttgatttttcggcatttaggtaatacgaaaatgataaaaatatgcgtataaatattatacaaatatgcacaaaaaacaaggcaaattaatttaaaaaaatatgcatttgcatatttttgaccgccctgattattatgattccaaataaaaaagtccgcatttgcgtcttgttgcacattaccaaatcgaattttgccagacattagtgattatgaggtaaattaaagaagagtgaattctaagttatatataattttattaaattgtctaaagatggtaaatttagtattatttaagttctgtgtttttgctctattatctttttctgatttacagatatttaagtaaattatg

SEQ ID NO: 105917 - DNA, 256 bp, Heterodera glycines
aaaaggtgtacaatttgttcatttgacaggtttatcacggtatgttcagccgataattggtgtattgatcccctgatccaaataaacttcttatataattagtcaattaatcaactaattagcttgttgtgaacctagaaactattttctggtagcggacaaaaagcgtctgataagtgccaaagaagcgacgcaagtgcaaaatgcggtggcaaaggccacggaaattctgttgagcagcgattgggaagaaatg

SEQ ID NO: 105918 - DNA, 82 bp, Heterodera glycines
ggtcagaaaaaacaaaactaaaaatttgcatgatttctttttaccgtagtttgattgtcgttattatttagttttggctatg

SEQ ID NO: 105919 - DNA, 114 bp, Heterodera glycines
ttttgacatggtgcatgtgaaaaacaacccttaaacaataaaagtaccgaaaaagagaagctaaaattcgaaaaaattcattcctggagtgtgatagacaatttgtttcagatg

SEQ ID NO: 105920 - DNA, 130 bp, Heterodera glycines
tatcggcaaacacccgtcgtgatcgcttgatgagagtccttatgagattatcaaatcgggtaattactagtgcaagtgtccaaattaaattaaattgacattagacactcggccgattacggcgcaaatg

SEQ ID NO: 105921 - DNA, 53 bp, Heterodera glycines
ggtccgatggccacactggtaacggagaattccatcgccgcataagcagcatg

SEQ ID NO: 105922 - DNA, 766 bp, Heterodera glycines
aagtctattgacaacgcaacaattaattttgaatgggtcaacaatttcagagaggtcagtaaacgtcatattttcataaacatttcaatattttcatttggtttccgttttccattgtttagaatttatccgcgccaccacttctgtcagctacaaaatacaattcaaactctttgaattggtggagccttttacattagtgaacaagcggacccagaaaagctgacactgactaaagcagaagaataagacaaaagatggatggtaaaacgatgtccaattggggagacggcagcgattcgatgggatgtcgaaaagagggacgattttaacacaataatgttttggctgtcacctgattaaatcattatgaatggaaatttacctgataattgctcctcacatttatttgttgcttttttcgtttgaagacatttaatttgtttggattttgggacttttacatcaacagaagtgatgagttagaataggtatgtgctttaccacggaaacgcttgaaattgtatttaatttgaaactgcaacagtgtaattttttggcatttttttcgggatttccaaactcccgaactgtccgacccacgaaatttattttgtttgatttcagattttgtttacttattgtcagtgttgtgttgtagaaattcaaaatgatgcttgtctttcagcgatttgcatatcttttgtatttttttgaaaatttgtttcattttgtgacacatttttggtccataaattgcaaaatg

SEQ ID NO: 105923 - DNA, 111 bp, Heterodera glycines
aaaatccggaccaggactcgaatttcctgaatagaccttaacagaattccggaattaaaattttttgtaattttttttttaccaatttccattcattgtgccacagaaatg

SEQ ID NO: 105924 - DNA, 288 bp, Heterodera glycines
tgcttctgctgctggtctttaaacgccattttcaccaacactcaaaaggcggaacaattggcccaattatttgtttccctccgccgatcactgatcatgtgaattgggtggcaaaactattggggaaatggcttctgatatttgacacggtccgatcatttttctttctttgataaaaagttaccgaatttttcatgccttcgcagaatttttttttattgtttttgtccaaatcgtttttattttggcgggccatcgtcggaatgctttaaaaacgatgaaaaaatg

SEQ ID NO: 105925 - DNA, 57 bp, Heterodera glycines
ttgcgttgttttctgccgcttctcctcccacgattaggccgccggcgttggccaatg

SEQ ID NO: 105926 - DNA, 324 bp, Heterodera glycines
tgtccaaaagcgggtttaaacttacattttttcaatcccagatgtaaacagctttaaataagcgattgaaagtgattgtgtgcaataatttgatcattagcaaattttgaaaaaataataatatcttttaagcaaaataatttttgaccctaataaaccaaataagttttcttaaatttaacgctgtttaaagacatataagattgaaaaaaggtaagttttaacccgattttggacataggcgcaaatgtctggacttgttttttaattgcatgttgataaaattttatatgtacttggatttcacacatttcccccgttatg

SEQ ID NO: 105927 - DNA, 528 bp, Heterodera glycines
taactcaaaaggtgccgaataaacactgaaaatagtccacaaaattacttttgattttgtaaatttagcaagagatatcatatttgtgatcagcgaaccttaaaacccccggaaatatgttttcaggccgtaataaaaaaaaatttttttttcaaaaaaaaaactaagttcgaaagaaagttagaaaattcggattttcaaatttcctaaattttggtctttgacataaaaagtattcccgaattaaattaggtcaaaacattttgaaatttaagcgatttggcatcgattttcgggtttcgacccaaaaaacgagttggggtaataaaaacgagttgggtcaaaaacgagttggggtaaaaacgagttggctgaaaacgagttgggtttttaccctttttggatcctctggcaggtgcccctttttgcgtccggtttatccctagaattcaaaatgtccttgaaaatgatcactcgaaaaaaacacattcaaaatgcctatttaaagtgaacgcattgaacaaaatg

SEQ ID NO: 105928 - DNA, 1003 bp, Heterodera glycines
tggtacattattcgaatttatgaaatgtgcccgtaatgatttttcaatgttttgttttttttattggaaatacattgataaatatgttttagtattaaattaaacatttttcgaaaaaaaaatcagattagaatccatatggcacaaaatcagcttgccagactaaaacgaccccctgactaaaacgtcacctcagactaaaccgacccctcccgacctttggcggtttttagaaacgacccagcacgagcaaaatatacaacgcaaatcgccaaaaaattaatcgcgtaaaaaaaacattttttattgcatttttgttaaatgccaaaatatttacaaaaataaaacttttatttttcctaaaaccccaaaaatatttttttttattgactaaaatgacttttaaatgaaaacatttaagcgcaggaatgcttttttgagctccttactttaatgcaattaggcaaaaaaatatttaaataaattacttctcagcactaatgattaattaagacagcaagtcgttaagtgacttaggtgttaattgacttagccgcagcagatgtctcagcggagaaaggtccaaattcaacccattcagaagacaaagtgacaacaaaaaaatgattctaattacctaatgttttttctgcctaaaaatccctacaacaagcaatatttgttagttgtctaaaatttacattcaaaatgtaaaatataatttacaatttttgcattttatttttgtgtataataaatgtgcaaatttattggaccttatgattgattattctctgcttctctctttattagcaataaatgtttgataattctttctctaaaaagatttttcttgaagaaatgctttatgaataaaaatgcaaaacatttaacgattaaccatgttttagcgtacataataattgttttatttaaaaaaaattattcacattttattattagcttttattattattattatattcacttttttttagaaatg

SEQ ID NO: 105929 - DNA, 176 bp, Heterodera glycines
attatgtctcggctgagttttggggtgcaccgccctaatttagccaaaattatttttaaaaatattttttcttttccgagcgacgcgacatttgaaattagttattagttattttgccgtcaccattgaaaaccactccgtctaccaaattttttttttaatttcagggcataatg

SEQ ID NO: 105930 - DNA, 137 bp, Heterodera glycines
aactgtgatcaaacccaatttaattttgtgataattgtttacctcaataaaatattaactgattacaatcgcagaagggaataaattggccaaccaaaattaagaaacaacacaaatcatttttaaaggaaaaaatg

SEQ ID NO: 105931 - DNA, 54 bp, Heterodera glycines
agaaaaaagcgattaaatacaatatttaatttaaatttttattctcacataatg

SEQ ID NO: 105932 - DNA, 250 bp, Heterodera glycines
  unsure (1)..(250): unsure at all n locations
taagtaattttctgaaagagctcaaaagcagctttcgaatggtgtattcaattaattgtttacttgaaaattcacagagatatgtccaaccgaatctgnaaatgaataatggcgtagtattctataaaaaaattttttcttaggaattttacagtgcgcagggatttgaattatccataaacacatcatagggtaaatatctagcaaaaagaaatttttttacacaaaatcctagtccagcagacagatg

SEQ ID NO: 105933 - DNA, 447 bp, Heterodera glycines
cgccgacgctcgcgttgatgcgcgcgcccatccaaccaaagccggtgacgcgcattttgccaaggccaacggccaaaaaggtacttcaaatggtagtcatatttccttgttttgttttactaggcagttcccccccccccccggaaaattttttctaaaaatttctcaaacctaaaagattttcaagaaaaaaaatcttaggaaattttttatatgaaagactcaaggaaaaaatatttttttcagcgaattttaggaaaatttttgagaaaaacttagtaactcatcataaaatttcgaaaatacgctggaaaaagtttcaaaaatttttttcttgtaatttcttacaaaaacatttcctaagatttctaggtttgagaagaaaaaaaataatgaagagtcgagaaatttcgtgcaatgactaaaaactaaaaacaaaataaaatg

SEQ ID NO: 105934 - DNA, 64 bp, Heterodera glycines
attaattaatcacagtaaaatcaattaaacagcgcattttaaccgggactttcctccaaaaatg

SEQ ID NO: 105935 - DNA, 550 bp, Heterodera glycines
attgtgagcaatggtggcacacgacgcttttgaatttaatgcagtcaatcatggaaaaacctttattattttttaatttcgatttatggaattaaatgcttgcaatggttggtattctcgatattttttcgatctttttacttttacaatatcaattatattgtttcatttttaatttcttaattaaatgttgtgctgattgtggttagtgtgacttcggtgtaaaatgctcttaattttgtcgataaacagattaaaaatgctggtgtacttttctagttggagttgaaatactatttgattttatttgaatcaattaaagaacaaaacgccaatttgtctctgttgtgacacgacacgtcaatcgcctcgtttttaaaacttttctttcgctcctcattttttggtttaccagcccaattaattcactaatcaacgacaatcaacttgtttcccataattacataatgacaattgaattctaataatttacaatttctgttggaatattaaatactgaaaagtttttagaatttattccgatacaatg

SEQ ID NO: 105936 - DNA, 1003 bp, Heterodera glycines
tggagggcatgaagatttctgaagcgagaagatcagaaaaactccaaaacccgaaattcatactcaagtcaattttaaaaaattaatattcagaaattttcattaaaaaacgaattccaaacctacaaaaatctccggagtccaaccaaccccgccctggttcaaatgtggtatatctaaatgtaagttaaataaatatccacaaatgtaaattttgataaaatctgtttcaaaaagtttcgttttaactaatgtatttctcataaaaaattataactattcaattttcagaagaattaaaattccagcgataaatgattgattataaaataggaatatacaccataaaaaaagaaatatataaatcgacaaaaaaaaagaaaatctactctactgtccaaatgcctttttcaaatttcacttccttcaatttcgcccattttttaaatttctttcgcaactttttcgaaatttctatttgaattgttaaatgatacttcaaattctgtcttccattccttgtataagttttcaatttctttccattttttgccttctccaattttcaccagttgtcgccaaagcgactgagaaaatggaagaaaattgaggaagagaaatttaattgatttaaattggataattttaaatattgtgattaattttattatttaatttgtgatctttgaaattgtgattttgtccctccattgaacattttgtacatttttagcattagtcactctttttgttgttgatcgctctgtccaaattgctccacctacgctttttctttctatttaaacacgcacatttctcactcctcacatcttatacagacatcttattcatctttattttatatttatcaaataaacttctttcttatttgggaattattttcccccttattccaccccgccctctctccctcgcgccttcccatttttgcccccattttgccgtccgagccaacaagtggtgccgctagcaaacaaagatg

SEQ ID NO: 105937 - DNA, 190 bp, Heterodera glycines
cgtacgcagctatcaaatttacaacgaatacaaaatatattctacagagaatataaaacgttaagtatatattaattttttattcgacaaaaatcaagcattcatcgcttttttatattttgcaggtaaatgtatgcagctataaatttacaatcgaatacaaaatatattctacagagaatataaaatg

SEQ ID NO: 105938 - DNA, 551 bp, Heterodera glycines
  unsure (1)..(551): unsure at all n locations
aattaattatttattttctgtctgtcaaatgttttcttcgccngacttttctttttgctaattttctttctctccaccacaaatggcacaacagaaacaacaaaaaacgcacaatcggcgccggaaaagaaaaagctcaaaattctcgtctattcggtaatccccgcgcacagtcacatgcaatttatgggagcaattgccgactcattggccgaggcggggcacgaagtggtgaggaaggacggacagaattttagaagaatttaaaaagcaattaagcatttcatcaaaacaattgacgacgatttgcaatggacaagcaaagccgagagcaacgagaccaaactgtcctccaaagtttaccgggttgtgctcaagtcgcgcgaagcgcccgttgcgacttcggatgtgctttatccgttcagtggggacaatgcgtggcaaatgcgcaacgcatgggacaacagattcgccaggcttttcgatttgtggccatatttttgcaaaggcaattaattattcctaattaattgcattacattttcaaaatg

SEQ ID NO: 105939 - DNA, 852 bp, Heterodera glycines
  unsure (1)..(852): unsure at all n locations
gaatttttttttatcaaaagtttctaggtatgaaaaaaaaattnagaaatttctgcggcgatattttgtctcggcgatatttcaggcaccgatatttgtcccgtctcctaaatattgtgcttttcccccacccattcgagtcaattttttcaataaaatattttttattttcaaaagatatggttttccgggtcactcattgatcagtgatcacgaatccccggcatccatttcgaccaattccggatcacagacctggagtcgaacaaaaatgcgaaaatgcaaatttttgtttttaccagtttctgtctgtgttcacgaattgcttatcattgcgtcacttttcttcatttgttttttgtttttaagttcgtcgcctgtttccttgccctcccttctgtcttatgctggtgtttctctgctgcgatctcatccaatttgctgatcaattggacggacttttggacttgcgtcaactttcgcgcggattacactgaagtgccgttggtcactttggtgagttttgaaatttggagggattttcaaggtcaggaaatcgattctgacagtcattttgaccaattccgaacctcggctcttgattcaaatggtcaaataaatttgagttttagtgaaaattaatttttgattgggtaatttgtttaaatccgattttagggttcaaattagtccaaaatggatgccaggatgagttttccgaccctgaaacctctaaaacatctttttactatttttttttttttgttttttttgcattctgaacacagttaagtgtaccccatttttaagatgctcagcatcgtcatggtgtgttcgtccgtcgtcgagatg

SEQ ID NO: 105940 - DNA, 482 bp, Heterodera glycines
aggaagagaaaattcatttttgagaaatattttatatttattattcctttttttcatatcgaataaattataaatttaatttttaagaaaaagaaaaattgtcaacaatgaaattatgcctattttcaattttaattgcctttttaattgctcaacttgaaattgtagcggaaaagaaaaaattggaacaaaaaacatttgacgaaatatttggagaaaaatgggaagaaaaagaaaatgaacagaaaaagagagaaattattcaaaaatactatcaaattaaagaaaggatcaaacaaaaaggaagaaaatattcaacaaaagaatggaataaaattgaattgaaaatagcgaaaacattgggcacaaatctaaaatacatttacaaatggatcaaagaattaaatcttcaaaaatataaatgccacaaatcaaaaacggatgtacaaaaaattgaaattgtgcaaaaatttaatgcaatg

SEQ ID NO: 105941 - DNA, 1003 bp, Heterodera glycines
tctgtcactccgcccattttgtcgaatgtctatttaagcggccctgcccaaggggtcgctctcttcgcttccttcacccccaaccattcttttattcgttttgctggacttttcgatcaattttttcaccattttacgcatttttaattcgtcgatcgcttctttaataaattttgtgtcggaatcgaagtctcgaattcgttttcgggggacacggtaaggagggaaaaagaccctcctcactccatcacattcgcctacgtcttttccctcaaccctcccggatcccaaatccccctcccatcagccactgggaaaaaattcgggagtgacccgaagtagcgccaaattcgagcagttcagtctcccaccagtaggagcagcggaagagacggggagaactcccgtcgtcgtcaagtccaagcagggcagtgaaggaaggaagagccgagcggtgccaaatcgtccgacgaaaggacagggccgttcgtcagcgtaactcccaccagccggagaagcgcgcgtcgatcgaagcggactcccaccagccggagtgtccgccgcagggaacgggagtcgaaacccgtggtcgtcgagtcaaaggggtccgacaagcccttcctccaaccttgtcggtggtgccgttaagcaagcagcgatttgctgcacagttctctcaagcaccaatccaaatttgtcacccctcccccctcccattctcgtccccctttggcgctgatcggatcggtcagcagcatcagacccatcaaaaagaacggcaaaaaagggtgcgcttccctttacaacaagcgaacggagtgagcagaaagcgaaagggacgagagcggtgaagaggagcgggaaccaatcccgcctcagcttggcccaccccaacccccaagcgcgcggcgcaaataaaagattggcgacaaactggtgccgttagcagggggtccagcgaaacatttcggtcgacgaacagaacagacggaaacgaaaaatg

SEQ ID NO: 105942 - DNA, 161 bp, Heterodera glycines
attatgtatttacattttctgtctccattttttatggataaatattattaattttccattgttactttaaatttcacattaaaatttgctgtttttcatttattttgctttacattttttacattgctttgcttccatttatgtgtatatatttagaaatg

SEQ ID NO: 105943 - DNA, 1003 bp, Heterodera glycines
  unsure (1)..(1003): unsure at all n locations
aaattttattcacttttttttaaatttttcaaaaaaaaaacccgggggggggaaattttaaaaaaaaaaatttttaaatatattttttcaaaaaataaaaactttttttaaaaagaaaaaaattttttggcgccccctttttttctcttttttttttttggcccaaaggtttggagagggggaaaattttttttttttttagggaaaaaaaaaaaaaaaccccctttttttttttttttttttcttttttttttttttaaaaaaaaaaaaaaaaatttaaaaaaaaacacaccaaaaaaggtgtgattcaaaaaaaaaaaaaaaagggtttgcttgtgtgcccccccccgggggttggtgggggaagaggggaaaacgggggggggaatatttttttttgggttcaaatatttttttcaaaaatttttaaaaaaaaattttattaaaaattttgggctcaaaaatcaaaataaaaaaaaaaaatttgtttttttttcttttttaaaacccaattttttcaaaattaaaaaaattttggaaaaatttttccctccccgtcactcgtttcccccccaaatgggtcaccttttcccctggaaaaatggctttttccctattcatatattctcttttaattattatatttttagggtaggaaatgggctttgtttttattctcggaaatttgtgttaaaagattaatgtgacaatttttatatttaaattaattatttattttggtagtcattcttttttgttgtgccattttaatttttgggtcctcaaatgtcgaccctaaaaagtttccgganccggaattagaatttttaaaattttcctttcaatttggaagcgtaatttttataattttttgcattactcgacctttacctcctaatcattttgtctnttagagaatatgcgagcaaaaataattttatttattttaatattttttaatttggccaaaattttcgtttgtttgccatacgaatgggaaatg

SEQ ID NO: 105944 - DNA, 534 bp, Heterodera glycines
  unsure (1)..(534): unsure at all n locations
attttnttatgcatattttgatttttgaaaatttttagaaattttttttgaaaaaacaaaaactttttttttaaatgtatttctaaaaatagcaaaaattaatttttaaaatgttaaaatgtgattctaaatctatttaggtcatttttatgccattttatgcttatttaacattttacgaagatttttttccaaaaaataaccataatttttttttaatattttcgtgcatattttgggtttttatacatatttcttacatatttcgagatttttttttttacatatttatgtacatattttgaccaatttttgtacatatttttgacatccctagtcatacatattgcattcattattcaatcgaatgtttttttaaaacaagggactaccatttttggcatcctgtttgtttagtttagttaacttaaaaacaattcgaattttttgtcaaaaaatgcaaatttttcaaaattttcgtgtttttattttaaaaatttaacttaaattcatttttggctccctattttaatg

SEQ ID NO: 105945 - DNA, 426 bp, Heterodera glycines
  unsure (1)..(426): unsure at all n locations
ccccccccacaacaaatatccttcgcctacggctcaaatccgccgcctccccctgccccctgctgtggtgggatgtgttgtaaagagcagagggagggcattgcaatgcttcattagtggtttctctccacaatccatgcgccatttgtgccgatcagtcgcgggagggagggcaaaagcaaagggaatgaatcaaatcaaaggcgggggagggggagggggagggggaggtccttcctgttcncttccatccaatggctttgacccctctcgccctttgcggatgattaacacaatacataagtgcaccgctctcccgccttctctcgcatttgctgcgcttgttcattcgcttgtccttaattattttttcaaaaattcggctgatttatttccaaaaaaatgaaaatgtttcttttgcagatg

SEQ ID NO: 105946 - DNA, 74 bp, Heterodera glycines
ttcgaagtgaatggccaaaagataaaaaatattaattaaattaattttattttatttaagtggccaataaaatg

SEQ ID NO: 105947 - DNA, 129 bp, Heterodera glycines
aaaaacaaatttattttaaatatctatcctttattataaaaagattggtattagttaatttcaataaaaaatattaataataattaaagggtttttaatttttatttcatttgaaaggaaaacataatg

SEQ ID NO: 105948 - DNA, 683 bp, Heterodera glycines
  unsure (1)..(683): unsure at all n locations
tctccatttatctcccgggggaataaatggaacttttggaaaaaaataatttctttttaaaattntaataaaattaattattcaaaatcgaaattcatttgcaaaaaattacagatttttctttctattttaatttatgaaaactccttttaagaatnggagtgctgaattttttgaagatatgcaccttatcgttctgaatcaaataatttgaaaaaattattaagaaaaagcaccgacattattttaaatgtattttattttattctttttttttgctgaataattgttttttcatttttattaaattttttgttttattggcaaggattttaaaaaaatttgctatttctttctgaggattaaaatttttcactctctctgtcaaaagttctgtttaatatttgtacttttggcggtaaataattgtttaatacgatgccctaaacaatactgaagaggatgaagtgggtggaatcccttcaaaagaacgaattcattttttttttgaattttgaaatgtcctttaaagggattaagcgactgccgcaaaacgacagtaactaatcagagcttggaacattctgtaaggcttccccgctgggatttaagtgccgtaaatttgcctttttaattaattcattttaaaattttcattgcccaaaatttccaaaatgaaaatg

SEQ ID NO: 105949 - DNA, 87 bp, Heterodera glycines
  unsure (1)..(87): unsure at all n locations
ttaattttgtattttttattataaanatatttattttgtttaaagaattgttgatataaaaaaaaccttttttaggtaatacttatg

SEQ ID NO: 105950 - DNA, 216 bp, Heterodera glycines
atagttagtccttttgttgaatttttagaaattttatccgtcaaatcggcttttggaattttaatgagtaaatcagtaaccgtaaatgacattctatgcttctcttgttggatacacgggaagaaataatagttagtccttttgttgaatttttagaaattctatccgtcaaatcggcttttggaattttaatgagtaaatcagtaaccgtaaatg

SEQ ID NO: 105951 - DNA, 377 bp, Heterodera glycines
tttaaccttttgtaaataaaaatcaaataattttttaatttattatccacttatttttattttggctgaaaatttgagaattgtacgaggcattttttcgtaatttcattttgtctcttttttaattgacaattataaaactgcaatcaaaatagaattttaattttgatgtttaactatttttgttttttatgtgtgtacgaagcacaaagaatcttattgttagtcccttcgctttttcttgttttctagtccttttattattttaatatggtcattgtgattttaatttatgtattttatgttgtatattatataatttttagttatttgtctgcatcttaaactccgtttttatggtccatcagccaccgatg

SEQ ID NO: 105952 - DNA, 110 bp, Heterodera glycines
caagtgctgacgtgatttggaaattcagtctttgactgaagctgggtttgaggtgccaaaaaagaatatcatggttttcattccctttgtagcaagtgccaacgaaaatg

SEQ ID NO: 105953 - DNA, 468 bp, Heterodera glycines
tttcttaaattctcagttctaaatatcaatattttaatttgattatttatagaaaagaaataagaaagttttttgataaaaaaaaataaaatttttggcttgctttttcggccgaaatacatttttgcaataaaaatggcgaatttttaaaattgttgagaaattacatatgaaatatttcatgttcaaaaatattatgaaaaatataataatttaaaaaaaatattaatatttataattctctgcatacatttcctaagtctttgaaaattcatgtgaaagcgtagattataagaaaaccagcagcaatttccgcaaaaatgattttttgatgtttttgtctactaaaggccacgtcaattaattaagtcagaaaaagggggtatttaagtgcacagaaaaaacacaaaaaaaatatcatcaattcaaattttattcattaattaaataaaaatattttttgccatg

SEQ ID NO: 105954 - DNA, 855 bp, Heterodera glycines
atcattgggaaagctctaagtgtcctttattagcctgccctcctaagaaaatttagtttaggttcaaaaaagttatggccccaagaattcaaaaaaccaaattttccaacttttttggccataaattggttcaaaattaacaaaaatttttggaattttgcaggctagtagagcatctgaagagctttcgattacgccaaaaagagaaatattcccttccttggccgcttccttttatcgtttttccctttcctctacttattttttcttggttgaaattcataattacggtttataacggaattctgtcgcgtccaatttctccgagttggacgcggtcatccatttcttggaggagttgcggccagacacggcaagtgaaccgaacagtgatttaatggcatttacccgtgacgagagtgatcagactgtgttacggtgctgatcagcccttaaataatcctaaaaaaaccggtagaaacccgagagaaattccgaaatctcgagacttgagcagcacttttttgttcaaaaggcaatttccctattggcccttctcattccgattattttgctggccacaactttgaacccgctttaccaacacatccatccctacctcaaatagtcagtctcgaaattttaatagtgaataagtattttaaattaaaaaagcaaaaatttaaatcgaaaatttgctgctgccttttgttgtcagctattgtatccacgccaactaacgttaattgtttcaaaatatgtttttaaatttaaatttgttcattcagtccgctgctgcacaccggcaactcgtcgcccagtcacgacgcgttcgccaccgacatttacgcgatg

SEQ ID NO: 105955 - DNA, 277 bp, Heterodera glycines
tttttgataattgctttttgttgtgtttgcgcagcatttgccttcctttgccccccccccgccctttggcacaattgcccatttgtcatgtgaacaattttaagtgagtattctcgagattttcgatctcgacccttgaatctctgagcctatttaaagattcgctctcagcattttccacatttaaaattggcacaaaacacagattttttaaatccgccaccgataagtgatttaggtatttacataattatttttccgtttttaagtcaaaatg

SEQ ID NO: 105956 - DNA, 140 bp, Heterodera glycines
aaacaatccttttcaactttgcatatctatagcgataaaattctgcaccgtttaatgctgattttattattaaccctgctaacatttaaaaagatattacattaaaattagattattttttctttttaataggatttatg

SEQ ID NO: 105957 - DNA, 1003 bp, Heterodera glycines
cattaattttactcaacttttattgttccaaactcatttttgagataaaaaatcaaaatcgaggtcaaatcgatgaagtgttagaggtttttggtctatttcaattcaggaattttattattttatggacatgaattacgaacttagaacaattcttaattttaattttttctaactcattttttacaaattttttctcgccgtatcgtcttttatttatcactttttgtaggtctttaaattttgccatcctacagcaaattccattccttctcgtcttttggtcatttgcatagaaaatgtcttataatttcgctgggcttaaggaggcattttcggctgtcgtgaaaagcactgcaacaataaacgaaaacgaaaaaacttcatcgtcgaaaaacgaaggagcagaagcggaggaaggggaggaggaggacagttttttggtgtgctatttttgccggtagagtccagccgattgattggagtccattcgatcgatccaaaattcacaaatgctttagtcttcttttgtttgtttaattaactgtgggatttctaatcttgtgggagtatgtatctcatcattttttcatcagcgtcgtcttcatttccattcggcccttctcagtgaaaatgtcgccgattctccgcctaacaatgatcatttttcggtgttttcatcctccactaattgtgtcagcgaatttgggactgtcacggccgaaaatggacagaaaatgcaaaagttctgcgattttgtcgtttttctttttactttttcaatttagcggttacgacaatcgaataacaattgaactttcgtctgcgtctgtcgccaaattgagtggacttttcggtgaaatctgttagctttttgagattataaattctccttttgctttaaggtgatggctcttcgtcgtccatcgaattcccttcatcggttgaagtgaatttgccgatttggctttgcgaatttctcttcaaagcaacgcaaaaaatg

SEQ ID NO: 105958 - DNA, 80 bp, Heterodera glycines
actgcaaatttgacattaaaaaaatcaaaatccaaaaatttaccgcaaaaggaatgccaatcaacagaataaccaaaatg

SEQ ID NO: 105959 - DNA, 358 bp, Heterodera glycines
cgaattgctttttagcgttgataatcaggatattgctcatcttttgcggctcccgtcagagttaagatagatgccgttttccgctgcggtgcgcaaaaacagcttgctgaacgagagtgtaatcgttggccaggcaagtaaaaacgtgacggcaggcacaacagtgttgattcttaatcaacaatcacggtggaattttgcctaaacgctccggcgacagcgccttcggccggcgatccttgcgccaactgtgacagccaccccgcagatgggttactatcgcgggcagaatcgacaagcgatgccttattgtcgtccagggattgccaagccacggtctgaggataattgagtaatg

SEQ ID NO: 105960 - DNA, 655 bp, Heterodera glycines
aataaataaattttaattaaattttgaaaaaactgcaaaatagatgttaattttttgattaaatcgtatttaaattttttatctcaaaatcttattttagggctgccttattttgaaaccatcagatacattctaaatatcttttaattactggccaaattatccccgaaacgccggggatttaatctcagagaacggggaaaaatccccgaccaaattatcgaggattgtggcttgtagaaattaaaaatgtcaggagaaacaatttaacgctaaattaattatttttttttttttttgggatgtgtgccaatggcgaattaattgcttttcattcttttaatgaaagggcaaattcagccgtttttgctaaatttgggcggcattggcattttcgtaagatgttaaattagtttttttactttaaaatgttttaaggggactggaaaatctgtttaaaattatttattttaaattttattttaaaattcaattaaatctattccacattaaaatgataattaaattataactattttcctcttaattagcatttttccgcaccgttaattccaatttttgtgccattttcagcccattgaatttgtttaatttaaatcctataaattattttagaaataaattgtaaaaaatg

SEQ ID NO: 105961 - DNA, 179 bp, Heterodera glycines
  unsure (1)..(179): unsure at all n locations
gggggcagcattgcgaggcgtcactccgttgacgaacggagtgacctgatgggggggggggggagaggaaggtantaatgacaatggaacattccatcccttttttcatcttttttttctgtttctaaattttttccccttccccaatttttgttttttatatcatcaattttagaatg

SEQ ID NO: 105962 - DNA, 153 bp, Heterodera glycines
ggtgagactcaatctctggggaatatcttccctatatcctgtagtttagttgtgcgttgggtttttgctccccataaatgtttgagtaccccaaccggacacttgaaaaaatcgatttttttgtttcataaatatttttttcagaaagtcatg

SEQ ID NO: 105963 - DNA, 1003 bp, Heterodera glycines
aatgacaaatgaatataaagaaaaaagaaaatattcaagaaaaggaatggcaccaaaattatgatgaaatttgtaagaaaattggagtaagccaaggaacaattaacaattagaaaatggaaggaaaaactcggattaagtggtaaaagaatcactgagaatgaaaaaaatcgaaaaaatgaaaaatgttggcaaaataaaaaaataaaaattcaaaaatgagtgacaaagaaattgatcaaattatgaaaattgatagaagagtatttctattcgtacgaaataatttggagaagaaattttggaagaatcattaatttctgttattaagtattacacattaataaaatgagaacaattaaaaaaaagttttgcaaaataaaacctaaaaaataaatttttgttatttttaaaaatttggcatattatgatcactcattttgtatttttttttttaatttttttttcattaccaaattatttcttcaatttcctaattatataataaattaggcaaattttcttgctaatttcggcgagatcagaaatggcacacttattaattaggctcattagatcctttaccttgacactaaaaatgagttggacagcatttacgcacctttgacaccgactcttcagacagatttgaagttgatgacgaaatacgattaattttttcaaaaaaaaatgtttatcttgagaaaatgaataaaatatttgaaatatttaaacataaattgtcctatttttgcacatttttgtcatggttttggtcaatgcaaagcttttcattttttaatgggtaatgcttagcgtttgaaataatttcctaaattcattaaaaaatattaattttatatagagttgagcgggaccgggaccggggcgggtaatcccggttttttcaggtcccggtcccggtttttggaaaaacagaaatcccggtcccggttttgccagtcccggtcccggcgggactaaataagcactggtaagaatg

SEQ ID NO: 105964 - DNA, 94 bp, Heterodera glycines; identical to SEQ ID NO: 97954

SEQ ID NO: 105965 - DNA, 1003 bp, Heterodera glycines
atcctgcatacaaaaaagtagagtgccacgggaccgggaatttttgccaaaaccgggaccgggacttgccgggacctgagaagccgggaccgggacctcgattttttttcgggaccgggaccgggaccgcaagaaaaaccgggaaccgggaccaaccgggaaattttaaaaattcaaaaaaattttaaaaattaaaaaaaaaattcaaattttaatttatatcaagtgaaaataatacaaaattatttggttttttatttaataaattaaattaatgaaaattttcaaacaaattttcttcaattatttcaaacaattaatcatttttggactaaatcatcgaatattaatagaaattcagatttgattttcacatcactttttttcggagcgcttttccaaaaaacttttgggaaagaaggggtccggcggtgccgataggcgccgccgaggggaaaattttaaaaatttgggtgcaatttgttaacagattttcaacaaaaaaaggttggtttttgcgattattaagctcaatcttacatttggcataagaagaattgtgaattttgtcaaaataaaaccaaataaagtctttttcgttggtcatttggtctaaattacaaagaggaaaattgtctataaaatgaacgatgaatgtataaatattttctgattgcatattccatttaaatgcgcgagaaaattggaattttggtcgttttcaaaattttataccttcaaatctaaatattcaaaaaagaaaatcgcttcaataaattttctttataaaaattttgccctaaaaaatgcgcggcgcgccgcgcacagaaaaatcccgcggtcgcggatcgcggattcaaattgccgcggtcgcggatcgcggatcgcgcaaaaaaaacgccgcgaatcgcggatcgcgcatcgcggatcgcggtcgcgtcccagccctgcggacgactttgtcacgtactctcatgcaaatttggaggggaggaaggccatg

SEQ ID NO: 105966 - DNA, 56 bp, Heterodera glycines
ttttttcaaaatttatatcgaaaataaattatttaaaattattcaattaaaaaatg

SEQ ID NO: 105967 - DNA, 1003 bp, Heterodera glycines
tagtacataatcaattttttgttttaatttaatttttatttttgcttacttttcaagtttttaaatttttatgaaaaatctagtttttttggaattataaaaaaaatttgtttacaaattgcccaagatatatgtatatgcgttgccatgacatttttgaattcgggacttacaagggaacctcgcgaactgtaactcggaaaatgggtataaatttggtaccattcgatagagcagggtcgacttctattgtgaaacaaataattaattgagtaagaaattttttctaaattgaatctagaagattgattggctcgacaatttgtctcatttaatttgatcaatttgccacaaattcgccgattttattttttgttgatcactaattattccatcagccccctcttgccaacccccgcaggagaaaccgaacaaatgcaatttaatttaattgaaaatttaattgcaattttaacatttcaaggaaaattttttttaaattattgaggtttaaaaatttaactttttgaatgaaaattggctgaatgattggcaatattgtgataatttaatttttaaaccacaaattttctcagcacttagatttgtttgttcacccaatcaatttcatcgatttatttgtcattttttacattaattgattattggggggctgtcggggggggggggaggggtaattgattattaattttaattattccttcccaaaaggcatattaatcattttttaaaaatatcattaccctgacaattaaattgttcgactcaaatatatgtcaagagtctcgacctggtcaaaaacccaaccatcaaccttttactttaaattgattattaataattgattttaattaaccctcggcggttttttttaaattcaattaattttgacttaaaatttagctaaaaatagtttcaaactgcgaaaaaaccatctatgaatcttttcacctcagcctaattacccttaattacccaaatg

SEQ ID NO: 105968 - DNA, 1003 bp, Heterodera glycines
ttattagaaagtaaatttacttcatttgcaactgcaatcagtgaataaaaaaattttttgcttaatttttggctgaaaattatgtcactattcgtcactattttggatttttttcactattttggcactttgtcgtcactattttagctaaatattttgcgatttttcgtcactaaaagtcggggccctagatataagcatcaacaaagtagataactttttaagtcattttaaggctatttaaaatcagaaaaaagtcatttgactaaaattcacagcgacattaattaaaaaattttattagatgccagtaatttatgaagaaacgcttcaaaacttggaaaatagcgcaacaaaaattattaaatctaatagcaaatttcttctctgtcttatttgatactttgtctcagttacactttaaatcgaattgaatattatttgacttaatcataatttattaataataacaattatgtatttttgcgcataaaaatgccatttcattggcactttttccccatgttcgtcaaatgcacaaattaaatcgcaatagtattgtcgaaaactaacagcaccaaacaaaatacattaatctaatttctcttctgaattcttggttttttatctcagttgtttcaaccgtaaattgctttatgtattagataaacatttatttgctttaatggcactcatcagaaacgcactgtcgagaatttaattataataattaaattgcgcgtcaaatgaacacattaaatcacaatagcattatttcaacttttgaaagccctgaatttacaattgtcggctgaaattttaaaagaatgaatttttctgcggtggaccctattggatattcggtacacatttttgaatttatttaaaaaaatagttagcatgtcatagatgagcaactaaaattagcgggagtagaacggatttgttttatacatccgagatcgcccttgttttcgatccgtgagatgcctgtaccgtaatg

SEQ ID NO: 105969 - DNA, 56 bp, Heterodera glycines
tgatagttggaatcatcaccaggcggttattgatactttttgtagaacaaacaatg

SEQ ID NO: 105970 - DNA, 843 bp, Heterodera glycines
tttagcttttcgcatttcgcttttttttcatttcgcatttttcagtttcgcttttcgcatttcgctttttatttttcaatttggcccatccctggctgacacacatttgtaatttccaatttattaataaattttgaaaaaaccttggcctgggttttcagtaaaaatccatggttagccaaattgtgcgagctctatgaaatgaaaacgcgaaattggattttattagccacaaaatccctcttccatttaaattttttccataaaatttgggaaaattccctggactcgctgcttctgtttactggttaccctctccccctctgtgctgtgttctctctccatcaatattatattccatcgtttgtcacacattttgtttgcttccccctgtttttttttgttttgttttgcttttgtcgtcttcggcacaattgccgccttctctctctctgcccctctctgtttctctgttgtgtctcctcccccaccccagtccctctccctccgtttgttccgttgtactttttctctttttatgatttttttcgcccacagaaaccacccatttttttcagttacacattatttgcaacaacaacaccaaatattatagttttatttgcgcgttgaaagtttaaaagtcaatgagaaaaataaaatgtaaggaaaaaacaccacacgcattttccaccattttttgtgccatttcggtttccgtttctcatacatatttgaaatttatgccaccattttttgtttcaatttgaattgtttgttttgccagcgcggttttaattaaatttggatatctgaaagccgacggacggctctcttctcatg

SEQ ID NO: 105971 - DNA, 487 bp, Heterodera glycines
gagattgggtaaattccccctccccgaaatgaaaaatttttccaagaaaaattggcaattttttaaaattttgaattattttttcttagcaaaatgcgttaaattaaaaaaaaaaatcggtggcgcccaatcggcatcgccggacccccaaaaggtaaaatcatagttggattcataccaaggcccagaggccatttttcggcaacccgagtttttcataattctgattttgtccataaacctaggtccaaattggatccaggtccacgattaaaacattagttgaaataaatgtaaatttcagaaagaattattcgtgagacgataaatgttcaagtaaattgggctcaaagacgtaaaaaaatgtatttttattttgttccaatttcactcataatttttaatacaaatgtttatggcagatattaaagcccaaaatataaattttgggtagcaaaatggaaaggaaacacatcaaaacggaatg

SEQ ID NO: 105972 - DNA, 1003 bp, Heterodera glycines
aaattcaactaattgaaaaattatttttaaaattaaaaatgttttaaatttatataatgaaaaaattaaaataaattcatataataatgcatttttgtgtttaaattactgcaattaacaaatcatcattttacgtttccgtcttaatattcataaaattatttttcatcaatcactaattatcatcattttccatttttgaacgatgaaaaattattaattaaaatgctgcattagagaaggcctgcgcaagttaaaaaacgaaacaatcaaatgggggaaagggcaaaaaaaataaggacacagcgccgaagcgaaagtgacacccccaaaaattggtggcggggagacgacggacggacgaccgaactgtgatcagcagcagaacagccaacgaaatgaaatgtcgggccagtcccatttgccgttgggcacgtcttccctgcccgtccccacgcccgaggccatttgttatgtgccggaaaaaagggtacccccgccccatcccatcgcgacacccctataaattgggcctcctccaccccatcatcaccactcattggaatgaacagtcatattccatcatattccaattagcaattggagtctcgtcaattcaaacaaaagtttcactttatgtctcaatattcccccaataattatcattaattaattgtccagtcttttaatcaggttttgatgccgtctcactcattgaaaatggttccaattacacccaaaaaggcacccggccccattcctttcataacggaccccgaaaattgagctttcttgaattcgaacagaaaaatcagccggcccctcaagaagcaattattagcatacccaaattatatttcctaaaacatcccaaaagtcctcaagaaaatctcattaattttccctaccttttttttgccgcaccgctcactattaagcattgtcccaaccaattaacaatttcctaccccccttcaggtagaaaactttgcaaaaaaaaatg

SEQ ID NO: 105973 - DNA, 92 bp, Heterodera glycines
ataagttggggcagagcgggaacggagatgaaaataagaaaatgcttttattatctgagccagttacgatgaaaattacttgcgtgaccatg

SEQ ID NO: 105974 - DNA, 153 bp, Heterodera glycines
aaaattctttatttttatggtgagatgaatgatagtattttagggattattcggggagggtgtcgagacttttaatgggattccggacatgaataagataaagaacaggaaaaacccctcttactgatacttgacgatttaatgcttaacatg

SEQ ID NO: 105975 - DNA, 153 bp, Heterodera glycines
gggctgggcattttatttaattaaatattttttgcttatatgtagagaccggattttatgtatatatatatatatatttttgcggcttacttatggcgaaagaagcccaaaaaatcgcattttatccgaatttcgggctctaatttagacatg

SEQ ID NO: 105976 - DNA, 571 bp, Heterodera glycines
atcaaagaagaaaaaaaaagttatttgtttttatttgcatgccttttttgttgttgtttttatattatttgtgttttttccaccatttaccgctgcccatagtcttccccccccctcggcaacaaaattccgtgatctgcaaaactggaacaaaaaaaccaaaaaaggaatactgaatggcaatgataaaatgaaaaataaataaaatggcggccaagaattagtagtcttatcttgtagcgtacgctgacccctcctattcctcctgccttccacttacggtggttgagttgactgctgctgttagaggcagagatgacaaaacatggaaagactatttgtatatgcccgcggggcagtgtctaaccaaaaattttgcataaatctaaggcaggaatgagataaatagtaaacagattttcacttcatcagcaccgcaggcaaattcattctcctcattgcaacgatgtcgctccacccctcactcttggctcctcctccctttagattcaactgattcgcctatttttgatttagatattaaagaattactacaatattttcagcaatg

SEQ ID NO: 105977 - DNA, 144 bp, Heterodera glycines
ataaatccagaaaacgttaaaattttcatatagcaggaaatagccatgccacttgatttttgggtttattgcagggcgcgtatctgtccttatttataagatttgtccttatttggagggtccaaatcttacaaaataaaaatg

SEQ ID NO: 105978 - DNA, 607 bp, Heterodera glycines
atatatattgtagacaattttatttacaacaatgtcgtggactttatgcgcggactgtcactgtatgtgatggcggcgaaaatttgcatactgtacccaagcggaacggtaccctttttggtgcaacagttcttcctcacctattcactgtggtgaacacattatcggacaaaaatgaactaaattgccgaaaaaggggacgaaagaaaataaaacgatggtcataaggactcccggacaatccgtcagcaaatttatattgtgaaaatgaattgaaaaaaatttaaataatatttttttatattataaagtaatgaaaaagcattttaaaaaatttaaacgatactttcttaagaaaataaattaaattgaattattaaacaaagaaatgccgttaataaatctaataatcgcattcgcaagatttgatttttaattattgctcaacaaataaaatttgctgacgaattttgcactgacggagattccgtagagacattttctaagacgaatatcaccttttttgactcaaaattttcctcagcatttttttcggctttcaaattaaaaaaaattattaaaattcatttcataattccttaaaatg

SEQ ID NO: 105979 - DNA, 1003 bp, Heterodera glycines
ggttaaattctacgatcttgaatagggctccgatttttagactaaaaattgctaaaacggttagtccttagaccttaagaacaaaaaacaagccttaaaaagtcataaattaggactgtgtatatcggcttatctgtatcttaattaattcgtcattccttatccaattgaccaaaataaaaactagagtaaaatacactaattgtaaatttttaaagcattaactgaaaaaccttttgggtaacttttcaaaaacatacaggtcgataacgaaggttgttcatacatataaggccaatttgtactgttttcgtcctaaaaaatgtcaaaattttaccaattttccggatctaatgttctctattttaacaagaaaatgtttcgtttcaaggaagttgcaaaaattcaatttttgacaatgcctataggtttttttaaattaatcaacaaattttgagattttgcaggatagagaacatttagattgtcaagatatcattaattgaaaggttccaaattttggtctggaaaacagtatggtccaatacgactcgggttttaccgattctttggaaatataccttaatacattttttctttgtttgcaggtccctaggagctcaataggaaaaatagccttgtctaaaattaagcttcctgtcaactaacattgttaagcttcctgttattacaggaatcccaaatccaaatgtgagaatttaaagaacgcgcttactcatgaattttatgcatttttgtcggattctttgcccccccccccccctcccaagaagttagtcgcgatagcacgtaaaaatactgcgatgtaaaacctgcttaatatcagtgtgtgtgtggcgttagatctgcgcgtcattatatacgacattaattgcgtttttaaaataagaaaaaaaatatcgcacgtctttaagataaaataagtcaactgatagccctttcttgaattaagtcagcgaagtgtgaagaatttttaataatg

SEQ ID NO: 105980 - DNA, 139 bp, Heterodera glycines
tttacggcgatttgacctacgcggaaggggccaacttctcacattggccacgctgtccccgcgagtacctatcattatctgcgacggcattggcaagcgctatttggtgcccggctggcgactcggctggctcatcatg

SEQ ID NO: 105981 - DNA, 671 bp, Heterodera glycines
gatttttcttttcaaaagctttttttagataccaaatttgttctgtttagttgggaatgaagcgagttttatacacttttaaaaagattcattttttatttaaattttccttctgtttaattgacctttatttgtctcattcgactgcctcatttcatttcccacttaatttgctcaaaagcattaattcttcactcttttttcaaataaatgtttttttccgactctctatgaaattatgtgcctcggcatttatgaaatttttaaaacccgcaaatttgattgggaatttttgcactgatacgaaaattttttcttccataaatggtgtcaggttttccaaaaattttcaactttcttgattcggctatgcatttatatacaaaatatggaacaaaccatgcaaataaacacattggcattgggagtcacttttaaagttttaaattcatgaatttaaaccattttttaaacttgaaatgtatggctctctctgatcacatcatcattagccaaatgatctctgatcacttcttcattaaccaaatacaattttttaataagctatctctgatcacttctccattagccaaatacaatttttataaacttatttctaatagattttgttttttttctttaaaatccaatctgcttttctcgacttaatg

SEQ ID NO: 105982 - DNA, 57 bp, Heterodera glycines
caaaagtgagtaactcgaactttaaaacattttgaacattaataacagattccgatg

SEQ ID NO: 105983 - DNA, 1003 bp, Heterodera glycines
aaaatctcactagacatagaaatttgggatgaacgggatcagggtttctggaaagtcgggtatggagtccaatttatttgacttatctaaatcgccgccaaagaaaaacaataagagagaaaaatatatacctaggattgaatcgaaccctcgacctcaggtatagcaatcggctcaccacccaaaccagtgctcttagaaaggaaagggaaaacatgtttgaaaaaaacattgaactaataatggctaatgggaataagtaaatgagggaaatacgtcgagaagcccttacactttgtctgatgttctttgatgcattcctacatgaatactttgcatacattagttgattggttatatttggtttaacttttttaacttttctagattaatctaggcgctgatcaagaactagcttcaaaatataaaatcacgattttatctatgatttcatcatatgattctgtcgatgagttttcttagtaacattagctgaggctaaaacttttaggagagtattgttcaatatttggcttttgtttggctggtaataattcgttcacttccttttcttttatattactttgttcctttcatttaattattatccttttattccacgtttgatgaaatttgaatgagcttcgccgatagccataagaaaagctttgttccaagaggtagaaaaaagaaagaaattggtaattaaactaaaacatattttaaccattcagccggctatcagtctccgtccacttcgttttcgggaggtttgaggaaggattattattggaacagaagcggatgttccacccccggctcaatcacttcaggcaccagcagattgtgcgttcgttttggcatatttttcggttgcgtcgctttagtttatgttaattacaataagcttattgctttcaatgtgttatttatttcatgttaaatcattctctcctttcgcagttcgtcctcaaacgtcggttgtttttccgccgttaaaatg

SEQ ID NO: 105984 - DNA, 220 bp, Heterodera glycines
atgatttgaatcacttagagcaaatttgtcataaaattggttcgcaaacaatcgaactgaaaaaggcaaaagaacaatttactttaaatattagaaatcgtcaaaagtacaaaggagaaagcgatcaatgggagaaaaagcagaaattgacgccaaaatcaagaaagttggataggaaaaacacgttttggacaatgagataaaaaatttgaacgaaatg

SEQ ID NO: 105985 - DNA, 283 bp, Heterodera glycines
ttaatctaaaagcatttctgataataaaaaagaaaaaaaaattttgaaaaaatttgacccaaaaggggggtacaaactgcattagtaccattgtgtggtcattgaaaccaatttaatatcaaatatcaacgggtcccacccactaaactgttaaaataagcgagtcattaatttcgataatcatttttggtacccaatttccactccctctccccttccgaatggtcataatgtctttttgctttaggacgagtctcccattctgatcgattttcctcaaatg

SEQ ID NO: 105986 - DNA, 544 bp, Heterodera glycines
aggatacgcaggaaaattgaaggactatgaaaatacggaagattcgatgaatgccccttagaatttgtttgatttatgttttttcaattatgttatgttatttgctcaattaataaagtattttattaattcattaactggggatcggatttttaggctctaaaaaatgccaaaataagcactaaccttttaaaaaagaatttaatttggggacgaaacgactcattttggcttaggggacgagacgacgcgggacgaaacgacgcgggacgaaacgacgcaggacgaaacgacgcgggacgaaacaacgcaggacgaaacgacgcgggacgaaacaacgcaggacgaaacgacgcgggacgaaacaacgcaggacgaaacgacgcgggacgaaatgacgggcagcgtttaaactagcgccgacaaaatgaattgaaacgccaaaaattatataatttagcgctaattcaatttatctgactagcggggtcagcgccttcggcgcatcccccgctaggcagtacgattgtgttatagaattatg

SEQ ID NO: 105987 - DNA, 653 bp, Heterodera glycines
aaaacgtaaaatatggacataaaatatggactaaaaactgctaaaatatatgttttaaaccaccaaaaattccaaaaaatgtgtgtttattcaatatttgcttaaataaacttaaaaagtacaataaacaaccaaaaaatggatttaaaacttaaaaatgcaaaattttattttctccattgtataaaaaatacttccaagttttgccaaaatttcgaaaaaaaaagttttcattttaaaaaaaaagaaaagttcgcaaaaaaatggcgaaaatatttataattttcgtgaaaattttctaaaaatagccaccgaaaacaccgaaaacacccaaaatatggatttatatggactttaaaatctggtaaaaatatttgtgccaaattgattaattttaattgtttttaggaaatcattcggactcatttatggaaaatttacgctcattgttattatcgtccattgaaatctgagcaaaaagggaaaaaattctagtgtctgaaattcaatcaaaagaaaaatttggaattaaatcatttgccaaattaatcaaattattattggcggaaaaaaggcaaaatcgacaacagaaaaaggacaaaaaagatgaaaaatcaaaaaattctgcggagaagcagaagttgaagcttatg

SEQ ID NO: 105988 - DNA, 121 bp, Heterodera glycines
aggagcttttccttttgtttcccttgccaaattagcaaatgctaattgcccacgccttttcgacaaatttcaattaatttaaattaattaaatatttatttttctaaaaatcagtctgatg

SEQ ID NO: 105989 - DNA, 190 bp, Heterodera glycines
atcagcaaaacgtaccgcggcacacttgacaacatcccctctctcaacaattccaacgaaacgacaacaatttttggacggcgcagcgcaattggacatcgcagcactgctaaccagcactgaagtgtctgaacccgttcgtgcagtcatttgccaactggatgcacttctcaagctcgcggtggacatg

SEQ ID NO: 105990 - DNA, 286 bp, Heterodera glycines
aattagagatctaaatatttagaacggacggataagggtacatacttatgggctaaataacgtgtagtccgtaaaacccgtcatcggctgagaaagacgtgctacgggttcataaaaacccgtataaggtttcattgcggccccagttattcggtctctatccagaacagagtcgtgcgaaatttcaaaatttaacatagatttaattttatagtttaattaagttttggataatgagttcatgaaataattttttgaaatgaattacggttactattaagaaatg

SEQ ID NO: 105991 - DNA, 539 bp, Heterodera glycines
aaaatcaggtattgttatttgattggactcataaaatacttttggactcataaaagtcgcttgggctcctaaagtgcaatagagctaaatgtactgtaacaaattttacaaaaaaagcctaagcctagtaccaagcaggcctaaagctaattttgtggccggagtcagcaaaaaacagcggcaaacttttcggaaaatggtaacaaatgaattgaatctataatttttttttattcatggtaattaatttgaattacttttgctatatatgcaaaattttaaatctaaaattcacaaattaactttcaaatccttcaaattttaatcgtttggaatttgttgcgctttaattcagtttttttaagattaataaataaatttatacaaaaaataaaaagaattaaaataaaacaatttgataatattaaccataaaagataataaataattaattaattttaattgaaatttgagcaaatattaataaatatataatagaaatttgagaaatttcgatttttttttcaattttagctatg

SEQ ID NO: 105992 - DNA, 352 bp, Heterodera glycines
aaaactgccaaaattgttagtttttaggttctgaaaaactccaaaataggtgctaaaaatgaaaaaaataaatgccaaaaaatgtcaaatttagtgggtgtaaaatgacaaaattttattcaaaaagcaaaaaattatgccaaatcagtattgagacacactatttttaaaattaaaaattcttatcaagaaaaaaatttaaaaaatttgtagatgaatttttgagaaaatttttcaattaatagggttgcctttttggaaataagccccaatttctaactttgtcaattttccataaaagttgcaaacgcgtcaaattcaaacacaacgccagaaacaagtatcgcaaatg

SEQ ID NO: 105993 - DNA, 330 bp, Heterodera glycines
aatgctcacttttttttgaattttccataccacttgcataaatttactgtcattttatgacagccaaaaataattctattgtgcatttgctgctaactatttcatgcaaagagcgataaaatattttcaagaatcttttgcattcgacaccgttgaacagttgtatgcgcattttaaagaagagattttgagctcccccggtgaatattacccaaaccctctttgtgtgcttgattgtgtacacattgtcaacgacgaacacgctgatttgccggtgttcattgaaggaacgcttgatttgatcgccggactagaactgtattccacatg

SEQ ID NO: 105994 - DNA, 152 bp, Heterodera glycines
cagcatttctcaatttgcagaatttgtcatatttatatatttagttttttgaaagtttatcccgcataaaacagacagtctttgattttcgccttttttagattatttgtgcagaattctattgacaagcaattaatgtgataaaggaaatg

SEQ ID NO: 105995 - DNA, 311 bp, Heterodera glycines
cctttaaggaatagtaatgcaataaaaattgacgatgttggtcgacacataagttaatagtggtaaaaaagggggaggggtagaagcctaaatttacgggggaaagacgccttttcctttttaggccacttttttgcgggtgtttatttaaaactatggggaaggggagggatccagcggtgccggtggcgccacaatctttccttgactaacttttgcgccatggcttggttcgtacaaataatcgccagtacgtggattttgtatgcctgccggatcgcgtccgacaatgtaagcgttcacgccacatg

SEQ ID NO: 105996 - DNA, 595 bp, Heterodera glycines
attcgtgatcagcgaccccgaaaaccccaggaagacgtttttgacgaattaaaaaaaaaattatttttttttgaaaaaagggggggggggcaaagcacactattacccaaatgtctggggcgcaattctggggtaaaatgcattcttaagtcattcggatcaacgaagtatattcgatggtttacccagcagtaatcattgtaaaaaacaaagtgaaacttataattttaactggtgtaaaataattatagccgggatttctagtgaaaaaccttttttttttgctcaattgttttgctcaaaaaacgcatttctgcgttgaaattttcttgtattcgctaatttaaatctttcgaaaccattagccaagatataagcaaaaagatcgacccttcatgaaatcggtcccagtcccggattatactgctttactttgtgtatttgcaattttaggctgacagtttgaaaaataaaaattgggctcaaaactattaaaaatgattggactcataaagtgcattagagcccagtttttttggactttatgagcatttaatttttttcttagaatttcattcgaattatttttaggatg

SEQ ID NO: 105997 - DNA, 562 bp, Heterodera glycines
aacgatgagccgatacaacaatgagctttaattcctcataaatttttataaaatttgggaattttcatttcacatttaacaaaatttggctaataaatgtaactcaaaatgattaattggcaatttataggagaccactaaataggagaaatttcaaatgttttgatgtatgggtaatcagatcattaggcgagattaaaaaattttgaattttaaacatgtgatataatctttttgaatgattaatgtgtgatatagtggagtaaatctgtcggtacatcaaatgagcaatttgtttaaaaatgggtcacatccattatcgggaattcgggatgcgttggtgcataataaagctgcctcccatttggagaataataataaagccgttgtgcaaggtcaacagcgcaccatttaaatgcatccctcccgtctcgctctcattatttcttcacatcacttgctcaatattttcacatttatttatccgctttacattttgctatatcccaaatcatatcatttaagcacacaaaatttacttcatatttttttttaaaaaatg

SEQ ID NO: 105998 - DNA, 778 bp, Heterodera glycines
atttcaatgcattttttgtgatgggctatagggccaaatgttcacatttttcactttgtgccccatttggccgatttttgcccccctcaatgtccctcccccatttgctcacccatttcggtttaattaccccaagtttgagataaaatttggtggtaatttttctgtgctttctttctgtgcggccccaaatccgaccgttagtcccgtctcgatcgcccccggcccctttgtgctctccctccaacttgtcaaagtcctgcacccaagtgcaggcaattgtcggactccaccgcgcccacacccgcacacaaactcggagtacgataagtggcgaccctggcagggacaaccaagcaacgacaaacagcaacaagtgcgcgacaagccgcggcggtgcactcaacggaaaaggtgtggtgaatttggaaaaattcactcggtgttccaagtgttcgctctccgtggcaaaacttggacacaacaaggaggggggaagcaaaagtgggagttcggggaaatactgatcggtctccgtgccatcagtatttcctaggtcaaattactgctcggtctccgtgccagcagtattttgtcaattactggtcggtctccgtgccgccagtaatcagtaatattactgatcggtctccgtgccatcagtaataggggcaattactggttggtctccgtgccgccagtaatcaagcaaagtactgctcgctctccgtggcaacagtaccggtccttgccaagcaaaggaaggaccgttggcatg

SEQ ID NO: 105999 - DNA, 438 bp, Heterodera glycines
  unsure (1)..(438): unsure at all n locations
tnccacaatttgaaataataataattttcttattatatataatcattcttttgctttatttatttgtttttgccttaagtccctctgtttctgtccatcctaaagatcccccaatgatgacctattttccacaactcaacaatttatgtaatgttttgttgtccatctgttcgtctcctcccctttactcatgtcagtatttaagcgatgcctttgccctcacattcaggactttcctttaccatttcttaaacctcaggttccctgcctgaagctttcttatttttgcttaataaacttttggtctttaacaaataagagttttgcttttcttgctttaaaaccgggaaaaactaatctggtgttggacacaacacttatcgtaggtcattatgggatcgctcggcttcaccttattccaggggtaggaagccaatg

SEQ ID NO: 106000 - DNA, 141 bp, Heterodera glycines
caacgcatttataatataagaaaaaatggattaatttccaaacattaatcacgtgaacttgcaatttcgtcatccattcacaatgattgtgtctggaagtcggagtgtgtaatgcgtatgctacagaatttgcagaaaatg

SEQ ID NO: 106001 - DNA, 266 bp, Heterodera glycines
tcattgcattgtcttcatttcactcataatcatgccccaccccgcggacatggcactagctgttccaacagctaacagacactctcaaaaacattgcaaatcaaaatgcaaatcccaataaacaaaactccgatttattcgctacaattaattcccaattgtccgaattcatctacaacccggaggcggatttggtttttgaaatttggcacgaacgttatgggccatttcttgagacagatggacaatcattgccagatgaaatg

SEQ ID NO: 106002 - DNA, 221 bp, Heterodera glycines
tggcaagtttttccaattcggccacggcatggagttcgagttttttcagacgtccagcaaaaaaacaaaatgcctgcttgaccgaggcatcctttgcaacgttgacctaggtcgggaaaactttttaaaggcaaatccaattgtgagcgtattgtttttctcaacacctatattttcgtcattgaaaattgtttattttaaaagtttcagaatagaaaatg

SEQ ID NO: 106003 - DNA, 1003 bp, Heterodera glycines
ttacaggctaaaaatattataccagtcataaacgcagaaattaatgtccaatggaactaaaaaaatgaaattcttggcgaattccgattgaaaccccgacaaattcaaagaaagatcagaaaattcaggaacatgaaaatgaaaacaggaccagggatgccatggaatttggttgactttttgaattcactttttttaaattattttttggcgccgtgaaaacattttgccaagtttggtagtggagagagatttggatgaattctggcgatgaaaaaaaaattgaataaaaatgtatcgataattgaaaggctttcaaatggttggagagagaacccaatgagcaatcggttttagaacccctaaaacttgaaaaatttcgaaattgggccctcttaacctttttaaacatattttttacgtttttaattgatttaaaattaaaatggtgcaaaaaatggaaaaattgcatttgcccgacgtttgccctaatttattttgaatgtgcccctattccgggcactcgaaatcgcatctgtatcatgtccagtagagcattttttgtatcagtcacagattaaacataagccatgaaatcatcgaacacatgagaaagatcatttttaaattttcaatttggatcttctaacttttcacgtttaactaacataaagctcatgaaaccttctgtcagattaagaagttgatcagaagcgactaaattgctttttggatcgacttaatcttgaagaatgaagaaaattggacgctcctaatctttttgagtggtcaaacctagacaaattaaccataattcgaaagttcaagaagatttgggtcaaaaattgttggggaatccgaacggaatttgagtcttctgggacctcatactaattccaaccagcattttaatcagctattattatattagcagaactccagaacttttctcatttctccggcggccattgcttaattttttctgccacaattagtgaaaatg

SEQ ID NO: 106004 - DNA, 259 bp, Heterodera glycines
tgttagcatgaattttatacataaaaaacactggcaattttacattaaaaatctggcataatttaatattttagcaaaaagagccggcgaaaacagaaaattacggctttccctatgattttcattcaattttgcattatgctgctgtgaaaacaagcgggtcagttattttaaaggtataaatgaaaagaaaataatttggcaatgaatcagctattacaacttgattacgctgaaccgtttttaccaacgcacaatg

SEQ ID NO: 106005 - DNA, 867 bp, Heterodera glycines
cgctataaataaaggaatttttacgggacggcagttttacgggattctcgctcccgtaagacttcggactcccgcaaattatttttaccgggctctaaaaatggcacaaatagtatatattttaaatttttatttgacttttttcaaaaaaatctctttgtatttttttatgctaatctgtagcttagctgttcaaattgacaaaaacaaaaattattaattttttgtgctcttttaaaagtaaaaaactaaatagaaatcaaaatatttttatttagtcaaatttctgcgcgaatgacagaattcagagaggaattttaaaaatcttttatatttagacattttgtttttgtgcattttaagacaaacattcaacttctaccaattacaaacagtgacagaaagaaacattgtctccttcagccaaaaacaaaatgttattaaacactcccaaagcatttgaatcagagcgtttttgaggggggggggggggggcaatagccaaacaaacctttgtcataacaaaatgctcaaacttctcaagaatggcaatttaatttgtcgtggcttagcgtctgacattttaaaacgaatgtttgcgacgcccaagggacaatcgttaatcatcaaagtggtgccatttggacatatgtattatcacttgaatttttcgtgaatttgccaactctttttcaattccatttatttcaatgattaatcagtggtaaatgggagaagggagacggatttaaaaggataaaattttgtatataaaaacaggacggagagaagaaaaaatcataatttgaattaaaaattatttaataaaaataaaattaattattttttttagttccatcgaagatg

SEQ ID NO: 106006 - DNA, 444 bp, Heterodera glycines
  unsure (1)..(444): unsure at all n locations
ttttaaacaaatcgcaatgcaattgcctctgcctcataaaggcnngcccggancccnnnccnccgggnnnnncacatttaacgannncnccncgncccgnccanggnnncgcnggagcagggnngnganncgnaaggncaaaaacccnctactnnncnaaaangnaaaaanaaaanannaaanganangnagcnnangcnnngccccnnngcnnaaaannnaannnaaanagccanaaannnagnaaggangaaaanagcgggnnaancaccacnnnnaannanngaaggnngnnnannnanncanaancaaggacaaaaatcggagatatcgtataacaaaaaatccaattttggaaataggcgccagtctgctcatgaaataaattacaaatatttacagttattttgacctgagcgtcagtagtgaatgagtcaaggcatg

SEQ ID NO: 106007 - DNA, 383 bp, Heterodera glycines
caaaaactcagtcagtatacaaggcagttgggaaaaaggtggaacaattggtagctacgacaactaaagctccttttacaacgactaaaaaatcgaaaattgaaaacacactgaaaaaggcaacaccaaaaccaaaaattgtgggtttgaagagcagaacgcagaaggttcttagcacagttagaccaagcactaagaaagtggtcagtgagctttttccaaagtcagctacaactccgagtacaattttggtagtaaaaagcacaaataattccaaaaatttttctaagcatgtgctggttaaaaaacctgaggttgaattggaaaaggccacaacagcaagtctatttccaaagacaattaaacacacagaaccaacaatg

SEQ ID NO: 106008 - DNA, 573 bp, Heterodera glycines
tttcctaatgaggtcttaaatttttaccgaccttttctctttattttgcgctgctaattatcattaaatagttcagtgataatcgtttttcagtcaatgcgccctttggcggatctaaaaataaggaaccaaaagaggcgagtttttgacccccttcgcccgcacaaccgaataaaagttggttttttagggatccgcgcaccaggcggcttgagtggagggtccccccccccccacgggtgagtgattaatttgtagaataaaatttcttttctcattttcagatgattcggaccaggaggagaagcacggacaaaaggaggagaaggccacaaaaagagaggcaaattttcgaaaaaaataagacgactcgatttaaaattttacgcgatgaattttattgaatttttaaaccgcacattcgtcaactttggccgcatatttcactcaccgcaacagactcagcgaaatcaaaggctgcttgctcatgggcgactgagtcgtgatcccagccaaactacgacagcgcatcctcaccacactacatttcacccatcctggaattgtcgaatg

SEQ ID NO: 106009 - DNA, 1003 bp, Heterodera glycines
ccttagtccgtttgggcatgttctgctggtgtgtttagacggaccttggagtgatcgaattcgtgtctttttttgttgctaattcacttacaacaccaccacccggtgggcgcccgaccgtggcaaataattgcactttttgtttgttgggcagtgcttcttcgttttgtcgcatgcttaaatggccatttttgttgtgactttaattaaattcaattttccaattaatacaaaatattttttaaattttaattcccaatttaattttccgcttttacttatgtgactgagcgatcggtcagcacatctcgccgtatttcttcgtctgttttggatgattccttcagttgataaaataaaagtaattaaaaattggacggtgaaaagcacagaaaaaaacggaattcgcttcatttggataattaactaattaatggatttaaatttcactttcaaacttaagtatgcacacaattaatccttttgtttgtctaattgcctgaagcgattgacgaaaccaatgaaatggacggacggacggacggacggagagaggggagagacacctgagtaaattgcaacattgaagaaaatgaatggtaaatattcacaaaatgtgttaaatgaaataattagtgagcaacaggaaaagaaaaacaataaatgaccagaaaaagtcgaaaaaggaattcattaaaatatattcaattaaaaaattaaattaaattaatatttatttctttgattatttaatttaaaatgccatttcggtcccaaattatgtgccattcattgcccttattcttcttccacattttgttaacgatttgctctgtttgctctgtccctctcccattaatttttcggcaatttccccatttgcctttgggatggatttgtttagcttttcactaatttcgtcaattttaccaaattcattccaataaatcccaaaattcttaaactaatccctcccaaattttattcttttttttcaacgatg

SEQ ID NO: 106010 - DNA, 375 bp, Heterodera glycines
agtaaaataaattatttataatttcaatacttacctaaattattggtttttgcttataaacaaatccaaaaaatttttatttttgaaatattattttgtttccatttaccgaggtgttttcggttgacacacgtttggccaatcccgaattctgaacccataatatttttaatcacttatactatgaagcaggactgtatccagtaaaaagtttcgggggagtgcaccaccgaagagcttttctttttttttttgttctccagaccaaaaaaaaaagattttccggtgtcatttttcaagtttttagcaaaaatacccataattaaaggtaccgtgacataagagggattgacaaacgcttgggcacattaaatg

SEQ ID NO: 106011 - DNA, 285 bp, Heterodera glycines
ttgcggggtccgtcgggggtgtggcattcttacagtatgctctttttaggctctctccgtggaatgagtgatttggtccgttttctgccaaatgccttttctctgcttaaccacagggaatgcctttagacttgtgagtctgcaaatgtttttggctctgtggtcaattcgacttgcgattcggtcgacgcgtccattcgatcgatgtatacggtaggaagggatggggagggtacggtaaggttgagacgcaaaggaatcccatccaatcataaatggaagatg

SEQ ID NO: 106012 - DNA, 346 bp, Heterodera glycines
ttttagtgtatataaagcatattttggggtttcgagaataaatgcatattttgcattttagagcatatttaatgtctaaaacgctgcttagtcatgttttaatttttatacaattttggcattttttgagaaattaaaagcaatttttgcaatttttacggcatattttattgcatatttgggcatttttcgggtttttagggcgtattggagggatctttagtgcatattttatgcattgccattttttagtgcataaacttcgaaccctaataacaatggccatattttatgaataataaaaaaaatttaaataattttttaatttttcttacagaaaaaaatg

SEQ ID NO: 106013 - DNA, 616 bp, Heterodera glycines
cgaaagaaaattatgctgtttgatgacccgggaaaggggggggggggtgaactgaatttaaatggccaactgtgcaggaaattgagcatttagtttccgttaatcaaaatctatggagaatgatagcaagagatggttaaaagccaaagccgcttagagaaaggagggataaagaacaaagagaaacgggatttgggaaaggagaagaaaatatttttattcaaactggaacaaagaacgccataaaaaattaaaatacaactgcaaaaataaaatttacaatgtctacctaatttttcgagagcccgaatccgggaaatgggaaaacgaaaggaaagaacggcatggattgcgaacgggaattccgcttttcccaatccctgtaaaaatctcatccgggcaaaaaggacgggaaacgagagaatgggatttccgggttttccgcgggaatcgcattcccaccgggctctaatttttttcacttttctcttgtgacaatgagaaggagttttaaaattttacaatttttagtaaaaaaatttttatgtttgagatgttggaaaaacctattttgtaccgaaattatctttcttcaatctcttccgctctgctaatg

SEQ ID NO: 106014 - DNA, 119 bp, Heterodera glycines
  unsure (1)..(119): unsure at all n locations
catgatttctgactgatctttcacgggacagcagggctggacgtaattgcggattacggaaattacagcattttttggagtntagggttacgagtttccgtaattgaaaacaagttatg

SEQ ID NO: 106015 - DNA, 263 bp, Heterodera glycines
  unsure (1)..(263): unsure at all n locations
tcccntttttctccaaaaaataaatacctggccaagcctttaaaagtgcaaccgaattatggaattccttttttctacaggtgtccaaagttgctgcttcttgggtcgtttcgccaattctttccggctcaatttcctcaattatttacatgtgcatcgattttgctgtgcttagaagggttaatttggacaatgtgattaattaaggcatttaattaatttcattaaagaaaaacccgttcaaatgtggccttcgaacgatg

SEQ ID NO: 106016 - DNA, 1003 bp, Heterodera glycines
actaaaaatttatgctattaaaacagcaataatttagttggaaatatttattgaataaaagtaggagcagtaaaaaactgatgtaaatggaaacaattgataatgaactggggaaagaaaaggaggagacattttttgctgattgaaaaggcgaggttaaagaccactggcgagtgtgcattacatataaaaaaaggaaagaaaagaaagtaatcaatttttatccaaaagtactttgctccatattttttattatgcctttctttctcttttaactcactcataaaattcttataaaaaacattaaaaaaaaattttaaaacgaataatttaaatataatatttgacgggaaaatctcataaattattgggactcgcacccacaacaccccatgaccaaaggcaagcacactaaccacttgaccaccgggtcgcttgcgaccatcccttttaattcccttttcattttccttcttttttgggaaaaattccgaccaaaagtgcttgtaatccctttttagggcacttcccggacccggacccaaacaaccctggtatcattcgaaagcccaggctttgtagattggaagaaattgtttcattttttggtttgaccaattttaaggcatgcaaaaagcgttcaaaaatgggacattcaaaaaagtttgattttttgagtcatttttcgaacacagttcgaacagttctaaaccgatcgaaaccgcactatttttcccttatagcccttgaaaaactgcgtcgattgaccccacgctcgacctgtaaaactcgctagaaagtcttaaattagtttttaagcttggatcatgggtatattattcttatatagggaataattttgattccatatacaattgattatttctttgttgttgtattttacaaattatatattgcatatttgctacggaattttttatttatatgtatttatttaatatgattttgcagagacttttaagcatttaaagaagccgacatg

SEQ ID NO: 106017 - DNA, 58 bp, Heterodera glycines
  unsure (1)..(58): unsure at all n locations
aaaacttttaaaaattntggcaaaaccgacaatgacatagaatttgtttaacattatg

SEQ ID NO: 106018 - DNA, 438 bp, Heterodera glycines
ttttttgaggtgaaatctagaaaaacaaacaaaaaaaacatttttaattggaaaatagttttttagtatttaatatttctcttcctttgcaaagcccggtggcgcaatggaaaacgcgtcagccaacgaagctgaagattccaggttcaactcctggtcgggttgattcttttttaattttaattaaaacgaattaatttgcaattttaaattgttttttaaataaattttctaaataaataaacaaatcccatccaattggattaccccagcatttttctcgcgcgcaatacaaattgttatttttaccccttaaattcagtagacactaaacgctatcttaggcctgagtattttcactaatttaaaaatgccaaaattttttccaaaaattagttcactccgctcaacccaaatgatgatggcaccacgccaatg

SEQ ID NO: 106019 - DNA, 59 bp, Heterodera glycines
ggtcagtgttttcctttgacttttggcaattacatttttcgggcctttgttttcagatg

SEQ ID NO: 106020 - DNA, 1003 bp, Heterodera glycines
gaatttactgatatgggaacaaattttacaataatccttaaaaacccgaatttacgaatccgtacaattttctatactgacttgcgtttcccgggaaaattggacaacaaaaaaattattatttgatattagaatttttatttcactgaatttttgttgtgtttgatattattgtgaatttgttgtgaaattaaataattgttaattgtggcgttctgtttactattttatatttgattgtattctcattttctaatagggcttccatttttaggcacaaaaaatcgcgaaataggcacctaaaaaggcaaaaaaaatattgcaaaaataggcattaaataggcacaaaaatccccgaataggcactaaaataggcaaataaaaaattttttggtagcaaaacacataaaaattaattttaaaaaaacttatttttttcatttttgttgaatttttattaagaatttttccaaaaatcctgaaaaaggcgccaaaaatggcgaaataggcaaatcggcaaaaagtcctaaataggcaaagtaattgttttcttctctgtcctctaacaaatctgagtttgtttaattttgtgttccatttgaaattatagggattttcccaaattccatacaatttgaccggcaccctttccaattaattaagctcgggaaaatatttttaaaatattggtactcaatttgccataaacttgaccaaaatctttgttgaaaaattagtgaattttttaaattattttatcatttaatgacaattttcgagcaagcaaacaaacaaacaaacatacgtcaatccgttcttccgtaaatcaggtctctctatcagatttgaattacccatagaaagagaaagaatttttaaaaatatttcaaaagatataatgccatgaaaaatatataaattatgaaatgaaaagcatataatatatgtagataaagaaaattaaatttttaataattatgatccaattttaaagaggaaaatg

SEQ ID NO: 106021 - DNA, 1003 bp, Heterodera glycines
attttcttcattaataatgtttagcaataaaagaaatattttaatctttgcatcaatacaatttttgtgatttaaattgttcaattttctttttaaatcaatttgaaatatacttttttttaattgaaattaataaaaattatagaattctgtaaataattttcactaaaaaacttgtcatctcattaagtcccacatttgtgttgtggtcagttcattttgataacccaattaatctaatcaatctccgcggctttctcatttttctgaaaaaaatgaaatcggcaatgaagaaacaggctttatcaaatgttatgcaattaataatagcggtgctaataaagatacaaacaaaaagcggccattccaacagcatagaatatcacagggtcacactttttgcgatgtcctggatttgggatgaatgggttcttttttttactggttttatgtgatttgtgatataaatatgttaagctaaaaaaagaatataaaataaatatatttatttacattacataaggctataaacaaaattcaaaaaataaatctattatttttatagataaaaatcaaatcatagaaaaattaattttaaagataaatttgttttttaaattaaaattaatttcgttttattacataaaaaaatatttatttaataattaatttaataatttttttgaaatccagttttttaatattaaaaaatctttttctaattattttaaataattaatatgtcaaatataacgaaacaattatgatcacaataaaatttggtgcgcgctgactttaatggattgcttcaccgttgcacaaatccaactaattagtgcgctaactggttttaatggggctgaaaattttggctataattaacacattaagccacacttttcagtgacaatatttaattgtcattttagcttcacaaattaatatagtgtcttaaaaattattaatttaataatctaaaattactcagtttttttacagtatg

SEQ ID NO: 106022 - DNA, 359 bp, Heterodera glycines
  unsure (1)..(359): unsure at all n locations
ttttgaaaatataaatgatacttnttcaaaaattttttacgagttgccataatgtcgaaaatgccatatttatttattttttaattttctttcatttgggcctttcaaacgccttaccacgcttgaaaagcaaagtcttcaaggcaaagttaaaacaaattaattaggtcataataattgctcttaagatcgtaagtgctgttcgcaatttgtcgatgagcgctgacttgttagaaaaaacgattgtgatttggaattgggataagcttgagaagcagcagcagggccaactgccttcttttacggacattgagcaaataataaaaaaagctcaattacccacttgtaaacttgaaatg

SEQ ID NO: 106023 - DNA, 326 bp, Heterodera glycines
ttggaccagccgaagctaaaaaaatgcagttcagcacgccaaatccatcaccgaagaacaaataaaatcaggcaaatttcagtcaatcacacaaattttcgagcatgtcaaaaagcaaaaagcttccgttgcggagagcttcactgggcccaaaattgcccaaagaagaataatgtgtgcagaaaatgccagaggagcgggcacatcgagcgacagtgtgacaaaattcaggcatatcacaaaaataagaggagccaaaatccaaaagtgaatattgtgatgttgcccgacactttcatcaattccgtcaatcgtcgggtctaatg

SEQ ID NO: 106024 - DNA, 205 bp, Heterodera glycines
ttttgccagtgtagcgcgcgtgcagccccggacatctaagggcatcacagacctgttattgctcaatttcgtgcggctgaacaccgaaaatccctctaagaagttgtgcccacagaagcaatgagccaactatttagtaggctagagtctcgctcgttatcggaataaaccagacaaatcgctccacgaactaagaacggccatg

SEQ ID NO: 106025 - DNA, 1003 bp, Heterodera glycines
ccgccgaaataacgccagccgaaatcacgcctggacaaaaccacaccattatgaatatttttttaaattttcaaacagaattttttcatgaaaaagctcagaaaattttaagaaaagatttgttgaaaaatttcagaaaaatttagtaatttatcataaaaatccaaaaaaaaatcgcagaaatttttaaaaaattttcttgaaattttcttataaaaaatttcaaagattttttcattaaaaaatttaagttagaaatttaaaaaatttcaagcggcgtgattttgtcccgttccctttcctccattatttgccttaagaggtgttaatctgtgagtgcatggataccattcctattctcatagtacagtacttttttccgctttttacataaaggcatcatcagcaggtgtcgttattgagttttcaatttttctttaaaaattgatcggattttccagaaaaatccatcaaaatttcttgcatatttcaacaaaatttaaatttccctgtggtgatttcggcaccgcctcattcccccatacaaaaaataaataaattatttatggaatccaatcagtgatgggagactggattaattattttataaaaataatttttgataagttttggaaaatttttttatgtcaataatgcgataacatttaaaaccaatttgaattattatatttgtgcaaaataaatatatttttttaaataatcataaaattttgcaaatttcaaaaaataatctgtgactgttaggtctgaagacgtttcttaacaaataatcaggcaatttgtccaccctcttttgccgatttcattttattcaattttggcttcaaaaagaaagaaattaattttgtaattaacaaattaagaacggaaaatgcgttttttataaataacaaaaatattccaaaatattatttttttatttaaatatttttagctttttgtttttattttgttaatttttgctttattcagcgagaaaatg

SEQ ID NO: 106026 - DNA, 486 bp, Heterodera glycines
aaacgccaccaagaaaaataaaatgttgagaaaataaaactggtccaggttataattttttttttacaattttaacagtcagttataacaagatggaattccgtgtatcaaatgctcgatgtttttcgtcgccagaaaaaccgttactttcaatggaagcagaacgcactgaatttcatttccttggttcataagcaaagcgttcactgctcgattttgtctctgatcatttaccgccgctaattcagattgattttatatttctgcgccaactttgtcctttgttggagctgtttaacagagaaacggaaagagtaataacaatttatttatatttctcattttaagttttcacgtcaaaagtcaacttgttcttgcattttgccaactctaaaaaggctttttgattttttaaccaaagaagaacatccacaacaaattaggttaattgcgcagagtctcgctgaatctattggctcacgaatg

SEQ ID NO: 106027 - DNA, 458 bp, Heterodera glycines
ccgacatttgataccccccgtttttttaaatgttcggggatatccttagaattaaaacaattagactcacgccgccatatccgccccctgtatcaatcccccccgtatcgtccccccccctcccccaaaattttttaaaacaacgaaatttttaaaaagaatttttaaattttaataaaaatttttgaaaattaaaaaaaaatttagtggggggggagaacagcggtggaatggtaaacgaactgttcgcttcggcacacacaaatcaatttgtcatagaaagattaattttgatggaattgcattcgaataaaaaatttttttgtttggaacttttacgttttaattttggatcatcgacgtggctatccgcgacgcgcaccgccttcacttggctcaatggacagctgatccggattggcttcaaatacacacggcacccattctgcactgccatg

SEQ ID NO: 106028 - DNA, 1003 bp, Heterodera glycines
ttgttttacgccaattattttttggcaatttttttcgttttttaccgtccatgttgggggcaagcacaacattgttttaaaattgggaaaaatatattttaaagggttttcgtcaaaaatttcattgttttgttgcccgcttcctctcacttgctctacaacagattagaattgacaaaaattgagtgtgatgaaaaatgctggtcccacaaaagaggcagaaagggggggggggtgggttgagtgatttgtgctgttttcggagggcgttgtgattattttccaacactccgagcaaaagtcgatgtttttgtttgtcaatcaaaatcacatccaaaggcaatcaacaaagcaacgtccattcatatttacctattttgcaatatttgtttacattaccttatgcatattttgttattaaaaaaaagtttttacgtgcattaaacagtattgagttaaatttatataagtaaaaaaaaaaaaaaggtaaaattgttcgaattcgggatttggaattggtctaaatttaggtactttcccattatgtgaccgcaagtcaaaacttttctgcaacaaaagggatacataatccatcaatcgagagtgtgtaattgtggcagtgatatgcgtggtgcgagataagaacagctcaggacaaaagaatcccggtttgacgttgcaacaaatttgcgcgcccctttgttgattttttaaaaattttgccttgcggtcacataatgggaaagtaccgaaatttatgttgtattcataatcagcgcacccgcaaaatttgaaatttccattctctactatccatatttttgttcgaaaaaaaatttgcgcaatttttcagtttttaatattagtaatttgctgtgctctctctctctctttctgttgccaaccataaattcacacacatcatcatatcacaatgagcagccgggacagcgagtttgagctgttgaacgcatttttatgttttgaggatggcacacgaatg

SEQ ID NO: 106029 - DNA, 463 bp, Heterodera glycines
taacttttttctaaaacaatcaattttaattttgtttatataattagatagcccaaagattactctattgttctgctaaatttcaaaaaattttattgaatttcaagaaagctagggtcaaaattgttgagtcaaaatttttcgcacttttttagtcacaactttttgtaaatttttactaattttttgaaaatttcataaatagtagaggatgcttcgagctgtcgctaaatacttaattttattaatttgactaagcttaagctaagttatgattaattacttggaaaataaaattaaaataataattaaatttaattattacaaacacccatatttttgtcgcttcggctcagcacgtttgtcaacaaccaaaattctggaggtcggccaaaacaaaaagcaggaaaaagaatttaaatgccgggcagaaaaagaactgaaaattttaaattttgaaatg

SEQ ID NO: 106030 - DNA, 315 bp, Heterodera glycines
aattatcatattttacattcaaaaatatttttatttccctaaaataaacattgtatattttgagctcaatttatgggttattattattttaaggtgaatgatggactacttactgtttattgactttatcaaagataggattaactcttttaattccaaaacagtgaaagacgtcaattttaatgtgtacttagccttttgtatatgatgaaaagcaattggcattgtgccaatgccaaagcaacaaaaagtgccaatgaatgcgctaaacttggccattacttggaaattttgtatgaatatttgttcagaatg

SEQ ID NO: 106031 - DNA, 236 bp, Heterodera glycines
tctcgccgggacaaaatctcgccgcaaaaatataaaaaaaattcaaaaattgaattttttcaaggaaaaaacaacaatttttgtaaattttgaaagtttttatttttaatagaaaacttttggttttgtgtagcattctctgagagattttggtcaaaaactttttgtcaaaaacttattgctcccttttccgctaaattattaattttcataatttcagttggtttgcagcgatg

SEQ ID NO: 106032 - DNA, 208 bp, Heterodera glycines
cagaggggggctctaaatcagggggggcttaccctcaaaaggggggctttatatcagagagtggctctaattcagggggggcttaccctcaaaaggggggctttatttcagaggggggctctaattcagggggggaaaatcccagcctaaagagcataatcagtcaaaatcattttttaaactgaatactcaattaagtcaatttatg

SEQ ID NO: 106033 - DNA, 1003 bp, Heterodera glycines
  unsure (1)..(1003): unsure at all n locations
aagcagccacagccattcgttntagcgaaaataaattgaatttgcttgggttccattccttttatatgtagttattcttcgagacatttttttttctgttaggtacttcacaaccagggttgtcagatctgaggatttatcctcattttgtggctttttgagaaattttgaggcttttggggaaaatcctcagaatcttttaaattttgataaattgacaaaatgttttacaaatatttaataagtgggtttttaatagagcatcaaaacgaaaatctcacccaaattttccaaaaaatttgctaaattttttataaaaaccaaaaaagaaccaatttttttttccaaaaaatcacaaaattaataattttttaatgaaagtctgctaaaaatatgggcaaaattctcaatttttcccctggcggcgcctatcggcaccgccagcccctaaaagtcctttatttttgttggagatggatgttgatgttggattttaattaatttgaattagcgccatacagtaacagtgatgttcctgtttgtttctccgcgccacatttccagtcattattttccctccgttgttttctccccattcattaattattttattcttaatttttcggttctaaattaaatctgttttgctccttccattttcgtcattcctctgactccgtcgtcatcttttatttatttattgatttcatttgtctttccacaataaatttaattctgttgttccttgtggacacaacattggcgacgcccgagtgcatattttgtgcattaccgtgaacttaccaaaaagctactctgacggccacctcacataacccataacactaaagttattccccatctgaccgcaagcctgaagagtttctcagtatattgactgagtaaagctaagtgtgtgttcggtatttgccaaatattgcaagtggcataaatttaattttatatttgttattgtcactttgaattcattctctctataatg

SEQ ID NO: 106034 - DNA, 1003 bp, Heterodera glycines
tgaaagtttgcaatgtgtatgctgttgttacggtatgcgtgacgtttgtgaatatactatatgccaaaattaggttactgaaatggagtccaaaaggggacttctagtgaggtttaaatctcttgaccaaattagtttagacgggaaaaaatttctcttccatactgttttttgtttcctctacatacctatcggcaatcgtaaggaatgggggtccctaatttaacttttttattttgggttcaaaaccagtttccgggggttttcgagggcgctgattacgaatctgaactcgaatttgcccaattccgaatcccagacccgaattcgaacaaaaaaatagaaaatttggcgctactgtaaaagtggtcccttttgaaaatttttttcacttttttttcatatatttttattattattttttattacaattatccatccttcctttgacttcgatttatccgagtcatatagtctcaacaattttggcacaacaatttgttttggataagtccgttgtgtgccaaaaattgtaaaatctcttcagtttttggaaaaaagccatctcaaatttatatcgtccaatgttggaaaagcgatgagcggcagattgttgtaatcattagggttgtaaattatatggattaacatattttttctgcgcatatgctataaagaaaggggctcaaaaatagcatttctgcgttaaaattttttggtttgctgaaggtttttagtccatataaatcagggctgcacgcaattacggattacggattgcggattacggaaattacggggtttttagagttacggattacggattacgggttacggatttttgagaattttccgtaattttgatccgtaatttgacttttggattagttttcgagacgatttcttgtaagattattttttataaaaactattttttctattttttatttaaagaaaatatgttcatttctttaaattcttatttctttagcaattaaaaatg

SEQ ID NO: 106035 - DNA, 1003 bp, Heterodera glycines
cagacccgaatttgaacaaaggttcgaaaattattatcagatttttggttcaaagtgatttaaataatcgtttattaatgagtttcagttgattccgcgtatttagcctaattctgaactaaaaagcaaagtttgaaaaacttgaattttcgaacctttgttcgaatccggttcgggttcgtatttggtcgaaatcgatgtcagaatcggaaattccaaatcaaaaattattcagttaatttgatcaggaagtttttgggatcacctgaaatactgagacaaggttgtttaccttaacacataaaccctttttgcggcacggttttttcaaaaactttgtgggtcaggagctgtctggccgacagacgcgccggagaaatttttgaaaatagattttcaatttgttaacagttttctccaaaaaatgaccatcattgattttttaccgagacaaaattctctgatctggtgtcacatcagcgatacatatgacgtcagatgagtgatttgacggaaattgaaataggcccctggttttttacaataaaattatgtttaaaagttaatttatccaaaaagcctattcattaaaaaaataaaattaattaatattgaagaattgatttattcaatagtgaacaattgattcacccaaaaacaaaaattgattaaaaaatcccgataaaataaataaacataataaataagtattaaatgtctggtcaacatttgtttatgccatttaaaaagcctaagaattgaaaaaattttcataaaaattattctctaaaatattaattttttttcttatatttaatttaagattttccttattcgaaaaaaacgtttatatatttaaattaatatgatggattattttattccaatatttttattattaatcattgccttttctttgcatttacaagtgataatggatccgtaagtttctctgctaattaggtgacaataattaagcatttttttatcaatttgtcagatg

SEQ ID NO: 106036 - DNA, 146 bp, Heterodera glycines
tttcgcaccccaaaatggacgtttggtcttttggtgtgtccgatcactgatcactttttcaaatcattcactttccccgcaggaatgttcttttgggagcttctgacacgtcaaagtaattatcaattgcaaaatcaattataatg

SEQ ID NO: 106037 - DNA, 504 bp, Heterodera glycines
attgcggactccgagcttttgagattaaaatttttgagcttcggaattcgagcagaagtgccaccaaaatgatgatgacatttgtagaagggaaatcattttaataaaagatgtaaaatattattaaccctaaccaatacaagtttatgctggtatggtatttatatggacaatccgaataaatgtcctggaatggtcccggaattttccggatcatgcaaaccgagcatcacaatatggctaacctattttcgatagtaatattcagcttaaggacacatttttcgtaaaaaaatcaatttagcatcagataatgctgttgataattttaggaaagacgaaaaaatgaattcactttcttttattttttttattaatttccattttatatatctctatgttaatagtgcagattgaatgagaaattatcagaacctagataaataatatatgcttagataaattgaaatttatttaaatcacgaaaaatcctatttcgaaatg

SEQ ID NO: 106038 - DNA, 97 bp, Heterodera glycines
gaatctatatttggatgttcacgctaaaaatccctattttgagtgtttgcccctaaaataatttttttccccttattttggcatttctcttaaaatg

SEQ ID NO: 106039 - DNA, 347 bp, Heterodera glycines
  unsure (1)..(347): unsure at all n locations
gctttatgttaattgaaaaaggtcaaaaatatttttttattctataggagtggaagagcgaggtttaggggtttaataatggangtggcataagaggtgggaccgcatttcgcattccggcatttttttaatgaaaattccggaaaatgcgtgaatttttattttttcatcaaagcttaaaaatatccttttttacactaaatctgtcaaaaactcaatctaagttcaaagaatttccacggtgaaatttggaaaacctactcagcacatgggtagatggatgcttgttttttaataatttaatatgttatttctttaattttttcatttagttatctcaaccaatg

SEQ ID NO: 106040 - DNA, 928 bp, Heterodera glycines
  unsure (1)..(928): unsure at all n locations
aggcaacttggttggtaccaagttntgcggtaaaaaaatgagaaaaaagagatagccattttttggtcaagaattttttttgtttgcgtttcaaatatcgtaagattgtttgatagggccagacaagagaaggcaactgttggtaccaagtttgcggtaaaaaaatgagaaaaaagagatagctattttttggtcaagaattttttttgtttgcgtttcaaatatcgtaagattgtttgatagggccagacaagagaaggcaactgttggtaccaagtttgcggtaaaaaaatgagaaaaaagagatagccattttttggtcaagaattttttttgtttgcgtttcaaatatcgtaagattgtttgatagggccagacaagagaaggcaactgttggtaccaagtttgcggtaaaaaaatgagaaaaaagagatagctattttttggtcaagaattttttttgtttgcgtttcaaatatcgtaagattgtttgatagggccagacaagagaaggcaactgttggtaccaagtttgcggtaaaaaaatgacaaaaaagagatagctattttttggtcaagaattttttttgtttgcgtttcaaatatcgtaagattgtttgatagggccagacaagagaaggcaactgttgttaccaagtttgcggtaaaaaaatgagaaaaaagagatagctattttttggtcaagaattttttttgtttgcgtttcaaatatcgtaagattgtttgatagggccagacaagagaaggcaactgttggtaccaagtttgcggtaaaaaaatgagaaaaaagagatagctattttttggtcaagaattttttttgtttgcgtttcaaatatcgtaagattgtttgatagggccagacaagagaaggcaactgttggtaccaagtttgcggtaaaaaatg

SEQ ID NO: 106041 - DNA, 391 bp, Heterodera glycines
atgaatattattatgatggtaaattgtaacaaaagtcaattaataaattattttatattttttcttaaaagttcgcattccgtccaattttgttgaacaatgactccgccgccattttttgttttactttaaaatttctgtcaatcaaatgcaaaagtgagaaacattttgttttaacgaatatgcacaatttgtaaccaaatcataaagtcaagaaaaaaaattaaggaaaattgtcataattggggagggggttgtcaatcttaactgtggaaggacggaaacgcacgaaaaaaaccttttacctgcttggtttgttattttagaatgaaattccatatgattttgtatattttggaacatttttcgcgatttatatgcataattaatg

SEQ ID NO: 106042 - DNA, 516 bp, Heterodera glycines
ttattttggtggttttttgggaaaatttaacaaaaaaccacaaaaagcctcaaaatttctagaaaaaaccacaaaaagcctcattttgaaaatttagcctcattggcctatcaaaaaaccacaaaatgaggctaaagcctcagatctgcgaaccctgtatttacctaactttaattgtaagatacggtttaacataacttcttaactcattgtcagccagaattaaactcctttcacgaacatttgattttcagaaattgttgcactaattgctaattattatggccacaaaagcttttcagcatccaaaggatcaactccttgatgagcaatgcaaatatcttttcaggttacttttttgttaatttctcaacaaattgttagccaatttcgtttagaatgtccaacgaaatgaaagatgatgagcagcgattcaattttgtccacgggtagggtgttgcattggagggacatttaaagaaatttaaaacaggcacatttccgccgtcgaggatg

SEQ ID NO: 106043 - DNA, 155 bp, Heterodera glycines
gcataaagttatcgaacagcaccaagaatgcttaatttgtttgataatgaacaaagtgatggtccaaaaagtcttccgttgacgttttggtcggcagcgttttggggtgcaaccagcggcggggggggggggggggggtctaagtgatacagatg

SEQ ID NO: 106044 - DNA, 571 bp, Heterodera glycines
aaatcggtagagatttttgttctctttctgataggccttctcattttttactgaaaaattttggcaaccccctaggaatctttgttctaaaatttcccagatttcaatccatatgggggggggaggttgattggtgcatgacacattttctcgaggacaaaagagttatcggtgtagtttttgggtatttgttagtgcattaattaatgtttcttttagcgtaaataactcttttttgccggcattcatttttgagaaaaccggggttttttttttaaatttttgttccattacttttgcacctgactgtaaatctcaattgaaatttaaatattttcgtctgtcatgtcgggggtcgggtcggggaataggtcccaaaaatgtcgggggtcggggggctcggggttcggggcttaacccctttttttaaggaccaacgctcctcggccccgtataatttgtttggataaaataaatttataaaaatcataaaaagggtattgagtttcactcaccgaagggaattgaattcgccggtcaaaaacttgcactaattcaggccaataaaatg

SEQ ID NO: 106045 - DNA, 110 bp, Heterodera glycines; identical to SEQ ID NO: 99093

SEQ ID NO: 106046 - DNA, 68 bp, Heterodera glycines
cgctttttcaaaagaattccggaccagtgatccttttccccgagggctactgcaccaacaattccatg

SEQ ID NO: 106047 - DNA, 70 bp, Heterodera glycines
atttttttagattttggtaaaaaaaatttaaattttttcgtggtgcgacaaaataaaatgacctgctatg

SEQ ID NO: 106048 - DNA, 1003 bp, Heterodera glycines
aaaattggataaacaataatttttgtttataatcgcattttatttgaaattttaattattttctttctttttcttcgcctttctctttgggcattcattaatttgctccaagtgaaaaagtaataattctataagaataaaaattctatcctttacctattcttttgctcttcttccatttttgggtcatcgttttgccgtgattaatttttgctttgcccccataaatgggcgaacaaagtccgtaggagataaattcaaacatacataattatttaggaaatctccaaaacttttttacttttcaaaccctaagcactctgggtcatacaataatttccaattgaataaatttaattaaagagtaatcaaataaaattgttgttgacttcaaccaattcgatggacagcagcgatttgaaaccagcagaaaaaagtggtgaaataaacggttaacagataaaaccatttaatttataaataaattaataaaaaaatgaaattatgatcattagggcggggaatatatggaaatccatctttttttcctggactgtcggggttcatatttgtccatattttggcatttttccaaaaaacctctattagaaaggccccatcaggtaaattggcctttttgactcctaaagaccgaaaatttccgaaaaagatatttttagcaaaattttggcgaaaatattgattaaatttaattttattaaaaattggttaatttatgtcaaaaataagcaaaaaagcttaaatttcgcttttcaggttgatttttcgctataatgagtaaacttaagctgtatcgtgttttttcttctaaaatgatttttaataccatattttgccatttttaaaagggttattttgcgtttagcgaatttgaagaaatttgagaaattataccctcaaattggaaaaatttatgttcaatttttgccattttatgtccatatttcgctatttttggtccatataagtcaccgccctaatg

SEQ ID NO: 106049 - DNA, 147 bp, Heterodera glycines
aataataataattattaataataatgataattatgtgtatataaatgccgtggtcatcccacggaaggcattcattcttccgacttccttccctctccttggccattattcattcatattctttcttcctccaattgtcataaaatg

SEQ ID NO: 106050 - DNA, 241 bp, Heterodera glycines
accaaattttggcaatcgttgaaatttgtgcaaatatattgagttttagttttaaactaacgaacaaacaaaaaagaaggttggcacaatacgccgatttttatagagaaattgccaaatctcgttcagagaaaacggcaagaaaaaggatacaacaggggagtggtatagccctgggagctgtcttggtcccggtactgagtgttttagcccaacatttattagaaaaaataacatcatg

SEQ ID NO: 106051 - DNA, 88 bp, Heterodera glycines
taattagttgttgattacttacgaaagcaattaaattatcccttttcccgtccgacaaattgtgaaattaaaaaaacaaaaataaatg

SEQ ID NO: 106052 - DNA, 88 bp, Heterodera glycines
ccccttttcggccgatccctgtggaaattacgaagccctaacccaccaattcttcgaccacatttacgaacataaccatgacaaaatg

SEQ ID NO: 106053 - DNA, 861 bp, Heterodera glycines
taaaaaatgtttcaaaaataatgttgacgatataaaatctcttaattttaaaatggtcgtagattttcaaaaatactctgattattttgtagaattttcaagtttctaaaaccgatacaaaaatgatttttcctattccttgaatgactagcggtgtccttaaattatttcgtgcttgaaaatcttagaaaagtatatttaaaacttgaaagaattaaccgcactaaccctattaatttataaggtaaactgatttcaaggactgtacttgagattcgaggctgaatatttgtagtattaaaatttttatcattatcaaaacgccaaaaaaatatactaaaaaaacattctaagcttaaaaatgtgtaaatatttttaatggatctaaattaaatattccaatgttcgctgtgaccagggttgccgttcaaagcttttatgccatattatttctgcttttgctatcattttgtgtgctctgcgctttatataatattaataattattattatttattattataattgttaaatatttaaataattcataaacgatgggaggttaatgatttaaacgaaactgaaatgcccttaatggcactctgaaacttttttgtaaaaaaaatacaattttatttttcataattttctctcttttcaaaaaattttaaatacatacatagtttcgcttcaaatcgacactcgaaagcattgaaaattttaatgattatgaaattggtacaacaaaatgaatcaattaaaaaaaattttctgaaactttctttaaatccttccctggctatatacaattatattattattattattacttatttatatgttagcattgatgtgacttatg

SEQ ID NO: 106054 - DNA, 989 bp, Heterodera glycines
  unsure (1)..(989): unsure at all n locations
tttttaggtagcaaaacacataaaactttccttattttttttgataatatttcatttgtaaatgaaattattaaatgttntaaattatntagaataaggacaaattttcaaaacaaaaattcttgtaagaaaaaaaaaaaataaatttataaatttntaagcaaaaataggcattagaaaagtcatcgtagacacctccaaaccaagctgaaaaagcgtttttcgtgcttctcagtgcgtattaattgcgcagaaaatttaggcatttgcccaaaaaaaggaacccctaatataataattatatgacaaaactgtaatgtttattaaacattaattggtgaaatttttgaaatacttatagttccataaaaataatttaatttatttatttaatcttcggtcatttttggcaaaattgttccaattttcttagtttctcatccatttaatttcgcattacatattctttcccaaattgtttcttccaattgaaaatgctattttgatgaattttcaatatttttccaatttccttttcactcattttcggcttttctccttttatttgccaatacattttcattttctccattttttctttttccgttataaattttcggctaattccaaattgcttcttccatttactaattgttttaaggctaactccgattttcttacaaatttcttcataattttgttgccattcttttctggaatattttattcctttttgtttaaattcatttgacatttcaatgaattttcgaataatttcaaatttttgttcgtcagtttttaattttgaatgatttattttttgatttactcccaattctttgatccattcataaatataattgcgatttgtgcccaatttttttgctatttttccttcaattttactccgttcttttgctgaatattagcggggtcagcgccttcggcgcatcccccgctaggtagtacgattgtattgtaagattatg

SEQ ID NO: 106055 - DNA, 214 bp, Heterodera glycines
ttccgattttccactccccgtgctccccgagattgtcagcgtgaacgggtgtctgaattgcaaatgtttttcatcaaatttttgaaaattgtcagccatttgtttaatttcataaattgtttcaaaatacctacattttctattttatatatacatataataaaaaataagtgtgtgtgtttagatcattcttaaattgttcaaacaccaaatg

SEQ ID NO: 106056 - DNA, 737 bp, Heterodera glycines
taaaaacgtccatctcatttttcgtcgatgaactttctaagccccaattggagtattagctttattttttcaattttcctggcctcacctcgccctatgggcaccaccggacgccaatcctttaaaaaattcaaagtcaaaaaaatgcaattccggcggtgcctatcgccactgccggactcttttattttaaaacacttagaaaaattaacatcctaaagccacatccgcttttccagctactaggatctcccttctcagtttgaggatacaatttaaaaaataagtttcttagtttttgttgagttgggaattttgtaattaaatttaaaacagttttacttttacttactttaatgaatatttaaaaaaataatgaaaataattttattctgtgtgggggtcagtcgaaccaagtcaaaaatcaaaaaacgattggagcttcagctacaaggctaatgtttcttgttgtttactattttaaaagaaatgattaaattattatttattttcaaataaattttctttttctgccaatttaaaaaaatattttctctcaacaattcacccaattgaaaaaccaattggatattttcattgctttggaaaaacctgcataggatacgtattgatttttacgtgtaaaatcgcgaaaataaattatgttattgcatttttgcctaggggtattcacaattcattcaaaaatatatatttaaaaaattaaaataaaaatg

SEQ ID NO: 106057 - DNA, 91 bp, Heterodera glycines
gaagataatccagatttgtttgtcgtgaattttgttaagaaactgataaaaagtatttaaggaatttttcattaactcatttataaaaatg

SEQ ID NO: 106058 - DNA, 116 bp, Heterodera glycines
  unsure (1)..(116): unsure at all n locations
ttntaatgaatgtcaattttgaagacaaaaagcaattatattattttatctaattcaatcaaaacataaataagttatttaataatatatttagataattttcagttaaaaaaatg

SEQ ID NO: 106059 - DNA, 60 bp, Heterodera glycines
  unsure (1)..(60): unsure at all n locations
cagttagtcagcgtccagtcggtggtgcccagtggtaccggaccgccncaagtgcccatg

SEQ ID NO: 106060 - DNA, 477 bp, Heterodera glycines
tatttttgctaaatggccataaattgataattcagtgaatgaatgatggctgagtgaatgttcttcgcctgtttcctgaattggctatcgattttgtcctttttctgccatttgcttcttttgcggccacaaatcgcttttggtccgatcactctgtcccatcgattcgttttctcccccgagggaatatgcgtgggttttgagcttcgccccccgggcatttcatgcgatggaatccccgacaaatgttcgctccctcccattcggcctttgtccttctctttcccatttcctttgccatcccttcgattgttttggctttcccttttttgccaaattcgttcaaaaaatgcctttggtctttcccccccggcgtcgtttaataacattcattctttaaaatacgcataaaaatatatcattagtaggtcattccgaagaaggttaatccaccgtcggcagctgaagtgaaaaatg

SEQ ID NO: 106061 - DNA, 54 bp, Heterodera glycines
aatttccaagaaaaaattaattaaaaattcatttaattgttttagtgcaacatg

SEQ ID NO: 106062 - DNA, 196 bp, Heterodera glycines
attctattttatttttcatagaagtatataattatctttaatttatgagttgtttgatacaattttttcttaaaaaaattgaattaaatttttttttttactaaaagaatttaatattttgatttgttatgttatttttgagttcttctaatgtcaaatagttccaaaatttcagtttttttttgaattttaaatg

SEQ ID NO: 106063 - DNA, 156 bp, Heterodera glycines
agtgaatttgttagaccagagaatttcaataattattggcacttattctttccctgttaaataaaattttttcattttttccctttcattattttttgttcattccattattatttattcgagttttttttctttattaatttttcagttaaaatg

SEQ ID NO: 106064 - DNA, 127 bp, Heterodera glycines
taatgagggtgttttttttagataaaattatataaatgtggaacgaaaaaataaaaatgaatgaaaattaaaaaaaatcccaaacattttataggcatttttccgactgtccgctcacctcgcgatg

SEQ ID NO: 106065 - DNA, 623 bp, Heterodera glycines
aggcattcatttcagcaaatcagattaaaccttaattctttttctcataataaaataaaattaattaaaaatatttttaatacaatttatattacggtagtcttaattaaaataataatttaataaattcagcaaaataataataagctaaagcaattctgatttcccgaacgaggtgaacgactgaaaatcagcacaacaaattggtggagtcaaaaacggagctcgggaaattgtccgaaagtttgtggaccaacggaagtggaacgaacggactgaaaacaaagccaaattgggttgtcatctgtgcattggaaaagtgccgagactgtgaagtcggttggtcttgacttttcgaaatttttgaatgtaaataaaataaattaaacatcggaaaatcttaaaatcaaataagattaaagaacaaggcaaaactaaataaaattaaaattaaattagacaacaaatataaataatacaaaattaaacagtcaaatatcccggattatttaactaaaagatttgttgaaaaaagtgaaggtgatagggaaagggaaagaagggcacaagaaagagaaagaagaaaaaagggtcaagaaatagaagaattaaatcgaaaaatg

SEQ ID NO: 106066 - DNA, 426 bp, Heterodera glycines
aaatataaataaataaaaatgaaaaatattattatataatgttaaaatgaataacaccaatacaacaaaacccaacatacaaattttgaattccccagaagagcctaatgaaactcttttacatgtactactttttcgcattatcttcttgcatttccggtgtttttgcttatttggttcgttttaattcggtggcttaaaagtcacggtcacttaacgcccagcgaggcagagacagtaatgcatgagatgaaaaatatcccccgacacccaccaatatttttcgcaacaaaatgatgcaagattagagaaaactgacagtgaactctctctctctcttcagtatgaccaaatcgataatgagtcatgctggcggaggattctcaaagcgactcattttttttcatctttcattttacaaaaatg

SEQ ID NO: 106067 - DNA, 1003 bp, Heterodera glycines
tctttaatgctattttgttaactaaattgcttaaatttcaaaaaatttacggaataatatatatttttaaatttttaattaaatctccctgatcaaacgagctgaatagcctcacaattattaaatcgccggtttcaaattgttacatatgtatatcgatataaatataaaattagcagtaaacagaacctcattccaaaaatactttaaataaatttattataaaataatttttttaaatatttattctacttaaaaaatattcttttctttgctttgtttgattgtagtggcttgaaacacattttaaagttcctgctgcggaccggaaaaacggtgcaaaaaattgtttttatttttttaaaccaaaattcattcttttgtacaattatagcctaccgaattcagatgattataaaaagaaaattttcgcgaaatgttcgggttttcgacctcaaaatctgattttttgagcccggtgttcttttgaataatttttgatggccgtcatagctttaatttcaaaatggacgtattcacatgccatgtgaatgtagattagcaaaaaaacattcgtcttgatatgtgaaattaattcagccaaagctcctaattagaatatgaaaatggtgatgaatttattaagcctttttacattaaatattttgccaaattgtttaataattgctcattttgattttgctcactatcacagaagtgccttactgaattaatttcgtattttatgatttcattttctttagcttcacttttctcctctatgtatgaagagattgcgatcatatttatagtcaaaaatttaatcaatttattttgtattaaattcggttaaaattacacaaattcttttatttttcttatttcttttaaaaaagactccatccaaacaatcttaaacatttttcgtaagccgaatcaaatttaagaaactcatgtaaacttttcactcatattaattctcttattaatcttgcaaaaaatg

SEQ ID NO: 106068 - DNA, 1003 bp, Heterodera glycines
aatcaaataccaatttttcttttttaatttaataatttaatttaaattcaaattgtaatttagttttaaaaccaatacctgaactaacagttcaatttcgcattttttgcgtgctcccgccgcctccaataaagtatcgtcaagtttatcgtcatacgcatttttttcaacattctttttccgtttactcaagaatattttgttcaacccctttttcctgttttcatttttgtattgcgaagaaacacttatttgctgaattatacaatttcgaaaatatttttcacaaaatgacccataacttaatttttctcaatttagaaaattgttatgaggcgaacttatgaaaatccagaattaaaagcccttttattttgttaacattaaaaacccaatataaattttatttaagtgaagtattttttaaatttttatttctattttatttaattatttttattttattttttaatttatgaccagcatacttaaacaatggacatttggacgaaataaattaaaaataaattaactaataaataatttaaataaaaatactaaaaaaaattccattaatttgctgatattattttgaaaattttaatcaaaaataatgaaaattccattaatttgctgatattgttttgaaaatatttgtcataccattgttgatttgaattattttggcgttttgttttagtttttgtgaccctttattttattttgttttgtttggggtatgtgtgatatatgtgctcttcctaaatttgtaattgattgctgtgtgctgttttattaattggaagtaaaagaaagcagtgaaaagagacggcgatttggttttggatttgggatacaattcccctttcccattggactattctttttcctacgacgaaacaaaaacttttattttgctaatttttatgctcctttccggaagcctctctaattacataatttacatgagtaaaacaggaaaatcaagaaaagttttatcatg

SEQ ID NO: 106069 - DNA, 61 bp, Heterodera glycines
tgccatttttcgtcaatattttccgatttgaatatctccttagtgaaaaaatttgattatg

SEQ ID NO: 106070 - DNA, 77 bp, Heterodera glycines
atttggatgattgtattatcggttcgatgacagaggactaacacttaaaagacatcgaaacatttctgaaaacgatg

SEQ ID NO: 106071 - DNA, 985 bp, Heterodera glycines
tgttcattcccaaaagtcaaaattattagctgcgaggcgatactgtattgatctaagatggcttataatctgttcgttaaattgctgctttgtttgaatcgcctgcggcttcttttgaccaaatttgttttatggttaataaattaaataattattaacttttttaaatttttttttgttaggtgttgatgggttgccaaaacgaattcagaaagaagaaaagcaacttgcactgttgcttttgtatgcatcacacaactttggcaaattgaaattgtttaaatgcgattactactgacttatagcgtagaatattttgatattaatcacttatatataagtatttggatatattttattttttaaacttatttggatatttttattttttaaagtcatttatttgtttcacttaaattgtagttcatattgttaaatttatttttttaattcactaaattatccgcaaatgtcggctaaccccgaaaacatgtctagccaacaaaatagtctgcataagagtgtcgaataaacaccagcagagacgggaaaattcaaaaatgagttagtttcctttgagaaatttctacttatttatgaaaataaaaaaataataaattgtttttcgataatttttaatgtccgtttttgttaatgctgtttttaaaaacaggcgagacggatgccccagtcacgtgtaaccaaaattgaaaaaaaaacaatttctgcagcatggagcaaaatgtgcagttgtttttttaaaagaaaattgaataaaaatattttcttatttgaattttgttatttaaaaaatattatatataagccaatttaaattggctatttcatcatttcccttaaactattatataaaccataaaaaattccattttcatcaaacattattaaaaaattaaaaaatttaatgcattttttcttctttgcccttgtttatttttatttgttgggaatcgaacaaataatg

SEQ ID NO: 106072 - DNA, 531 bp, Heterodera glycines
actcactgatctggttcatttttcgtcttgatcaaaattcttttccttcattatacactttttcgttccatgacgcctgatcaggttcactctcctcactgatcaatttgtccatttcctccctaaacacagcatccatttcccctgatcagaatgtccttatactcaatgatcagattcattatttcgccctgatcaatatgtcctttgtcttcatgataaacaaacgtcccgccgttccctgatcaggtttactttcctcactgatccctaatcactttgtgcatttacttttgatcagaatgtcattatactcattcatttacctcactgatcactccttttccttttctgttgttttcctctgatcagtgcatacttttgtattttctttattattttgtttcatttttttcttgattatttcgcccgttttcctgtgattaattatcattttctttgttcagaagttctttttttcagaacatttgacgatttattttcttacaaccaatacatatttcgaagatg

SEQ ID NO: 106073 - DNA, 283 bp, Heterodera glycines
gaatgcacaagggggaaacgaacttcttgttgaatcatttccgccttcgcgttttgagcaaattcgtaaagacgaatttagcaaggagcaaaaagcagtctttgcgaagctacaaaaacaagataagcatcacaaaaagcacatttgagaatgaatgacggttttatcaaaatcattgtaattatatttaactaaatgattcaatgttctgaaaataccttctcccatttcacttccgtcgctaatgcgcgcgcttcaaaaacatttgacgatcaaaaacatg

SEQ ID NO: 106074 - DNA, 179 bp, Heterodera glycines
ttggcagaattgaatgtcaaattcgtgttcagcaacccagaaaatccccaaaaaaatgggctttatgaactttaaaaaaattcgaaaaaggggagggcgtaccatcaaatcaataccaagaaatattcgaaaatttgccgcattcagatggctacgagtatgtgatctcccgtgacatg

SEQ ID NO: 106075 - DNA, 67 bp, Heterodera glycines
tttccaaaaaattattcctttaatttgaaggggaaccattgttgcggcgggcggtggccaatcaatg

SEQ ID NO: 106076 - DNA, 263 bp, Heterodera glycines
ttgtcagattaaacaatgatttgaattaatttctcatctttattttacatttcacgtaatttttttttatcatggtcgtccttaacgcgtttttgtcaacatttagatgccaaaaaactttaattagcattattgttttaattcataatacaaaataaattctgagaataataaatacactgattaataagacaattaaaatttaattgctctgtcaggcaccttcaaattaatggcatttaaaatttctcggtgcccaaatg

SEQ ID NO: 106077 - DNA, 581 bp, Heterodera glycines
tttacttcgttctcatcatcattttccatcgccgctaaatcaaaaattcctttggtctcctcaatttttattattatttttttaatgaaaaaggttcccaaattataaatttgtctgatcttcgttctcttaatcagaataacaaaaatttctgccgttcgcttttctccccacaaactgcttaattagccaattagtgatgcttttcctccgtttcccttttgctcgtccgccgttgttctgctaataatgcgtcatttctcgtaggaaaaaggaacaaagatacataaaaatatgctatgctttggattttctgtgctttttgcttcaaatccggcaattcgttcgatgcaaatcgttcatttccactgaatgccccgggggagcaaaaggataaaaggatggagtttggcgggcgatgtgcattgattgtggggattttgtggggaactcgttcagaagcggacaatttttaaccttcccattgactaaccgcaggcttcggtttcgtttgtcacaattttgtatttcagcagccttttaaacccccaattttctttcgtttttcctttggcacaatg

SEQ ID NO: 106078 - DNA, 95 bp, Heterodera glycines
ggttttgccgcctccctcccaaatttagcattaattttacaaaatatttccaaggctatggccacattgtgccaagaacgccggaaggcaaaatg

SEQ ID NO: 106079 - DNA, 59 bp, Heterodera glycines
atataataaatttaattttaaacaattattcataaaaattctagctaaaaccaattatg

SEQ ID NO: 106080 - DNA, 496 bp, Heterodera glycines
ttttatgttgctgatttaaataaaagtgaatgtccgcgtcttggaaatattgtgagggacagcagtgaataggctccgaccccaaaccagcataagttttgcacgacaactataaattaaaaaataagaatgccgtcaatttttaacgggtatttggccggatgaattttaaaaattttaattaatttatttaaagtaaatttatcataagccttttattcgctttcatttaagcaaaagtcaaaaattaaaaaaaataaataaatcaaaaactaatatagtttaataataaaaaaaaaatctaaattaaatttaacttcattattttcaattaattcaacaattctctttaattcaaatgaccgaattttatggtacaccaaaattaataattcttaatttgaagccagaagaatttaataattaaactttaattcaaaataattgtaagaaaatatgaaaaaatgtctatttttgagaaaaattcagggaaatg

SEQ ID NO: 106081 - DNA, 1003 bp, Heterodera glycines
gggaaaaactgttgctgaacggggggaattcgacgagaaatgagaagaatgaattaatgcccgaggaaggtatgatttttgggtgggatttctcgggagttccttaattgctaattagtgtaagggtgggcgccttttttgtttggttaatggaaaggcggtaagcggaaactgcccataactttcgtctaagtaaccaaattaaacattcttgatatcattcgatagccctaagggttctctctattacttcacctaattttcaaaaatttgatcatgtttggacaaagtttggccaacagtactcaggaaaccaggttatcagaatatattgatcataattttttgaaacttagccaaatttttgaaattttgcaggccagaagaaaacacttagagctatcaaatgatatcaagaaaataaaaatttaaacaataaattttttcattagacataaaataatttttttcttcaaaaaataatttgttagaaccacaaaaattttttgaaattgaagtaagctaatagagaatccttaggatttcgagtgatatcaggaatgtttaattttattgcgtcatttttaagaaattgcttaaaatgaccatttttcttgtattttttttcttgatttcggggcggggggggggggggggaggggttagcccccacctccgccgccttggctacgcccttggtacccttttcaagcaaaatcctgggaccatccctgcaccctcccttccgttcctcactcggtacaacccgaaacatttagggaattctatacctttgctaaagaagaggtcgacattgaatctacaactgcaagcgaccaaaatcaaaatcatcctaatccaatattttttataatatttattagtaccatcattttattatgctggttatgctgctggtacattcaatacaaaaaagggggccaaatttggggccagataatgtgcctaacactactcatcgggttccatcaatttcaaaatg

SEQ ID NO: 106082 - DNA, 520 bp, Heterodera glycines
  unsure (1)..(520): unsure at all n locations
tctgacataaaattgacaaaaaaggacataantcgtttcaaaattaacggctgaatatgaaagcgcttaaaaaaataaagaaataaatttaaccgtaataatttttcgcgaaaaaaggaactaaaaagcaaaaatttcccacttttttttttgcttatttttcgtaaaatttgttagtttttaagaaaatttcaatttaaatttcgaaaaactgtttttttttgaagattttcggatttttttgggtaaacaggccaattgataatgggaatttagatatatgtagaactacatccttgaataagctaaacatgcttttcgtgcgtctcatggctcccagagcccgcaaaaaatagtgaattctataaaattattttacgcccaactcataaaataaataaataatttctgagacatttttgaaattttattttcctaaattgttgaggacagcagctttttgacggatagtgccgatgaaaaaagcagttttataagcagcgcagaaagtttgctgatg

SEQ ID NO: 106083 - DNA, 799 bp, Heterodera glycines
attaattttttatttgtttctcggcccaattcccttgcagtcttttgatgaatgaaatatttccgttggatatgcgcggcttcggaaagggcgtcgcgattttggccgtctatggcaccgcttgcgttctcgaccaaatgtttcccgtaaaatttcccattcattggcaattcaaaaaaatttattttcatattttcctcaatctgatcggccaatcgcaaaccttcgtcattttcgctctgatcggactttgtgcgttgtttttctcgtggcgttatttgcccgaaacgcacggcaaatcgttggaggaattggagcagcagttcaaagcgggcgattggaaggaattgaaaaagcgcagaaatttacataaaacattcgacgcaacggaacagccgaaaagagaggtggcggagagcaattaattaattaattgatgatgttcggttaggaaagttataaatgatgattcattttccgaatcggcaaataattatgaagaaaataaaaatgaaaaattttaataaaaataaaagaatggcaaaacaaataaatcttttaactttatgaaatgatcaggaaaaaaataattactttttttttgttacaaatacataactaatgagtgagtgtttcgtgagtttaaaagttttttttttgcattttgctatttgatgcggatttgttactcaaaaattgactaaataaaaaataaatgtgtttattttttaaacattcaaaaaacctacacaattcgtatatcatgttagtgaattgttttatcatttcagtaaaaatg

SEQ ID NO: 106084 - DNA, 113 bp, Heterodera glycines
agtattttcctggatttttgtccacttatcctggaaaagcatggaatccattccaaatgctataaacatttttacagaaattggtggacggcaaacgctgtgtgccggccatg

SEQ ID NO: 106085 - DNA, 65 bp, Heterodera glycines
cggcacaattaatgagcaatgccgttaaaagcagtgacacccgagctctgctgatgacaacaatg

SEQ ID NO: 106086 - DNA, 393 bp, Heterodera glycines
agtaatggccataccttttggttagaaaaaattttttcaaaaaaaacgccagaaaaaaatgcgggaaaatttcccgcgccagccccggacaaacaccgggtttgggacaaacaccgggggcgacccttgttttcacacaccctcccaaaggtgtgaaaacacatgttttcacacctgggacggttgggacgctccccgtgggataactactgtcatttatctacgttaatcttactggttttgatcacgatttttgaaaaatcttgatcattgcaagaaacatgaatttttttttctaatatcgatcaaaatttcgtttctgaaccaaagtgatttaaattcaatgttttcaaaaagtttctgcataatttttttttattttatagccaaatg

SEQ ID NO: 106087 - DNA, 1003 bp, Heterodera glycines
tatttttaaaaattgtctcaacatataatatatatatacataaaaatttggtgcagaaatctttttttttttaccaatttctttttttgaaaaaattttggtgttattttgcaaaaaatgcccatagaaaagttaatgctattaaaaccgtgattccttaattatattatttctgtgaaaattttgacttttttttttggaaaaatgccgttttgcctcaataggtttccaaaaggcgcacttcggcacattttacaaaaaaaaatacaaaatatttatgaattctttaatttttttaaacaattattgtcatacaaaatctttttagagttcatttgttcgcatcatatacataatgtatgacaattcgtaaaatcaaaaaaaaaaaaattgccatgtaattatcggcgaaaaacgtgtaaaatatcttaaaattaccatatattattagaaaaaaaagctcatttttgccatgtaaatgtaattatcggtgaacaacgtgtaatttcattaattaataggcatgtgaattgttgaaattacccgaattgttttcattgccatcatttggcattaaaattaattaactgttgaaataataaattgtttgctgaaatgaaaggcagacaaaaaactgataaatatttgacaatctgaaacaaattaaattaaactagtaaatgaactttttattacattctttcaattccaatatttaataaatggcaaattaactcttaattgaataaagtagctattcatttttttcacaattattgtaataaaatacaataaaaagaaagctctcttcattagattgagagaatcgcatatcacatttttactaactaattagaaaatagatatttaaaaataataatttgctccactgatgcaaaagcaattaaaaaataaagaattaatttaaaatgcttttttctaaaatattatacttaaagataaaaactttaaaaattacttacattttttaaccttatttatg

SEQ ID NO: 106088 - DNA, 869 bp, Heterodera glycines
caccccaccaaaagcaaaacgatataaccaaaatataaggaaaaattttttaaaaaattttttctccatcttcctttttgatactaaagcatcggaaggctaaaattaagttgtaaataaaatctgggcgctttaggccttcggggaaaaataccccgaaaacaaaaaaatcgattttttcaagtgtccgtttggggtactcaaacaattatggggagcaaaaatccaacgcagaattaaagtacaggctatagggaagctattcccgaaggattcggtctccccataaatctgggcgcatcggttcggggggactgccccgaaaacaaaaaaatcgattttttcaagtgtccgtttggggtactcaaacaattatggggagcaaaaatccaacgcagaattaaagtacaggctatagggaagctattccggaaggattcggtctccccataaatctgggcgcatcggctcggggggactgccccgaaaacaaaaaaatcgattttttcaagtgtccgtttggggtactcaaacaattatggggagcaaaaatccaacgcagaattaaagtacaggctatagggaagctattccggaaggattcggtctccccataaatctgggcgcatcggctcggggggactgccccgaaaacaaaaaaatcgattttttcaagtgtccgtttggggtactcaaacaattatggggagcaaaaatccaacgcagaattaaagtacaggctatagggaagctattcccgaaggattcggtctccccataaatctgggcgcatcggttcggggggactgccccgaaaacaaaaaaatcgattttttcaagtgtccgtttggggtactcaaacaattatg

SEQ ID NO: 106089 - DNA, 59 bp, Heterodera glycines
tgagttacagttttcgaattccaccaaaattgcatggtaaatcgtcaccacgaaaaatg

SEQ ID NO: 106090 - DNA, 70 bp, Heterodera glycines
aaaggacgaggcgaaagaggagtcacccgaagtaatattcccctagagttggcctaagaaactggggatg

SEQ ID NO: 106091 - DNA, 297 bp, Heterodera glycines
  unsure (1)..(297): unsure at all n locations
aaataaaataaacaaacattaagtctcaaatgagttttccctcactagtgaagattaattttaataaataaaatttattaaatggattatatattagtcagaatattatattaaaatttttaaaatgtgaaagaatttttcgaaaattgctttttttatgcacaatgcttcaccttttctcacngatacaatttgcggatgcaagcncagcaaatgagacagacaaaaatagtagtaaattaatataaaatgtgaaaaaaataaattaaaactaattaattatgaaatttaaaaatg

SEQ ID NO: 106092 - DNA, 156 bp, Heterodera glycines
aatgaattgaaaatgggacatcaattataaaagctttaaataaaatttttgaaatcattcaattttttgtgcatttcatttagtgatttttccttcatttctgttcccaaatcccactctcaaagcaattcgttttactctcaaccgtctaacatg

SEQ ID NO: 106093 - DNA, 163 bp, Heterodera glycines
tatttgtattttccgttatttctttattccttaaatgctttaggcaattccattttatttaaatttggcattatggcattctgaaatctttaaaaaaaagtcacccaaatgattggagattttatgttctcatgtgatttgtaagcaaatttttgtgaaaatg

SEQ ID NO: 106094 - DNA, 285 bp, Heterodera glycines
aataaacgtaataaagttttttttaattaaattaatattcatttaatttttattttatttgtttaaggcaaattgaaaattcttacatatggtgaggaaattgaaatatgtgaaaagaagtgaggaaatgaaactaagaaaaatctaacgatgagtgataagaaaattgccgaaaatttgggtgtcaaccgaaccagcttaatcggatggaagaagaagttcggcaccaaaacgtgaaataaaagaatttttcataaaaataatttattagagcacggtagaatg

SEQ ID NO: 106095 - DNA, 124 bp, Heterodera glycines
taccagcgtggaattgaggggaagtcagcatgcaaaaatgttcaacatcttttgtatcaaaatattttttactgaatgagctgtaaattctttcccttgatcagtcaaaattttccatggaatg

SEQ ID NO: 106096 - DNA, 131 bp, Heterodera glycines
aaaattcgttgtaaaaatttcctacgatattaaatgtttccaagtcattgggcatttggtatagcattttacagcgggcataatagtgacactgtactgtatataatcaaaaacccaaggaccatcaaatg

SEQ ID NO: 106097 - DNA, 527 bp, Heterodera glycines
tccctgatacatacggaggaatgattgaaaaaggcgaagccgaccggtttaaatggtgctaggtcattgcgcgaaaatagcaaaaatggcgtttcgcgaaaagtgcaattttaacaaaagagagcgggccttatcagtacgattcttgtgataaaatgatttttaataatttcaaatgtttgttttggtccttaccataaacacaccactgcaaaaaaacaaaccaaattataaaggtttataaaattaagttctttttaatagcaatttataaagaagcagagaaaatttaaaataatttaatttcgcccagccgttaacccgccaccgtacaaaagaaaaactaaataaattggaaacattgaaattttttattattatttattaacattgattatttaaagaattcatttattattatctgaaaatctccgcgttcatagtaaataaagtgaacatttaaataaattaaaaagaatttattgttttaaaaaacaacaaagaatgttaaaattccagtaaaaatg

SEQ ID NO: 106098 - DNA, 273 bp, Heterodera glycines
aattctcatgagtagtgacccgtgtacttttgttacaatttttggcgctaaattcaaatttgaattttcgcgtcaatactctgtgggtggagggacgcttgctggggttgggccgtagggtgtaaggcttatttaatgctattttaaatatatttatctattttaaatatgtgtttttatctaatttagaattatttatataatttaaattgtttatttttaggaatgtaatatatattatttaaatgttttatttttagatatcccaaaatg

SEQ ID NO: 106099 - DNA, 243 bp, Heterodera glycines
  unsure (1)..(243): unsure at all n locations
ttcctctctctttttttttgccaccacacattttcttcaattctttattttgggtggggtgcgcaaatccgcccaacgaggcggaagaaggcgcatttggatgaatgtgcatccaaaatatgcnaatttgaagaannatggagtcatattataacattttgtttttgttataacttttaacaactaaatattaataataattaataatttttcttatgaaaaaagcgaatcaattaattaatg

SEQ ID NO: 106100 - DNA, 87 bp, Heterodera glycines
  unsure (1)..(87): unsure at all n locations
gcatttttattttaaaatatttttaaaagcatttttctaatntaggctaaaagaaccttattnaaaatttcagtgaatttcctaatg

SEQ ID NO: 106101 - DNA, 286 bp, Heterodera glycines
  unsure (1)..(286): unsure at all n locations
aatgggggatnaaaatattatcaaaatgagaagttggagtagtagaatgataataattgataataaaaaggaggaggaaataagggtggaattaaggaataaaatgaagagtgaagaaaaatagtagaagaaggaagaaagatcatatgaggaggaaggagcagagagggaagaggagggagaaagttatgagacggaggaaagtgaagaagggaaggaagagggggaggaacggaatggagcagtacagcaggagaagcagaagaaagaagacaacacgaccatg

SEQ ID NO: 106102 - DNA, 1003 bp, Heterodera glycines
aaactaatgaatgaataataaataaaataatttacgacaaaaaatgactactgaattttattaaaagaattctttgattctaattcaataattttttgtttttatttgaatccaaattctaagcaattcatatttataatttcaacattttttcagccaataattcgaattatgtttattaaatcatgaagtataatttactaagatatttacaatgtcattaaaattaaaatattatatgtatccatttttgattaaattatctaactaaatttattgaaggtaaattgatttttccaaatccataatcttgttaaatcttcgattgtcatatcaacaaaaataatctggcgatcattttatgccttttgattggcttaacgacaatgctttttgaatgactttgaacagctgccactctctctccctctccctcttctctctctcttaactctctctctctctctctctttctctcctctctctctctctctctgtgtctctccctctccctcttctctctctcgttctttctctctctctctctctctcgttttctcttctatctctgtttttctctctgcttatatcttttgctctctccatttcactaggacattgttcatttctcttttttctacactattttcatagattacttttctttttttcttttccattaactatctctgtctttcactttttctttcattcatggtctctcttcattgcatagatttgaaaagagtaaaatgtgaattggcgattgactgtgtctatccatatgggataaaccaactgcattcatccgacggggattagtgagccacaaatcgcttccctctcttccctcttatactgttggcccatcaagaaacggggcaagggctgctgatgggacaatgaaattttttgatagattgattgacatggtgtggagaagcattgccatcatcatcatcatatatcctccaccttccattcgtctcgagacaaaaaaatg

SEQ ID NO: 106103 - DNA, 391 bp, Heterodera glycines
caaataattagacagccatattaatcaccatttagtgtacattcaatatattttttgttataatactaaggtaagtttttggtctttttaataaattctttttttctataaataatccttttattgcgcacatcattaaattgagtaaatccaacactaatcaaatgcgagtgttgatattattattatttttatagaatcctactgagggttaaatttatttaaaaatgaaattttattctttatttttatttaaaattgtttcacaattttgtgtgttcgactatggtaaagaaggtacctcaataatcatttaaaaacacattaacattgttttattatttttctataaatatttataaatattcttttagtcttttgccaacaaatg

SEQ ID NO: 106104 - DNA, 352 bp, Heterodera glycines
ttgagggtccgatttgattgtgttccaaaattagaagaaatgggggtattgaaaaacaaagaccccttttcctgccgtgaaaattcgtgcattgcccaccttttgatttttcgacaattcaggttgaaaaattcctttcctgtcacatatgcatgtgtccttttgtgagtggggagtgtgcccccctcactcccattgtttccatattttccatgccccatgtattgtaccatggcttaggattcagcgctcatgtcctgtttgtaaatttttattgccatgaataaattttttgttgttctctgttaaggcgattgaggacagtttcgtcattgagcgcaccacgcaaatg

SEQ ID NO: 106105 - DNA, 574 bp, Heterodera glycines
tttttaattgttcgcaacaattttcggtttcatatgtttgaagttttcagtttttttttgggcccatcgtctcctcccctcctcatcgtttgccttcattcatttatctcttttttaaattctgccgtttataactgatctttttttgctcgagaattgtccaatatgtatatttattttgctgtttattccgtccattttttgtattgctattttgcaactttttcattttaattttattctctattttccattgttcacttttgctcatttcattttgtcgattttttttttttgctgtgtcgagcttggccaattgccgctttttcaaaaattataaaaaatgtaaatttcacttttaccatttttacacagccttttgcaattctgtatatataaaataataatgtaaaaagaaataaattttgacaatttcattcatttatttatttatctatcataataatgatttcctaaacaaatgcctatttttttccttttttgattttgagtggatttttcgcgcaaattttttttggcatttttggtgcataactacttttttttgacaatg

SEQ ID NO: 106106 - DNA, 253 bp, Heterodera glycines
aaaattctgttacaccgatcattcaacgttttgccaattagcggattagaatcgggcactttgtataacacaattttgacggatcacaacatgtccacatagccaacagtcattgaaaaggtgcggaaaaggaaagtcgcctttccgtccaattcctttagagggtattatatcatcgggtaatctctatgtatctttggccgaggaaagagaaaagctattgtcttgcaaggtgttggtccttgtccgaatg

SEQ ID NO: 106107 - DNA, 295 bp, Heterodera glycines
atcccaatcaaagcttttcgtgcccctctttatttcaaacacttttttaattaaatgtttttgattttcccattttcggcttttgcctccgcttcttcgcccgtctgcttcatcatcgtcttccgctttttacgtccgttctttaataagacgacatctctgttttacgttacgttggaagatgtgtccgttttggcctttgatctgatcaatgatcggaccggggagcgattgacgatgaaacagatggacaatttgcacttgctgatcgtccgttctccgattgggcgcgatg

SEQ ID NO: 106108 - DNA, 1003 bp, Heterodera glycines
tcaagacttaaaattttatgagtttaaacaaaattagacgggttctaaaattttatgagtttaaacaaaattagacgggttctaaaattttatgagtttaaacaaaattagacgggttcttgttatttcggggccaactaatctgggtattcaggtctaagtccaaacagaaactaaatacatgtttaactatgcgtttaaacaaccgtaagaattgactaaataataagattgaacaggtttccatagataaattttttaattttcaataacatagaaatttttgagcacaagggttgttaaaatttactaaattttaatgatttatataacattttatatatttattttgttttatttttttaaatccctccctctggtgcccaaacttcatgttgccaccctgactccccaagcctaaaaaaagttttttgaaaaatgccgcaaaaaaagccgtttgaatcacgaatgcactgaaaattacgatttgcttattcatttgttccccaaatttcgatcagaatcctcgcctaccggcaccgtcggaccctcatgtttcccaagtttttttttgtaaaaagtgtgcaaaaagcgtttttaacagcaaaaaacgccgtcactttaatgttgagacttatgagacttctacgcaaaaattccctttgatctacctcatttttaatgtgtttttgatttatttggattcttttcatttaaatttctcgctttccgagtcgagaaatttatcggtttttggatctcttatcgtttccggggttatttctcggttcccagtaaaaatcacttctcgcacatccctactttttgtccttttcatgcattttagatgcctttttttcgtgtctcttttaggtggctatttaaaaaaggtcgttttaaatccaaaattacttgagaattgggttttcttttgctcattgcttttgtaaaaatttgcgtaaaaccattactctttttaagccaattattctgttcaaaaatg

SEQ ID NO: 106109 - DNA, 220 bp, Heterodera glycines
gatggatgggatggacgggcaaaaagggggaaaagagagttatttggaggtggggagggggggaatcgaactgctgacgaagaaagggaagaagggggggggggtgatcatggcaagagggaaagggacggactgagtgattggagacgcaaaaagtgatcaaatgggggacactcttggaatgcaaaatgaaagaaattgttaaagggacggaccgatg

SEQ ID NO: 106110 - DNA, 1003 bp, Heterodera glycines
taagcaacaaaaattatagtactaattgatcagcaaaaggatttttttttaataaaatgatcgttagtcaattaaaaaatctttgtttaaacattgacccaaaattaaatatatttttttagatgactttttaaatgatgagcgctgctctggtcatgaaattaataaataaattgaattactaaataatttattatttaaaaaaaatatcaaacaatatttttcatagagtttaataagtttatatattatgttttgtaatttaattacagtcatcaatatagattttattaatagctatattttgtctctcgatacgcttataggaaatgattggaattattttttatttttacatttttaaatcttaaatttttattaatttatcagcattttcaaatttaaaaatttttgttgtgatttattttttttaaatttaaatattccgccaaaataaatttcttagtatatggaaatgctacattactttaactgcttcttaatctttattatttattattcttcagtatatttaaaaagtattctttaaatattaaaaatttatccgcatataaatttaaaatttaatcattttaattcatcttaacaaacaaaatttttttatcttatttaaaaagaaattatgtttttttaatattgacgaagccattggtctggtcgaatccgcttcggcactttttcttttctattgacgatctctaagcctaattcatcgtacttaagagcatgtcaggaatctgttcgctttcatcattgatttataacttaattttttttaattcaacattaaatcagaatcataactaatgattaaaccctttattgatttattcaattttttcgtaatcttactattaacttaaaatactttttatcataaatatctttcactatatcaaaaaatcatcaaaattttatttatttatcgcttatatattactacgtttcttatagtataattattataatcttcttgcagatg

SEQ ID NO: 106111 - DNA, 345 bp, Heterodera glycines
tttttattatttattattattgtctcttcgtaaataaatatttgttggtcttattcactcggacaaagacacaacaaatttggcgcagtcagcagtcgtcttcaaccaacaagaagacacccggactgcacaccacaaaaccaatagtccctaggcgggtgaggtctgcaaatactgcagtttttcgccatcaacaaaaccaatagtccctaggcgggtgaggtctgcatatattgcagttaattcgccgaaaaaccaacagacctaagaaaggttgcggttccgcaataagcggtttttcaactgtggattctcaaattcggcgccggcaaacatttcggcatg

SEQ ID NO: 106112 - DNA, 790 bp, Heterodera glycines
agagagagagagagagagagacggggatagacaacacacattttgttgtaagaattttgccgaaaatgttgatggcgttttatgcaccgtgggcattttggagtcccgcttcctcagcccacttcgatgggcgggggctaaacaccttatagctttctttttactcagcatcaaacataaatcaaattttcaaattgtcttacacacttccatgaatcataccacacactcacagtgccgactattattatatcattcgagttttccaccccccccccccccttaacccatcccttcccgggagggggcggggaatcaccaacttcgttccatcacggtgtcgtcgtcgttcgtcgtcgtccccccagcccctcccgtcatcgtcctccaaactttttctacctgtattttgctggtgcacagttgggcagggccggtcccgcccccctatggtgcccccggggcgcgggtggacccctctctaatcgagaggttcaatcaaaatgacacccgccctgggggcacaactggtggcgcgcttgggactgtaacacacgccaccactgcgcctccatctcctcttgcccaaacaaggccatcggggcgcctagcgcctatttaaggggttggccggagccgacatacgccacaaatcaacaaataaataaataatactaaaaaatactaataaataaaattcattttttaaataaatttaaagcgtaaaccacccaaaagggacaacaacacagcagcactaagcttaataatcagcaacaacaacaaaatg

SEQ ID NO: 106113 - DNA, 447 bp, Heterodera glycines
cccccccccccccccgaaatcagaattttttgaaaaaaaatttattttttttttaaatattatattaatttttttgtaaaaataacaaacgagtttatgaaatgaaaaaaaacagatcatttacaattgaacgcgtctaatgcaatcaattcaatttttaaaaaaacacgaaaatacacccctaaatattgaggtttacaaaaacgaaaaaatacacccctaagaaccgactttttgagttgccccccccccccgaaacgaaggtcctggctacgcccttgcaacctggttccattaaaaaggtaaaactaaaacaccaatcattgataattgaattttttctgtagaggagtaagagtgattttttaattgaattatttttttattaaaaaaacaatatttcctagtgaattcaatttgtcgaattcaggtcaaacgggggcgatg

SEQ ID NO: 106114 - DNA, 299 bp, Heterodera glycines
tgatatctaattaataatttggcattagattcagaaattttttaaatatccaaatttaatttaattttatgaatctaaaattcagaataaaattaattaaaatatattttaatatttttcaaatatcaaaactaattacgtagttacggaattctgaaacctataagagaaatttttttgaataattaagacttgaattaatttaataagcaataaattaaatatacttaaaattcatttattttttcttagtatttgaataaattttaagctcgatggtcattatgccttaattgatg

SEQ ID NO: 106115 - DNA, 715 bp, Heterodera glycines
  unsure (1)..(715): unsure at all n locations
caaagcatcaggaagatcgttaatataatcataaataaataaaggtccaaggacagagccctgggggacgccagagccaacttttttactggaggataaatcatccacaattgtaacacgaaaaggtnctattactcaaaaagtcctttatccacatcaaaagtttgccccttataccgatttttcccatttggataaaaattaattcaaattgaaattccgaaatttttttgttttttaatagaaaattgtaaatatttttgcttaaaattctttccataaccctgcagagtgagcaggttaatgaaattggcctatagttttcgggattatttttgtcaccctttttaaagaaatgctatcgtatagtgcttttttggatgggtcagttttagcttgtctgaataatttagccttttctttgatggatgctaataaatgttgtgggtatttaggagtcaaatcattcttggttaaacgctttattggaatacactcatttaaaatttctaacaacatactgttaaaggcggaatatttttgatttatgctaaagcattcatatgacaaggcatttagccttgatgctatgactatattaaaatgtaacacattcgatggacaaaaccaacgaaagtttacgatctttgttttcggttttgttttaggagtaattaatgtgaaaaattgtgttaaatgatccgatgaaaaaatg

SEQ ID NO: 106116 - DNA, 131 bp, Heterodera glycines
cccggtacttaaaaattccggtctctactgtccatataaaaataaagaatgatatttattcctataaaattaattatgaagatattaaagagttaaaatactatgagaaaaattgcctaatgttgcagatg

SEQ ID NO: 106117 - DNA, 89 bp, Heterodera glycines
ttgacaaagacgaccttttgggggagacgaaatcttcgaaaggggacggcgtttttgaactgaaagaaacaaaggacgagtgggaaatg

SEQ ID NO: 106118 - DNA, 1003 bp, Heterodera glycines
gtataaaaacggaaaaagacattggctgcattcaacaagcaatatttgtaaaaaaatgagaattttaaattttcaaaacttgttcgaatccgggttcgggttcgaaattgagcctgtgataaaggccagattcgtactaattgtaaactttattatcaatagggctgccaaaaatatgcacataaaatcgtaaaatatgcaccaaaaatcgtgaaatatgcatataaaaagtgaaaaatatgcacataaaattttccaaattgagggtgtaatttctcaaaatttcttcaaatttgttaaacataaaaatcttcaaaaatggctaaatgtggtattaaaaatcattttaggagaaaaaaaaacatgataaagcaaaaatttactcattttttgcgaaaaatcaaccaaaaagcgaaattttgctttttttgcttatttttgacataaattaaccatttttttgagaaaatttatttattcaacatttttcgtgaaaattttgctaaaaaaatttttttttttggaaaattttccggtttttgaggtcaaaaaggccaatttgtctgttgggggccgatctattagaggttttttggaaaaacgccaaaatatgcacataaatcgcgaaatatgcacaaatatgcacatggaaagtcatcctagaagcttcaaatcaagctaaaaacatgtttttcgtgcgcttcaggcttcccgcaatccaggaaaaaaatatgcatgtgcatatttttggcagccctaattatcaatatgtatgtgtgtttgtttttgttttttcctactgaccctttgcatttcaatttgttggagcgattgcattgggcgggggttgtaaacgaactgaacgaattggcgggcattggcggcaatgaaaagggtgaggaacagcaaaaaaaaaggtggcggagagaatggaagacgaagcatcggagggagggaaaggacggagaaaccgacctaaaggggaaaatgccaaggaaaaatg

SEQ ID NO: 106119 - DNA, 475 bp, Heterodera glycines
gcgggggccggaaacgcaacagagaatggtagggaagggatggagcaggtcattggagtttctcacagagtaaataaaaaaatccaccaaaaaataacattaaaaattttcaggaaaaaatcctagtaattttttcctttttttatcagccaaagaaaaataatttttatttttttgatgaactaatgaaaatgataatgcttttttggcttcaaaagttttttttcttcaaaacattttgatttgttgactcttattgttagataaaaatttttatgcctttctgaaaattgcgtaaattatatctacggtcggtcgcatcttcattttaccatgaatcatgcataatcgctccactattagagggggggggggggggggggaatgtggactgaaccagttgggtttacaaaaaagcgatttatttgcatgttttattggtttatttgtaaagttttgaatacatactagtatg

SEQ ID NO: 106120 - DNA, 89 bp, Heterodera glycines
agttttgctccatgaaatttttgtagaatttgcgcgacttggccaagtacgtcagtgcctttgacttgcccgatcagtttctcaccatg

SEQ ID NO: 106121 - DNA, 311 bp, Heterodera glycines
tttgttcgctagaaagttgttccaaaaaagagatagccagttttctggcatacccgagaacttaggaaattctttgaaaaattatatgtcagtagcgacagactacgcggcgcctgctctcgagcatttgatcggggtaaatgggttgccaaagagagatagcaattaaataacaataaacgagtaatttgtaagttctctgaatgaggaattggcagatggagtcagctcggtgaatcttgctcacaggcattggtgggaaagtaccaggtgtcaccacccatttaaaaattccaccccatttaaaaatg

SEQ ID NO: 106122 - DNA, 280 bp, Heterodera glycines
ggttattatttaaggctgtttagtttatttcacaaattaagacaattgattcctttttgcttaaaaaacatgacgagcaaaaggaagttgaggaaatgttgactaattttatggtccagcaaaactgcgccttttcagtttttgaaaattcaattcttctaaaattaacgcaacgtgcataccctaattttgaggtttgacagtcagccactatttagaatgagatattattcagactcgcagtgaatggcattttcgaaaaattgtgattccaagaatg

SEQ ID NO: 106123 - DNA, 264 bp, Heterodera glycines
ccccccccccctcttcttccgctttgttcccattcattcatttgttcatccatcctttttttgccccttccgccaatttaatttattcgaattttattgtatttcaaaaaatttaatttgtccaaatttttagggacaataatttgaaattcaattgattttaaaattgtgcaaaggtgcgcttttgtgtccgtccgttcacatgcattgatgggaacgagaaaaggtaattagcgaaaagaatttgaaatttcaatatgaatg

SEQ ID NO: 106124 - DNA, 422 bp, Heterodera glycines
tttatttctaaattagcgttttttctgttcattttctacgcataaatttgtgtgaataatattttttaaattttggctaattcaatgacttggcaatcgatgctttattagcatatgattttgtcatttagcataatcgaaaaaatatattttacttttacgattcataaaaatttatgatttataaaatggcttttaacttcgcacattttttcttcctaaactttgcctttttgctctgctcatccgtcactaatttggccacaaaaaatgccaacgaacaaacgccaaacggacgggcgatgttcccaaacgcgccgaatgctcgaaacattcacaatgattacggtatttaccgtcaaaacggaaagtaatcggccgaacaaagctcagaattgacagcgcaccaagtgaccaaaatg

SEQ ID NO: 106125 - DNA, 147 bp, Heterodera glycines
agtttgggtgtgtcttctcacttttttcccccacttttcgcttccttttgctcaattagctcaactcgcccactcgcgtcgcaaatccctccaacggtcgcttcattttcaccgattttttgacgcaatccgtcgcttggatcaatg

SEQ ID NO: 106126 - DNA, 91 bp, Heterodera glycines
ctcaggtcgatcaattcacacattttcatgcttttttcttatgaatttgacaattttctgattgcttgtacagctccaactcctcggcatg

SEQ ID NO: 106127 - DNA, 195 bp, Heterodera glycines
tccgaatcgtccgccgaattagtcccagttgataaaacagctgctgaccctatcactgttcctttggaaagactcataaaagtgccaaaggcagtccccgacatcgcaacattaccacggggaaaaaacccgtataaaaatgtgctaaatgcaatgattttcatgatttcggcccaactgaattttgaaaatatg

SEQ ID NO: 106128 - DNA, 90 bp, Heterodera glycines
aatacgacagaaggccaataaaagcactccaatttttcgagaggaaatgaattgtttaattaaaattcaacactattttagaaaaaaatg

SEQ ID NO: 106129 - DNA, 578 bp, Heterodera glycines
tgattgactttttctgtgccgattagcatgccaattctttccctcgactgctccgtcgttggctctttccattgcatttgcttgtggcctgcttttccgttacgactgtctttagaatagaaatggcgtcacattgcttaattcgtcaatattattgtatcatttccaatcgtttatcaaattgcccagactgtcctattacaattagtccgatctcatcgcatttaataatttcgatttttgaggtccattaaaagcttttcattgtccatttgcggttatttttcctgttgctttaacttgccatataaattatatatatttttatataatttaacatcaattaatttttgaatgttttaaatgttcgctggtattgatgggcagcaaaatgttctcctttccgctcaattacagcgtttactttgccaccacggagaaacggcgaatgcattcgttttctgtcaccaaatgcaaccggagctgcaaaaggggccgacgtgagtgggcgagcggtcattcattatgtgcaagttaattgggcaatttggaattgcatttaaatgtaagataaaatg

SEQ ID NO: 106130 - DNA, 332 bp, Heterodera glycines
ctggtcatgattttaaaaatatagtttttgcgacggacattaacctgaattgccaaatatggcgtaaagctagccttaatctttaccaaaatgactttgacaactctggctttaggcaaattgaaaaaaattggaatgatttatcggaatggctcaatgattcgtttatttattcatttctctgctatattagcacggtttcgacaaaaaatgttgttgttgttgactccttgtatactgatatccagcaaatgccaaaaatacttttatctaatctgaaaaaaaatgtctttaattctaatcagcagtcgcccccagagataatacttatg

SEQ ID NO: 106131 - DNA, 662 bp, Heterodera glycines
aattttatatatgaattatcaaattaaaatagtaaactgcctataaatttcaaataattattaaaatttatttttttttaatttgggggctgattttattgataaatttatttaattaaatcaattgttaaattaattatctgggaccgaatttatttggattaaaaattcccagataatgaattcaattatcgcaaacagatggattggaatgtacaaaatttgcgaattataattttaaaaattgtaaatttctaaatgttgtccgtcccttagatgcttaaactaaattgcaattgctgatttcatgcgaaataatcttacaaaaaaaaccatcaaaatccatacagactcaaatccgaacttataatttttattcatacaaaaaagtgaccataatcgaataatgatgtcattttacaataaaatctttttaaatttatatttatatcttaaaaactttacaaaattttaaagctttcccatctgtcaaaaatggttaattggactcaaattgaagaagaagaagaagcaacaaaatggaggcgaaaaattagacgcagaaaaaataaatttaataaatgaattgttggacaaagaagtggccacgcacattcacaaggagtacacgctcaatgtgctcaaagggatgtacataaatg

SEQ ID NO: 106132 - DNA, 1003 bp, Heterodera glycines
gggaagggatttatgaaagcttgcgagtgattcgatgagaatttagagatgaaaaaatcagatttataaattaaggaggggaggggggtgacgaaaccgaagttttatgattaatttaactgattgtatttcagtttctatgattattctcatgagaaaataaagcattgaataaatggggttaactttgttttcaatatgactattacacataatatcgttcttatagcataataatggcataaaaatagcgtagtgctacatttgcggaccgaaatatcaaactttgcgactgaaatgccaaaaaaagaaagaaaacaaattagaatctacatatattttcataaattttcaaatacttccaatattgaaattaatgacgtttaagctggtctgtaagtagtcgagattatctgtctcaagtagagaaaagtcaactttggcatacctttttttgtttttcattttcttgaagggaagaaatacccttcaactagattcaaattttatgacctatataggcgcccccacaaattgtccaagccacgaattgtccaagccacgaattgtccaagccacgttttgtccaagccacgaattgtccaaaagagtaaaaacccacgaagtgtccaaaagtctaaaaagctcataaaaagccggaaaacgggtctattttagggttttcagggtcgctgaataccaatacgacatttatatagccccttgcctaaccctagacccacccgaataagaaaaatctccaaatttgattaaaaatatgtgctttttttgtcttcagattttgctattcattaattgaacaaatgattcgtaataaacttgaaagtctacaaaaaagtcggaagaagctttgtttgtcagcatttcaaacccaactgaggaggccgtaaattttggagtggagattgacgaactgcatgccgtgataacttccgacaatgttgaacaacagactttgaacgaggctgaactttcaacaatg

SEQ ID NO: 106133 - DNA, 544 bp, Heterodera glycines
aaaaaatttttttttgtactttcatgttttctacccccgcccttcgagaaattttaaaaattcatattttgttgtttttaagctcactgatatcgaatagcatttttaaagttatagcgaattacgaaattttcttagctaaaattgtctgtcaaataattgcagcacttattaattaggtaattattgtttttttctaccatcaaaaggtgctggctgtcaaggagaaggaacgtctggaggaggaaggcgaacccgagtcggaacagcaggccaaactgatgatggaccgaacatgaaaaagggcacccaaaatttaattgtttttttttgtttttgtttttgaaagccgtcattgcatatacgataatataataatacagtgggtttctgtgttccaatttgtatccatttgattgttggggttctttaatgcctcgtcatattgttttttcatattttttatttttgtttttttttaatttgcattttgtaatagcattgtatcgtacgttaccactgccacccgcactcaaacaaaatg

SEQ ID NO: 106134 - DNA, 70 bp, Heterodera glycines
ggttggttacagctaaataaattaattttaaaatattaattaattcattttttatttttaggcgtcaatg

SEQ ID NO: 106135 - DNA, 385 bp, Heterodera glycines
tttttttgggggggggggcgaagttcgaagccgggcggtgtacattatttttctttgtattttttgggttaattttcattacttttaataaatttaaatgtttggttttattaataataaatttttttagtttaattaaattttttgatgaataatgattttcattaaattatttattatatttaattaaagaatttcagctattattttaaaattaaattgtaaaatttttttcatttcaatttaaataactattcaattattatacatttcataatttgtttttcattaataaaaagtgtattatattttaaaaaatgaaaaatataacacattgattttttatctattttgagtaaaaacaattccttaattaccataaatg

SEQ ID NO: 106136 - DNA, 650 bp, Heterodera glycines
attgttttatttagaaaaccggacttagaccaattttcaaagggaagggagtaagaaaaaacgaagtttgtgtgataagagagggcgaacattgggatggtttaaaatctgttactcaatttttcgccgtcaaaaatttttgtgtaagctgtgaggtgacattttggaccaaagaccgtcaccgaatggaatgtagggagcgttgcaaaaagtgttgccggatggggttcgggttcccctgtttggatgtttgtgaggcgatacactgtggagaatgcaatcggaatttctacaacaatgattgtttcgagtctcacaaaaagacagcttctagggagtacaagaaatgcaacaaatgtggggaaacatatcaaacacgatcaaaacacacgtgcggggagaaattctgtagaatttgcaaagtctatcatccgggtcggcaatgtttcattaaaaaaatcaaactccgacagcagaaagcataccgaattgtggcttatgacctcgagacgacggttgtagggggcgaacacaaaccaaatcttgttagtgccgcgcatacttgtagtgtttgtgtgggagaagagagggaatgcgaaattggtccgcggatgatcacttggtctgtagcagatgggtttgaaccgatg

SEQ ID NO: 106137 - DNA, 251 bp, Heterodera glycines
cgccaataaattttaaaggcgaattgcacaactttccaattgtaagcaaccaaatccggcaccgagaaatttatgaggattttggcccctaccgggagcacgaaaattttcgctccagccaaattcaaattcgccaacaacctgcgttagcgtggcaacaacaaaatgcaaacttcggctttttgccatgcgaacggcaacacaacgaattcgtcggacgacatctttttgaggatggacgtcaaatgatg

SEQ ID NO: 106138 - DNA, 1003 bp, Heterodera glycines
  unsure (1)..(1003): unsure at all n locations
ttacatntaattatttattttcaatntaattacctctaatnttgtcattaaaattaatttaattttcttttcaatagctaaatgagcagattgttcgccttgcacttgaagtgttacattccgaaaatcctgaacaaataaaaaaacagaaggaggtgctaaaacttgccctttattatcaacacgtgctggttgagctcagagtaattgattaataattaaaaaacgagtcaaattaagtataaacttgtggctttttaaaaatatttctaaataaaatgaggaatagatatgagagatttaattaaaattcactaatatttttaataaatgcttaattaaaaagagaaatttcttactaaaataaatttttttttaaaaagataattttttttaaatagaaaaaactgcataaagcgagagaagaattaaaagaagcaaacaatgcaaagagcaaacttaaaaagcttaaccagaacactgaacatcagaatgcaattataataaaagcggagaaaaaagtgaacaaattaagggacacaaagcgggaaacaaaagcgtaataattatctaataaattttactttttaaattatcaaataaaaataacatcccatattttatcaaatattaatgtgccaaaattttgttgaaaaccccggataaaaccctagaaaaaaaaattcagggatttgcaatttttttttttaaattagctatttttccaattaaattagcatcattaaaaaaaccattataaatttgttaattaactgatatgtgcacaataattaaaaaaaggaaacttttaaaatcattgtgcccgctattttatttacaattttaaagaagcatcgatgagctggtcgatttggccaaaaagaacaaacagttttcatttgtcattcgtcttaataatttgagcaacaataagcatgggttgcacgaattgttgaaagattgggaaaaagaaataccgtatcagtatgaccgtaaccaaatg

SEQ ID NO: 106139 - DNA, 258 bp, Heterodera glycines
gacaatagccacaataaacatcaaaacgaagtggcaaacaaacaaaaacaaacaacaacaccaataatgagttgtccaaaaaagatcagcgagcagagtgcgcttgcgttcaacagtgcgctgaacgtgttcaccgttccgcccacaaatgtgtcggtgtcgcgttccttcttccgagaactgttgccattgtccactatcagccaggaggggccctacctgttccgcttgttcaatgacaacctgtgggcggacatg

SEQ ID NO: 106140 - DNA, 471 bp, Heterodera glycines
aaagtcgcatagacattaaacatgcacaaagatccgcgaataatgttttaaataagacaaaattttttaagtaaaaaatttttttaatgtacctatttagttgaaaacaaaatttatttctaaatttaaaaaatatggacacttaacaatttgtttttaagtgtatacaatttttaaatttactcatttattaaataatatttttaaaattatccctttttcaggggacaagtacactctgttggacaaccatgaccaaattcagtggcgcgtgcgcggcatggacgacgttgaggttgttcaaagaaaaattcagattttgttgtcctaataaaagttaattaaaaactttagttaaaaaatggattttttaaattactattttaatttcaatttaataaagtttttctgatttttttggttcttaataagtttaattaaaaaatggatttctagctttaattaaagatg

SEQ ID NO: 106141 - DNA, 171 bp, Heterodera glycines
cggtgcaccccaaaacgtcgtcggccgaaacgtcgtcggaaaactttttgaaccataactttgttcgctgtcaatcaaattaagaattgttggtgttgttcgatagctctatgtgtttattattaattgtcaaaatctcaaaaattttcgttaagttttaaaaaagttatg

SEQ ID NO: 106142 - DNA, 827 bp, Heterodera glycines
atttcaaaaattggaaaatgggccggtaaatcatcaaaatgccaaaataagtagagaaacggataaccttttttcgataaattgaaattgcatcaaaaatggtgaacataaattttacaaattaaaaattattatttgttaagtcatattttgatcacaactgacaaattaatctttctcatacatagaatagagtgaatgtgcaagagaaatggcattaatttaaaatgttgaaataacaaaattggcaatttgaaccataagctttatatatttttaataccaaataatttgtatttaaaaacttattaagaaatacttctcggcttatgttagacatgaggaaatgaactcactgccaaaagtgccaaggaaacgaaatgccaaattggaaaacaacgggaacaaatgaatgcaccactcatcaatcattgtcagaaaatacttctaaatttgccgttttaaggcattttaatgaatgagactctcaacagatgtttatctcttttctatttatttgttagtcatttttgattttaaatttatttatgtgttaacggaaatacgataaaaggaagcgcaaaaatgctttgctttagttcaatttgttatcgtttccttaaatgtccttgcgttaattaccatatttaaataatattctgtcataattagaagtattaattgtttttgcaaattaatttattgccaattattagtccatcaattcgcttcatcttccgccggttgggtttgtaagcagacattcgatgtcgcgcaccactaacggcggattgcccatcacccaattgccatttgcgttacaaatg

SEQ ID NO: 106143 - DNA, 69 bp, Heterodera glycines
attcagaatcaaaaatcagatttttaacaatttttttgccgtatttttccaaaaaactatttgggaatg

SEQ ID NO: 106144 - DNA, 102 bp, Heterodera glycines
cccacaggtgtttttttgaaatttttaaataattttactattttaaaatttaaataagttacattaaatttttggtatttccgaaatttaaagtttgtcatg

SEQ ID NO: 106145 - DNA, 154 bp, Heterodera glycines
ttcattcactcttttactcgcccatccatccattgattagcttttattattaatttatcccgctttttccctctcactcactcccctccaaaatattatttatatttcttttgccgcccatttaattaatctcccaatttttcattttttcatg

SEQ ID NO: 106146 - DNA, 827 bp, Heterodera glycines
aaaagcaaaccgcaaaaaacatttttcttgcttttttttgataaaaactttacaaaatggtaattttcatcctccaaatgttgattttaaaaattcaattgggagccctgttatttgtaaattattaattattattattattattatcactattattatttaaatccttaaaaaaacttatgagtatttatttttttttattattaagtcctgaaagaaacattattgattcttttcgctggcaaatataattatgcttaataattatgcttatccgattaataaaatggatattattttatgttgtagtattcacttataaatttctacatatttattaacgttacaaatttaataaaagaaataggcaaagtgttcagcatcgagtgggaatcgagcccactccaccacccaatctgtgggcagatttaccattgagctcccgaggcaaataatgttacatgagatttgcgctttggacatttatgcctatgtcaaaaatcggactcaaacttaagtttttttcaagccctgatagcctaaacagcattaaaattaagaaaacacagtcttctagtttgtttggacattaattctgctgtttgaacccaattttgggtatcatttccagattaaaaaaagccaacaaaaggccgggcaaattacaaaaaagcatgtgcagctattttggcgacataaatgcaacaatatgagccaatacttacaaagtccaaacacataaatttttgtgttatgtgtgatattttatgtcaatttttattatttcaattaaaatatttcttaatctccttaataagcttattatg

SEQ ID NO: 106147 - DNA, 769 bp, Heterodera glycines
ttccaactctgtcctcctccccccataactaatcaaaatcaatccaataataaataacttttccccttccgatagaatcattttatgaatcgtcatattattgaatttaattataccattttaaaactgaaagacgacaactcatatcttctaaagtctcttttgcctttttgttcagcttctcacaccagacataatttatgaattaatattaaaagaaattttaaatacaaaattttgatattaaattattgtacataaatgccgttctttccaggtccgatggtcagctgataatcatcagttaatcattcttcttatcgcattttgcttttttatactaaagaaggaaagtgccttaactcacatggccatttcccttctcaaattcaaaattctctcccttctcttccctctctctcatttttgtttgttttgctaattatccatccattagttttgtctcgctgttctttcattcgctttgtgctttttctcccctccttttttccatgctcttccccaaaggaaaaaatctaaagttcaaaggtaaactttcagccaaaagacgtctgagagagagaagagagcaaacagccccaactttgtccttccccttcatctgctgatcttatcttctccaatcgctttcccattcctttgccgaaagtaattttaacaaataaaaaagaccggcaacagaaagagacgcctttcgtccatttgttcgcctctcactgagtctctcttcgactttactccccaaatg

SEQ ID NO: 106148 - DNA, 559 bp, Heterodera glycines
attaaaaaatattatcatatcaaaaaacaaaatccaaaactcaaagaatacgaaattgccgcaaaattgggaatttcaatgagctcattatacaaatacagcgatgaattagtcaataaacacattaaaatatgctaattattccaatttatcgttttaattctttttttattagaaataaataaatttgcattttccatctgttctttggatccatccttgtccaaattagagtcaaatccttgtgatatttttcatgatacaattattcatttatatgtttggctttctgtgattttttatacaccaatttttctaactttatgcttaatgttgttctattctcgtctgatccaattcaatcaataattttgataacattgttttattaacacgcagtgggatttgaaccatacaataataatattatgggatgaaacatttttatcatatgtaaatatcaaacataaaataatttatgggttgaaaatttgtacaaaataatataaaagaaattgtggaaaaatttcataaaattaaagaaaaaataaagcaaatg

SEQ ID NO: 106149 - DNA, 417 bp, Heterodera glycines
ggtaacccgttcatttttgtacaaaaggcaacgtgtacaattgcttggttattaggattatgtttaggcgtaagctttaagctatacctaggcttagcttgcttgggcctaggcttaggcttatgcgtaggctttttgtaaaatatgagttgacttttgtacgaggtgccattgaccccaaatatacgatggaatggaacttattttattagcctttgtcagggatgcgattggttaaattattaataatattatggatgggttttacaaattgaaatagggggaaaagattcacttaagcgctgatgtcgaaattttgaaaattttagcgtgattttaagagattttgcaatttcggcataaataaacttaaaaaatttggtagaatcgtaaaacccttacccaacgacatgtatg

SEQ ID NO: 106150 - DNA, 1003 bp, Heterodera glycines
tatcaaaaacacctccaagtttgccaaatttcgaaaaaattctcattaaaaaaaaagaaatgttcgcaaaaaaatgacgaaaatatttattgaaaatgccaaaatgacgacgaaaactcaaatttttcgtgttttgtggggtgtaatttttaaaaatttccaaaaagttgatctttaggggtgtatttttcgtttttttttttcatttttcttgtgaaaatttccaaaaaatggccaaaatatggactaaaaacccaaaaatggcgaaatatggatttattcccgaaaacccccaaaatatggatttatatggactaaaaaccttcaccaaatcaaaaaattttaacgcagaaatgctatttttaagcccctttcttcatagcatatgcgcagaaaaaatatgttaatccatatattttacaaccctagtgatatatgtgctcttcctaaatttgtaattgattgctgtgtgctgttttattaattggaagtaaaagaaagcagtgaaaagagacggcgatttggttttggatttggggtacaattcccctttcccattggactattctttttcctacgacgtggcgctcctgtacaaaggtggctcagcagtggcaataaacgacaaatttggacgagcaacgattttaaaaggaaaagtaaatccttctgcaatttgtaacaggaaaagcaaatcctggtctctggaaaagggaaacaaatccctaatgaagtttcttcattggttgtggccacgaaatcagtaaaacgggaaaactaaatccctctgcatataaaaaaaaaacgcaacttcgaaaaggaaaagccgtaaagtgtgaaacaaatcacgatttgtcagttcggtaaattaacttcgtctaaaaactgacttcaaaaccgggaaacgaaaatcccatttcaacatgcaatttcttctcaacacaaaattcggccgaggaaaattggaaagacaatcgcaactttttggtttcattacaaaatg

SEQ ID NO: 106151 - DNA, 340 bp, Heterodera glycines
ctcataattaatcaacgggaaaagcattattagtttcatgtattcctcgtcctgaggtgtgtgcatttcattcccccgtcgtttcacggccaaaattttttattttttattttcatttttagaaaattttcagaaaaaatcttcattttttttttgtaagaatatataccaagagaaactttttttaaagaaaatttcttataaaaaaatcattaggattttttaaaaaattctaagtttgatttttttttaattttcggagtgctccgctcccaaatgtatttgtgctcggttctccacccatgtgggtttgtttgccttttctatttttcaaaaaatg

SEQ ID NO: 106152 - DNA, 407 bp, Heterodera glycines
gtttcagcgcggatggggcccaacacagacggggtgcggggataggtgatatttttcgtggtctctggcgctttttcctgccactaattcgcagagctggagattctgtcacagacgaaacaattcagactggaaaacgctttataaatagggtaatcgatgaaaaacccggtttgaagggaacgatagagacgttggcaactgagagtaaacgtggagcggataatgttttagagaagggcggatttcggcgtcaatttggcacaggagggcgaagaaagcatataaaagctaacaattcctccattctatcacatcaaacgataattggaaaaacaataacaaaaccgttaattcaaagcaaaaagaggcttcgatcagacgcgttcgggctttattaaaaaatg

SEQ ID NO: 106153 - DNA, 62 bp, Heterodera glycines
aagccatgtttgacatgcccgcgccgacccaatatttcgtcatgcgctcatttttgggtatg

SEQ ID NO: 106154 - DNA, 445 bp, Heterodera glycines
aattcgtaattttattaaattttatttttaaattaatattttccttatagcttccaaccatttccaagaaggaattgaaaattggaccgaaaatttcttcggtaaaaattactaaatttaatgtttaaaaaataaattgtaaaaacttttctttagtttggtaaatattttggcatttttaaattaatgattgtaattgtaattaatttaacatatttaaattaattaatattcttttttattcaaatttaaattcttttaaataaagcataattaatcaaccactgcctagggcaaattcctcgtcttgcataagtcaaaactgcatgactcatcagtgtgcctaaaatcgatgaaatgccaaaatgacaatttcgatattttcctcaatgaagcggcaattttgtggcacattcggttgtccgcccacctgttcaagacaatg

SEQ ID NO: 106155 - DNA, 660 bp, Heterodera glycines
tcgcagaacttagccgaccatgaggaggactcactggttttggggacatagcaatattgggtatgacaatgagtcgtagggctttatgagcgaccccccccccaaaaaaaataataaattgggctcaaatggacattggtcagaaagcaaggcccattaaaaccagttcggtttgaaattctcttaattaaagcgcctgttttcacaaagcaacagatgtgaaagcaatgagagagagaatcaatggccaaaagcggcggacggatttattcagaaaacattaattgatcactaatgttttttatggtcaccatttccatttgatcagatttgtctgtaataggttcaaagatatctgtctgattgtacttacttagggtgtaacataagtttccgcacaattttttttttcaaattcaaaaattcataactccgtaatttctgcagttattttaataattctttttttattttgttcgtcagaaagtcttctttcatttcattttttatttgcttattcaattttttagtattttttcccgaccatgcaaaaattgaaaattggcccactaatttttctcgattttttatggtcaaaaaagtaacctgatataaaaaaaaggttttctatacaaattagaccagtagaatccgaatatg

SEQ ID NO: 106156 - DNA, 134 bp, Heterodera glycines
tttgaaggggaaagctcgcgcagcgcgtcggtcacactgagatacagtacacgcgcacgcctgccgaattccacaagctgctcgacgactcgacttacgacaaactggactttgtccacgtctccgaccacatg

SEQ ID NO: 106157 - DNA, 52 bp, Heterodera glycines
  unsure (1)..(52): unsure at all n locations
tatcagattatttgaattttttaaatacatatttggaagctcaattanaatg

SEQ ID NO: 106158 - DNA, 506 bp, Heterodera glycines
ttcattaaaataatgcgttattaaaaattgtttcctattattttaatcatttagcatcattattattttccgttcgtaatccgacgacgataaatactcaaatccaaaaaaaccaataggaaatgttttgttcccaagggagaggagacaggacaaaaaagagatgagataaaatctgaaattgaaaaaaatccctcattttttcatagacaatttcccattaggtcgtcgtcgctcgttcatccaactccaatatgttcatgtactttctgattcttattaaaaacaaaaaaaaaataaataaatcccttcaatttttatgcgaatttatattcaaatggaactaataaattggaattttaatttttaaatttattgggctaaaacaaatatgctatattttaatttatttgtggaaaatttattttagataataattttatagcggctaacatttatttttgtatttaaattgaaaaacccacaaaaattgtttcgccaaaatg

SEQ ID NO: 106159 - DNA, 1003 bp, Heterodera glycines
ctttgaattattgaacagattacaattctgtcaaatgaacattgcaaggaaaagcttcggaccgtcaaaaagaatggacaaattccgcagatcccttttttgtgtgcaaattcgacaaaaaatgcctttttgaatgtgagcaaattaattaaaattcagttaaaaaggtttaaatatatatatgcatatactcatggaaatccaattcaattgcaaaaaaacggacgcttttatttgctgggactgtcgaccggcggcacaaaatgagatgagttgccaattctatataacatatatttaataaataaaattcgattgatttttttaattgaatgcgtggcaaatataattaaaatccattctcagttttcccttatcattttataaatttgcattttcatataaaatttatgcccattcgagaaaagaaaaattgaaatttatacaatgaatgggaaaaaaatcagtcgctttaattatttttatttctttgtacttttaaattttacaataatttttgcgaaattgccgaaggcattgtttggtattttattttaattcattttaaatgtttaaaaatgttttccgtaaggcataaagctgaaaagtcttgaggatggatatatccgtttgctttttgaccatcaattggatgacaatgcgcgacaaaaactcagtgcccaattgacggctgttcaaatttgcatggaaattgaaaggtacgaaaattacttattaaaaattgaaatattattaattataattccattattaatcccggggttttccaatgtttgttcatttttttaatttggcaattattttcctgctggcaattttcattggtacttttttttgtgatcattcagactttaaattttgcacgcaaatcaggtgtaaataggacttctgaattagtaaattgataaaataattaatttatttacatattgaattattttgggtttaatttttggaataaaaatgccgttaaaagaaaatg

SEQ ID NO: 106160 - DNA, 71 bp, Heterodera glycines
ttaaacacatttccaataaaatttagcattaatttgcaacggtcgttcaaattgtctttatcgaagagatg

SEQ ID NO: 106161 - DNA, 200 bp, Heterodera glycines
aagaataattaaatagtaaaatcagacaaatgaaaaaaggctagaaatagggggaaaagaagtgaagagaagaggagagaatggataacagagagagaataaaatgagaaaaatgtaacgcgaaaagataaaaagaaaaaaattacaattaagaattaaagaaagaaaatatataatatttaaagcagagaaaaataatg

SEQ ID NO: 106162 - DNA, 91 bp, Heterodera glycines
atcgagtgcaaaattataagcatatcgaataatttttatatttcacatggatttgcatttaatggttttaaattgaatcaattgaataatg

SEQ ID NO: 106163 - DNA, 772 bp, Heterodera glycines
aaattctgtactatcatattactttaaattgttttaaatattaatatttaacacggcgagtcaattttgggctccaagtacaaataagtttattatttatttagtaatcagaacgccaaaactttgcaaaacttaaaatttattggggattttcccttgtaaaaatggaagagtcgatctcgagttagaaaagaaactttcaaaaaacaaaagagaattcgatagagagggccgaaaaactagcctaggcaaaatttcaagaaaatcgcaactttggaaaaatttttacgactgggcaaagttttttctttttctctcattttgacgcactatttccatgtctctaacatataagataacacatggttcatttttttgccaataaacaatttttttaaacttttgactatttaagaaatattcttcagaattttcccttcaaaatgagcataaaatggttttatttggtatattattgaaaaagttataagctaaaaaaattcataaaatcaagggtaaaataaaatgtttaccttttattgtttgtatttgttcttttggcgttctgtttttattatttttttatatatttgctttaaaaaaatgaaatttatacacaaacacaaagaggacttgaacctgagacccacatttggtgactaactcacagaccactaagacgaaaaaaccaacttaagtgtacttggagcccaaaattgactcgccgtgttaaatcatgacatatttatgttgctattaataaataaaaatg

SEQ ID NO: 106164 - DNA, 157 bp, Heterodera glycines
ttagggggaacaaaaatttttgaaaattactggaatttatatgcaaatataaatgggtttttagtgaaaattaaattcaaagcgaaacgttacaaaaaatgcaaaataaacaagcttaaaatcaaattcgcatttaattaaattattttttaagatg

SEQ ID NO: 106165 - DNA, 118 bp, Heterodera glycines
tcgcttggggccgcagacggacgccggcgggggcggtggacggctgagaggggccaactgagtacgggtggggcacactaaaaagggcacatttggcattttgtttatttatcttatg

SEQ ID NO: 106166 - DNA, 208 bp, Heterodera glycines
acccaccaactttcaatggcattccaatctctgggactcaacccaccagcatttcaatctctgggactcaacccaccagcatttcaatctctgagactcaattctcaggctttccaatcgctgggactcaacccaccagcatttcaatctctgggactcaaatctcctgcattccagacactgggactcaacccaccaactttcaatg

SEQ ID NO: 106167 - DNA, 151 bp, Heterodera glycines
ccttgaaaaagttaaatgaaaattataggaaattgcaatttcaatcccagaaaaattttatattgtatgagaaatgccattgacccgaaaatccgccgtcggaaaacaacggaattatttaatttgttgacagaaaaaaagcaccaccatg

SEQ ID NO: 106168 - DNA, 193 bp, Heterodera glycines
tggatggtaaataaacaaacaaaaatgccaaattaaatcattaattaatcactaattaattaatatgaaaaattgtatcaataaaatgttaattagaagccatgtgttgcttctttcacaatttgcacattaaacattgttgttgttttttttcatttcccatccatgggcggaaaacgctgaacaaacgatg

SEQ ID NO: 106169 - DNA, 299 bp, Heterodera glycines
ttctgcgggctagaaaatgaagatcaaaaatgaataaaataaacctgaacattaacgaaaactatatttggctcttaattttggcaaaatgtttaataaaattcaaataaatgaattgaaaataggaaagccggaaaaaaacccaaaaacccggcaaaaacccggcaacttcaaaaacccggcaaaaacccggcaaggacccccaaaacccggcaaatgccgggttttccaggtaaaatggcacccctgtttgtgcaccgcttctgaaaaaggtgcaacaaattaactgttaattaatg

SEQ ID NO: 106170 - DNA, 375 bp, Heterodera glycines
  unsure (1)..(375): unsure at all n locations
cacccgaaattttttanagggaaaaatagtatttttgctaaaatcttaaattttccttgctggtacctctctccccttagaaccagcctcacctaaattttaatttttcaaaaaaaccactatttttgaagaaaatctgctaaaaacgactcaaaatcgcaaaatttgtcactttttggacaaaattttttaacaaatctcattaaaaataaaaaaaattcccggcggagcctatcggcaccgccggggccgccctctggtcgccaaattttttttcgcaaaaaaatggtgtgaaacaaaggttgtcgccagaggtgaagggtacccccccccaagccgaatggaggaaaactgacacgaaattcgaaattaatg

SEQ ID NO: 106171 - DNA, 563 bp, Heterodera glycines
tcggtgcgcgaacattcgcagaaattggcggtcgcttcgctgaccgaacttttcgttaatgtgttgcccgggtacgaaattcgaccgctgacggactcagaaaagacgcaaaaaatgaaaaaggaaaccaaaaggtaagggaaattttggtgagatatttcgttccctttttcttttgggctggccgaatacgaacacgccctgctcaattactatttgaaattccttcgtttgctcgagaaaaatgcgaacagtcagtctttataagccattcattcattttggttgactttttccagagattcttcagaagggcaaaaggcattcattggctgaggaagcgccgactttttccacccaattttcttttatttgcgtccgatgtttgtgccgactcattgacaaatgttcacattttaatttcgccaagaatgtcatcacttgcttggtccggcttagcacaacgccgtggaaaaaggcaattaaacaatgaatgaattggcggggaggggggggggatggaagaattcgtccaatcgctgtttttgccgccattttagatg

SEQ ID NO: 106172 - DNA, 124 bp, Heterodera glycines
agtgtgatcagcccagcagaagtgcagcagggatatactgatcagactaattggagggggaaattggcacaaattaggggggaggggtgggggataaacgatcggacaaaatgacaaaaacatg

SEQ ID NO: 106173 - DNA, 104 bp, Heterodera glycines; identical to SEQ ID NO: 98209

SEQ ID NO: 106174 - DNA, 252 bp, Heterodera glycines
  unsure (1)..(252): unsure at all n locations
aagttgttagagtactaatagttcaaatacatatcattaaaattcacaaactgccgttgtggctttttntaatgttttgtttttctcatttttgtaatttcgctntacggatttcactttttgtttttagattttcttttttntagtttttaaaatatgttataaattatgtcttatatttatctaataattagtcttttcttaatttttttttgattaagataatgattttttgttgacattgcacaaatg

SEQ ID NO: 106175 - DNA, 451 bp, Heterodera glycines
atttctctactatttcatttataaataatatgcgctgaaatatgatataattaataataataattttgttcaaaggactaagacaaaatttaataagaaccctggataaactttgttattcgcaagttaaatgtaaatataaagtaatagtgttaaagtttaaaataaaatattctcatttattcatatatcaaaatttcttaaaacgagctgtaatttcaaacaaaaattcaaattttcttttcgcgttattaattttaaactatttataataaaataatggaaaacataatttatttagatttcataatggtaaaattcccggttggtccgggttcccggttccggaccaaaatcgaggtcccgatcccggcttctcagatcccggcaagacccggtcccggttttggcaaaaattcccggtcccgtgtatcaaatgataccaagaatg

SEQ ID NO: 106176 - DNA, 877 bp, Heterodera glycines
atatattattaaaaggcctggaacaatactaccaatacggttagggatacggcgctgatccgatatacagtgtggacgaaccgtagggtcatgaaggtggattttaattttgatgaccagcagatgatggatgatgatgatatatgatggcaaaatgtattattatttgtatctacaaattaaaaaaatgataataaatttattttaaatgaattctacataatttgatacttaaaccctttttgttctgccatctctgttttgtttttaaatttttttctatgctaattttcggcgctgaaaatgaatttaacatttattttaatctaacattcatttgctgtgaaataggcacaaaaagaaattcaaaataggcactaaaaaacctcaaatttagggatgtataaatgacaaaaattattgaaaaatgaaacaaatttcgtaggggggtatttttttaatatttaaaaataggatttttaaaaaatttttgagcctcttaggctctaaaaataagaaccaacaaaataggcaataataactcaaaaagtaacttaaaaccaccaaaaagcacttgttaaatgttttattaaaaatcaaaattaataaatccatctttttaaaattttattgcccgaaatgcttaattataaacaaaattttatggttcgaatttggagatcagtttttattgtggtcttttattaccaaaaaataaataaatattttgttattaaaaagctataaatagttaagaaatgaatgataaagcatttggaaattctttcatttaaaaaatattcaaaactgataatttcccatgaaaaattttaaaatgaattctttcttttttttcatcacaattcttcccacaatg

SEQ ID NO: 106177 - DNA, 91 bp, Heterodera glycines
tgttggtccaaacttggccaaatttgtccattttttgtagtattgtagcgaaaaaaattgagacaaagtacggcacatttttcccttcatg

SEQ ID NO: 106178 - DNA, 69 bp, Heterodera glycines
ggtttggcaaattttttaaattaatatttttattttatttatgtaaatatcatttaagtctgtccaatg

SEQ ID NO: 106179 - DNA, 1003 bp, Heterodera glycines
aagacatttatcctttttctgccaacactatccttggcctgttggttgtgctctggatttggctcttgggttcgggtccccttatatgttgccgaattaattgaattaaatcctctcatgggtttggaccccggcccctgggactgagtgattttaaatcacacatatatgacatttatcctttttctgtcaacactatccttggcctattggttgtgctctggatttggctcttgggttcgggccctctgacttgtgggtgaattagttgaattaaatcctctcatgggtttggacccctgcccctgggatcactctgggtggtctcgacattcaaaaacattggtaaaaaaaagggtgattttttgggtggagggagggttttggacgcccgtaaacgtgtccttatactactgttaatttctcaaaaaagtctcattttttatcaatttcgctagcttaatgtaatgctttttggcgtaaattttttttcgctctcaaagatttactcatttttcggaatttcttcgctaaaaatcaaattttgccttaaaagtgaaaaagtcatgaaaagggtcaaaaaaatacaaaaaaaaaagaaaattttgaaaaattattgggcatttatttgaccacgaatttgagtgccaaaaaagacatttttgtaaaaaaaaactaatttttccaaaaaatcgccaaaatatgtgacaaaaactgccgaaaccccaaaatatgtttttattcccaaaaagcccaaaataaatatgtgctaaagactcgctctgattgaaaggaaaacaggtaaaaatgctatttttgagattttcatgcgatagatgcgcaaaaaaatatataaaaacatataaatccgttccctgataatatccgtcaagaaataggaaaaccctaaaaatccaagctttacccaactcaattaattcttctgctatttgtgtgacatcattcggagctcggccaaattgtgctaattgcctcaaaaatg

SEQ ID NO: 106180 - DNA, 512 bp, Heterodera glycines
aataaagattaattgaattctctcccccaggggcctatttcaattcccgtcgtatctccgatatgatgtcatatctcagatacgacatcatatcgtcacttagcaccgccgccagaaccaaagcaatgacaaacatcgaccggcggcgatttactatggcattttaaaagctaacagttggcatcactgcgcagaaatttactggccctaaatgtcggcttcttcgaggggacgcattcagttggcatgaaaagttgtaaagcaacattcggcttttacctcattattattattattattattattttaatataatatattttttaaagttaatcaatacgaaatgaaaaataattttatttgcgttgttttttgccacggcatttcaatggatggctttgccaacgtaaaaagtcacatgaaatagtcataactctaattgcgcgcgtcaattcattttctgcataaatggcaatgttgaaaaagaaataaccatttctaaattgaaaatg

SEQ ID NO: 106181 - DNA, 155 bp, Heterodera glycines
ggtaaatataaattcccaattttgcgtgttgctaattagttccaagtttgcttaccctgaaattgtgtttgggtacaattatatatccaatttataaaatcataaaaaccttccttttttaaccaatttaactgattcattttcagatctacatg

SEQ ID NO: 106182 - DNA, 731 bp, Heterodera glycines
ttcgtcgtatagtattcgggctaaggcctatttctaacaaaaacccaaagggtgtggaaccgaaacctattgcaatggtaaaggggctgccaaaagcgtactgtaatttaatatcatcttcttacaaatgtacagtcattcggactttatgcctttttcccatcacagttaaacattcattctcaatgctcattcttactgtaatttttcttctttctcacattacagtgtaccatagcatatttccgatatttctctaaattgtaattttttctcattcattacatcattattcaatcgtgaaaatggccataagccatatcattaaactgtatcgccgactctcatcaatcagcctgtcccatggcattcggtgtttgccaatcagctttcacatacattaggccttccgttttcataccattacaatgtcagtgcccatcctatctcttctgatcttgaattcacaccatgtatgagcaatacttaagccttatgtattcactaatcagtcattatccatcacaagccttcgctcttcagccatcagtgttcactcatcacagttccccatcaaagcactaactggtactaacccatactaagtccctcactcaatgctaactcgtttgcatcaatcactagtgtgtacttattgagactaacaccttagtttatagataattctagactcaattcactactccttcaaacctcccaacccatcaatg

SEQ ID NO: 106183 - DNA, 893 bp, Heterodera glycines
gaatgtcaaatggtcgcgctcgacgttatgccatcgttgggggcgttggggactttgttggttactgtagttaccctaacatttcaagaattgggtcctaaattgacgacttttgcgaccacgtggcctgcccgcgaaattctaggattatattgtatgggctctctatatgtctttctatccctctcttatactctatctctttatctgtctttctatctctctctctctctcttatatctctctatctccctaccactctttttatctctctctctctctctctctatctatctcgctacttatctccatgtctacctctttatctatctactctcgatacacatctctctattatctctctctattcgtatcaaaactttcggctactaaatcccgattatatccaaactttaaaattgcccacaaaaattcctgtccccggtcgtctccgatgggtcggggacttggcccccatttttatacaataaaattggcccattggatacacttggactaaaaatgatgatgcctttttcacaattttttttaggatggactgaagcgcatgacgaacacttgctcattgttgtcgacaaatttggccttgaggacattcatggaaaagtcaaactgttgcccaaactttttgaatcggtacagttttaaaagggtgtataatttaaatatctatattaaatttatcattaatttttcccgttctctaaattgtcgtaaatccggcgatagagtaaataaaatcatgtcaagtcataaaacataacttatcataggttggtccaattgatgagcacattctgttgcggcgagtggtcgagatttgtatcacgctggagaccgccaaatggagtgggcccgcgtccattgaaatg

SEQ ID NO: 106184 - DNA, 532 bp, Heterodera glycines
atctgtgaattttataataggcccaaagaagacgcagaaaaataaagagtgattttaaattttaaataaataattgatcaccataatttaaaaaaaaaattgatcacccataaaatcgtctaaaattgatctaaaaattcacccaaattttatagggaaaataaaaggatacgataatcctaaaactcattaagaattttaaaagataagtaggccaaaacgtggcagataaaataattaaattttttttttgctatttttggaaataattattttttacaaaattttttttagcaagttttcctttctcatttcttctaagctgatcggaactgaaccatatttaaaaataatcaaagaaaaagtggcatatattttttatatttttaaaataaaatcgaataaaacagaattttttctaattttaatttcaaatggattttcatttaaatttaatttaatcatttatttttatttgcctttccacagaataagcgatgtgtggcgaaagcaggccccgtttctgaagatg

SEQ ID NO: 106185 - DNA, 52 bp, Heterodera glycines
tttgtacctttaagtgcttttttaggcttatcaaaacattttaaacagaatg

SEQ ID NO: 106186 - DNA, 757 bp, Heterodera glycines
tcgccccttcccgttccaaaaccccccccccccttcccttaccaaaatcccctccccccccccttcccttaccaaaacccaccacccccctgaaaaattccggcccaaatttggtcccaagatccccccaccctccctttcatctgacccccctaccgcgattcgctccccgcatattttgatcagataagattattcaattgcgtttttttaattttcgtttgttgcgaaatttttgtgcggggcgcaccaaaaatggtgccatccgcgctccaaggtcaaaatagtttttatgttcacaatctgtcaatcaaagttcttgggcgagaaaatttaaagcgctgcggagatgcaaaaatatttgcggccactttaccgcagtttttatacacgggaactgtcaatcatataaagaagggaacgccgaagcgacttcatttcaattccatttcggttgaggcggggggtcggggccattctttgcctctcggggcgcttgcccacaaatattcaaatttttccatcaatcatctttatctgccaccgcggcactgcagcacggcatgccagtgggtggagtcagcagccgcaccatccgcaagtttacttcatttgccactttcgtccgctttcaattttgtcagcagcagaaccatccccaattcaattctcattgtttgtcagtttcgaccactttccattgccaacatgtcttttattgcccccggcactttcgcgttcctttcaaaagactatg

SEQ ID NO: 106187 - DNA, 161 bp, Heterodera glycines
agtgggacacaacgctgttcagctcctacgtgaacacctttgtggggctcaaagtgcaggcgagtggctggcctgaaggttgcgacagcgaggagcagcgccaggcatttgtgcaagacttccagcgcacagagggaatccggctggacccggacaaaatg

SEQ ID NO: 106188 - DNA, 414 bp, Heterodera glycines
ctggcatatgatttgctcattctttttctttgtgtctccgcttttctcttcactctctccttttctcttcattttttttttgaatattgtttggcattttgtatacaaaaataagaaactacccaaaatgatttcttttttaactttcttacttgagcagactttgttcgggaccggcttttggaaatttcggaaccagtaatcccgcttctaggccgggaaaaatcgctcaaaaatgggaaaaagattgggaaatcttggtataaatacagagcccggaactagtcctggacccgaattcgatgccatagaatttttttttttgatttttttcatccttattaattttttagccatttatttgacttccagttcagcaattacattctttgttcttcttcaattttcgcaatg

SEQ ID NO: 106189 - DNA, 450 bp, Heterodera glycines
  unsure (1)..(450): unsure at all n locations
caggtgcagcaaaagcgataatatgaaatttccaaacaacgagtttagcntattaatcatggaaaaatgtgaagggaagacaggcggccaaaatgaagcccaacggtggtgtcacgccaataaatctccgaggggcaacaaataatttttaggggggagagggggtgggaaatggcatggccaatgccattctggccaagaatagcaccacacagtgtacaaaaaggttcatgtgaaagtgggaggagaacaatcggcggcactatgacaacggatgaaaatggaaaattaattagcggaaaaaagttgcacggcataattagttgtgagaggggtggggggtaagcatattatagtagcgcggccgtgcgcggtggtcgtgctggcgttgggaattggaattcggaatggggagggaaagggaaaagtgccacatattcccgaaggatg

SEQ ID NO: 106190 - DNA, 671 bp, Heterodera glycines
  unsure (1)..(671): unsure at all n locations
ttttagccctggggaatttttggaanaattatttnntattattttatcatgttaattcagcagaagtcattggcaggctgcatcataaaacaaaaattttttttatagctatatttaaagaaaattaggatataaaaaaaaactggaatttcttagggttgtaaaaaaaaagatataaaatttctaaaaattctaattttcttgaaaaattttgacctaccctgtcttaatctccccaaatttgttcaaggagcggctttgccgggctgttatgtgaattgcagtgcgaaatgaaatgcctaaatggtggaaagtgccaaaaaacgacggacaagggcgaattctgtgaatgccctaaaggcgagaaaattgaattattatactgtattaacttttatacataggtataatttatatgatcaagaaacgagaaagtcccggggtgcccttttattttaattttttcattttgaaatttctcattttttgtttgccctgaggcaaaaaaaaagcataggaccattttaagccggtaccaagattgtggcaaagaagaaatcttgggacgagtaccaattgtaactcatttgtggaataatgccatgaaaaacttattaagaaatgtttatatattttaaaaattttttgccaggttttcatggccctttatg

SEQ ID NO: 106191 - DNA, 404 bp, Heterodera glycines
ttcgccatcaagcttcaggccggaggccacaagccgcgaccaggcactagcgcaccagccccaagcacggggttgggcactagcaccgtgtccaaccattcgccatcaagcttcaggccggaggccacaagccgcgaccaggcactagcgcaccaagccaatatcaaaacaaaaaacataaaaatgaatgaatgaatgaatgatgaaaaatatttagacaaaattcaattcagtaaatattaatgcatgagaaaggtcagagaattgctggacgggcaaaagaaagagggggaggagagaacggggggttaattatctcataattcagttctgtacgatttttatttaaatatttttttttataaataattttaaaaaaactttttagatttttaaaaaaaatg

SEQ ID NO: 106192 - DNA, 474 bp, Heterodera glycines
aaatttaaaaaataaaacccctaagaaatgaaaaattttctcaacaattcatctccaaaattgattttcatattttttttgccaggaattttagattttaaaaaatgttgtaattccttaatactgatttggcataatttgttgcttccttgaataaaaaaaaatcattttacacttctaaattaatttgaagttttttagtgaatgtttaccatttttagttcctgttttggcgtttagagcctaaataaagcctacccattttggcagtttttaaagcctaaaaatattatctctaactatcattggaaataattttgaataattgaattcatcctttttgaaattattcagttcccggagttcctccggtccgtttattaaatgttgtttttgttcatgttcatttattaaaacaaatcaggtcatctaaatttttaaaatttagcaattcaattttatttatctaatatg

SEQ ID NO: 106193 - DNA, 651 bp, Heterodera glycines
attaattgaccatttaccttgataatttaccaattgcggctttatcttctttaaatgattaatatatatttgatttaggttgaacatgggcatgaggtgatggtcttgcacggaccgggtcagtttagtctggccggtttagtctggtcgttttagtctggccgttttaggctggccagtttagtcagagggtcggttttagtctggcaagctgtttttgcccataactcttaaaatgtttttttttgtcaattataaacaaggaaaaacttaaaatatctatgtttagctacaatataaatgaatatcccaattagaaaataaaaacaaagcgaaaccttcagtttggcaccgcctttttatagcttcaggcaaagtaaaccctaatttttttcacgttttttctccatagaaggcttcaacgggcttttgcttgtttatatccaactgttttccgcttcatcaacacaattcgatatgagaaaagtcaattgatgcagacatcgcacgatgcatcgctggtgaagtccctcctcaaaaaacgcgaaaatatcgtgccgttgatacgaattcttcgactcttacagggttacaataccatcaactaaaacggccagactaaaccgacccccaccgggtcttgcaccaatg

SEQ ID NO: 106194 - DNA, 129 bp, Heterodera glycines
tattcgcccattctgagggacacgtcgaaatattttgccaaatcaaaattcgatcgaagaaagtgcctgattctcgagagacaaactttccccctttttccaatcccactttttgttgtttcagcaatg

SEQ ID NO: 106195 - DNA, 388 bp, Heterodera glycines
ttcgtttgctattcacaaagtgattatttcaatccaacaaatccatcgtccattctcttctctctgatcatttgccattccctttcactcgtcactcactgatcaccggcactgatcggacgcattatcagctgaagctgaaaagaggcacagaaacgaccgacattccccgtttttgtgttgtgtgatggtcttgtttggtttttctcattgcgctttgctttcccccccccttttttttttttgcttttcctccgcttctttcctttccctcttacgcttaccccccccccctccccttccgtttttattttgcccctccctcagaaagtgctgccggtgtcgtcggcacttccgctgcgtctggtgcagcggtgacgcaccaatg

SEQ ID NO: 106196 - DNA, 775 bp, Heterodera glycines
attatttaaattagtgatgggtttgctgtagggtttattatgacttttaattatgtttggctttttatggtgtcctttttcggttttttgattgggtttggtgatccgtgtgtgtgtgtgtgtgtgtttttttaaattgggtttgtcaacccttgattttgtatgggcttggtgacccttatacttccggatgacgagcagttgcgcaacggtgaatttgacgttttgacggggcaatcaggtgcagaccggacaggcagcacagtaagacgaatgggcacagcaagacaaacgggcagagcggcaggcacggcaggacaaatgggcacagcggagtggacaggcacaacagggcgaacgagcacagcgggacgcacggcaggacaaatgggcacagcgggaaaggcacggtcccgggtcgtggcaccaatttttgtcgtggcgacaaaaaatttgcgtcgaactctgcggggtgaaggggacgggaaggggatgaaatgggcgaggcgcgcagagtagccggtcgggggaacgtagggggtcgggaccgatcggagagcgatgagtcgtgccggttttcgtccaggcaaatagaccaagttgggcacaattttaataagagtatgtttattgtgtcgacctcaaacttgggtaattaaaccgtcccaatcgggacggtgagggaaacgaaaaatgggggacaaacatgataatgtgaacggggaaaagggggcacaaaaacggtgacagtaaataaatcacaaatggaaaaatg

SEQ ID NO: 106197 - DNA, 205 bp, Heterodera glycines
gcccccagccacagcccctgctttctcccagtcttaagtcttggatttgtcaaataaattcaagacttcaaaataataatcaaaaattctcttaaaatttttttgaacccaattcaaaaaaggaaaaaaatttgcagtcaaaaaattattcgaatttctccaattttgtttccataatttccgaaagttattcggtatcataatg

SEQ ID NO: 106198 - DNA, 173 bp, Heterodera glycines
ttgtagcagaacaaatgagacatagctgacaaattgccggggcttttatactccccggaaaattaggccacgcccacttttgaaagctatttaagccgagattttctcacacaatcaaatcagtcttgcaaaatcatcatcaacaacaatggcagatcaatttgtacaacatg

SEQ ID NO: 106199 - DNA, 656 bp, Heterodera glycines
tgttttgtttgcccacacaaaacgtcgtcaagtcgctcaaccaccgcccgactaaagtccaacgattaatgaatgaatgagtgaccaataccaaaataataatcaatgcacaacattttaacactgattttgcgttaattaaaaaataaatatttatgttgtaattattttgattaattaattaaatttaattcgtttcattttttgtacttatttattttagtgtaaaaaaatgaaaaattggaaagtttttagcaaaaaaattttgtgaaactctcttttattaattactgtgaattcagtaatattttttcaaaaaatttctcggcagcatcgcctggtgcccatgaaaatacctgaaattatttcttggttcacattaagttaaaaaaaaaaattgcttaaaattcgtcacaaaataattaatgcttcctacttcaatttgggttaaaaattattttgacactaatttgattaattctaattagcattttatttgttagacaccaactgtttttttttaatatataaaacaatgaaaaattaatttttttgtgaaacaaaatgtgtgtaaatgggagggagtttttattcttttggtgtctaaaattctaaaaaaaaatctattatcattatttcttaaaaactcaacaatg

SEQ ID NO: 106200 - DNA, 556 bp, Heterodera glycines
agctggaaatcatgcggaagcgccgtgaatttcaggcatttaatacgcaattgttaaggcatattcctttttttattagggcccggaatttgaaaaaaacccgaaccaggcacttggtattggacctggataggattgatccggactaattgtaagaaaattcctgttttataatcaactcatgtcaatgtcctattgcatttttcaaaaacatcaaaacctgaacccttgagattcctattccgatttctgtcctttccgacctcttctttttgtgtctctatgatttagtttttcctttctcttttctcacctttccttaattcctttaggaaggtcttcatcgctttcatttcctcactttcgttgcccatcttcgctttatggcccattcccttctccgcaattcttccactcttttgacgccattcactgttttgtttggtccaatttctgcgccgatttcacccgcccaaatgggacaatttcttctcaaggaattccgaagcaaattccggtctcaaaatgacacattgaggaatgagtcgaccaaatg

SEQ ID NO: 106201 - DNA, 86 bp, Heterodera glycines
tgtgagaaaattggggggagggcattaaaaattaattaataattaaattgaaaaataataaaataataaaaattaaatacagtatg

SEQ ID NO: 106202 - DNA, 270 bp, Heterodera glycines
aatttaaagcacattcaatggcaatctttgacgaatttattgttgttgacgaaaaaacgatcagtgaattcataggcaataactgtggcagctgtaactgtaaatttcgtgatgtgacccaatttgctgcactgtaaatttaattgtttaaattttaaaatgtaaaaataatacttaaaaagcaaccaaatttaatatgtagcataataagccaagatgattttttatttcaatttaaattcatcacttacatattttagtgaattcatg

SEQ ID NO: 106203 - DNA, 251 bp, Heterodera glycines
gtccgcttctctgcaaattgcaacttttgccgtcaattaccgtggcagacctttcatggagagtttagttggtcagtttttgtggtcgtaacacacacaactcacgcggatcagtcccgatagaagggaaattatgctttctaaaacgattcgaaatttttgtcatctaaattcacagtgattttctattgtttgtacgtctagaaaacaagcccctcttctactcaatcatttgctcttttggtgcaatg

SEQ ID NO: 106204 - DNA, 185 bp, Heterodera glycines
ggggggggggggggattttggcacgagattaatttcgaatgtgttggaaaaaatgtggagaatgaattgctgattgatagcaaattggctgtcaattaaattttttgtctttctattccatttcaatcattattatttcgataattaaaatgattaatttcagtagttactgtaagagagaaatg

SEQ ID NO: 106205 - DNA, 73 bp, Heterodera glycines
tttgcagcaaaaattattcgaatttctccaattttgtttccataatttccgaaagttattcggtatcataatg

SEQ ID NO: 106206 - DNA, 528 bp, Heterodera glycines
tcccaccacaattagcgggtgcttgttttttggccaaatcacttccttcactcaacacatagaagacattcagaaaaactggaagcaccgctgaaacgcatgcgacgcattttcatgtcaatggattttgggaaatgggcgcagcgaaagtgccgagaattgggtgggcgcggacgaggccgggctcggggctcagaaagtcactgaatccgaaatccggtccccaaacgattcgaaattggagtattcttgaaaatgctttactaaatatgaattatctcaaattaatcaaattctaaaattttatatttttttaatatttgcattacaaggaattttggcctaaaaaactccaaatccgagcccagccaaggcacggactctttgagcaccataacatttagggatggaggagacgttgttgcacaacgatctgtggataaacaacatcctttggcacaacggacagagggcggacgaagtggccgctttcattgactggcaactcgcctcccgtggttggcaatg

SEQ ID NO: 106207 - DNA, 306 bp, Heterodera glycines
agccaatcgatattcgcctctctccgtcaccaatttattatttttatttgtttcttcaataaactttattgtctatatttgttgtcgttcctttgggtaaggacacaacgaatttggcgcagtcagcaacaaaagcctaagcggctttcatcggacattttaaaaaactgatcacctggggggtgtaagtttccgctgggtgcggttttcatcggacatttaaaaaaactgatcacctggggggtgtaagtttccgctgggtgcggttttgaaaattcaacaaattttcgacaaaaattcgacatg

SEQ ID NO: 106208 - DNA, 354 bp, Heterodera glycines
ttaattttttcaataaaaatgttttacttaaaattattccttctttggttcttgttggtcggaacggaaagttgttgcctttcaaaagaagaaaaagagcaatttaccagtgcccgaagaacggtagaaggcgtatttagagacataattaggttagataacgaagcaaaagaattttctttttctgcacataataccatggttgaagcccaaaatattaaaaataaaaaccctgataaacctggtgtgaatttttggcatagcaaattattagatggagttttaaaaattcatgccctatatgacaaaataaaaaaagaagaaaagaatatgaaaaatataaaaaaaggtatg

SEQ ID NO: 106209 - DNA, 201 bp, Heterodera glycines
ggtctgctgaccctttaaatcctaagccttttatcacttttcaaaaattatctaattattagacattattaaaactaccatttttacaaaaacaaaatttttggagagtatatttttcaaagaaaatttgctttttaagctgtttatttttcatttttattgaaaaaatcaatttttttattcattccagacgaagggatg

SEQ ID NO: 106210 - DNA, 138 bp, Heterodera glycines
tagcatttttaattagactcccaggacttcaaaaagaaaaagagttagacatagtcaaagcccaagctgaagagcttgaattgcttcttaaaactcataaaggacaaattcccgacccaattctccaaacagttcatg

SEQ ID NO: 106211 - DNA, 174 bp, Heterodera glycines
ttcattcatcgggaatgaacaaataaataattggaggtggccccaaaatgagtgatcacaagtgtcgatcgacacagaccggaatttataccggaacaattattgcgggatcgctataaaaagagcagttgatgaatgggtaatgcaacagaataaaacccaaacattcagatg

SEQ ID NO: 106212 - DNA, 134 bp, Heterodera glycines
ttttgttaaatcatttgtacgactagcagcaaatcaggaggccatccttcaaatcacttttggaaatacagcgattttgtttggcttttaatttttattttaggataaccaataaattcccaattttggttatg

SEQ ID NO: 106213 - DNA, 184 bp, Heterodera glycines
cttgaaaatgcctttcacttcatgtccttgaattttttcggaaaatcatcaaaaattttatatgtaatctaaaatattttttaattattattatatgacattagaaaaatttttaaccattctttttaaatttaaatttccgttttctgagcacccaccacttcagacacttctcgtcccgatg

SEQ ID NO: 106214 - DNA, 486 bp, Heterodera glycines
ggtgcttttgcttttgtatttgttgaaaaaacaaaccattggattttcagcttttataaaattgcgtcaaattcaattcccaaatgaaaataattggtcccaattgttttcaccttcaaaattcactaaaaaggcaattaattaattgttcactaatggttcattatatttcattttttgattaagtacaaacattatgccgccatttgttgcgttgtcggcaatttaattcatttggcacaattttgtgactttgttgagcgcaacattcggtttcaattattgcatttcgacactgtgactgatggagtcaatttcacgcatattatgacggaaaatgacggggaatttaagtgcccaaattcaattttaatgcctgtcctaaaacaaaatcggtatttatatttttatttgaatatataaataaatttttttttgcaaaggaatttttcactgcacaaagcgtggctagtgggaatagaaatg

SEQ ID NO: 106215 - DNA, 531 bp, Heterodera glycines
tattgtttaattcacattcgaatgccaatgttgacgtgaacacataataattatgttttcagctgatttaataagcaccccggggaattgtttgacaggaattttgtccaaatcaaagattaattgaacacaattcgaaaagacaatttgtcctttggcattttgtcaaattaaaattttcatcctcgtttggaataatcaagtctaaatcatcaaaaagttggtttgttaccttaaaaataaaagagtatttatgcctttattgaaatagctttttttacaaaagccgacgaaaatttaccttaacaaattcctcccttaatggatggtttattaatattaaattgtctgggtctattataattaaataaatacgttaaattgctttgtttaaattttgagcaaaatttccaatcgcgtcttttcttttttctaatgatatttaataaatttttctccaccaacaacaacggcaatgttcaatggggtcaaccgccgccttttgctggcactggcgccgtttcgcagatg

SEQ ID NO: 106216 - DNA, 53 bp, Heterodera glycines
aattaaaaagaaataaatattctaagttttaataattacctaattttcaaatg

SEQ ID NO: 106217 - DNA, 1003 bp, Heterodera glycines
tctgctggaaaaaagtgacatttattgctgaatttgtggtggacaaaaagtaattttcccattttgaattgaattgttttgtacaaaagaaaacattgctaaagatttaacaaagaaaaacagaaaaagtgagtttttatattccaaaattataaataattttactttatagttttataatttaaaaaaatccctttttaaatggtataaaaaataattaaaaaatttattaaaaaatccgaaactaatttaaaaaacactccaaaacagaccaataaaattatggactaaaaaacggcaaatatggacataaaatatggactaaaaaagcccgaaatatggactaaaaaggtcaaaaatgaccaaatatggaccaaaatatggactaaaaactgccaaaatatatgctttaaaccctaaaaaattacgaaaaatgtatttaagctaaaaactgccaatttttattagattctagcttttccaaaaaagtcgatctttaagggtgtatttttcgcctttttttttgcattttttttgtgaaattttgccaaaaatggccaaaatatggactaaaaacgcaaaaatagcggaatatagatttattccctaaaaccccccaaaaaaaaatttatatttaattaaaagaaagtttttgaaaaagagaaaaggtaaaaaagtacgtaaaataatttttaaaatttaaaattaaaaatattttgtatttttcggccgaatgcttttttaacaagaaaaattcatatagaaaatatataattattttaaaaaatctttacaaaatagcgagtcttttttaaattcacgtgaaagcaaataagaaaatccaccaatttccgctaaaaagattttttgatgtttttgtctaataaaatccacgtctattaaggaaatcagaaaaaggggtatttaagtgcactgaaaaaataaaataaagacatcattaatatattttattcattattaaataaaaaatctttttgccatg

SEQ ID NO: 106218 - DNA, 260 bp, Heterodera glycines
aaaaatgcctttttacgtcgcttttttctaaaaaattttggggaacctggggccggcggtgccgataggcgccgccgggaaaaattttgtaattataatacgatttgttaatagattttgtcaaaaaaataaacaactcattgcaagcgacaaatattgaaagggagaaggtatagccactagactacataaacgaaaaaatgctttaaaagaaataaattatttagggtcgggattcgggtttcggaacgagaaaaatg

SEQ ID NO: 106219 - DNA, 67 bp, Heterodera glycines
ggtaacgaaagttttggtggtaattttttgaaattattaaaatgaataaatgaaaatattaaagatg

SEQ ID NO: 106220 - DNA, 936 bp, Heterodera glycines
aattccattaaaatttccaaaaattttcctcggctgcgcctgtcgacatcgtcagaatccatattttgtcatattttcggaaatttgactacaaaataagcaaaaatggtcattttttcagtgaaaaatgaatgaatgagtcatttctgacgattttttaatcttctaaatcacatttcattttttcgaaattttggatttaattgccccaaaaaagccgagggatttcagcccaactacatatataaatattcagcaaaaattccatccttcagcccttaattacagtacataaaccatttgaatggggtggggaagggctacgaaacatacggtaggtgtttacgggaaagtatagtaatctatggttttgtgaaaaattaaaattcaaaaattaaaaatgctcttcaaggccagctatgtgtccttctgcgggccctccggcaaacagatgcaacgcttttttgtgctgcgccgaaatttctgtctctattcctatcagacggacaaagtgccaaaatttgcggaattttcccgctaaaaattttgtttaaatttctcaaggacaaatgcgctttggccatgttgcccgtgtccggctgtgacattggtgatttatcatttatttacaatattattttgtgaattacctgaaaaaaagtttaattttttaatttatttttaatcatttttacttaaaatactaaatgaaatatatttaattcggtaatttaatacatattttttgtaccttcaaattatctatcttttaacggacaaagaagtaaaaaatctctaatatttaaatataaaatactttttaatacataaaaatggcaaaatttatttttaaaaaattaaatgtttattaattttaaatcaaaagaattttgttttttaatctggacaattacatttcagcaatcaatcagaatg

SEQ ID NO: 106221 - DNA, 954 bp, Heterodera glycines
tggtggtagtttagcaccgtcttaaaaacaggaaaaaaagaacggtaaatcgagaagaatcaaggaccaaaataaaaaccaaaagtccaaaaatccaagaatttctcaaaccgaaacactgttctcaaattgcgctcgctaatgccaatgccaactgatgagaaatgtttgtggcgaattgccttttaaactcacttcactatattttagtctttggctttatttgcgctcattcatttattcatatattatgtatttttctgaatcagctaagcaacattccaatgcaagcctcttaatttagcattgctttttttacccaattaatttatatattttattttattacttaattaactaattttattaacatttgccaatgcaacattccattacaagcctcttaatttagcattgcttattttgctcaattaattaattaattaaatttattttgttgacatttgccagtacaacattctcatgcaagcctcttaatttagaactgtttgttttgcttaattaattaattatatttttttaacatttcccaatgcagcattccaatgcaattctctcaaattagcattgcttattctgctcaatttattcattaattatttttatttggttaacatttgccaatgcgacatttttactgacttcctaatttagcattgcttaattgtctcaactattaattaattttgtttttcttttattattttattaatactcactgaaatttgtgacaaaaaagctttagtaatttattcaagtgaatttttcattatcatatatcgttatgttcattgcattttgtgggctcatttactacaaaactcagctgaatcattagtccattttcaatttgttctcactgatcggctgaataatttttttttaaatttaccacataatattagtaaattgctttagaagattaaaataatg

SEQ ID NO: 106222 - DNA, 818 bp, Heterodera glycines
attgggaagaaaatgcaaaaatggtctttgatcagccaaatgaacacgttaagtgatcagataaattttgctaatgagcaaattattggacagtcgagcagcggcggaacgggttataattagaatgtgattatgacaaaatgattgaccatgaaataattttgagagggtggagcaatttgaaaaaattccaataaaatgaaaaatttaaatgataaattaacaaaattttttaattttaataaaaagaaaaagaaattgaattaatttaaatgataaattataaaggatttaatttaattaaaagtgaaaaaaatctcaaagccttgacaagataaaaatattagaaaaatttaaaaagtaaaattgaaaattataaaatttaatttcctttaaattgtttaaatatgtacaatactataaaataaacacattttaaactattaaaaatgctaataaaaactaagaacttccgttgtcgatttaaaaaatttacgcgaaattttacattaaaaaggagcgcaaaaacattggtctttgaccttgcgatcagaaatgatacaactgatcagaccaaaaaaattggtcattcaccggaaataaaaaggggcgggggcacaaaaaaggctctgatcgatcagtcagtcatgaatggcgtcaaaaaaatgtgatggatgctgttgtaaatgtcacagggtgtaaattaattatgcctttttatccagtttttaatggaggggggggggggggcggaaattcgaaaattggaatatgtgcgccccgcgtgacaatcgtgcaaaaaaaacgcgaaaaatatg

SEQ ID NO: 106223 - DNA, 443 bp, Heterodera glycines
taatcaactgaggaatatggtaaatctaaaaagtaaaatcaagaaatatgtaaagcataaattgacagttagataaattaaaaagagcaataaaaaaatttgaattattcaatttgaatttttttttttttttggcaaaatgatctttctaaaattaatgcggcttaacaatatgtgcacaaacaggacgcacaaaatatgccccattgctccacatagctcaaagatagacacgcaataggcgcgattagttggggcggaacagaacggggaggaatggagagggagaaggagtagttttataatttataattgattttcatcgttcgtttccttttgaccattacatcctttcatttttacatctttttggagaagacacaagaatttatttacagtgattaaatagtattttagaataaatacaaattattttaaaaatg

SEQ ID NO: 106224 - DNA, 51 bp, Heterodera glycines
aatttaaagctctgagaagagtctcgagtattaattagtattaagcatatg

SEQ ID NO: 106225 - DNA, 500 bp, Heterodera glycines
taagtagaataatgatttatagagttttttaatcagaaaaaaaattttttatatgcttgtttataatgtatttcgattaatagaccataaatacaatatccccttcctccccaacccacacaattcgacgcccccgaccagcattgccccaggcggtttgtcccttacgcggtcgctcttctccagcggctgcttctcctctcccttcccatcatcgcccgaagcaaaagcccctgaggcgctttcctctctccacaccgtctcccgccaattactttattctcttttcatttactgcttgggaagctggtgatgggaatgtgtggggttgtggggggaattgcccctttccgccttcattttcttcgctttgtatttattttgagtattatgtccaaaatgaattgcttcgtacttttaggttttgaaaagaatcaaagccatttctttgaatagatttgattcatttcatttaaaaaaaacaaaaattgccgccgatg

SEQ ID NO: 106226 - DNA, 420 bp, Heterodera glycines
aaaatgcatggtatacaatttttaaccattgtaaggcaaataaaaaatggtcatgcaattttcctaattttcaaacgttacgtcgaacgtcgaaatctaacagcaccggaatccggattttcgcagattttttgatggctaattgatcaacttgcaatttaaaataattatgaaaatctatgaaaaatttaaaagaatttttgattttttgagagcatctgtctgataagattttttaattgaaatattaattaaaaatggaaaaaatttctcgattcgatgttggcttagaattgcatcctaattaggcttcctaatggcaaatttaatttgtcataattcacggcacaggattggctggcccaggtgaaggaatatgccaaggacagtgtacagcttgtgcttgtcggcaacaaaatg

SEQ ID NO: 106227 - DNA, 125 bp, Heterodera glycines
cttcggcttgagcgaaagaagtgatgccgaactctgatcttctgacaaaacaaatattggtttgtcattcaacttaaaaaattaataattgaatgatttttggcttcgctattcagaaggaaatg

SEQ ID NO: 106228 - DNA, 293 bp, Heterodera glycines
tccataaaggaacagctaaaaatttagttggtcacgcgaagctaaaagaaaagcaacattattttttaagtgatttaaaatattttttgtcattttggttgcccgatttttaaattttgaatttgattttttaagatttgttttcttttgtgaaatttttattatcaaattaactaatctttcgttgtctccgcctcatttaccatctaaaatgatagggataacaaacagtttaataacaacaactttagataatcgttattaaataatcattactagagttttgaaaaatg

SEQ ID NO: 106229 - DNA, 233 bp, Heterodera glycines
tttcgtggtcgacgcattactttttttgccttttgcgcaaatggacaaataaattatgggtttttgggcgaaattcctcaggaaactgcgactttgcctatttcaatttgtttttcgaatttactttttacgaacccttagaattttgtcagctttcccatgatttctctttcacccattttcttcaataagtgagtgaaggccgtttccaaattaattattgccgctaaatg

SEQ ID NO: 106230 - DNA, 389 bp, Heterodera glycines
ttttaaatccatcatttgctcagctttatttaattgaacatttcaaactatctcaccaacaatttaacagattaccaccaatttaaaatcctcatttgctcagctttatagaagtgaacatttcaaacaatctaaccaaaaatatagcagaataccggcaatttaagatcatcatttgttcagctttattgaagtgaacatttcatacaatctaaccaaaatttaacagcatcagctttcaatatttgttcatattttatttatgacaaaagaatacaaaatttgccctcgaagtttggttttttctgaaataaaaggcacgtcaaatgctcgaaaattcatatttcattaattattcaattttattttattcaaaatcaataaaaatg

SEQ ID NO: 106231 - DNA, 1003 bp, Heterodera glycines
tttttgtaaactgacgaaattttttgaaattttacaggctaatagagaatctgaagagctatcgaatgataacaaaaatttttaatttggttgatcaggaaaaaagttgttagcaacggcgcccgaaaaggccggcgccgaaagtgggcggttcccatttatagccctagttatttgatggaaagaaaataaactgttttatttattaaatatgaaaaaataactgattttttgtattgttcattttgatcagccataactcgcttcattccccactaaactgaacaattttgatatgcttcaaaagatattgaaaaggagaaactttataagcaaaagctaagcattttgaaaaaatatctgggtgaactgtagtgaaagccccttgaaaaaagggtcaaatgatataccaatcggttcgtctcaaggagctaagcatggaaaaatatgtctcagttgcggaaatacaaaaaaaactggtttttaaacctgttcaaaactcgaaaaattgtgagatttcgcacactaactttttttaaacgatcgaatccccacaaatttgggggaccagagcgtttgggcccccgtttttgggcccccgcgtttgggcccccgtttttgggccccggggtcgtttgggcccccgtttttgggccccggggtcgtttgggccccaacccaaaaatcgaaaaatgtgcttttttaaaaattaagattctaaaaacagcctgagggatccctcgccacttggcataagctaggtttaattaacattcgctcatttttcacaattttacttattccaaatcctattattttttaatagttaaccaatttgatgtacattctgatttggacatttttcagaatggctaacccaattgcaaccaaaaaacaaaaagtaaaattgtcttacaaaggccacctttaacccttcgctaaaatgagttctgatgggatgacaaaattttggagatgagttcaaaaacagcactgacaaatg

SEQ ID NO: 106232 - DNA, 159 bp, Heterodera glycines
aaatttattcggggtctcacctccgtctcgcagacgggagacctaaatttggacgcggttcgccacgatctggactgggccaggggtggacggacaacaacaaatccttcagcgaaaaatgtcaattataaccagcagctccgacgttatttacagatg

SEQ ID NO: 106233 - DNA, 120 bp, Heterodera glycines
tgtcagtgaattgcatgcactccccattttgttgttgtgtttaagtcactgaatcgcgtccctttctctttcagcactgatgatggcaccggcaacttcttcctgagcgcatatgccatg

SEQ ID NO: 106234 - DNA, 614 bp, Heterodera glycines
accagttgccttcgccggccaccctacagtatcctgcggcactcattgtgaaccgtgacccccatcacaaagggggctcccattggtgtgccatttatgcccgggacttggacgcgccagtgatttactttgatagccttgcccttcccataccaccaagtatttcatcatcctttttaaataaatttcccaaaggtttacacaaaaacattgaagcctaccagtccccattgacatcaacatgtgccccccattgtattgtctttgtttaccacatgtcccatggaaaatcattcgataaatttatacatattctcaaaacttgttcaaaccctgacatgtattcattattaatgctaaataaaatgttgaacagttaaattatattttcaatttcttaattttttcaaaattgtgtcttccacctactaattatgcattattctacctaaaagttacattttccaacgtttaattattttcgtactttattttccattcattaattatgcatgcaataaaataaaaaggggcggagcttatccatttgagttggaacaccggtataaaagccgctcgaatttcttcattcagacataaaaaaatctgaaatg

SEQ ID NO: 106235 - DNA, 91 bp, Heterodera glycines
cgttgatggcgatggatttataacgcgtaaaaataagtaatgaataaattaattattttaaaaattaaattttagatccgagctgaggatg

SEQ ID NO: 106236 - DNA, 588 bp, Heterodera glycines
tctaaaagatttttatagaaagcgtcgccggaacgcggtcacaaaagaaaaatgcataattaagtaacataaattctaacattcccacgtaaatcacgtcaaatttacaactgaaacgctatctgcttactcaaccaaaagaaagctaaaagtcaaataggtttgtccaactttctgaaaacggtaaattaagcatgtcagatccccagaatattactcttgaccatctattattttttacgactttcgctaatgaaataatcaatttttactacattactattttatacattcacgacttttcaaagctacgttttcatgtgatttttaatgagttgtcactgaatttggattcagttaacccattggtaagtagctgtgaatgttagcattctaaaagatttttatagaaagcgtcgccggaacgcggtcacaaaagaaaatgcataattaagtaacataaattctaacattcccacgtaaatcacgtcaaatttacaactgaaacgctatctgcttactcaaccaaaagaaagctaaaagtcaaataggtttgtccaactttctgaaaacggtaaattaagcatg

SEQ ID NO: 106237 - DNA, 360 bp, Heterodera glycines
agttgaaataaatgtataaaattgattaattagttaatgttttgcggtatttaggtgggacttcaggtcgcggtcatggaagaagcgggtgcgtcccctggaagaagacccggacaaggccaaaatgtttgtgcgtgtgtacaccgtgtcaccgcgcaagcatgagctatttgccttgaggtaataaattaaaatgaaaagttaataaagctatcaaatagaacactgctcctccaccgtccgggacccaagagctttgccgaccttcgcaccattgatggcatccaatttgacacattcgtgggtacgtgccaacatttgggtcttcaagtgagcgatgaagtcttccgccgagccatg

SEQ ID NO: 106238 - DNA, 776 bp, Heterodera glycines
ttcttttgctgatgttttatttaataaaaacattatttatttccgttttattacgcttataaaaaacataagtatgtgcagactaaaataaaatcttttagccaaaccaaattttttgttttatttatttttaattaatttattttttaaccaaatagtgtctaatattccggtgtccaattttccattggtgtccaatcttctagtgtccacttttcggcgtccaattttctggtgtccaatttaccgggagccgaatggcgagatggaaaacgtaaattttcttttataattaaggggtgttaaccagaggtcgcatttttacttatttgtaagtattttacttattttgagggtccaaaacttacatattttaaatgtacttatttgtaagtaatgtacttattttggcattctagagaaattcaatttttttatctttgttttaaagcgaatattaatttttttttttttttgcagtcttgtttttctctttctattactttttaattcgctttattgagattcataaaggttctatttagcctagcttataggttcatggctcctccaaaacataaataattggaagacaagttatttgacgaaataacagatatgaacagaatcctggcagagatcccccatttttttggcatttcaatcgaggagaaatggaagctggttttcaaggtgaatggcattttctagcttgcttatttacaaaaaaataggctcaactcccaaatttgtacgttctgatcagcaaagttatg

SEQ ID NO: 106239 - DNA, 424 bp, Heterodera glycines
caaagaaaacgacgattaattgcttctgctggccatggccacggttttgtggcataaccttgacagaaaaagcaccgaaatgaatgagcaaaatggagacgaaggccaatttgaagtgcatggaaattgggagataaagggtctgtaaaggcggaaatataatttataaaatttaaaattagaaataaattaaagaaatttcaccaaaatgaatagtaaggttttttgtttcataaatgaagaaattttatttccatttattaattggattaaacaaaagttaaatcagtctgagaatgttgtcaattttaacggacaaaattccgatggattgtcgaattgtttcgtccatttcgccaagtacaaattccgtcgccatctctcccaaccattctctgcaatctcttagttcgtcagtgaaatg

SEQ ID NO: 106240 - DNA, 91 bp, Heterodera glycines
atgaaagatgtgacaatcagcttatacaataataaaattcatttaagttaatgcatttgaaaaaatgacagcaaaagggaggagcattatg

SEQ ID NO: 106241 - DNA, 66 bp, Heterodera glycines
atttcttaatttcaggtaattaattttttttatttccacaaaatctccccaccccaaaaaataatg

SEQ ID NO: 106242 - DNA, 758 bp, Heterodera glycines
ttgcacgtaacaatgcacactacctggtgctgatgcgcaacccgtcgggcgcacttcaggtacgctcgttgggcgtccagctgttcccgggtgcgctgcgccacttcctcgaggcgtacgatgacgcgacagcggacccgtttggttacctgttggtggacatgcacccgaccacccgaccacagatgcgcctcaaaactcatatatatccgggcgagctgaccgttgtgtacgcaccacgagaccgggcagcaatgttcaatgcagaagaagcataaaagcggaaacaacaacggtaacagcagcagcgacagaccagaaacaatacaacaagaaaagagacaacaacaacaacaacaaaagcaagcgaagaaaaggccgaaaccaagtcaatacattcaacggaacactagctttttcaagcaactgagcaactgtcgctcggcacgcgcacgtgcctaccgtcagctggtgaggggggcgagcagtgagcagctgttgtgtctggtggaaagtgcgttgaacattctccgtgcacgcgtcccgctccggagcactcatcttcagcacttgcgcgctcaggcccaacacgtgcgtgcgttgggccgtgcgagaagcggccacggggcacgtcgactgttgctgagacagcagaccgggcgcggcgtcccggccttggctggcttggtggccagcgttgtgcttccactgctggcggataagctcatgagccgcaaagacagcatcatccaaacatg

SEQ ID NO: 106243 - DNA, 128 bp, Heterodera glycines
cggggatctctagagccatttgcaccttcgacaacgacaacaatgctgctagccctctacaaccacaatttgttggattaagcgattatgactgtcaatttgacaatgatcagcccacggaactgatg

SEQ ID NO: 106244 - DNA, 68 bp, Heterodera glycines
atacacaaaattctatttatctttcaataattaaattttagatttatgaccctctctactactcaatg

SEQ ID NO: 106245 - DNA, 669 bp, Heterodera glycines
ctcgatcagaaccccactctcgaataaagccccccttctgagaggggttgaacaataaagccaccgggggctctaatcgagtaaatacggtagttaaaaaataataatttttttttaaatttttgcaaaaaaggagaaaaccataatatttgcaaataatgaaaattcagtaggataaattattgcaaaagaggagaaatcataatgtttgccaataataaaaaatcagtaggataaattttttgcaaaaaaaaaatcaaaaaattaggcaatattattatgtaattttattttattttcagcaagataaatttttcattgtcataagggttggcataatcaacgtcaaaattaatgtcaaacaatgccagatggactgcataaatacggggtggcataagctgaagccatcctcatggcccgtatttcagcttttttccttttcatatagcatttttggagagatgaaagcaagaaaaataaaaaaatttctgacaaatatgaattagagcgagttattacatataaacatcctagaaatagtcaattttgtaggtttgacaataaaaaactatttagtttaagcatatatttccgcaatttaaaaaaataaaataattaatataaattttattttttaagacaaataacaaaaaaattgaactaatg

SEQ ID NO: 106246 - DNA, 190 bp, Heterodera glycines
  unsure (1)..(190): unsure at all n locations
gtcatgcaattttgcgcnagagaggatagcgtcggggcaaaatttattttaccatttatgcaaatttgcgaaaagacttcaaaaatttccatttattagtcgcttaatggttctttgttattttattcattttggggggtgactcacataaattttcattcagatcccggagttaattgaagaggcgatg

SEQ ID NO: 106247 - DNA, 1003 bp, Heterodera glycines
agcgtaataaaatacacccctaagaattgaaaaatttttctcaaaaattgatcgccaacatttcatttttttcaaaagttatggattcttaaacttgtctgggacggagttggcaggacggagttgacccctacccagatgggggtgctgttagttttcgacagtggtgatctcgacagtgttggtttcgacagtgattgatttcgacagtaaagcttatttttttaaaaattgttctatatggcataagtctcgttaaattttgacaattagaatgataagaacatggctcttatacattgcagaggtgttcgagttttcgaattcttgcttaagagcttgcaaatttgaattttggcacttgaacccggcattagttagcagttttttccacacgattcgagaatcttatctaagaaatttgttgtatttttgactacagtctagcaagagatattttttagaaaaaataaaagcgataaatttttgccaaaaaaatcatacaagtcttattttattacttacttcaattataaattttgtatatgcaaattgtatattcatataaattcatgtgtacaataaatcatgtagaaaattaatttaaaagtactgtcgaaatcaatcactgtcgaaaacacctggtacgaaagaggtggacaggtggcaattacccaataattacggccagatgaaattgcacattaattaagtggcgctgaatcttcataagtgcttattggttagattcattcctttaattatcagataaaggttttttaatgttttaaagtgagtttagccattaaatatccgatgaatttcagaaaatctcaaatttttacatcccttcacataatttgctgaaaagcattaaattttgtcgacatcctatcattcgatagctttaagtgttctttattaatttaaaaattccagaatttcgtaagttataaatattgtttttccctaaaaaattctttgtagcaaaaaaaaccaaatg

SEQ ID NO: 106248 - DNA, 287 bp, Heterodera glycines
aagagacaaattccaaaaacgaattttaggagaagcatttgaagaagaaaaaacaaagcaatgcgtaaaagaaaaagaaagcataaaaggaaacaaaaaaagaaaagaatggactaattaatgggaaaaacggaaggacctcgtgggttttaatgataccctcaattaagaacaattaactgattaattaattattgatgaaggaaaatggaaagctacgccggaaagaaaaccaaatgatttagggattggggaaaatctcaccgaattcgcgcactttcggcatg

SEQ ID NO: 106249 - DNA, 65 bp, Heterodera glycines
tgtcctccgcctccgatgttgtgccatcctcgacgaccacttcaatcgcaccaacgacagagatg

SEQ ID NO: 106250 - DNA, 175 bp, Heterodera glycines
tgttttaaaagaaattttaaaatttaattctcgaaaaatgttcgagttcggattagggattcggaattggtcgaaatggaggccggattcgtgctcagcgcctcaaaacacccctagaaaagtgttaaaaaattttaagataaaaaaataaaattaaaaaatttcggggccaatg

SEQ ID NO: 106251 - DNA, 140 bp, Heterodera glycines
agcaacaacaacatgaagatgagcagcagaaagaccgtaccacaattttgattgcgccccgaatttggtggaaccgtcagcgttatgaagtgtttcctcaaatttctttggttgtgtatgatcgtcgccgggaaccaatg

SEQ ID NO: 106252 - DNA, 209 bp, Heterodera glycines
tgcgatttttgttatgtaaaaaacatattaattttaaacttattattatttttaaataaatacaattttttctgagaatttttaaataaaatgaaactccacctattaatcgttttatttatatttttgatcactcaaattaatcaaatcggaacagaaaagaaaaagttggaactaaaatcatttgatgaaacatttggagaaaaatg

SEQ ID NO: 106253 - DNA, 389 bp, Heterodera glycines; identical to SEQ ID NO: 106230

SEQ ID NO: 106254 - DNA, 359 bp, Heterodera glycines
ttttttatgtgaccagtaaaagtcagtattaccaaattttgtggtgtaggcccaaaacccaagttttcgatgcgatctctggaaaaatctcatctctattcctcattatgttagacttcagatttgactgatttcaccacttttgaattgttttttatatttttatctggattgaatgtctattcaccagagcaactcaccaaataggagtccacaatttggcgtatttaatgtttattgtgtggcgtaatgaggaaaatatcccttttgcttttgcattcctaactacctataattgagcgtatgattcactttattttcatttgtaacatttctcagattcctgtgctaaacaaatg

SEQ ID NO: 106255 - DNA, 726 bp, Heterodera glycines
gtagtgattaagagaggacaactttgaccgattgataatgggatttgcttaatttgataaattttgttggaatttttaataactaagttaaaagttaagccgtctttttctatttgtcgtataaatttcttcttaacttattatttaatgaatttataagataaatggatgaacttgttcatttcgaccccagcagtgtgagttttactatttgatttcagtacacttatccatgatagcataactggaaaaagatattcacagggtgtacaaggcaccaacgtttttgtccatttttcaataatttttaaatgagcatccctttctctgtagatttctctcttttcggcaaatgcgttgtccgttgatgatcagagcagcagcactattgccgaagtctgttgcccttctctttctttcatttggtgtgttctttttcaggaaaggcctctttcgtccgagtcacaattagtcgcccaaaagtcaattggcacagatcagacggaacatggcgaaacggacggaaggcgagtgacagagacacctttagggggtgggcgaagatttcatgctttcatcttcctcccccccccccaattcgcctccctattttggcccctttttgttagtgcgcgggagaaggtcactctatttttaatatgtggggaagcccttggcaaaacgaattcgtttagattttccacttaccatcgaagaaaaaacatg

SEQ ID NO: 106256 - DNA, 64 bp, Heterodera glycines
actgaaatttcgagcaaaaaaatgttcgccgctaaatcaatcggccaaaatttgttgcgaaatg

SEQ ID NO: 106257 - DNA, 67 bp, Heterodera glycines
tcatatattttaggccatgagtctgctgtattttcgatttgcatccgatttcgagtttttaaaaatg

SEQ ID NO: 106258 - DNA, 135 bp, Heterodera glycines
caatctctagttattatctgttatctgtgctcaaattcaaaagttaatcaaaagacaaattttaaaacgcctttatcttttttctaacacgtccaactgtttaacatttcttagaaaaagtttcagctctccatg

SEQ ID NO: 106259 - DNA, 561 bp, Heterodera glycines
tggagaaacgaaaaaaacagaaaaatggcgagaaaagaatacatttaattgaatatattccaatgattgcttaatggaattgatcaaaaatgttttgacaaattttgcaaatgattcgacttattttttaagctttttctgtttgataatttcccaatgagggcgtaattggcaaaattgttggcatcaatataaaacatggaatgcattttaattaatgaagcaaatttatgaataaatggtccatcaaatgaaaaaacatttgatgagaagcgatgcccgggggaatgaaacaaaaaaagaataattacattttgagaagtacacaatcagacttgttatttattataaaaaggccaaaataaaataataaatatatcaaatgaaatgtaaaataattttaattcaaatttacaataaagtcttaaaatattagaaagtccttttctttttcgtttcgagtttcgtttcaatgtgccaattttttggggggtttctttcgttttctgggtttttctgtcgagaaatgccgacaagaaacattaattgtaagtcaaaatg

SEQ ID NO: 106260 - DNA, 62 bp, Heterodera glycines
tgattatcaaattattttgttatttttttttcattttcagccgtcacgtttctctccacatg

SEQ ID NO: 106261 - DNA, 307 bp, Heterodera glycines
gataattcaagaaaaaagtgaaaaataattttactgtctaaaagtaacaatttctttaattttcgagaatacatcaaaaatctggatagagtgaaacggatgtgtttttgaaaaaagatttaaattctttctaaattcctcgggtaaaaataaaatggaaaacaattccatcctttaaataattaattataatgcatttttcttgttcataaaaggaaagcgctccgtctgcgcaaagtatccgatttttcatgatcaaaatgacaccgccaacagattttactttgaaatttcaatcaaaaatatg

SEQ ID NO: 106262 - DNA, 72 bp, Heterodera glycines
aacatctcctcctactctgacattttaaattgctgtcacatttagtcgaacagggtcggaaaaccgattatg

SEQ ID NO: 106263 - DNA, 319 bp, Heterodera glycines
aaattagaagccaaaatgcctgattttaacctgaacatattgctacacaaaagcgtgccctttgttgataaagtaaaattatgaaaattatttttaacaaaataattatttaaaagaattcatatatgaattaatttagtatacatattttgtgctgatcaattgtgtggctgagcaacaaacgcaaatttttgacaaattttgtcagttcgttgacgggcgaatccgtcggcaaattttatacgatttggacccaaaaaatgggccaaacattggcacacatttgtaccccgacatttaccagcacaactgcgaaatg

SEQ ID NO: 106264 - DNA, 107 bp, Heterodera glycines
ttatagttaattgaggaggataattattgtgggaattatcgatttgaatttttttgatggaaaaagaggggaatggaaaaagaggggaatggaaaaagaggggaatg

SEQ ID NO: 106265 - DNA, 171 bp, Heterodera glycines
attttcatgatcacttttgtgatattctcaatatttcaatttcttatatccaaatgtattctgtataagttttcagtaggaaattgtaatttgggggttattggcgatttcaaatggatcctcccggaacactgattctgtttatatttagatcgtaatgatctgaaaatg

SEQ ID NO: 106266 - DNA, 610 bp, Heterodera glycines
ccaaataaataaataaaattgcgttaataagcttaaaaatttataaaaaattaaaacttttattacttgattttattaaaaggaaacatggctgaagtgaagcacggtgtttttgagcaatttatagaatgcagggagcaacttcttcgactgccgaggcctctcaaagttcaaaagaattaaaacttaataactagaataaatatagtctataatcaataactagaattaaatatagtctataatcatattgaaaagaaaaaataattttgctactgtaaaatgcattcggtaaaaatcttataatttatacaattaaaaaaaattaaaattgataatttagtttatttataataattaatagatgaaatacatttagaatgtgtatgtttttgggatgatttttatttcattataaaagtttattatattgaaaataaataattgaaaattcaaaatttcaaaaatcagtttaatttcttgtaaaaataattgatactaaaagaagatcaaaatttttataaaataaaataaataatatcaattatgtataaagaaaacccaaacatgatgtataaatttaaaaaaataaagaaatcatttaattatg

SEQ ID NO: 106267 - DNA, 60 bp, Heterodera glycines
tacagggtaagtggcaatttaatttgggaaacaattggtttagattatttcggcccaatg

SEQ ID NO: 106268 - DNA, 761 bp, Heterodera glycines
ttttctaccgtttcccaattccttattactgtatgccttttttcctttatttttctctctcattgtcagtgtccaaagttgcctggtttttgttccaaaaggatggcaattttacgatgggccattataattttgcggtatgaaatgttttattattttaaatatatttgattgagccgttattacaagagctagtaaaatcaaaattatggacatcgcaaaagaattcaatttgcaattaaattttagtgtcgcgagcaatcgaaattttgaaaaaactttttttattactcaaaatacataaatattaaaaagataaaatctagaaaaagaatcccagaaaaagagttttattactcattggtacaagggatggcattctgaggccccaaaaaattttcggaaacagattttgttaaagaaatgactaatttaacgaatttgagcaatttttaagaaaattatgaatttagggcaaaattattgatttttagggtccggcagagctgataggcgccgccgggaaaaattgaaattcaggcaatttattaacagaatttgttcaaaaattcaagtttttttgaaaaaaactcaaaaaatttccgaaaatatccgactttttatcaaaaatttcgggaatcggaattccgtgcctcaatttaatttcccaatgcataaaatacagttttactgctggcgagatttgttttaatttgatttctttcaaggaaaaattccaattcggatcacagcccaacatg

SEQ ID NO: 106269 - DNA, 275 bp, Heterodera glycines
cctttaaaatgaacaaatcgaagtcaaatgataccaattgacatttgctttttcaccacaattttttctatttgttcagtggggggggggggggggggggggcgtccgtttggtattatgaagagagtgcccgcgaactgttctatttcgccgattcgttggacgaccgaacggcacaatttgtgcgccaattggacaaaaggcgcgaaatgtggcaaaaaacggcggaggcgaaattggagggggcgacaaagctttgtctggtgcacaaaatg

SEQ ID NO: 106270 - DNA, 65 bp, Heterodera glycines
acagaacacactttgccaagagcccaaccaaaatcggctgagtttgcctcaacagcaaaagaatg

SEQ ID NO: 106271 - DNA, 143 bp, Heterodera glycines
atttataaaatttaatttaatttttattttttcatacatattttattcaagaaaatccaggctctaacatattaaaaaattattttttcctttacccataatattaataaacattgcaaatttctttcagcaattgaattatg

SEQ ID NO: 106272 - DNA, 795 bp, Heterodera glycines
  unsure (1)..(795): unsure at all n locations
acatgaacaaacaaatgtttaacattttttctaaaatattgtgaattttgatccaatgaaagtgcattgaaccatatgttatttttcaaacanncataaataacaattttatgattatttgatcttaaatgtaaacccaaatttgtctcataaatttaaatattttttgaaatntaaaatgagataatttaaaaaactgaaaaaactcttgtctttttttttgcttaaatgaaaatgatcatttttagaaatatgtttataaaaatgtaaaatgtacactatcattaaaaataaagggcgttttaatgaatttggcctcggtttttggcacgtaaacttcaaaaattggtataatttaggccctataaactctattaaaattaaccatgacattttgtgtataatttttttcatatttaattttttttgtaaggatgcattttgtgtaaatatgaaaaaaatagagaatgaatgcatttttcgtttttattatgtttttgtttaggaatattgtgcaaaaaattgaaaaaatatgattgtgtttttttttcgagccgaaaacataggaggtagaagcaacagtatctaaaaatattttttttgtagttttttgcaggtatttaggaattcggagttcgggaaaaatagagagatcccttaaatagtcgatttaaatttggatacatattagatggaattgtttgtaatgtgatgctcatttgctctctaaatacattttgggacgacaatttgtccattcctccgcttcttcttttcgttgaatgtcccccgatg

SEQ ID NO: 106273 - DNA, 464 bp, Heterodera glycines
ttttttgcataattgttttttcagagggtcagaactttttcatcaacccaataggaagaaaaacttggagcctggcttgtcggcaccgtctatcccttctttcccaaaaaacccaaaataattttcatttccttcaaatttcccgtgcttttttatttagataattctgagttgatggctacatcctcctgtgctgattgtttctttttccctttcgtcactttgagtttgaatggcgctggtgataaaattgaggccaactttggccccaacttcagatttgatttggtcactcattgaaggaagaaaatatcacttttgatcagctttattgatttttttcctttttcttttcctcagtattttcataaaattattttacttaaatatttgatgaattatctcaaaatttggcattttgtcagtaggatttcgtatttgtctcaccaatccctaaacttatg

SEQ ID NO: 106274 - DNA, 491 bp, Heterodera glycines
tttctattaaattttttgctgaaaatacccaaaataatgaaaatttttcgatccttagaggtcaaaaagtctttaacagagggggccgttttaatgtaataagattttttgaaaaaattcccaaatatgcacataaatttggaaaaaatattcatgtgcgtattattggcatccgtaatataaatcaacatttatttaagcgtcacaggattaagataggggaaaatttttatttttaatgtttttaaatttctgaaaaggtaggggccggttgtttcgatagcagtctggattttactagatttaaatttgggataacattattacacgggtccaaaaacagcgtagatttccgtaatatataatttatttgagaaaaattaaattaataaattcatttctgttaatgaaggacacatatatgtgtctggtggttaagccttctttctttcgttgtctgtcctttgggttcaattccccattgggatatg

SEQ ID NO: 106275 - DNA, 320 bp, Heterodera glycines
ttatgactagggctgggatttttctgttttaacatatttttttgcagcttagttttggcgagagaagcccaaaaatagcattttctccgaacaatttttgatttagagcgacttataaaaacataaaaacacatattttggcgttttggcacataaaagcatatcgcacatatttgggctattttggattttttagcacatatttgggcatttttgagaaaaatcgtaagaaaaatacaagaaaatctgaaaatgcaccctaaaaattgactactttacgtttcttaagaatttagaaaatttctttatatatttaaatg

SEQ ID NO: 106276 - DNA, 1003 bp, Heterodera glycines
ttatgacttatacactcccttccttaattaatcataatttataaatttcactctactgaaacatatgtaaatctgttgaagttgatgactatattctcagattccaatattatgcttcatagatataatttcattataacccttctttctgcataaaatcttcaattggtaaaaaattaaggaacaattaggtctaaaattacaattatacagataccatacatacactaccagaaaatcttagtaatttatcataatacttaaccatactaaataattgtaaaagcatctcaccaaacattgttccgcctttgaaatgattaattgatttttagctatattacacaaaataatttacgactcattattaattaaaattcttttacgtcattctcggtaatttggaataattaaacaacaattagcccccatatcataataatatttcgaataaacatttttctagaatataaaaattaatttaatttaatgaatattataaatttagaatttaaacaaaatagtgatggtaaaaaaaaaattgattttaagaaaaaattctttattttatgcagttgaaaaagacaataaaattagtagttactaccacctccccccttccggtccctttaacctagtagcggtcagtcattagcgctcaaattatcacaaccgtgcgctcaaatggcccctgcgggcgctcatgtggtacgcgcgagtgctcaaatgacccggcgtcgcttccctcccgacagctgacgccctttcccttctccattaggctttggttttgcgaattatttattttatttttaatttaaattatttttaatcaataaaaacccttcaataggtttaggttcacccccgcacccatccaataggtttaggttcactcccacacctattcaataggttttggttaaccaataggctttggtttggaacggtggttttccaacccccaaaaagggggggagtaactactgaaatgcacagaatg

SEQ ID NO: 106277 - DNA, 551 bp, Heterodera glycines
ggaaaaacgggaaaaaaccgggaatttcccggtcccggtcaaaactggtcgaaaccgggaccttgatactcagttgtccgtgttttggtcccggtccaggcgcactctagaatagatcaatccacgccataaaaatatttaaaaatttcaagaaaaatattaaaaaaatttagagcttttttttaaacctacatagatgatactaaaaacaaaatttgtgaatctccagaaaaaaaaacaaaaaacttaaatttttcttaataattactattttcggccctttcttttggcactttcgccgcctttacgcttctctttttgttcagaaattgttggctaaccaccggggccaaagcccgatttttgaactcccatttatgttaagagaatgcaaaaggaaattattaatagcattattgattgtggtttaaaatttcattctttgcacttttaatttgatttcatttaataatttatttttccccaccttttagcttttgccagcacacaaattaattctgaactcagcttccgatgtttttgaggcaatg

SEQ ID NO: 106278 - DNA, 788 bp, Heterodera glycines
gatggggttggccggcgcgctgagacgtgcaccaagacagtgcactcaattggtcctcgatgcgtcaattgtccgatgcgtccaatgtccaattcgatgcgtccaatgtccgaattcgatgcgtccaatgtccaaattgccaatgcgtccaatttccaatttgttcggctcgtccaatttgcaatttgttcggctcgtccaatttgcaatttgttctgcgcgtccaatttccaatttgccaatgtcagatacttttcacttgtaaaaggggaaagcaattatgaaattttgatgagacaaaattaattgaagtaatttaggctggaaccggttttccgccaaaatttgaaatcgagcagtttagttttgtgtggcggaaaacttgctcagaaaacctccggtttgctggttgcaaaacacaaatttcaatgaaattccaatgaagaaatttaatttcaaaaatgtgatgagaattgcaaaaaagcggaattgtcgattaaaaacaattttaagtgaataatgtaagagagcgatgggaaaaaaatgaatggcttaaatatggcggatgagaccgccgtcaatttgcgagagatatgtgtcggagataacaagagagaaaatgaaaaatagaatttaataatttaaatgatcgaaaaagcatttaaaattaaagcagaattaataataaaaataaatgagaatttgggcagaatttgggcagaattgagtgatcgaattaaatgttgtcagatttgccagccctctccattcgcaacttcctcctcatg

SEQ ID NO: 106279 - DNA, 769 bp, Heterodera glycines
atctaccatttaattttattaatttacccacatttctcataaaataattaagaatttacttaaaacttgttaatttaaactgcatacaccaaatttaggcccttttccaaatttgctttattaattttattatctattctatttatttatttttggtttggcaccactggacccagctaaatttcctattttttaaaaactggaaatttttaagtcaaaatctatttctttaaaaattctaaagagtaaaaattgtaaatatcaccatattttttggaaaaaatctaataagaaattggaccaaagttttcaaaaatggccagcggtgccatatcgccccacctttttgaaaaaaattatacgagtatttaacgattttcccggctttgtgtttttggcgataaaaagccagtttctttttgttattacttttatttaattttaaatttattaaatgttcgttcttctcgcagctcatttgtgaattcccgttctattgaaactataattaaattttttcgttaacacatttccaaatttggattagttttaattactttagattaaattttcaaaattattactgcaaattgctttggttctgcgcgttttgaagtcatccatcactcaaattgtggtccaaaaagtgatctttgataatcaaaaataatttaaaaggccgacgtacaaaaatatttaaaaaggccgaatttggagcaattaaattgcattttcaaaaatctccaattccattttttctttccaaatg

SEQ ID NO: 106280 - DNA, 1003 bp, Heterodera glycines
ggaaaattaattatttttttttggttactctaaaagggaatcttttttatggtcataagttctgtcggtgttataataaatttccattcgtttttttttatacgtgtagtgaaaataattcataataatccaatttattgttttatatattgtaatttagtttatatttgatgtaaatgtgaggaagatgtttgaggtttttctgtagaaagaatagtgggacaaaagaaataaaattgtaaattgaaaataataacgtttatttaatatattaattaataattaagtaacatttagtcgaattctaatgcgattaattatatcgaaattaatttaataaatcaattaaattctcatttatgcatgtttccatttattatgtgctcctttaagatgcgacgcgtaaactgcattagagccatttcaaccaataaatttgaagaaattttacattcaattttgaaaaatttatgtccatattttgacatttttgccatttatttacatatgggggggcggtgtttgaaataatctaattagcggtcatttgccccgcctgcgggcggcaaaaacattgcattacattacaaattacactcgccactcattcactataaaaatgaaaatcctggaaaaaagccaatgttagcctattattccccaagcagtgtgtttcaaagcagaatttaaaaaatatatttttaaatatatttaaaatgtatttttaatttattatcattaaattaataatattttttaatttgtttgctgaaattgttcgcctattcatcagaacatatcagaaaaatcagtacatttaacgatttttattaataccagtaacattagaaaaaaatgggcaatattcgatgaaagtaattattctaaatattttgcattatatgtaaaaatgaatttgtggtatttattatattttttaatatttttgtattgaatccggcaaaatccgtccgaattttgaagaaatatttggcgatggatg

SEQ ID NO: 106281 - DNA, 418 bp, Heterodera glycines
tataccaatactacattcatttatttaatttaaatattattattattattattattttttttttaatttatgtattgaacttttccctttaataatcatttctcacttgttgtgttttttttttgtgtttatttaatttaatcagctccgcagagcttagacaaatttgtgtgaatatatatatatgtagagtagctccgcagagcttattttaaaccatcaaatataaatgcgagaaataacaaatgaaccattgggacgaatgatgtcagggtgccatcggaaaggtgaatttccgggcaaaataaaggatgggtgaattttaattccagatgagagctgaacacttttgagaacaacattgacttgatgatctcttctgaagtgttcaagcggaaaatttgcttgacgtcgtatg

SEQ ID NO: 106282 - DNA, 1003 bp, Heterodera glycines
  unsure (1)..(1003): unsure at all n locations
gaggagaggaagtgagagagagagagaggagaggaagtgagagagagagtgaggagatgaacgaagagagcaaacgaaagagagggagagaagataaaagtgaggagaggaaagaaggagaagagagcaaagaaaaaagagagggagagagagaagagggagaaagagagagagaggagaaacagagaaaattcgagggagcgagagaaaaagcgagagagagagagaaaaagagagggaaagaaagagaggagggagagagagtaaagcgacagagaaaaaagaggaaataagagaaagaaagagataagagagagaggattagagagataaagaaagagtgaaaatggaaaagtgagagagagagtggaaaggaaagaaagatagaaagagagagcaatagagagagagagagaaagagagatatgagacaagaagagagtgagagggagaaagtacagagaaatagaaagaaagaaagggagagaaatgaagaagggaaagtgagggaaaggaggaactgagagagagaaagaaaaaatgcaagagagagggaatgcaagacagagaggagagaacgcgagataaagacagagagaaganaaagcgagagatatggatgagaaagaaagcgagaaagagagagcaatgcagagagagagagaaagcaacaaacaaagaatgacaaagggagatggagatagaaagaatgagtgaggtggggaaagagaggagatgagagagagaaagtgaaagagagaaaagaaatcgaaatagagagagaaagtgagacaaatagagaaagaagagtatgacaagagaaataaagagaagagaaataaaattaataaataagaatataagttgtgaaaaaaataaatttaaaaattttaattaattagtgaaatttttaaattctgaaaacagagcggttggcgccgcgaagcagcgcccaagcgctcgttgggatttaatttgctaagaaaaatcaaaatttgaaatg

SEQ ID NO: 106283 - DNA, 57 bp, Heterodera glycines
tcgtctttgggcagccgagcaatgccctagaactgtgaacaagtacaagaccaaatg

SEQ ID NO: 106284 - DNA, 88 bp, Heterodera glycines
attttttccatgtttcagttggatttgtaccgtcgtgtggatggacattttcccatcttttgaccatgcccaactcggactcaaaatg

SEQ ID NO: 106285 - DNA, 150 bp, Heterodera glycines
tttcagagggattacataaagttgcaaattggacactcattttatactcaaaaacttggccacgcccatccaaattcaaatttgactccacccatttttcaagcaaatttaaattaccatcccgaatcccaattcatttttgccaaaatg

SEQ ID NO: 106286 - DNA, 519 bp, Heterodera glycines
tttctcgtgccaatttcatcgtttacattcgctttcgcttttctttttggagtgttcgggttggtattccgacctttgaattgttcaacaattcaactggggagcgattgacactgaaacagatttatgatgagtatgttattaatcttacattatcaatcatttgggttcggtgggaccgcattaggccaaaaacccaaaaaataaaatttaaatttcaaaattttagatttcatttgtaattttttcttctaaattgttttttttaatataattcagccatcctttcgtgatttttaacgtaaattttttcagtcattttgtcttattttgaagaaaaaaaaattccgaactctggttttaaaagagtttgagaagacttaatcatttgttcatacataatgttctctctttttaaattttgagaaaaatatctttaaaaaacatttttgattactaatccgctccctagtgataagcgtagctttttgctgattcgttgtccaatttcgcgagatg

SEQ ID NO: 106287 - DNA, 214 bp, Heterodera glycines
agtgagtgaaagagtggaaaatcgaagatcagacatactgattcatcattggggtgatgtaacacattttgcaattttctcggttagtaaaaccgtcgtggttggtgccggatacattgcagtcgaattggcatcaattttggctgaccttggctctgaaacccatctgctgatccgttatgatcgtgttctgcgcaattttgacgacacaatg

SEQ ID NO: 106288 - DNA, 561 bp, Heterodera glycines
ttttgacttacaattaatgtttcttgtcggcatttctcgacagaaaaacccagaaaacgaaagaaaccccccaaaaaattggcacattgaaacgaaactcgaaacgaaaaagaaaaggactttctaatattttaagactttattgtaaatttgaattaaaattattttacatttcatttgatatatttattattttattttggcctttttataataaataacaagtctgattgtgtacttctcaaaatgtaattattctttttttgtttcattcccccgggcatcgcttctcatcaaatgttttttcatttgatggaccatttattcataaatttgcttcattaattaaaatgcattccatgttttatattgatgccaacaattttgccaattacgccctcattgggaaattatcaaacagaaaaagcttaaaaaataagtcgaatcatttgcaaaatttgtcaaaacatttttgatcaattccattaagcaatcattggaatatattcaattaaatgtattcttttctcgccatttttctgtttttttcgtttctccatg

SEQ ID NO: 106289 - DNA, 114 bp, Heterodera glycines
caaatttttgcatctccaaataaatccatccaaattaaggaattgttggacacgagccaaggattttacaacaaagaagaggacaaagtgacattggccattgatgtcattatg

SEQ ID NO: 106290 - DNA, 166 bp, Heterodera glycines
tttgatttcaaccatatttattgcctttcaatcgctttaaatcggaaaatacgctattttttacggatgtttaaactgttatatctcgtcaaatgttgttttaatgggttttacactatacattcagttgatcccaattaattttagagagtgaaaacaaaaaatg

SEQ ID NO: 106291 - DNA, 115 bp, Heterodera glycines
ctgtcgcaaaaaattttaaattttaatgaattttggtcattaaattcttctgattcccccttcagggccaattctacacgattgcgaaatcggaaaaaaacagtccaaaaaaatg

SEQ ID NO: 106292 - DNA, 1003 bp, Heterodera glycines
tcaaatggcgttggttttttgctggccgattttggctcgcaacgccgccgcggctgacccacgttcggtcgcggtttgtttggttgacccgcttttctgcccataaaatgccttagtcagacaaatattcctttttttcttttcccttttgtctcttccgtttcttttctctcatcctttgcattgactgagtttttcttttactttttctcaaacatttattttctgcagttttttcgtcgatacgaaagttaaaaaaaacaccaaacttttagtctcaaaaaacctttcctcaaatcattgggcaaattaaaaaaaacattttccatttataattattttaaatttacaaattgaatttgctgtgtccaggtattaacaattcatccagaacagacgggttctggtagaaaatttgcgaaatttctgcgcgggactctcttcccgccaaactttgtctcccaatccttcaattaattcagattctcatcaacttttcgccacttgataatttttagagatcggcctggacctggatccaggtccaggccatttttcggcaacctggatttttcctggacctggattttcgtccaggaaatccaggtcaaatgtgaaaaaaatccaggtccaggcaaacaggaaaaaactggattttcctggacaaaattttagaatttattatttcaagtgaccgaagttttttcaagttttcaaaaaaagattaaataaatttaaaaacacattattattataaatcagatatttttaaatgttttctaagcaaataattaattttttcaaacattttttgatttttaaaatgagtttcaaaaaatccaggtccaggcctggatttttcctggatttttgtccaggtccaacatggaatccaggtccaggcttttttcaaaataccgatctctaataattttgtttcttacctttttaaagtttttcagcttttaattccaaatttggccgaaattgtttttacacaatg

SEQ ID NO: 106293 - DNA, 934 bp, Heterodera glycines
ttcattacactttccttttgctaaattccactcaaaaagttaaaattgttgatcagctgattttgtacaaaaacgaaagaccactggccaaaaaatggactcattataatgacgataatgagatcaaattttccgccttcgtaatcagtttaatgggctaattaattatgttggcgtactgtacgttttattatcgtaatccgcccacaaatttttttattgtgctaaaaatgatggtcttttttcgacgataaatgaatgaatgtttttcaccatacaaaatacaccccgggggggctatcagcacaatttaagagcaaattgttgcttcttatcagttttatcgggaatggtatttattggctcatccttttgtccacagcaaacattagctcacaaatcaactaattaatgaatatttccctccccgacaccaaaaagtctccctcccattttatcattttttcactgctatatgtaatcaaaaacagtcaagaagtttgtaaataaatttgttttccaaattgccacatcttatagggcattaaaaatccgaaaaataaaacaaaaattccaaatgaaaatgttttaagctaaaataaaaatattaacttctccaccttttcattcattaattaagctaattaaattcattaaattaaatacaacaattgcattttggcgggtatgcaaaatttgctaatttcgtgtttttaaatcaaaaatgaagaaataattaaaaataaaataaaaattttgctatttgaaataatgccatttttagaaattaggacaaattgttgctcatttgtcagtggcttatattagttaggatgattgttgtttaaattaatttgtttgtcatttttttccttaattcgtaattttcagattaatttgctgctcatttcctacaatttgtgcatcaaaaatg

SEQ ID NO: 106294 - DNA, 698 bp, Heterodera glycines
  unsure (1)..(698): unsure at all n locations
agtgtgcagggatccacccagagcagaatataaaggtaactcgccggtgggactcgaacacatgaccncagcaatccgtgccgtgctctgactgagctacgggcgctccttttcccactttctcccacactccgcttccttctggcataacaatagaagacacgtagagctatcgtttaataccaagattggttaatttgattaagtttgagttaagttatgttcattttaggttcggctcacacgaatttgatgacacataatcggctgataacagcacctcggaaaggctcaaagtaaaaaaagggggaagattgttgtaatagataactgtaaaaaaatatttctaaattttttaaaagcggaattccgggcaattaattattttttaattaaaaaatgttacgtaaatgtttacaaattgtcgtcattccatcaataaattgtataagaaattgattggatttgtcagaaaagtgaagaaaaataaataaatattcttatttcttttattacttcataataaatacaatttaaattttcaaattctcctcaaaattattaaacaattttttttttgttcatttctaaataaatttaaataacttaaaaaactttgttgactaaaaaaagctaaaaagacttgagaataatatgtattgcatgtttaaagactagtttttatccaaaattaaatg

SEQ ID NO: 106295 - DNA, 219 bp, Heterodera glycines
attgtgatcatgaggaaggtgatcagcagaaggcggcaaaagtgatcatggggatagatgatcagaagaagatggcaaaagtgatcatggggatagatgatcagaagaagatggcaaaagtgatcatggggatagatgatcagaagaagatggcaaaagtgatcattgggatagatgatcagaagaagatggcaaaagtgatcatggggatagaagatg

SEQ ID NO: 106296 - DNA, 542 bp, Heterodera glycines
ggtgggaatttgaatttggcatttatttattatttatttggcattttatatatatcaatttatattttatgggacaagaaaaagaagaatatttcatgactgagtacagatctaaaacttttaatttctcagcgtaatcataaaaatcccaatttttgaggcgctttttcaaccaatttttatttaaaaagaaagaaaaaacttttaaaatgatcattttcaaattttcaaaaatgaatcaaataaaaaattgcggcaatttttgatttaaaattttaatgtttaaaactttccccattagtctccctcaattgacccctttttgtcccccattccccccactccctcctcacccattaacacgctctttctgttaaagatatctcccctctccccaagcacaagtgcactcacaatgcacccaaaataatcgaatccataattcccccccccccccccccccccattaattgtcaattggatgaccaaaaattatttagcaaaatttactaattgtaaaagtggaaattcttgcaggtatg

SEQ ID NO: 106297 - DNA, 407 bp, Heterodera glycines
ttttttaggccaattaagaatacacttaggcaattgaattaattgtgtttattctgaaaaagttttgacaattttaaaaccactaatgatttttttttggtcccattttcaccaattaattaattcattttcttttgtctatgcgcattcttttcatttcgttttgggtaatttgtcaaattgagtcggagccctccctaattgttaataaaatttgttgacacataaattaactgaaaaatatttttttattgccaaaaaatgtttaaaaatacacaaacaaattaaggtcatcttcaattcatttcaaaaaatcaaatttaaatttaaataaaatttggatttttcgttaaaatttttagaaaataaaataaaaatgtaattttagaaaacaaaataaaaatatg

SEQ ID NO: 106298 - DNA, 325 bp, Heterodera glycines
tgttttatttaacgatttctgcctccattttaattttttatttcctaaatattaaattttgatttgtttgaaaaaattcttccagcctttaatgttttagtttcattttctatttttatccattttaagagaccatgatttcaaatcttcccgggcagggtggggttggatcttcgaaagcagacaattcctttgtccgccttttcccaaccggtcaaattgggttttcccaaaaatcaccgggcccattaaaaacctagcccgcctctctctatttttacattacaaatttattttgttttagccacaaatagctctgataatg

SEQ ID NO: 106299 - DNA, 463 bp, Heterodera glycines
tatcttgaattatactttcatgatgattccaagttgcaataggaaacaagggtccatggccagcatgaccatgtacatatgttctgtgttaacaaatattatatttgttaacccatttatgtaccttccaatatagtcaaaaactgagattggttggcctccatcttgaataacttgaacattcaattcttgagcttttaagcgaagaaaatattggatgtgccagccgcacgcgccgtttgtttttcactttgccaaaacagccggcgcctttgctttccgaaagatgtgccagccgcacgcgccgtttgtttttcacttcagcattactttaaattcttaattcttacacaacacaaaaagtattttgacaatgacataaaatgaaaacgttttttctatttttacattcctcttttcgataattttttgatgcattaaataaatattttaatgcagaatg

SEQ ID NO: 106300 - DNA, 246 bp, Heterodera glycines
gtaaaaactataaaaaataatccctggatttcctgccttttaataaatgcccgatcaatatcaaataactgacttagaacatataacccaaaaatatgacccttcaataattctaatcaatgagacctggttaaactccagaaatacggtagacgcggaacttacaataaatggtcataccaaattatttatgcaaaccgaactgaaaaaaagggcggaggatcggcaatcctaataaaaacaatg

SEQ ID NO: 106301 - DNA, 781 bp, Heterodera glycines
tctttttcatccatatcaatgatttgattgatgttctgattcattatttgggtggatttgttgttcattttctttctttttcaacaacaatttctctttaatatcatttgctataagtagctactcaccaagattttgggggttgcatttcacccccgccatttcagtcccagtggaaagggacgtttcagtaccaaatttaaacctttaaaaaacatctataataaatatatccaatcccagaagaggtaaataattgaaaaaacatctggggccgtagcaaaagaaggtggttatttgacgaggtcatttaactatggttatttgacctggtcatttgaccacgaaatacgagaaaaacggtagcaaaagaagatagtaaattttctgctggagcaaccaccagtcaccgttttttaaccatgaactaacttcttttgctataccaccaactttctaccacgaaatttttatttacatatatatatatattttgcttcttttcatggaaaacaagaagtcaataagttgttttgcaaatttgcagctgaaaggatgaatggatcaatagaaaatgatcatgaaatatatttttattttttgttggtcgctaatattgttcgcctatttttcattataaataaaccaatataattttgcatctttttcttcgtccaaatgttaatatatccttccgagtaaaaatattcagaataaacttaataattttatataaaaattattaaagaattaatacatattctcttatttactaaaaatg

SEQ ID NO: 106302 - DNA, 338 bp, Heterodera glycines
  unsure (1)..(338): unsure at all n locations
cttggataaaattccttcctcatccattttttagcttatcantttgcccaacaacaaaaccaaaaaaaggattaatttatttatttgaaagatatttaattgattgatgataatgacataattttgcctaattactttttgtctacaaatgccgccaccctataaaaggcgaacatattcagcacaaaacagcaaatgttcattaatatatttggcactgctgaattttatttcccaatttacatttctttaaagttttgctatttgtaaattttatttaaaaatttttaaaatatttcttagattgcacaatacactttctttaatttgaaaaaatg

SEQ ID NO: 106303 - DNA, 189 bp, Heterodera glycines
ttatgctgtcattagataatcatgtcacaaatgaaagccgtatttcttttttttatttttgggcattattattgctcgcttcacgaaatcggctgaaggaaagagtttgttttctttagataaaagcaaaattttaaataaaatttatttcttagaaatggcgatgccgggaatgtgaaatccgggatg

SEQ ID NO: 106304 - DNA, 152 bp, Heterodera glycines
actttattatataggattatgaattcccgaatttatcatatcatatatactttcttaaccattattaatctagtaattgtaaagcttatggcgtcgaagttgttgtttcggcaagttggtccatgttctggtgaatgttttgccccaaaatg

SEQ ID NO: 106305 - DNA, 114 bp, Heterodera glycines
tgacctgcagttttagcagaatgggcattttaactgcttcgaaagtgtgcactttgccacggctttcttccgctcgctctatgacttggtggtggggcccggagaaaagcaatg

SEQ ID NO: 106306 - DNA, 83 bp, Heterodera glycines
atttttagaatttaaatccttgccatgaaagcccttgtttacaaggatactttttttagtttaataatttgttaattcagatg

SEQ ID NO: 106307 - DNA, 244 bp, Heterodera glycines
gggtaatttaaaaagtgagtcctttatatattgattttttaattgattggcgccatttcgtcgctcagctgatcagttactccttggcgtcatccgacaaagtaaatcaatgagaattatgatgatgaggccataactaattttcatcgagaccgaaaatttcactaaactctaaatctcgaagagaagctatcaattaatctgggttcgaactttttgcttagctgcctttgacttcggcatg

SEQ ID NO: 106308 - DNA, 1003 bp, Heterodera glycines
acataacttttttgaaacttagccaaattttttgaaattttgcagattagtagaaaaccttagggctaccgaatgatatcaagatttcttaattttgttggttctaataatgttttggtcagagtttttgatgatcaaaaattttatgtttaatcaaaaaattttcgttataaattgttaagatatttttattttcttaatatcttcgatagccttaatattttctactagaatgcaaaatttcaaaattcgtttaactttcaaaaaagttatgaccgaaaatgtctgaaaacctggttgcttgagtactttttgccacaactttgttcaaatttgaccaatttttgaaaattaggtgagctaatagagaactcttaggcctatcgaatgatatcaagaatatttaatacgattgattttgacaaaaatttgggcagttttttgttggaaatttttatttgatggttttttatataacgccctttttgatggtttttattagggcagatcgggaccgggaattttgggcaaaaccaggactgggacttttcgggttgtaaaaccgggacttttggctgggaaaaccgggaaaaagacaccgagaaaaaacccgggaattccccgggcccgatcaaaaccgggacttcggtactcagttgtccgtgttttggtcccggtcccgacctaccctactttaaacacatgaaaacaaaccaaaagcaatttaatccttcaatgagatatgatttacgccgtttttgaaccaactaaattcgaaaaatctttttgatcgaattcaggtacggggatatttggttatttcttcccaaaattctagtacaaggcgaaaaaatatgaatcaatataaatcaaaataagccatattccttaattttatcattaattagttacctaaatcgaatcagatgagatgaatatgaatgattatctaatttgtcaaggaaacagaaattttgattttagttaaatatttctaaaaatg

SEQ ID NO: 106309 - DNA, 262 bp, Heterodera glycines
aagcctaaactttttggcctgtttaaaaaggaattaaaaatttttaaaaattttattcatctcccttttgatagaaaaagcatcagagagccttatttaacttttaattaacatttggtgcgtttcagagcagtttctgaaaaaatatttatgaattgattttgcaaaataataaataattaatgaaaaagtcagaatttcgaaaaattttaaaaacaacaagcgttggcattttttcaggttaagttagtcctttacaatg

SEQ ID NO: 106310 - DNA, 397 bp, Heterodera glycines
agcaacaagcgaacataagccagcttgtgcgtgaaaatttcgggtttttgcgtgttttatcgagaacaaagtccccaacaaaatgtagccgaataattagaaaagcaaacaccgatcagctgttagcactggtcgaaatttgtttaaacattgtctgctcccgcttccaattgactactcgacagaaaaaacgtttaatgcctcatgtggagtttgtgcgatgcatgagcagagcgagaagcgagcggggcgcgaaacggaccattgttcagaaaggagcggggattggtacattcgctgccctattgacacctgtactcattgaattagcaaaatcagttatatccaaaactatataaacaattccctaacaattattgttgaatcattttaaatg

SEQ ID NO: 106311 - DNA, 131 bp, Heterodera glycines
ttcccgtgtaaacataaacaacaaaaagataaaaccatagaaaattaccccataaatattctcgcatcctcagtctgtcagattttaattcgattttatctttgggttcatatttctcggctatctaaatg

SEQ ID NO: 106312 - DNA, 832 bp, Heterodera glycines
  unsure (1)..(832): unsure at all n locations
ttttaaaatttttgctagttccctattcctaatgggaccccaacaaaaancngaaccngnccaccttttctttttcggggcgcaaaggccaaagggncgccacgggacgaaggccgctcggcggccgcagagcgcaagcggcagttcggccaatgacaggagaagaatcaaacaatgaatcaatcaatcagcctttgtttggtggaacaaattagagtttgccaatcacttttaatttccggtgggccaaccccttgacagattttgttttcaaaagtccccggaggaccaattcccgtttcccggtgaaacgatttttagtaccaaattttcccctaccgtaaccttcaaacaatgtcccggtgacaaatatttattacggtgcgaaaattcgaaattaataaataatttttaatcggagagagaagatgttcaacggattaaaaagttaagcgaatgagaacagatttttaatttttccatctttcccccttttttccgctcacggacattttccgctttttgttaaactgtgaaattccctatcgcttcttttcttcttgtctccaacgacttataaagtgatcgcaaaagcaaaggatgaaagatatggatgaataataaaatagagaaatgaaatgaaatttaaattaataaataattaaatgcaaatttgttcaaaaattattttctccgtctcttccgtttttggcatttaattctttcggcattctctggcatctcggcttcgtcggtcgtgggcgccgacaacgtttctaaacccgatcgaattttttaaacctttatatgaaaacatttattgcaggaaatg

SEQ ID NO: 106313 - DNA, 167 bp, Heterodera glycines
  unsure (1)..(167): unsure at all n locations
gaccaaactttgatgacatattnggcgacggatggacnaaagatgagagtgatcaaacagtaaaaagtgacaaaagaagcaaaataaaaattgaaattgttaatttcttcaaccaaacggtgatgaaatgggaaatgacccaattgatcaaatgaacggttcgaatg

SEQ ID NO: 106314 - DNA, 330 bp, Heterodera glycines
ttgcttttgctttcccatttcgttttcctttttttgtatatttttcttttttaattagtcgttcgtttttcttttttctgcagggccttccccacgaaaactcacctctcaattattttgattattctaattgttttctataattgaaacaaccaattttttgtcttatgcttttaatttgtatataaaaagaaaataaaagattaaagaaaacgcattatttttcctgacatttaaattaattgtaaattttatttaatattttctttgattttcgttctcgtaatttcgttgcattttgtcagtgttattttttcgatgaacaaaatg

SEQ ID NO: 106315 - DNA, 390 bp, Heterodera glycines
ataggcgccgcccttacaagattgagaatttttaccagatttttagcagatttccattaaaaaattctttattttgtggttttttgattggaggattttcccccaaagcctcaaaatttgtcaaaaagccacaaaaatcctcaaatcctcattttccaaaaaaaatcctcattgacctatcaaaaagccacaaaatgaggataaatcctcagatctggcagccctggtttagatgagtttggtttaccccgcattgacagaaaaaaaagttattgcctaggaaactgaggacggtctttattggacctaaagggcaaaagagccaactcatactttggtataacctataatcagcaaataattatttcattttagcacaaacaaattatg

SEQ ID NO: 106316 - DNA, 198 bp, Heterodera glycines
  unsure (1)..(198): unsure at all n locations
caaaaaaatttttaaactttttcgtcagatttcaaaaanttcatccatttactaagggagtaggtagcaatttgtgctttccatgtaaatcctatcttccaggtaccactagatttctgaccgttgaatttatgagcgatttttgggacttaaattcttaaaatgtaatacgattttttaaaaatttagttggcaatg

SEQ ID NO: 106317 - DNA, 134 bp, Heterodera glycines
atggtgagaaaggggcgcggattttcagttacgaaaaattgcaaaataattaacaaaaatagtgaaaaaatggaaaaagttgatgaaaatagtgatattttttacaatttaaatatatttctagggatgtgatg

SEQ ID NO: 106318 - DNA, 63 bp, Heterodera glycines
ggtcataattttttttactttcgattcacacgtttaaaagaaacatttttgtaggggttcatg

SEQ ID NO: 106319 - DNA, 178 bp, Heterodera glycines
  unsure (1)..(178): unsure at all n locations
cgagactaccccccggggccgaatcctgagcatcattttgncgaggagtgatcagacgaatgagccggccatcagctgggatgaattggcaaagcgaccggagctcagcagacttgtggacggacagaaggacactgcccgattgatgttggacaatgtgccacgtatctgcaaaatg

SEQ ID NO: 106320 - DNA, 191 bp, Heterodera glycines
ttcgtcctatttcccttggtaattcatcaaggtgctggcacttttttttaaattttcaaatgtccgcttttactgtagagctttttctttatcggcgagccagcacaaagaatgggatttgaatggtgatccgatattttatttgtgatattttgagtggtgcaataatattataaaatgacataataatg

SEQ ID NO: 106321 - DNA, 69 bp, Heterodera glycines
tgtctgcaatgttcctttatacacgaattagcttactaagtgaccggatttatacccaaattggcaatg

SEQ ID NO: 106322 - DNA, 163 bp, Heterodera glycines
tttttatttaagaaattattaaaatgatttttggttttgagcggatgaacttgtcgagctgaaaagtgggcggagcctatccgatttcaaaagtataaaaccggcacatttttgaatgcccgcgtctttttccaaatcattcttaattttattcaccaaaatg

SEQ ID NO: 106323 - DNA, 164 bp, Heterodera glycines
tgtagtgatggatttatgaaacgtctattttggcgtttatgaaacgcctccagcggccggatatccgtatgacacgaagtatttacgtgtattttcgctaataaatatttataaatgcttttatattataaagttttgtcagaaagcttcattaaaataaaatg

SEQ ID NO: 106324 - DNA, 216 bp, Heterodera glycines
ttattaattatttatttgcacagttttcattttttaaattttactgtcaaaattccaaaagaatgtgaaaaatatttataaaattcaccgttttatttgctcagcttttgaaaattttgacaaaaagcggagggaaaatcctttataaagcggacgcagaacacagaaaaatcataaaattaaaaacataattttaatttataattatcaaaaatg

SEQ ID NO: 106325 - DNA, 315 bp, Heterodera glycines
ttcagcgggtttaaaaatctagaaaaattagtaagcatttgtagtgctccgatacgtatctctgcaaaatttggtgagccgctgatcaattacaaattatttatggacgatcaaattttttgaaatttttttaagtgcaaaagtggatgggtgtctgcaaaaaattttcaccggagtttaaaaaatctaggaaaataagtaagcttttgtagtgttccgatacgtatctctgcaaaatttcggtgagcccctgatcaattacaaattatttatggacgatcaaatttttttaaattttttatagatttttaaatg

SEQ ID NO: 106326 - DNA, 778 bp, Heterodera glycines
cggtaggggttagttgcgtctgagccaagcttaatacatcataactttttttcaggctggccaaattttataaatttggtatcattcgaaagctctacatgtttagaagcttttgataagttatttctaagcgattgaacaacttataaaaaagttgaaacatgaacactgccaaaaagtcagaatttttgcatattttaatttatcttttttatatgtcagtatacctatgtatctttgtgatttttaggaagccgatagagcttgttaagagcttcgaatgataccaattttgttggatttggtcaacaaagaaaaaagttatgatgctctaaacttggctcagacgcaactggcccgtttcgaataccatggccaaagaatggacaaaccgcccatcagagtaaatccccgtgctccattaataaggaataagtgcaaaattgtctttttcatgcattaaaaagcgaaaaagtttattaattttagacaacaaattaaaaatgccattgtgagaaggtatccttgtaataataggaaaatcataacaaagggtaattatgagaacgaataaataattgaacaaaatgcaatttggatggatttatccgttgctggccttctcctgggaagggacttcgttcctcttcattggccctccccttccttctcctcttcctcctcctcatccccaccatcgtcctcctcctcattttcttcatcgtcgagtgcttccacgtcaggcgcaagaaaatattgcagcggatttggccaaatg

SEQ ID NO: 106327 - DNA, 321 bp, Heterodera glycines
attttcaccattttttgcgaacttttctttttttaacaaatttttttaaaattgacaaacttggaggtgttttttttatacaacgacaaaaaaattttgcatttttaattttaaatccattttttagttgtttattgtattttttaagtttatttaagcaaatattgaaatataaaccttttttggcattttgatgatttaaaacatatattttgacagtttttagtccatatttggccatttttgagctttttggtccatatttcaagcatttttagtccatattttatgcacatatttagcgttttttagtcgattatg

SEQ ID NO: 106328 - DNA, 62 bp, Heterodera glycines
ttttttaataaaaatttaattttattttttgaaattcaattagttaattatattgtaaaatg

SEQ ID NO: 106329 - DNA, 585 bp, Heterodera glycines
aggactcaaaaagcgcgctgttgttgcttttttccacttttaagtatttatttctttattttacacgtacctattcttttcattaacaacattttaatgacagaaggtaattttcagaaattctatttttggtcagtcaaaatttgccgggctcagaaattaaaattcaaaccgcaacaaaagctgtcattttgtcattcatgagttaattttgcacatccaattgattgatcatcgtcttaaatcatttgcaattcattgccttaaattacattcatcgtatttaacaaaaaattctctgtttttgtttatttcaatttaatttttcattgtgacattttccttatgcccaaatgtgcctcaaaaattgtttgtttttttttgtcaaaaaatagtcaagtgatgatgatgttgcccataaattctaagtgattggatgattcggattttaaatattgtttttttactatttttgtttgaaatctcataaatgaatgaaattgtaaatttattgtgtctattcctgtatttttcaaattaccaaaaaaagacaatttgtggatttttcgaataattttgagaatg

SEQ ID NO: 106330 - DNA, 122 bp, Heterodera glycines
tttattgtttcggcttatttaccgtactcccccacccttttttactgtctcagcttactgtatccgcacattggcttatgtccgtttcgccggtggtccagcgtatgctcagcgtggaaatg

SEQ ID NO: 106331 - DNA, 194 bp, Heterodera glycines
tttggcctgaaggaatgcaagagcaactgaaggcgcgggagttgggattgcccgacccgcatccgattgtgccgccgcattggctaaatccacccaaaaaggaaaaaaagaaaaaggtggaagggcaaaggaaccaaaaatgtataaattttaactcgttttgacagacgaaaactgttccaattgctcaaatg

SEQ ID NO: 106332 - DNA, 1002 bp, Heterodera glycines
aaataaaatttttatgtattaaaaaaaatttattaatttttgcaattggaatgcccttatttagtgttgtttttagtgggattctgtttccatggcaatgaaaatgattccctaggattaagttattccttctttatttaccaaaataaatttggtttttgttgggcggacaaagatagtaggtatcccaacacatttcaaagtggattattgtcagttttgtatagcattggaagtaaacctttgcatattttgaataaggtctttttgcttttttcataattaatttatgattaggtatatgatttttagaatgtacggaatggtcatatcaaaagaatcgccgatgaaggcgaaataaaaacttacaacggaatttattaatatttcatctattattagacattcaatcctccgttatcgacttggtcggaatcaatgtcaggtgggacattgaacaatgctcacattcattataatcattaatattttatgcccaactttcttctcttggcctcttgaccctatgaaaaatcttggaattaaattaccttattttgagatgactgtcaataccctgcccaactctttcactctgctatttcagattgtacccaaaaggggggatttatttaatgacctttcaaattggcagccgttttctgaatttttcgttcaagcgatttccgctcaagttccttcattgaaagattctttgttgagggaattttctgcatttaaattgaacacgcgaataaattagaagtaaaatcgttctaaaagaatttaaactgttaggtaatcaaggtcatttcgtttagctgattgcttctcgcttctcgaggcttgatcagaaaagcgtcagttgaaaatttaaactttattattacttttaaaacttttggcataatgtcttttttctttttgttgtttccttttttccagagccataaccgaggtaacagccgtttttgaccaagtttttcaaatttagaaaaaatg

SEQ ID NO: 106333 - DNA, 240 bp, Heterodera glycines
tcagttcgttgtgtaggccaaaaaagttgacaatcggctgttggttggtgtgcgatttggactttttgttcaggcgcaagcggcggtaatgttttcgcacactgtcagcaaaatttgaattttatgcattaaaatttgagcaaattttaattaaataattattattaaataccgtaaatcggggagaaaattgcccaaacaaaatttgtcgtaaacggctggacaaattttaaaaaaatg

SEQ ID NO: 106334 - DNA, 497 bp, Heterodera glycines
ttttagcttagaatactgggataatatttctttctaaaatgaatggattagcatcgaaaaagatatatttttattctaattcgagttgttctattgcaaattggaaaagcctgcgaaaggacataacctttgaaaaggacggtatcaagattatatgaagtatgtatagtgcaatgaaaagcaaagaatcaatgaaaatgcattgaatgaaaagattgccttttttagagtccgatttattaattgatcaattttggcaaatattaattacctagctaattaggtaaaacaaattttcctcatgtttacctattaaccgttttcatctacctaatctgatgattttttgagataccaaaattttgaatttggcagtatctctttatgatggcaaatgtttttcgcgtgtgtttcgtgttgttttgtgttattttttgtatttaagcaatgccttgccactgcccctgccattcttgcgcttgttatttgttgtaatg

SEQ ID NO: 106335 - DNA, 76 bp, Heterodera glycines
cctaaataaagggaggggacaaacaattcgagaattacagcaaattagtttcataaaattcataaaacgcaccatg

SEQ ID NO: 106336 - DNA, 83 bp, Heterodera glycines
cgcagactgaacctgaagagaagcccaaaacatttgcttttggattgcaaactgatcaaaccggtttgatcgattcggagatg

SEQ ID NO: 106337 - DNA, 1003 bp, Heterodera glycines
cgttattttcaataacccagggttcccagtcactgtacaaacatttaaagtctcttttgaggtcttagaaatgttctgtgaccggaaatggttaatgaaatttgttcgaactcctaaaagtgggtctaaacgtcgttttggagcaaaaataacaacatttgacccccttggaggaacccctgtctggaaatgtcttcctgatcatttttgaagagttcgaacaatgttcgacttttcgacattttgttcgaactcgttattttggtctgaatagggctctaatccattgcgcaagtatttttgacgctttattttaatttgtaattaaaaaaatatatatttaaattaatttttgaatataaatattagaaataataattagcgaatgggagcgccgtagcatagtggttaacgcttttgattaaatgctttggggttctagtccgcacggcgctcccattaggtaggaattaacatcatttcatttcatttcatttcatttcatttcattacattacattacattacattacattacattacattacattacattacattacattacattacattacattacattacattacattacattacattacattacattacattacattacattacattacattacattacattacattacattacattacattacattacattacattacattacattacattacattacattacattacattacattacattacattacattacattacattacattacattacattacattacattacattacattacattacattacattacattacattacattacattacattacattacattacattacattacattacattacacacacacatttttttataaagtttttgttataacaaccaacattttggtatcactacttcattttagtactaatcattgtcattaaatttacaaaagctcgtttttatttatttattatttagtttagattttattaaaaaatg

SEQ ID NO: 106338 - DNA, 1003 bp, Heterodera glycines
gcctctaaggatttttttttttgatcattaggcacacattctcttttgatcagtgccactccccaatttttctttgatcattaggcacacatcctcttttgatcagtgccattctccttttaatcaattggcacatatttttctgatcaataccattccccttttgatcaattggcacatattatcttttgatcagtgccattccccaatttctctttgatcattaggcacacattctcctttgatcagtgccattctccttttaatcaattggcacacattttttctgatcaatgccattccccttttgatcaattggcacacatttttttctgatcaataccattccccttttgatcaattggcacatattatcttttgatcagtgccattccccaatttttctttgatcattaggcacacattctcctttgatcagtgccattctccttttaatcaattggcacacattttttctgatcaatgccattccccttttgatcaattggcacacattttttttctgatcaataccattccccttttgatcaattggcacatattatcttttgatcagtgccattccccaatttttctttgatcattaggcacacgttctcttttgatcagtgtcgttctccttttaatcaattggcacacatttatttttgatcaatgccattccccttttgatcaattggcacacatttttcatgttgatcaaatcgccgcgatttttatttgatcagtctctttttcgatcatttcctttgatcagtcccaccctgaaatattcatttatacaaatatccatgccatctatcatctatgattctttcatgcatgcattattcatgcaaacattcattcatgctagccttattcaatcattcattcatgccatgtgctttcatagagtcatgcggttataaattttcatgcattacttataaatgtaataaatattataaatggtgcggaattagcttatcgcattcagatg

SEQ ID NO: 106339 - DNA, 143 bp, Heterodera glycines
tatcaaaggtcgtttattgattttattcactgtgcgtggcgaactctcccaatatttgctggcgataaacattctctctcatttactcattttcattcacacaaacattggtctgactgaaaagcacttaactgatcaaaatg

SEQ ID NO: 106340 - DNA, 745 bp, Heterodera glycines
aaaattccgcaacatttttattgcccttgtgactttaaagtggggcaggcaattaataaattgggaatatttgaaaaaatgatttttaggtttatctttctccactaaattgttatgctatttttttggaatttttcgtaaaaacaatataatttcattaatattaatttatttgtttttcttcataaaatgattttctgaatttcttacgatgaaataatcaatgcaaataattgcacattgattactggaaattgatttcttcttttatttataagcatttccaaagccgcccagcttctcatttttatgaatttttttgtttttctttaatttctttcacatttttatggctctaaattattttttgttcgtcattttaatgattctcataaataacggcaagtttataataatatttaataaatagtcttttgcttttttcttttaaaatgttttgtgctttttcacatattcgactgttgtttaagttctgtaataaaagagaatttttttttgtttgctgatttaaaaaagtttcaattaaattgagtgataatttgcaaatgccattcgaaagagaaagtttaagcatttttagaaagcgtttaaaatccgtttggttttttcattttttctgttttaaggctgcgcgcaagattttgagttgggccttcccttaaaagatttgctaacgtccaaattttcattgcaaaattcaaaaccattgaaagaatgttttatg

SEQ ID NO: 106341 - DNA, 449 bp, Heterodera glycines; identical to SEQ ID NO: 105225

SEQ ID NO: 106342 - DNA, 64 bp, Heterodera glycines
tccataaaaaaacaaatttggacctcggaattccgatcttctgtttccgaaaagcctcggaatg

SEQ ID NO: 106343 - DNA, 559 bp, Heterodera glycines
tcacggcacccgaccttttggctagtcagtaataagtagggatcggatttctaagtttttacttattttttctgtggctttaactcgaagagaaatgtacgaaaaacacatattttgttcgaaaattttgcgttttatcgcccttattcgaccttagaattccttatattgggtattcgcccttaaaaatccatattttagatgttcgcccttaaaataagtttttgcccatattttggcgtttcatccttatgttcgcctttatttcgcgatttttaaaatttttcttataaaattcacaaattattgaacaaaattgcaattaaaaaagatttttttttgacacgatcacattttttggaaaatccaaaattttcactgaaaaataaaagctactcatggggtcatatttaagcctaaagctttttgacaaaacatttttaccttccaacaattggtgctagtgcgttttataaatccgccagcatatttttttgcatatatcattaataatattaaaattttatgcaataatttcagctatattttatacaaaatg

SEQ ID NO: 106344 - DNA, 69 bp, Heterodera glycines
acgtcagcatgtcaaagaggacgtgttctttgagagcgccatgaactggggggtcaagggcgatggatg

SEQ ID NO: 106345 - DNA, 382 bp, Heterodera glycines
tcatttggacaatttgcgtcgtctcatttcatcaacaattctcactgatcttgcttgatcaattgaattcaatcagttccggccacctgtttcccgccgcggtgattgatgatttcgatgatccaaatgcaacttctgctggccaagcgttgtccaaatgggtgcacacgccgacaccaaatggccaaccgaagcgactgttatgccaattatgccgaaatagcgtagaaagaaacgtcgattgggtcaacagtttcaaggaggtgttgtgctgcttacatttttttataaaatatttcaattttcgtttccatttttgtttagaaatttatttgtgccatcacttcttgtgccagctatacaattacgtttgatacttatg

SEQ ID NO: 106346 - DNA, 260 bp, Heterodera glycines
gcgcaaagtgaaccaattttttcaaggttaaaatatttgaggaatcttcagcttttggtattcgttctaattgatcaaatttataattcaaaaacaagaacactcgagaagaaactaagcttggtcgggaccacaggaattcccgtatttttagatccccggtttttgaaaaaaaaattaaagcttaagtacgaatcataaatttttatcttaataaaaacatgttaacaaaaatttcaagggtgacaacgaagaatatg

SEQ ID NO: 106347 - DNA, 155 bp, Heterodera glycines
tttacgctttgctaaaaaattttattcaaaaaagtataactaatatttgtacatagttctagatttttttttttacatattttatatacatattttgagacttctcatataaaaaatttgtagccctattaataaataattaaactacagatatg

SEQ ID NO: 106348 - DNA, 109 bp, Heterodera glycines
agctcaagccctatgtgttggtcaacagaaagcgaccggtgccgcaaattatcaaccaatttgctggaaaattgtttcgtttttcagaaaaaattagtgccaaacaatg

SEQ ID NO: 106349 - DNA, 806 bp, Heterodera glycines
  unsure (1)..(806): unsure at all n locations
ttggaaatgccaatttgttactcaattagttgncagaaatttcctcatgagattcttgcctgtttgaagttttaacattcttacatatcacatatatacggatttgtgtcaaccataaaataatttttcattgttttgataaaaatattggttaatcgaaaattttttttttgcgaattagagttttaaaatttaacttacctatataccttttagttcaattttatattatgattttgtgtactgtagaattttaaaaaagttatgttattctgtttattgtgaatttatattaaagattttttgcattggttttccaaaaaaatcgttttagcgagtcactcatagtctggatgaaagattgggcgctatatgcaaagtggtcaatttttaattttatcaaaaagtaaagggggaacccttttgttttgtgaaatttttttgtgataaaaaaccatgaaaattgtgttatccggggttttagaggttgctgatcacgaatctgacatctgattcgaggtcatggacccaaaaaaccccagggaataaattttcataactatatattgaaaaacttgcaaaacaatagggtaccccttttgtttttactttttgataaaattcaaaattgaccaaaaccgttttgctcgactccccgtcttacaagaaacatgaacctgtaatgtttctaaaacccgtactcaggtcctcccagcttcagtcatggctttaaaaagcgctaattaccaacgtacatacatattcagtttttaatcactttagaaaatcatattaaactaaaaatg

SEQ ID NO: 106350 - DNA, 680 bp, Heterodera glycines
ataaattcagtgatttcctgaaacttgaacatttccgaccaaacaaaaatgcactactttccagcagaatttgtttggggccaatattttggttttgcaaaaatgttataattttgggttggatgtctctgaacagacctaaaaatgtatttttgaaaatttgggattttcgaatccgggggttgggaatcgtcggatgtcagattggtggtcaaggcaatattttaggccccattttttcttcaaaaattcatataaaagacggagaaaaatggcattgactgtcactttttttttgtacaaatgttggttaatcagcaggcggcggcgccgtgcaaatgtttattttctttgcttttttagctcctccattttgtttctaaattatccaatcacttttttgtttaatttaaatagactaaaattagtttttttggttcacacaaaaagacgaaattgaccaactgaataattgtgtccgttttaaataaaagtccggtaaaaaaagattttacgggaacagtaaaatgaagaaattgggactttgctccctgaactctgtgttggaaaccatggtttacaaaaggaatctcctgatttcacataatttgtcttttttagtttccctaagctaatttaaatccgtcaaaaactgtcttgtaatttgcgccaacaaaatg

SEQ ID NO: 106351 - DNA, 462 bp, Heterodera glycines
tcccccgttctccaaaattccttggaaaaatgcgccgcaaaaatttgtttttttagattaaaaatgcactgaatttgctaatttacttcccaaaatcgttaaatatgataattggaggcgaaaaatacaaaagttgatgctatattaattgtataaagtgttatacaagcgatttaagtattttttgttaaatgttcttatttttgaccctaaaatcttattttatggcctggatgttcttattttgaaattttttcgatggaagccctgcattagaataaaaaataaataatataaatcacaattttttatttttaaaaatattttttcagagctctaagattattttaatgttttgtagtttgtttaaacagaaaatttttgcataaataaatacccatcaataataaaaatcattctttttaaaaaaatatccaatttgagaatatttttaaagagatg

SEQ ID NO: 106352 - DNA, 464 bp, Heterodera glycines
tttttttttggtttctataggaaaaattatattaaatttattggaaacttattataataatagggctaaataggtacaaaataattattaaacaaatttatgcacttattcactcaaaaaagcttttttttctattttaaagtaaaaccaggattgtatctactgagttatcaaaagaataaaaagggtaacatttttattcaattcagttgtttttctccaaaatgaattttcttccatatttttttagcaccggcgttgcctataggcaccaccttggaaaattttttagaaattttgtctttatcacaattttgaccaaaaaaaaaaattgtccaggacgggatataggaaaaaatataaatatgtttgctcagagatatgaaacttagacttgggtgtagcaaagtattttaaagaaattgaaaaggaaaaaaacttaggaagatatataacaaaaaatg

SEQ ID NO: 106353 - DNA, 136 bp, Heterodera glycines
ggtgaggagccgtcaccgtcccaccccccccccccccccactttccacattttaatgtcttttcaactttgtttagttgccgcgcgaggacgtagtggagctgctgccgaacgatggggacttcctggtgcgcatg

SEQ ID NO: 106354 - DNA, 606 bp, Heterodera glycines
tttatgtattagaaatataaattaaaatcccgtgtatattaaataaaatttttgaggatgttttgcatgaaatttgaaaaataagaacttgttaaacaagtttgtgaacgaattttaccaagctaagcgtccgaaaaatgggttgcatggcaaaacttacaatagcaactcgtacataagttagactaggcctaggcattaagccgaaactttaggctaggtctaggcttaaattttatttttacaattttatatattttgcgtttcgaattttttacattttgacatttatacgttatgccatttttgcttttggcgataatttaaagttaccatttttgaattttattaaaaaccgaagggggatccatttgtttttgtaaaatgttttcctatcctctaaacttgttgtttgaggttttaaggattgttacagatcacgaatttgacttctatttcgaccaaccaaaacctaaaaattaatttttattgaaaatttctagaaaacaaacaagtccgttaaattttaggaataaatttaatgtcggaccggaccaactctaattttcaaactttttacttttaaggctgttcctatcaattatg

SEQ ID NO: 106355 - DNA, 1003 bp, Heterodera glycines
tttaatattttggcatttttagcaatacacggcgaagcctaacggcaccgcaggcccctttccttattcctgaatttttttttgaacaaagcccactgctaacattgagcgaaaagcaacaaaaaaaaagtcgaactttattggttgacctcattgacaattaattaccttcgaccactctccgatacctggaacattcgaaaaaacttggtcgatccaccaccctttttccatgtatgcgaaagccaaaatatgcgaaaatgcgaaaagcgaaatgcgatttttttttaaattttaccaatagcttttgaggttgtgatgcaaaaaaaaatctgcattttccggttcgatctttttctcagataaaaaaatgacaaattctacccatttggtggttaaaatttcaaaaattaaggtaaaatgaaggtccggcggtgccgataatcgccgccggaaaattttttggaaattgtaataaaatatggtaggaaaagttgcaaaattttcaaaaaatttactgtatttcaaaaaaataaatcgcaaaaaaggcaaaaaaatgcaccaaaaagtttaagataaaagcttcaaaccaagttaaaaactcgttttcgtgcatattaggctatagcaagttagcaaaaaaggtaatattagagttgcacgggaccgggaattttgacaaaaaccgggaccgggacttaccgggaccagaaaagtcgggaccgggacctcgattttcgtccgggactgggaccaaccgggaattttcccaagtgaaattttttgaaaaaaaaatttgaaaatttgagtgcactttgttacgaaaaattgcctatatttaaatgtgtttgtggggagaaattcgaagaatttttccattttaacagaaaataataaactgaagcattcgttttaaaaattaaattttcaaatatattcatttcttaggggtggaaatttcgcatttcgcgccaaaaagcgaaatgcgaaacgccaaaaaatg

SEQ ID NO: 106356 - DNA, 359 bp, Heterodera glycines
agttgtatgaaaacgcgctaagaaagttgaaaaaacgcttccactaaaaaataaatgatttacattttaccctgttgttttttagtttcatattgttcttttcatttctcctattattttgttacccacccatctcaatttccattttccattgtcttgttccttttttcagaaatattttggtgaataaatattgtttaaactaaataatacattattttggtaattaataataaacgattcctaatcgattttgagtcaattatttattgtcacaggcaaactgtttcttctcattttgtagttcgggctgactttagtgatttatttatttattttttttgattttctgtcagatg

SEQ ID NO: 106357 - DNA, 127 bp, Heterodera glycines
  unsure (1)..(127): unsure at all n locations
gaaaggggtcaaatgcgataattaattaacagggggagggcgggggaaatgggcngggtgccaaaaacccccgatcggttaaggactgatcccgagacttttcggcgtcaacaaagactgtgtgatg

SEQ ID NO: 106358 - DNA, 1003 bp, Heterodera glycines
cgtttcggcacttggccaatgcctccgtccctccacccgccgaccgtcctattttctcggggccctttaaatttgcgaatttgtgcatgtgccaattgatttgtcttttatgctttttggttaatcagtcaatgaaatccgtcagcaaatgatgcaatcggctgccaattcggttttcgggccgcgccttcgccgcaagtccgccgctttgatgctaaccaatgaattgcgtcgcagggtccttctccccccccccccccccaaaaaaaggcgatcacttattctgtttgtttagttcgcgtgtttctacctgctcttttgaacaggtccttccgaagtgactgtctattttagagaatggatttttgaaaaagtctgggatcgggattcggaattgactttttgcgtccgtccgttgttccatttgttcctcttttcttttaggccactcaaatgattggccccgatggtctgtgggctgctgtccgtgctaatttccctcactttcttaagggctgacttttctcggcgtcaatttggtgcctttcgggaatggctttcgctacaatttgcccgtttcctccgctaacattgcttcttctcgaaagacttccctttttattggaccatcgtcacgaaaaccttcggcattttttgtccaaaagtctttgatcaaaaaggagaagacacgtttccaacgagtgaccgaagtgttgctggtcagtgattcacagaccatcagaaaagtggcgaattgcgaaatctgatcggctgaattagacggaccaatcgaaacgcaatagccagacaatttactaattcattctccgctgatcagtccgttgtccccactaatctccgcctttttccctttccactttcaaagagtatttacgaaaagtcccgggtccattaccttttgccaattctcgtccttgtcatttactcttttcttggcggggccattttctatacaattgaacatccagcggaacagaacatg

SEQ ID NO: 106359 - DNA, 1003 bp, Heterodera glycines
ggacttttatttattttatatacctatttggagtttttatacatatttacatatttcggaatctaatacatacatatttggtacatattttggactttttagcatttttttctaaattgagaatttttgataatttataaaaatttcatgtgaaaaattaaaaatgttaaaaatatgttcaaatttttttgatcgaataaagggaataatttacccttaaaatggcaaaaacacctcagattttcttggggcagattattccctttgtgccatcaaaaaaaccaatgcattaatttttaaaaaccgtactaattgtaatagagacccgggaggctctatttttcaacccacctcaaaagggggactttatttcagggggagggggctctaattcagtggggggctttatttttcaaccctaattttttcaaaagtccaacaaaaaatggcgattttttgaaaactttttactaaaaacaaaaaatttctacgggtttccgggttaattccaaaattcttgttcgttttggatgaaaatgatttttttgttggcagattcttgggacatgggagcacagcaacaggatgtaaatttcacaaaaatgctgatttttttattcacttcggagttgaaagggcctaaaaacccaaaatttgcccattctcgacagatgtaactaattaaacattggtttttgggccaagggttcagattcgattgcctgtaaattttttaaaaattatttttgggtttttttgagttcgggtcagggttcggaattgggcgaagtgaatgtcaaattcttgatcagtggtcccaaaaccctcgagaaacaattttaaaaatatttgcaggcaagtggattctaactcttggcccaaaaaaactgaaaattgcggattttgtgtatatttcttttcctatactttttcagaacagtgatattatccccatccaaaagaggctaaaatgtagaattgaagaagcgtatcgcccgaaatg

SEQ ID NO: 106360 - DNA, 100 bp, Heterodera glycines
gggtaaacccaactcatccatatccaattcatccatagcacgatacgagtcgtcgccgtggcatttaatgtcacgactaagaccgtacaaccaaaaaatg

SEQ ID NO: 106361 - DNA, 333 bp, Heterodera glycines
ataaaaggtacttcctcctactcttctcagtcattcattcgccctcattttttgcttttatttgtgttcgaaatgtcttccgtttttatgccccaaattcttttttcttcgtcccattgcttttctcctttggcttttgcctgcactctctgagttgcttttgatcatcaaattttaatttccattacaaaaattttttacttttttcagtcaaaccgaagcaccaatgaattcgttgtccctcatttttgcttctttgcgtctcatttttcgttgttcatttgttattcttttatcaattccattttcagtgtatttgctgtgcctttgatg

SEQ ID NO: 106362 - DNA, 209 bp, Heterodera glycines
gtcaaaataggcaaaatttatacaaaattggtaaaaaaatttagccaaattagtagggatgagattttaggcacaaaaaatcgcaaaataggcattaaataggcaaaaaatatatattataaaaaaacaggttcaggactaagaaaccataaaatctttttaatgataagtagggttaccaaaaaattcctgcctttaaatttcagatg

SEQ ID NO: 106363 - DNA, 76 bp, Heterodera glycines
ttgtagcatgacacccaaaattaaattaatttaaattaaattatatatttttagttaattaaattatttttacatg

SEQ ID NO: 106364 - DNA, 473 bp, Heterodera glycines
atttattagaatagacatttcgcatatgtttaaaggttatttattgcataaatttgtttgtgcattattatttatttatgtacatatgtatgtgttacggagtggaacactattcgacaatttttaatcaaaaataataaataattttggtaatacatatacccgatggtaggaccccttttttgaatgatgcaaaaaagaataaaattttcgtaaacaaaaaatttttggaattttgttttctatttttagtgcagtatttaaaaaaaatttcggcacgattcttaggggctgtatatggaattcggattcgcgatcactgatctgcaacgcataaaactatagtgaacaaattttcacgaaaagatgataataagaccatagctgggacttagaacttgtatcaaattaatagattaattgttggttaatctctattacgactaacttcaatcgtttctcaacaaaatatg

SEQ ID NO: 106365 - DNA, 211 bp, Heterodera glycines
aataacgtaataagcaatcagctacaaaccaccccggccatatatcctatgagaaaaattgagatcaggagtcttttcatcccgcgtggcacttctgacctttcacacaatgtttttacaagcattgttccgagacgtttaatcgtcgggtttgtttcaaccggtgcgtataccggaaatcctaaagagtcacccttcgtctttgaacatg

SEQ ID NO: 106366 - DNA, 155 bp, Heterodera glycines
accgttcccaattgtgaattcatcaattgaattcgtacaagttggcgaaaaagaaatatttgtcgaattgtttccggcaaatctttttgctgaggcggacgattcgcttgggtcgcccattgttagtgaacaaccttaaattggtatcgaaaatg

SEQ ID NO: 106367 - DNA, 377 bp, Heterodera glycines
  unsure (1)..(377): unsure at all n locations
aaattttcagacgcaaatttccaagtttaaaatgttaatttttcacngatttgtgagttttattcgcccggtttcacgttccccagaattcgttcaatatttctttctcccattcattctttgtgctcttttttcgcaatatttgctacgtatgcctttggttgtgccatttaccaattacacatttcattttcattcgcttcttcacttacaaattaatctatctatccatcgtttacatttagtcagcatttattttcttttaaaaataaattgagaaaatattaatgttggttaaagtttataaattgccataattaatgtgatactatcgttagcaaatgaaccattttgctttttaatgaattaagcgaatg

SEQ ID NO: 106368 - DNA, 125 bp, Heterodera glycines
aattttttagaaaatttaataaaaaataaaaatttgaccgaaataaaaaacacgagtacaattctggatcaaaaaagcgaaaaatttatttgttttttaaatttttgttaacaaatctcagcatg

SEQ ID NO: 106369 - DNA, 107 bp, Heterodera glycines
acgagtgggacaaaaatgaaagagacgaaaacgaagaagaaaatggcaccgaaacaattgatcaaattcaaaatgatcaaaaaattatcaaaaatgaccaaaatatg

SEQ ID NO: 106370 - DNA, 1003 bp, Heterodera glycines
gcaaaaaattcgatagttttttcaaaatcaaagagcaaaaaattcgggagttttgaaatctttttttaataaatttcccaacagcaaatcggcagagaaattgaaaaatgaaatggtaattttgttattcatcacaaattctctttaaatcatatatgaagccttttcctaggcccaattcaatttttttaattagaaaaaacctcaaaaaccaaaatttcataagaaaattaggtttggtgattttaagaaagttatccgacaaccatttttagtggttaaagtcattcttttgaggtgccaattttacattttattgtattccgctaagaaatccaaaaaccattccggcacaaaatgccaaaaggcaaaatggggatttaagttttaagaatctttttagttatttgttaaatttttaatacattttttttttataactttacatggtaatgaggaactagagctaccgtatatgctctaattatagcccatgggggattatttttcaacctcctcagaaaaggggggataattagagacgggtggattatgatagagggattatttttcaaaacacctcgtagactggggtgggggataattggagactgcgggattaatagagactgggctataattagagcatatacggtatctttcgatattaagattgtttaaattgataaacttcgagcaaaggttatggatttatttattctacaaatatgattgaatactaataattaaatttaaatatttaatataaattatatttttagaatccaatatagcatccaagcgtacgttgcaaaatgcccataggacaacgctacatttctcattataaattgaatggatatagatttattgcatgatttttctttaaaaaattgttttacatataattatccaagttaataaagtaatttttcgcttttcttaagagctaaaattttatttagccttttaattttctcttagaaattctgtctgatttatg

SEQ ID NO: 106371 - DNA, 1003 bp, Heterodera glycines
atatagcataatcacctattttttaattgattataatatcaaaatcaatgattcactaaatattggccactgttactacggttatacaacattagagcatcagtaagattctacatagcaaaatagcatccatagttattagaaaattatatacaataattaactaaaaatagcgataaatattttaaaaaatattaataatttaataagggacacaaaataaaaaagttcaaataatttatgatgttttaataaaatgaaaataagatttgctgaaggttcttctacatttatgagaataatgcacaataaaattaggcaaaatatgaactaaaatatttttctcatatacggagaggctcaaagaaaatgcataaatttgtcaattgatgtgcgtgcgtcagcagaaaagaattcgaatctttaaatcaaatattaaaataaatgaaaaaataattatttaaatctaaatcaaattattaatattaactaaaaattcaaaaaataataataattattaactctttgttactcatcttttttaggtcattactttgccgtaatgttttatgaccttaatcattaatatttaaaagtgaaccatcaccagcaaattgttcattttatccgttctcattacaatgcatatatgttcattactcgaattcttaatgagttcgaattgttaaggaatttcctatgtttcccaaattcttatggagaataaaaaaaaaattcttttgagagtttgtagaaattcccttcattttttccaacgatttatcatattttgcagtgctcactcataacaattctttggtcacggcttaatgggcgttttcaccaccaaatttttgaatatgatagggaataactccccatttgcgcctcccatttttgcgtctcgcattaatttgtttaaaaatgaactgtatcacatttcaatcgagaaataaaatttaatttgtcccaacattttcattcttattattgagttgccatg

SEQ ID NO: 106372 - DNA, 177 bp, Heterodera glycines
tggcaggagaatgaaagtgggatgaagttgaaaaattttacttttatttgcgcaaaagtgtggccacgcctacactatttgaaaagagtcacggttttagacatgcccgcccactaaaagccaaaacattttgcctgccaaaaacccagaatcattttaccaatttttgtcaaaatg

SEQ ID NO: 106373 - DNA, 293 bp, Heterodera glycines
ttgctgttgttgtcgctgttgtcgggctggctttgtgggtgcttgatgtgtgatcgttgagagcgttgcttgaagtgttgctgctgctgagtgaggagaatgtgcaaaatccacctccttatatacaaaattcgggtgcaaaaattcatgcagcaaaaaaaagtgtataaaaggcgacggttttcttcacttttcaccagtgccagccagccttcaactcaacgcaacatcaacaccagtgcgcgccaagctcatctacacatttcgtcgcgacaactcatcacttcatcatg

SEQ ID NO: 106374 - DNA, 238 bp, Heterodera glycines
ctaaattctcctctctcttttcctctcaccttctctcttccttcacccctctctctctccccctcttcctctctctctctctctccctctctatctctctctttctctctctctctctccgaacaaaactatcagcaaacatttcccaatgtttcctcctcttttttttgttggtgtgattcattagtaaacaaaaaattccaaattttctgtcattccctaacaaattcagtggatg

SEQ ID NO: 106375 - DNA, 545 bp, Heterodera glycines
tagagctcgcattttgtggcatatgcctttttttctgcgcacttgtttcgacatattaagcataataacatattttccacttggtttgaggcttctattacataaatgcctttttttggtattttgccgtttggtgccttttttggcgttttttccgaaaaattccattaaaaatgctataaaatatggaaatatacccctaagaaatgacctgaaaaatttttagaaaatacacccctaagaagtgaaaaaattttcgaaaactgatcgccaaaatttctttttttttcttgataaaatttttaagtttaaaaattttcctctttcgtagaacattataaaaaatttaataatcatttaaatgaacaaaattaagttttatcattaagttttacgtgttatgctccctaaaaatccttaataaaaaaagccttttttcatgcctttttcggggttttcctgtctttacaaatagtactcaaaacttaaccttatcccatccatcatcatatccaatttgacacttataaaaactttgaaaaatg

SEQ ID NO: 106376 - DNA, 95 bp, Heterodera glycines
cgtttcgtggacatgcgacatcgttgggcgtacgagcaagcgcagcatcggaaacaaccttaagtgaaactgttcaaaacattgacgtggagatg

SEQ ID NO: 106377 - DNA, 816 bp, Heterodera glycines
tccggaagtataagggtcaccaagcacatacaaaatcaagggttgacaaacccaatttaaaaaaaaaacacacacacacacacacggatcaccaaacccaatcaaaaaaccgaaaaaggacaccataaaaagccaaacataattaaaagtcataataaaccctacagcaaacccatcactaatttaaataattaagtggacagagcgactcctaattcaattactccgacgaccaaagccaacacgaaaaagaaacaagtggcgaaaagcactacactgactgaacttataaaattaaaaacacaaacggaatacaaattaacgaaacttcgcccaaaacatacggagaatatattgaaagaattttatgaaaaaaaggagcaaataattaacaaaaacaaataaaattctgtgatcaaatttttaaatttgtgataacaattattaattctgtgatcattaaattttaataaaaattatttaaccagtgataaaacaattaaaattcgactcgatagtgattatccactaaataaccataaaagggtacttagttaattattttgaatttttaaaatacaaactatgtccggtacgcttcgtagcaaaatacccctccttaatcgcgtattaaaaagggaaatagaaacgatcaaaacaaaaattgaggaaaacaaattcgaatatgatcaaaataatcccggagaatgcatgcggatattcaataaaacaaaggaaattatccaaaaaatagagccaaattttgaaaaattaaaagccttaaataaaaggtggcaaaatttaatgagaaaaatg

SEQ ID NO: 106378 - DNA, 918 bp, Heterodera glycines
atgaaagtgatttgagagcagacaaattgagagactttttatagtagcgccaagccagacaaatgccataccttccaaacacaccaaaatgacacaacatcaaaaaaatagactcttcagctattttaccataaacaatgtattaattaattaattattaataattcaaaacaccgcagccaaactcaaattatgaccggaagtgacacacataacaaattcagaaaacctaattttgcacaattgctttcaaatttaattaattagggaagaatttagtgattcataaatcattcaaaccattaaatttaattagtgtattttaattggggaatatgtctaaaccaaattaccacatcaaaacatcaattcatttttatgacggaaatgacgcaacaaattcttaagtaattatatttttattaagatattttaaattttagaaaagaataataattacaaagaaaaataaattaaaattttaacagcaactttttttttacattattcgtttttgaattcatctttttagtcgaagaattaagttaaattacaaaaaataataataatacatctttaaaactattttatggtttagtttttaatttagcatttaacataaacattcatttaaacaaatcatgtgcttatgactaactcggattggcataacacttgaattggcatttctttcttatttatgaaagaatgaaaaaattgtgcatatgacaccaaagaaattataaatgtcaaaaaatatggccatataaattgcgattaatgcttttgggttttcaaaataaattttcaaaaataattttccgcttttaataatttcaaataattttccgcttttaataatttcaaataattttccgcttttaataatttcaaataattttccgctttttccaaatg

SEQ ID NO: 106379 - DNA, 660 bp, Heterodera glycines
  unsure (1)..(660): unsure at all n locations
ggaaaactgctggctggcacgggaccatgttttttactgcttctttcacaaattctcactttcctcanngttgattttctgagttgaaatttcgatggatgtaccgtcccatccacttttgttttttcggttgattgcttctaataatctattggattaaaatattttccatcttttttctttggcggaatttcgaatcattttggcttaggccgaattttgacgggcaaagaacgcattttattatcatattgaaaaaaagaaaaccttcgaatgcgtgcgacacgcgacttttcaattcacctgccttttttaattgccttttcttttttgtactttaaaaactgaacacctgggcccggtcaataagaaggtggttaaatgaccgggtcaaatgaccatggttacttgacctggtcgaatgaccacgaagttggtgctaaaccgcatcaataagaaaatgaccacgaagtgccgttttgactaccaacactatcttcttattgacccgggtcatttaactacatgcaattttggggcagattcacataaaaattttgttttttttcttctatttatgtgataatgagggatacgtggtcctattagagggataaaattaatttataattagtttattttaaagaattttaaaaaatg

SEQ ID NO: 106380 - DNA, 69 bp, Heterodera glycines
ggtaaattcattgacacttatattcctattgttataatttagctctttgaaaaagtgagcgaaaaaatg

SEQ ID NO: 106381 - DNA, 81 bp, Heterodera glycines
tccgtccccagtgccgccggcgaccgcgactttccgcctctcgacgtccgacggcgtcgtgcccgatcactcacggaaatg

SEQ ID NO: 106382 - DNA, 264 bp, Heterodera glycines
attatcaatgttatttataactagctctccatcagacattgacattttgaaaaaagccaggaccttgatatgtgtattttctggacaaaatctaggaaactctaaaggttggcaatacacaacatttttcaaatttacgcctctgaggcgaacgcaataatttattagcaaatattcgcgttgctatcagaaacttgcaaaaaattcgaacagcgaattaaggttttttaaaatgtgaaaatcgactaacagagaagaaaaatg

SEQ ID NO: 106383 - DNA, 226 bp, Heterodera glycines
caattggggaggaggccgccaggagcaatttagccaaagaaactggtcaagcaaccctcgatgccattattgtgcccgtgctggacattttgcgtacaatttccatcaacgccgtggcaatttcagaggaaattccaaccaatcgttccgtcaaggaaaatggtcaaatcagcaacctcgccaatctcagggacaatggcaaaatcggcagaatcctgttaacatg

SEQ ID NO: 106384 - DNA, 63 bp, Heterodera glycines
tttaaaggtgatgaggcgctccattccgtttggcgccgacttgagcaactgtggaagtgtatg

SEQ ID NO: 106385 - DNA, 64 bp, Heterodera glycines
ttccgttgctttgcctcggattccctcgcgcaatgtcttccgcgcccctccctcctccaacatg

SEQ ID NO: 106386 - DNA, 1003 bp, Heterodera glycines
aaatttaaaaaaatcctaagcttctttaaaattgtgttaccatttcacacttatttatttggtttaaaaacctcaaaatacagctatagcatgcactgggaatcgaacctgagaccccccttttggtgactaactcacagaccactaagacgaaaaatccaacttaattgtacttggagcccaaaattgactcgccgtgtaaaatgagtaaattttaagctgtatcgtctttttcaactaaaatgagttttaatatagtatttagccatttttgaaagttttactttatatttagcgaatttgaagaaagtttgaaaaattataccctcaatttgcacaaatttatgtccatattttcggcattttatgtccatatttcgcaatttgttttggcccatatttatgagcatatttcgcgattttatatccatattttttgcagccctagtcattaggattaattaaaaaatagctttaattaattcgcacacaagatcaaatatattgcaaattgaccattttggtaagatctgttaataatcacaacaaaatttcaaattttcttcggcggcgcccatcggcaccgccgtcgtcctccttccaccaaaatttttagatttttttgaatattatttatttattttttaaattcccgattggtcccggtcccctgttgagaatccaagtcccgccacggctttcctgtcccggcagtcccggtccgggtatttctaaaattctcggtccaatgcaactccaaaattaaggcacgcctttaacagattttcatccattttttaacatttttaattggcgaaatgttttttttaattaaaaaaaaatctgaattgttttgaaatttagcccaaaattcgggtcggaattcccgcgccatctctgatcagttgttttttaaaattcttctaattttgtctagcatttttttatttaaattttttaaagtagattattattattattatattttttggcttatgaaatg

SEQ ID NO: 106387 - DNA, 459 bp, Heterodera glycines
ggtcgtaaagaatggccgccgcttcggctgctgctctctccctaacccaaatttgtttagtgcccgaaataacactcgcgagccttacaatcaaatatcttaaataaatatcttttaaagaacatttatatctttacgacttcgttttttttgccattttgttgctcagagacacaaagaaaaaatatttaaaggcaaatttctgaaaatttgaaatatttttttatttagccagtaaataagcgtaaagaaggcgctggtcgtcatttgttactcaaaaattcataattggacaacggactcaaaaaaaatgagatatgtgagaaaaatacactttctcattttggcgtattgtattgtatcttttaacagagaaaaacaacatttactccgttctatgtatagccttttttccgccttactaattatcttttttttttccttttagaaatataaatg

SEQ ID NO: 106388 - DNA, 564 bp, Heterodera glycines
ttttaaagaatttgaataaagaatgatttcgatttcttgctgggaatcatttggtggtgcgcaagtgggcgtggcctaagtgtgcatatcgtacacccggtcattttctagattcattttaaaaattttcatcttttttttgcacatctggtgtttctctctcctcccctcacttgtcttgtgctttatggggaccgtatcatttaattgtgattttggggacggtataattaaattaatatttttgctgttaaccagggcggttgctttaattacaaaaagctccgtttatcctggcagcaatttgccttttagggcttgaggtctttcgcttgacttgactaatttcccgagtcgtttaggtgccctgtcgtcttgtgcttcatgggtggcggtgtgctgctcttcaggccatagtttgtttatgtttttttttttgactattttccatgcccaaatatttattattcattcaccatttcacgccatttccatgccggcgatcgcatataaataccgagattttactcattcctcctcactccactctcagattaaaaaatg

SEQ ID NO: 106389 - DNA, 203 bp, Heterodera glycines
ttgcgaaccgaattgtttaaaggtggacaaattaatttttgttaaatttctaaaaagctagttggctagcaaaagattaaaatgagttcgccaatattggatataattcacgggctagtcaatcggttagaggttgaattaaaagagatattccgataaatcccggtcaaaatgcaaccccaaatacagtacaaagacatatg

SEQ ID NO: 106390 - DNA, 461 bp, Heterodera glycines
tctaaacagctcgaaaattaataatgataaactgatccacttcaagttctaaaagacaactaatgccaggataaacgatgctttataaataagcaatcgccctggttaacagcaaaaaaaaaaaaaaaataaatttattttattatacggtcccttattctgtttttattaattatatggtccctgtatttatcagctaaagaataattaaataaatagatgagaaagagggagggaaggaagaaaagatgactcgggagcaagtgtaaaaaaaataaaatgatttctcgaatagacaaggtgtgtaaaatgagtgagtttcgagaacggattgtcttgaaagataaaccacgcccattttcatggtagaggtccctccgagcttacacttttgtaccagtctcgacgtttttcggcaatcagcaaaaatcaagaatcatttataatattttgtcaaaatg

SEQ ID NO: 106391 - DNA, 489 bp, Heterodera glycines
aagtccaccagtatttctacataaagcaccggatccgcctactgtacccttagctgaagtgcattattgagtaccacaacaagggccactgcaaatactatcccttgccgccggcccaagcttggaagacggcgtaaaagaacaaaaggaaatgactcagatggcataaacacttgtccatttttctattgttgatattctgatggactacccaagaataaatgaaagtgaactcgcttttcccatcccttcggggattattgtcagcggtccgtcctcatcgggcaagacccagctggtccttcgcctgttacggcatgccaacgtgatgtttgacccgccgcccaaggcaataggtatgtgcaaaggggtttctgtgcagtgggctgttgctatttagtatgggcatacggtgagtactcgacgcagattcccgatctggagcggcagggagttgtcccccacgcaggtgccccgtctgacgagatg

SEQ ID NO: 106392 - DNA, 902 bp, Heterodera glycines
  unsure (1)..(902): unsure at all n locations
ttttcatttcatttttagaggggaaataaattaagacttaaggtcacctcccttccacggggaaacgttttatttgatttattattacaaacancgaaaatctatgaataatgttatagttgaccccccatttgttaatagtgaccataatgcattcaattcagcataaattancaggttaatagaaatgcttcaaaaaaattttataattcaaaaaagcaaattatttgaaaataaatgccatactctcaatggttgattggaatttattttnttctgattgccctgatatcgagcttatntacctaaaatttatgtttttcctaaataatntgataaggaattatgtacccatacaaacaacaaataaagttgaaaaactgcccgaacatgttttgaaattaatcatttatcgtaaacagctttggaaggaccttcataaagaccatataaaaatcaaatttttagaagtttcaaaaaaaatcgatgtagaaataaataaattttataaaaatcgtgaaaataagtttttgcggaccttagactctaaaaaacattttcaatttataaattctttccttaaaattaaaaatactatgatacctgcatttactgataaaaatggtctgatcctcttctcagataaggaaaagtcgaatgcattagcgcaacaatttttttccgtttttacagatcaaaatttagaacaatttcaatgcctagaaaatactgaaaaaaacatcgaatattttaacataaccccatatgaaatttatttctctctttccaaactttcaaatgctaacaacacttgtattgatggaattcccaacatttttttgaaaaattgtaaagaaaatttagtccgaccacttttccatatttttagtttctcattgatg

SEQ ID NO: 106393 - DNA, 631 bp, Heterodera glycines
  unsure (1)..(631): unsure at all n locations
tttgaagctcggagagtaaagtagatgccgacacgagaccgagtgccgcgcgggattttgcgggatcccagtccgcaatcccgcattttttggaaaatgcgggattttcggtattaatcccgcgggatcccgtcccgcaaagaattttgagttccaatcccgcagcgggatccgcaaatttgattttttgtgcggaattatgcgggattttattgatttttttgaaaatttttctaagatagaatgccaaataattttaaataaattaaataataaatttaattaaagttacctaactcatttttcggcgcccccacaaattgtccaagccacgaattgtccaagccacgaattgtccaagccacgaattgtccaagccacgttttgtccaagccacgaattgtccaaaagagtaaaaacccacgaattgtccaaaagtctaaaaaactcataaaaaggcggagaatgggtctattttaaggttttcggggtcgctgaataccaatacgacatttatatagccccttgcctaaccctagacccacccgaataagaaaaatctaaaaactcggttaaaatatatgctgttgtttgtcttcangattttgttattcaatgatcgaacaaaatg

SEQ ID NO: 106394 - DNA, 104 bp, Heterodera glycines
tgggaaatctttgcacttgaaccttttgaactcaacaaactttttgtccttatttccaaggacagtccttattttctaaaagtacaactcgtttgtaaaagatg

SEQ ID NO: 106395 - DNA, 57 bp, Heterodera glycines
atttcataattgccaatttgtcagggcgtttgttgcatcgacgaattcgacaaaatg

SEQ ID NO: 106396 - DNA, 1003 bp, Heterodera glycines
ttataatatttgtctttaatataattgtttttttaaaatttatcaaatcatatttaaaatgcgttttttgtgttatttgtagtaattttctattaccttgatctccagtgaaaaaattgcatttattatatatattcattactttttgtgaaattaaattattccatttatttttatttttaagttatatttaatcaaattctattaaatgtttatttgtattttatggggtttcttattttattttatgaattattaatttggattgcatttattcaattaaattaaaatgctttattccttctttcttaataatgagattttttaatatcttttcatgcatctctttttttatttgttaaaactatatttttattttttataattataatttatattttcaattgtttgttgtattattgtttatgttttatttttttaataattcaatgaggatacttaatatcagtatctggtattttattatctacataaaatttctttctttgttttctcttttttcaataagctggctccattagtattccgataaaattattttgtcagtactcttctataaatataattattcaaatttaaacgaatattatctcaatagaattattaagcttatccggctcgaacttttattagaaaatatattatttttttaattttaatgaaatacatgtattattaggaattcttttatatttttcggtgctaattcgtttcagaaaatccgccaacatgggagtttataaaattcaacattttagcgaatttttcgacagaacagaaccgagcatggcataactttgcttaaaggcaatcaaatcttggtactatttgatagcccagctttttctctaatatatcgcaaaattttaaaaaaattatcaaatttaacataagttgtgccagaaacattacttgtcttcatacaactttttctaaagttgaccaaattttttacctttccaggctaattgagaaaaatatg

SEQ ID NO: 106397 - DNA, 88 bp, Heterodera glycines
attgataaatagataaaaaataaatatataaaagcgaaacagctaagagcactcgtttaattaaacatttagaagagcgcaaaaaatg

SEQ ID NO: 106398 - DNA, 127 bp, Heterodera glycines
tcttgtcgcagtgcggattctttgccaaaatgttgcaggtttcacaccatttcctttcttattatgccaattccattggcgcaaacattgcaaaaaagagtgggagggtgatcgtttaacgaaaatg

SEQ ID NO: 106399 - DNA, 63 bp, Heterodera glycines
gctgaaaaaacaacatttacactaagcaagcattaaatgttttctggacccgatctcgaaatg

SEQ ID NO: 106400 - DNA, 322 bp, Heterodera glycines
ggtgactccaaatttacattaaattattattaattaaatatttttaaaaaaattggagaaatatgtaattaacaaatattgtccatttatatgcgtaaaattaaaatgaatcaaaaattcttatatggaatcataagaagaaaaaatgtgagatgtttttcaataacgaaaagttgtattgtttttcattttgaatataaaaccctaaattatacttattattttttcttattaattttcaaaactctgaaaatatggacgaaaaaattccgacttttttgttttcagttgtgccaaaattggattctccaccaaagcaatg

SEQ ID NO: 106401 - DNA, 156 bp, Heterodera glycines
ttttttgtttgtttatacagcattttcgggacaaaatttcattgagtatcgttttgcgaaaagattttaatgattccaatgtttggattaggtaatttactcagattaataattaaattttaataattttatttagttggcatttatccaataatg

SEQ ID NO: 106402 - DNA, 420 bp, Heterodera glycines
taagtcaaaaatcatctcttcaattttaatgttttttgccatttaaaatttagtctttttaaaataatttatgtcagaaatccgtggtttttttgtttgcatccttttgtataatgtttatgaattttgcagaagcaatggaaaaaatatacataagcagctccaatgttacaaatatattgtgtattgttacctctcaatttttaatataattttatttatttaagcattttaataaaataaaattattttttataaatttaaatttaaaaactgaaagcttgaatttattttagagtttctcatagccaacaaaccgttgccggtgatcaaaccaaggggatgactaagctaattcggaaaaaattttattaagaaaattcaaggaaataaattcacaatttttcagtaacacaaatg

SEQ ID NO: 106403 - DNA, 401 bp, Heterodera glycines
ttagtccagtcataaaaaggcaataatgaattaattagatgatgccactttttcgtccccacgcgtcgttcgccgttctttcgtttcgttgcgtcccccgcgcgtacgcgcagcaccacgcggcgcacgcgcactttgcgcgttcaatgggtgtccgttgccggtcattaatttagcatttgcttaacactaatcacctcattttgcttcatttgtctcttcgttttagaaggaaacagttggcactgctcgaactttctgtcttttccgcttccactgcttcgtgcgttcaatttccttttgaatgtgccgaagtgttggcctcccttcgttttggcattcctccgtttactaccgtaaaaaatagaaacaacaccggtaatacggtagagaaatttatg

SEQ ID NO: 106404 - DNA, 815 bp, Heterodera glycines
ggtggcccaactgattttggacattcttctgaaagcgttcaaatgggcggggggagagagtggggaagagagaagagaccagcagacggacagagatgagcgaaatgatcagtggaagagagcgaagtgatcagtggaagagagcgaagtgatcagtggaagagagcgaagtgatcagtggaagagagcgaagtgatcagtggaagagagcgaagtgatcagtggaagagagcgaagtgatcagtggaagagagcgaagtgatcagtggaagagagcgaagtgatcagagtaattagtggaatactgatcgaagggcgattagccatggaaatctgtcatgattaaattgttaaaaaattcatttatgaaaaaagaaattgggcatttctgtaaaatttcttttaaatatttttataaaataatatccaaaaataaataaaacaaaacgatggaatcgatgaatgaataggacctgggcagacaaaatgaatgaatgaatgcattgtgtgctgattgaacgcggcagcccattgtgtgccggcttatccaaaattaattgacagcaattaacgacagataatagcaaaacaattattattacccatcgaaatgcattcacttttcatcattttttgttttttcttcttccgttgcgtttttgcaacaaatggtaattggaaaatttccattcaattgaattttgtggcataattgaattgttacattaagaaacaaaatttgggagcgatgccgacgaaggcacttttggcaatggcacaatggcaaaggcacagcaaagtccgcgcatcaaatg

SEQ ID NO: 106405 - DNA, 154 bp, Heterodera glycines
aggggacaaaatgttgaaaataaatgggagaaaagagcatggaattgaacaccgaacaataaatttgacattttgcttccctgttgtttgtcttatttttaattctgacagatggctgaacggcaaagacggcgatgtttgggtttgggtgatg

SEQ ID NO: 106406 - DNA, 140 bp, Heterodera glycines
acggcataatgatgccgattatgccatcagcttaaatgtgaagacaattatgatttatgccgacaatttgttttacaatttgatgcaatgaaagcggcattttgaaaacccacaaaaatcctgagcttaaaaaattgatg

SEQ ID NO: 106407 - DNA, 754 bp, Heterodera glycines
tttacctgtctccgccccttggccaatttgccatcgttcgctggcgtcgaaatggacaatgcccagcggtgggtaggccgaatgggccaccagtccgccagtgccatcgaaactttcgctgtcgccgtgcccaaattcggcaaagaaaatatcaatgtcggcaactcggcgcgagtttagcggcaaatcgcgcgaagccggcgacgcatcgatcagacggagggacggcgactgcgcggagaaagcggcggcaacttcccattttctgatcgcttctccgatcactattcttgatgagttagaaattacacagcagcagaaacaagaaaaatacacaaatgcattggctttttatgaccggaatttcctcctctttaacactaatgagtcaaaacccttttttagcgggggcccaaggggttgtgccacatttgcgccccaatgaaaaagaaaaaaaaattttctgctttggccattgtttaaatgcctcacttaaatgataggaaattaattctgtttccagactcaaccacgtgaaggtagcagacattgagtccacacaaatacatcacaaattctaatgaaaaatctatttatataaaataatttaaatactcaaaaatatttgctataatacatttagttggacaaacacaatactttattttttgtgttttcattttatttttttatattttctttgtttttgtattattttcttgttttttattatttcttgtttttttaaaagatg

SEQ ID NO: 106408 - DNA, 315 bp, Heterodera glycines
cctgcaaatcctgcattttaaatttgcaggatcccacgcaggattgcggattcttagaaattttgaaaaaatttcaatgaatttcaaaagtctgccgaattcattccgagtcgcaccgttaagtgtaatggatattactaaacgacctaatctctttgatttttgcttataatcgcaatatttataccaaaatttcaaagatggttgggcagaaaaaaaaatcggaaattaaaatatttttgttgtggtttatttgcgccgatgtaaaaagataaaaaataattataaaattaaatttattcaaggcaaaacatg

SEQ ID NO: 106409 - DNA, 150 bp, Heterodera glycines
  unsure (1)..(150): unsure at all n locations
tcaataattacaatgattttgnaaaaattccccatttgtcggctaacaataaaccaaaatttaaataaatccacgattgggttttggtttggttcattttcctgattaagctatgcttccgatagcattgagttgcaaatgcgaaggatg

SEQ ID NO: 106410 - DNA, 1003 bp, Heterodera glycines
ttcatgagaaatttcataaaacaattatgggtactgaagattgaaactccatttttggaaaaagttttaaagaaacaattttcatttgcttctcattcaatacaaaaagtaacttacctaacaaccaccaaagaaaacaacttgtttttcgtgcgttttaggtcactgggaaatcaggaaaaatgagctaaaacctaaaagccggagcaaatgaaaaaatgtatgagtgatcagtaagacatccaaaaatatggaaatccattttttcctgtaccatatttccatatttgtccatattttggttttaagtccatgttttatgtccatattttggcatgtctccaaaaaaccctattagaacggcccccatcagttaaattggccgttttgacaccaacgaccggaaaattttccaaaaaatggaaaattttgtttttggtcggttttctcaaaaaattgcttttttttcttcttctaaaacgagttattatactatattcagccattttaaatgtattttatttgaatttaatgaattttgaaaaattgaaaatttgcccctcatttcgggaaatttatgtccatgtttttgctattttatgtccatattttgtgatttttggtccatattttatggccgtatttcgcgattttatatccatatttttggatgccctagtgatcagacaattattaagacaaaaatactggaataattttttgtgttaaacctgtaaaaggaaatgttaaattgatggtttaaaaatgggaaatttatctttgatgcgtcatgaatagatcaatcccaaaaacattcatttcgcctactaacacaaaatcggacgtttcattttgttgagttaataaataaaaaattatatttaaattaatttttttttgatgaataaattttataagtttaaattaattttttttaattgatagaatttcatgtatttttttaattaaatttgttaaaaaatattttcattttaatttaatg

SEQ ID NO: 106411 - DNA, 118 bp, Heterodera glycines
tcttcgccccgaagaatcgctctttttctttatcaacagcgttatcccccaggttttggttgctttaatgttttccatttatgaggtttaccctcagatgatttcctttcagacaatg

SEQ ID NO: 106412 - DNA, 334 bp, Heterodera glycines
  unsure (1)..(334): unsure at all n locations
taaaaaactggaaaccgagaaccaaaaaaacccggagacttttctggagttgagacttgagaccaaggttttcgagcatccctactcctttccctgaaatattcgtttgaacgccccaaagtcacttgggtaacctatccttttgttaggaacaccctnttcggtgactttgaaaattaaaatttttcagaacccatcggcagaattacccaaaactgattaaatgcatgaaaacaaattaataaaatatttttaatttttatccttttttaatcaccgaatatttttagccagaaaatacaacattttgggggggctgatccgtcgatgtatg

SEQ ID NO: 106413 - DNA, 88 bp, Heterodera glycines
atagttagtccttttgttgaatttttagaaattttatccgtcaaatcggcttttggaattttaatgagtaaatcagtaaccgtaaatg

SEQ ID NO: 106414 - DNA, 561 bp, Heterodera glycines
cccccgggtggaaagaagaaccgtaaaaaacagcctttttattctttttttatgggaccagtaaaagtcagtattaccctttcatccgatgctcccacgggatttcccccgattccctccggctttactaaagcaaagacaaacagaaaaataaatgataaataacaaatatataaatgacggaggaaagacaattaataaaaatgaaatgaaggagagaacggcaagtgacccgaatgagtgaaagggtcaacattaaataaacactatgggtcaactccactgtgcagagaaaagcctagtactatctcgtcgttttcttttttttgtaatttctctcactttggcgtactatctctccggttttaatcatgtaaaaaacaacattcacttcgctacgtttaactttttttctatacgttaaatctataccaaattttgcatatcgatagagaaagaaattaggaacaaaatgtaagggtttttaagagcaaaaaaagggttaactaaaaagttataacggtttctcttgtaaaattcttattttttaaattttagatg

SEQ ID NO: 106415 - DNA, 373 bp, Heterodera glycines
taaatggacttccatggagaatatatgccaaaataaatacaaagatgggaagcactgacaatgagaaatgcttgggcttttaccttttgtgcgatgcttcagaagaaggtgctaattaactgctcattagtgctaatgaacagcgacaattaatggcattaagactcaatttggcgctgctgtgttcgttcggccacttttcgaattgtctcgcaaaagaaagcggcggataattccactgggactttttgtgaccatatttttaacaataaaaacagctggtggggtttccctaattttattacttttgccgtgagttggccatttaattttattccttattaatcgattatgggcaattaaggaattgatg

SEQ ID NO: 106416 - DNA, 129 bp, Heterodera glycines
ttgaatttgaagtgttaaaaaatgacaggagaaaacggacaacagtgaccacgcctgatgcgcaatggcttaaaaaaagttgaaaaaagtaaaaaaaggggtaaagcgggacaggaaaataagaacatg

SEQ ID NO: 106417 - DNA, 1003 bp, Heterodera glycines
tctctctcttctctttctctctctacacaacctctctctctctccctctctttctttctcaatctccctctctttttttcctttcctcttttctattctctcgtcacatctctctctctctctccttttctctagctctcctcacctcactctctctctttttgtcctttcctcttttctattctctcctcacattactctctctcctttctttctccttttctctcgctctcctcaccttgctctctcatccatccttttctctcttccctcctcacctcactctctcacttcctccttttctttcttctctattcacctaaccctctctctctctcttttcctccttttctctctccctctcactctcttctacaaaactaaaacggaaaaagatgaatattttgaaacatccatttgcaaaatttcaagaaattctcaactgtagaaaaattttttcaactgggcaaagttttttctttttctctcattttgacgcactatttccatgtctctaacatatgagataacacatggttcattttcttgctaataaactattttttcaaatttttatttaactttgaaatattcttaagaattttcccatcaaaatgagcacaaaatggttttgtttggtttacccttcaccaagttataagtattagaaatttagttaaaatcaatgataaaacatatagtgtctaattccgctgtctgtttttcattggcgttttgttcacttttattttcaataatttttaatgtagtgtctgacttatatatcgtttcaatactcattttttttatatgtaatgatacgcatttttattcaaaatgatgatatatgagtaagggatatagtaagggataagggatgtccagccaccgtttttttttagttctcgaagctctcgctcagttctcattttcctggataattcgcgcggcatcaatcgcattttcaatgccgaactataattagcattttttagagaacatg

SEQ ID NO: 106418 - DNA, 771 bp, Heterodera glycines
tcatcatcttttatacttaaaatgccaatttcaaatgaaaaacagagaaaggaaaccaaaggcatgccaaatgttcaactctttgtttctcaattattaacctaaaacgctttaatactctttttttgggctcatccttgtgctaagtttggttactttttctgccttttgtctcccaatttctctctttttctctttcattcgcttttttgcgcccaaatatttgcggggggggggaaatgaaaggcgcagccgacgaaactttgtgttggccaacagcagcagcaaatcgtaccgatttttgtgctccttttatcccatcctttcccaaaccgagtaaaagtgaaagttggccgaggaagggataaaatgaataaaaagcggagaattagaaaagaaagattcataggggggaaagggggaaaaaggggggagggaagggtgatcgatcggtgatcatccaattgagttggagggcgctgaaatttgaatttggtggaacgtttacagccaaaggaatgcttcgtgccttttcccttttccattcattgccatttttcattcggttcattaaggaaaaacaaatttcattcttcccacaatttgtcatcactttgagcagaaaagacggggatttttaatgacttaagcatttcattaattagacaaatacaataaaatgtattttggaaaacgaaaaaaagacctacatacattaaaaaaatatatatatatatataataaataatcatttttaggacctttccgatg

SEQ ID NO: 106419 - DNA, 58 bp, Heterodera glycines
agtccttttttatttggtttttttgaaaattaaaaataaatttaaggcccagcccatg

SEQ ID NO: 106420 - DNA, 420 bp, Heterodera glycines
ttgccaccatcaaatgaagtttgaattctaagtggacattttgttttgacaaaaagtttatgtttaaaaatcatgaaaatattatctggagtcgagagtattcagatcatgaatctgaccaatttttaccaatccctaacccgaactcgaacacaaaaatcgaaaatcctattttttcaattgattctgaattgaatgaaaagatgttaaaataaattaaaaatttaaattttttctttcgccaatgcgcttacaaaaaaatttggctcgacactaattgactatggccatggccatgaatgacatcaaccacactaaattttaagcttttcgcctactaccatttttaagttcaataattattaattaatatgttaggagaagaaaaattaataaaaatttcgctagacaaataatatg

SEQ ID NO: 106421 - DNA, 626 bp, Heterodera glycines
catgcaagttttgaaaagtttgaataaacaatattgcctcctatgtatggcagaggattattattataaaaataagtgcttataattaaaaaattgctattttcatcgtttacacaaaaaaaaaggctgctgggcagaaatagaaaagaggagcggctcttaagatgtaaaatgaatgacattgtatcagagatttgtaaaatttattaatattatgagaatattgtctagaccaaaagtgccgattaattcgtatattaatcaaaaaaatttgcttgcagaaaatattttaaaagtttgaaacaaaaatagttaataaaaagaatatatttttaaatgcaaaaagtaataataattaatttttatacacaaatataaagtttttttttaatttcttttcaaaatttgttgccaaataaatttattcaaattcttatatggcagtggaataataaaatgtcagctttcactcacggcaacatttgctattttgctcatcgtatttgctattcaacattgtcgctcgcagtcttccttttggcaaaaatttagaatgtatttgtgatcaaagcatttttttgtaaaataatatgaaattttaattatagattataaaatttaaaatg

SEQ ID NO: 106422 - DNA, 1003 bp, Heterodera glycines
  unsure (1)..(1003): unsure at all n locations
aaatttttgttgaaaatctgttatcaaatctcactcaaattttcaaaatttccccccgcggcggtgactatcggcaccgccggaccacctttttcccaaaagttttctggaaaaagtgcgcgaaaaaagtgatatgaaaagcaacgaccatttagcccaaatgattaattgcttgaaataattgaagaaattttgatttgaaaattttctttaatttaatttagttttaacttttggattttattaaataaaaaataatataatttaattttgtattattttcacttgaaataaattaaaatttgaaaaccgggaaccgggaaaaacaagcactggtaagaatgggggtctgagtggaaaattagtaatgaaaattagagtcaaaggaaaaaatattaaaaaaatgattaaaaatattctttaagcgtgtcgcaactaattgttcaaatgcactagtggctagtccccttgacttttgtcttcttctttcccctggnttcatccctctacggaaattaaaatattttgaattttctttttgtatactcatggttttcctatcgacaaaatatgatttctcatattttttttgtttatatatattttattattttttaaaatgaaaatacgtacaaattgagcctaataaatccaaaaaacctgcctttttgttgataatctgttaacaaattggactcaaattttcaaatttttccccggcggcacctatcggcaccgccggtctcccctttctccacaaaagttttttggaaaaagcgcgccaaaaaaatgatcagaaaagtaatataaatttataataatattcgatcatttagtccaaaatgattattttaaaaaataatttaaataaattattttgaaaattttcattaatttaattatgctttaacttttggattttattaaataaaaaacaaaataaaaatttaatttagtattattttcaattgaaataaattagagatcgacattttgaaaaatg

SEQ ID NO: 106423 - DNA, 243 bp, Heterodera glycines
attaaataattttgataatttaatttattatttaaaagaattttacacacaaacggattcactgagaatgaagtggaagagagaaagtgcatcattttttcaaatacaggtgcaaaatattatttcttcttaatgtatataattttgaattttactgtgttattttcattaaatttacactaaattaaactaatttttattttaataaaaaaatttgaatataaaaatttagtaagaagcatg

SEQ ID NO: 106424 - DNA, 285 bp, Heterodera glycines
cctgtttcgggtttgaggagtaaagcaatttgaaaaattaaatttgtttaaaaaggttttcagcataaataatgggcaaagtgcaaataaaaaaaaaatcggattccacctaagaaatttgaaaagatgccatctcaaaaggaactcagaaacagaaaatggcatttatctataaaagagtgcaaaaataatgccaagacattcaaaactgtggaaaatgccattaattagtggaaatgtcgcacccggggcggggggggggctggagaatggtgggtgagaatg

SEQ ID NO: 106425 - DNA, 370 bp, Heterodera glycines
gtaaatagattaaaaatttcgacgtctccatactttcactactttcgttcgaaagcttttttttgggctctacaacatgtgtatgagttttttatgttgccgcactctaaaatggtaccagctagtgatcagtttaacgccaaaatagttgaaaatagttttttttcaatttttaggtgttaaaaaacgaaatcgtatccctagatatgatacacgccctattcattaataatttcataaagacatatatgtagaatcaaactcagaaaaatactgaagatataaaaacacccaaaggtttaagcggtttttatccttcttttgaattcttttattttaataaatttgatttatttgaaaaatagaaatg

SEQ ID NO: 106426 - DNA, 170 bp, Heterodera glycines
ttttcactgctcctcccaatgcttatccaccatagagcatttatctgttgtcactgaccaaatttatccgatgccataagcttcccgtcatttccatgcataaaacaaataccaatttcgcattattttaggaacatttgcatttttatgctgctgtaattctgcaaatg

SEQ ID NO: 106427 - DNA, 553 bp, Heterodera glycines
ataactttcatcttttcaattcattcatcaccttacacgcacaaatgagctgttttttgatgaaaaaaagtgttcatttggaaatggaggggagtaacttaactgatcggacacaaatgttttttaacacatcaaatgagcgttaaacggttccacaatgatatgattaatgtccaaaatatgctttttaatttcaaatgaacgagtaataaacccgaaacaaaaatcattacggcaacaattagcaagttttttgccattttgggttcatataaaagcgaataagcagttaccattaacagcagaagaacatccatttgctcagcaatttgaaactccctataatttttaaaatttatataaaataaatttaataattttgaaatgactctttatttccaattctttcatttctgattaaaatgcaaaaaaaaaaaaaaaaaaaatttccacagagaaaaactaatcccaaataagtcaatatttaagaaatcccaagattttaactagtaatatgtaattgaaaaatcacaaaattttaccgtaaaatatg

SEQ ID NO: 106428 - DNA, 1003 bp, Heterodera glycines
tatgcacgaaatgctaaaatatgcaaaaatatgcatataaatcgcgaaatatgcaaaatatgcatatgggaaatacgtcatagaagcttcaaagcaagctaaaaacatgtttttcgtccgtttcaggcctcagcctcccgcagtccaggaaaaaaaatgcatgtgcatataattcccaaccctaatgattacctatatgagttaagcaattagagcgaatgaaaacctgaaaaattcacataaacttttgcccaaattttcgtttttcaagtcgatttggggggctaaaatttactcactgcatataaccatgaaggagtgatctgatgaaagtctatagttttggaacagcaaattttggaccaaaaatataaaaaacatttagttttattgttaatttaattctgaggtatgcctgataaaaattcaagctgggttagcctaagggtagtaagtgaaacacaatatgtttctggattttgaacagtttacaaagagagtgattttttttatcaaattgaacctttaataatatgtaggtaaatattttggacttttttcttatatatttttatttttttacatattttgaggattttacacggaaatttttggaaaaaatccaaaattttggcaaatatttttgtacatttttttcattttttttacttattttgaaaatttatagtgaaaaaataattttgaaaatgtacccctgaaaaaacaaaaggaaatttttaaaatattacaaggtgattctaagcctattaaagtcatttttatggaattttgtgcctattttatcatttacgaggattttttttttcaaaaaataaccttttcaaaaattttatcatagttggacttttctttaaatatttcgggatttttcttacatatttatgtcgaatatttagacaactttttgtgcatatttttggcagccctaataagtgagcgaacaaacaattaatcggtggtgtgccgtcttcctgcttcaatg

SEQ ID NO: 106429 - DNA, 974 bp, Heterodera glycines
ttttgagacaatttattttttggaaacatcattttatttatttttatttctcaaaaatatatttttttttaaaaattatataattgaaataaacaaaatcattttaatcgttaaattatccattcatttattcgtatttaaaaaaagaattcaatttccaaaaagccaaaaatgcatttttcaaaaaataaattcaattaattaaatgcacaattttcattcccatagatttttcttttaaaaattataaaaattgtttccaacaagaaataatgaaaggttctcgaaaattgccgatttttctctatttattgtttttgttttgggaccggaaaattgcccctctccccctcttgcctgcgggcagcaattccagttttaattagaccaaaaaccatttacttaattgactataaaaatctttaaaaataacccgttgccaaatttggtcattctgctgctgctacctgctgcgttgcagatgatccaacaatttgagcaacatcatattacttctttttaatcacccttgcattgattaattattgttaattagttaaatttaaccactaaataaataaaacggactaaattggggcaaaagggaggacactcaaattttgatcattgcaaaacgcaaattaaatgtcaattagactcaattaaggcaattttagtcaatttcgccctaaaataatccatttggtgattcagcactttttgtctgtcgctgccgttcttcgcccatttttacaaaattaaatttgacatttgtgaatgaaaaccacaaaaattggcggacaaatgagacgattgggatttgttaaatcccattcgcctgggataatccagcagaatctaataatcctctaagttttaaataaaattattgaaaaattcacgcggaattattttataaaatataaaattttccaggttttcattccttatcaaagtgtgatacggtaataatg

SEQ ID NO: 106430 - DNA, 677 bp, Heterodera glycines
ttttgctcccccatttgttggcatttttttaaaaataaagtacctaatacatttttttcaaatacagccacccccgtccgtgtacaaataaataatcaaactatacctaatttagttatacttaaaatgtttccccgttttgtgtgccctttaattgtggtgtttttgctgatggctctgttcgacaacagttggaagtgcagtgccttttttgatcctgctaaaacaccagcgcctccgaccgggaagccgactgccaagtcgggtgccattggtggtgtgcgtgtgggccagcagttgttgcttttgcccatgccgttgttcatggcgctgtcgctggccggcaattgtaaaaaaccgtatcgtatttgctctattaaagcccccccccctcctcctcatataccccccgaacccagtttcgaacaaaactcgaaaaaagtagaaaattcatttgtcaacaaaagtacagccaaccggacttgaacaaaaattcgaaatctgaaaaatttgaatttactacttttggtttgaatctggttcggggttcgaattgggacaaattagataccagaaggttttcccgaccctaaaaaccccaagacaattcttaattaatttttttttgtgaatctccgcacagattacagtaaagcaccgatttttgtcaaaaaatg

SEQ ID NO: 106431 - DNA, 577 bp, Heterodera glycines
  unsure (1)..(577): unsure at all n locations
gcagaaatgctccaaaattattggcaagaggcatcattcgtncgtctatgtctncatggcaagtcncattgtgatgtcccaaaacgtgatggaacgttacgtttttgtgtggactacggggctttaattcgatcacccgaaaagatagttcccgctcncaaatatcgacaatactcttntaatgcttggaggacgaaaatacttcagcactttagactttatgtccggatattggcagataagaatggatgaaaattccattgaaaaaactgccttttcgactgagtacggtctttacgaatttacagtaatgccatttggtctaaccaatgcagtggcaactttccagcgatttatgtcgcgtctctttgagggaatgattaatgactttctgttcgtttacattgacgatattttaatcgcatctaaatcctttgatgagcatctgaaacaccttgaagcggtcttttctcgagttaaagcagcagaattaaaactaaaatttgaaaagtgtcatttttgcacaaccgaattaccatttttgggccacatcctcacaagggaagggattaaaatg

SEQ ID NO: 106432 - DNA, 189 bp, Heterodera glycines
ttttttacatatacactcatcaatctcaacacaaacacatgtgtaacttattgtttcgagttgattttgctcctgattatatataaatattggtgatatttattcgagagcggattcttttttcgtttttaatcgaaaaagaatattgtaattgccaatttgcaaaagcaacttttttcttcagaaatg

SEQ ID NO: 106433 - DNA, 962 bp, Heterodera glycines
tttttttatataaaaaaattctttattcgaactccagaaaaaaattgaaaattttttaatattttttgtaaaaatagaaatttaaaagtttgattctacaaaaagactatttttattttgattctctttatttattcttttttgctgcacaattggtggaataattttttttcaaaatttcatttttttttatttttcaaagtcgaggcctcaatgtatggacacagtagagtaaaaatttttttattttttacgaaaattggttgaggccatgtgttcagctctgtgatggtggtgctgagtaccaaaattgaggcgtgaaattcccagagcagataattggggattaaattttgcggggaaaaaaattcgcatcgaaattcggtggcattttgggaaaatagacctctaatggctgcacaagagtaaaaaaaaaaaaatttttttttcatttttttttgttttttgaggaattggctggcgcaaatggattcagctctatgatgtggtgatgagtgccaaaattgaggaggtgaaattcccagagcagataattagggattaaattttgcggggaaaaaaattcggtggcattttgaaaatctattgtgttatttaaaaaattcacttggaaaatagatatattcgagagttttgttaaacaaatttcgccagtaaaataagcattttcaacagtcgagaaaataaaaaaattttcagtctaaaattttgaaaattattcgatcaaatttattttttttctttatattccaaggtcgatgtcattatgtcctccgatcccatgggctatatgctggtcaacgagcggatgttggagatgagcccgcaaatttcttcgccgtgttagtcactaataaaacaattttattttcaaatgtttacctataaaatttttttttaaaactattgtattttttccacatttgtaggagttggagatg

SEQ ID NO: 106434 - DNA, 99 bp, Heterodera glycines
tgggtcggccaaaggcgtcgaaacggccgaatgttagcagcaaagcattggcagcaggcacttaattcatttttaaaaaatcaaatttctttgccaatg

SEQ ID NO: 106435 - DNA, 193 bp, Heterodera glycines
caaattttattactgtaaaactttgtatccgaatttaataaaaataaacgaaaatggcattggcatgggacgcagaaaccgaaaaggggagaacaaatcgccaaataaccaatctgttgaactatccaaagctttcgtttgttttgctctgctccttttttctttggttttctttttaaaaatttccgcaatg

SEQ ID NO: 106436 - DNA, 713 bp, Heterodera glycines
  unsure (1)..(713): unsure at all n locations
aaacaaaaaaatcgattttttcaagtgtcncgtttgcgtgtactcaaacatttatgggggagcaaaaatccaacgcagaattaaagtacaggctatagggaagctattcccgaaggattcggtctccccataaatctgggcgcatcggttcggggggactgccccgaaaacaaaaaaatcgattttttcaagtgtccgtttggggtactcaaacatttatggggagcaaaaatccaacgcagaattaaagtacaggctatagggaagctattccggaaggattcggtctccccataaatctgggcgcatcggttcggggggactgccccgaaaacaaaaaaatcgattttttcaagtgtccgtttggggtactcaaacaattatggggagcaaaaatccaacgcagaattaaagtacaggctatagggaagctattccggaaggattcggtctccccataaatctgggcgcatcggctcggggggactgccccgaaaacaaaaaaatcgattttttcaagtgtccgtttggggtactcaaacaattatggggagcaaaaatccaacgcagaattaaagtacaggctatagggaagctattcccgaaggattcggtctccccataaatctgggcgcatcggttcggggggactgccccgaaaacaaaaaaatcgattttttcaagtgtccgtttggggtactcaaacatttatg

SEQ ID NO: 106437 - DNA, 679 bp, Heterodera glycines
cgtttaatgtaaaaactaacctttagttttaaattttcgccaggttattgtctgtcggaacgcgaaggtgtggtcggcactcctgagaagccgttgtccgacttgggcaaagtcagctaccgttcctactggtggtgggtgctcatcggggtgctcgaccgagagcaggtggagtccaacatttcggtagccgaactctcgcgcctctccggcattcacacggatgacatcattgagacattcaaatcgttgcaactgattaaatattggcgcggtgagaaatgccgacgaatgaatataaaaaacatgcgttttccttttccgttgtcaggtgaccacgtcgtgcgcataagtcaaaaggtcgtctcccagataaaacaattgcatcttttccatccgccaaaattaattctccgcaaatctgcggtccgttggcgtcgcgggtcgacagtctctaacgaagtcggaagaaattgtagggaagaacggggccgttcaatctcagcacattgattcattttccaattatcaaataaatatttctgaagctatttcttcctgacaagttacaatatttgttttcgaacaatcatttttctttgcaattttttaaatcaaagtttattgtctttcaattagccaacaagcgacagttatattgtgtgactcgcccaaaatg

SEQ ID NO: 106438 - DNA, 581 bp, Heterodera glycines
tccacgctgcattgataaaaggcaacgcagattgaacacttgaaaaattattattaaatttgagcattttttgatcaaaaaatttttgaaaataaattcaaattttagaattaaagtgtctaaaaaattaatgtttttttgatatacaatgatgactagggttaataatatacttaaaaaactataaaatatttgattttgaaatttgcaagtataaacttttgtatattttcgaatttataattttaatcatctgacaaatgcaaatatattgaattttgaaaaatttccttctctttaagctcaaattttttcgagttttaagggtatattttttgaatttcctaaaaatcaatcataaggtgtattttgcatttttcttatcatattttatcaaaaaaacgaacgcatattctattacattcattggtaaatgccgatttccaaggaatccaagacgcaatgcccagatccaaggatatacttataatccgaggactaatgggagccctcttgcttaaaattgacaatcaaaaattaaaataatttaagacttttttaattcagcggaaaaaactatg

SEQ ID NO: 106439 - DNA, 98 bp, Heterodera glycines
tccttcctttgccaagggtgcgtaattaacaaattaatgagccgaaaattggccccctgctaataattgtccatcccacccttccttcggccgcaatg

SEQ ID NO: 106440 - DNA, 420 bp, Heterodera glycines
tgtctgcctattttcccagcgtcgttggtatgagcaaaaaaaaaaaaaaaggtcgttcgggcgaaagtttttcaaaaatacacccctaagaatcgggcgaagaattttcaaaaatacacccctaagaatcgggcgaagaattttcaaaaatacacccctaagaattgacttttcggatcggtaccccccccccccccccaagcccaaatcctggatacgtccctgggcgccatgttatcagaaattggaagagcgaattgagccctcgtaaaaaactaagacaaatcatagccccgtcccaaggcctattttacgggaaaaagccggaattttagttttttctgcatttatttagggtatgtttcacaatgttgatttgcatctctctcctcaataaattttctaataaattttagtatg

SEQ ID NO: 106441 - DNA, 453 bp, Heterodera glycines
ctaacgagccgtttgtgtgatggattttttgttttgttaattctgtgtttgcctgtcattttactgtccgctcattcgtaatttgggtatcactttattggcgctaaattgtttgcttattctgacaacggtatatgaaaacagctcaatgctatttaatttactgaagcggtattgtaataaaacaaaacttgatctcattattaatttaaagttggtttggcgcattttgtgatcgtataaattagcagtttaatacccaaaacaaatatgttattgtttaaaggcagcattgataaagttttgtttgatcggatgattggtccttttacatttaatctggttgtgtcttcgttttcaccataatatttctaattgagagcgttgacaccaaataagcatcaataccatctttctaaactgttaccctcaatttttttagatttaattatg

SEQ ID NO: 106442 - DNA, 155 bp, Heterodera glycines
ccagcttcaaactggccgtgcatcgttttacaaggatctgtgcgtgctccatgatcgtgttgactcgttgaaaaaggtcattggctgcaacgaccaaattttggaagagtttgccactgaccaaagtgcgcaattggctgtagggagggaaaatg

SEQ ID NO: 106443 - DNA, 721 bp, Heterodera glycines
  unsure (1)..(721): unsure at all n locations
tagtgatttttatataaggtattaatcaccaaaaatgtctgttatttgggaaattgctagaacaacncaactatctnggggagctcaattttcactcactatcaccctggaggagtgatctgatcaaaatggtgcaatttagttgtttgatctgcatcgaatgttctcatttatgaatgattcagattttatcaagtgcacgaaaaaatttttttgaagtttgatcaataattctgttatagtatgacaaattttgggaaaatacataaaaaataattgttttgtgtggttcttcttttgataatttttccaattgggtagttcacatcatttgcgtttttatttttggcctgtctataattcctacaggcaattaccgtccttgatgatagagggtaaatttctcccattgtgaatgaaaggtgtggggaaatagaattgcatgaaagaaattataaccaaaatgttccagattgaatgaaaacaaaaaatgtgatgaaggatgggaaatttgagattctttgcctctagggaggggtggacagcagatagcgaacagtaaatttgatgaacgataatttagaataattttgataaaatgtatcggacattatcgccttcttctgacactgcaagggcgaatacggattcgatccaatgttgccgtgcgcttgggcccgatcgcaaatgcgagcaacctacgtcagaatatggcaacatg

SEQ ID NO: 106444 - DNA, 534 bp, Heterodera glycines
gacacaaaatttaagtaactattttattttttcttcataatcttcacattataaaaaagtatatcttctatatatctcttgacttaaattgattaaatatttataatttcaaatttctcggttactaaatgtttcaagatagccctgaaaaatgccgttttctcggtaggttgttcaatgagtgccgtgttaacaaatatattcgcagtttcattttgcaaagcatgtttgggttcaaacttcactcataaaaacaattaaatatgtgtatatttttaattaaattaaaattttttaaaattttcatggtttttgtttttcaaatttataaattctatattttgtgagaaaaagccttggtcttttttgaattctaaacacataagcatttgtcattttttgcttcgcctattttgctgcactttcattcttcagttattttgcataattattattattattatttatttttaaattttgccgtgtaaaaaaaatcaaaaaatttttcaaaatttattttatttttttcagatg

SEQ ID NO: 106445 - DNA, 587 bp, Heterodera glycines
tccaatttcgtttttttaaaaatatggtttcatgtcaatgtaatttatatgtatgtaattagcactttgttgctgtgttttttcattttccagatactcccagcaattcaatttcaatttcatttcgatttatgataatataattccattattatttaggtgtttctccaatatttgcttctatatttttccttaaaattattcaatcaatttgtaaaacgtggcttttattattatattttttattaaatgaaaatatatataattttttattacttttttgatatttaatatttctgtaacttttttgcttcatcccccgtcatttgatttcaattattattatttatttatttttgaatggctcgggttcgcttctgctactttttccgcttcgttacggtcactttttgcttttggtttacggtaattgttgcgcaacaacaaacacaacaagttggtttgacatctaataaatcaattttcaaatatatataaacatattaagcaatttgatcaaccgttttccgcatatttgggaggtgaattcgaaacaaacgcatggaaaacgaatggcatcaaaaatg

SEQ ID NO: 106446 - DNA, 116 bp, Heterodera glycines
ctcagtaccttaaaatacccctagaaagtttttcccaggattttccaaaaaaaaaaacggggaccagtaaactgcaggattgccccatttgttggaccaataaacgaattgtcatg

SEQ ID NO: 106447 - DNA, 1003 bp, Heterodera glycines
cacttttctatgaatttatctaaatgccaaaaaaaaatcaaattctaaatatccgtccaatacatttgcgatttataagaattgaaaacacagcattttattacaaataatgagttcaaactcataaattttttgccaaattaaatgaatatcatccactaattacattttgacatttggccatatttcttcgaatttaatttcatttaatgccaaagtgacaattcgctgatttacccactttgaaaatgcacgcacctgcaatttgttaattaatgcatttgtctgaatttctcaatattcattaaaaaattgtctatagaaaaatttattattgcatgttgaagagtaacaatttttgataatctttcagaaattggaaacgaaataaatttttattcgttatatcaaatgaattatgaaactttttgccacctattttcccattttagtatttaggggggtttttagaacctaaaaactaactattttggcatgttttagcacctaaaaatcgtatcattattaattaatttcaattataataaagcaaaaaaataataattttttaaattgtattttcatgatatgacaaaattttaataattaaacaattttaagcattctgtaccggttttcatgaaaatcattgcgtgacttcgtgtaaatcttttaaaaaagttggctttgcgtgttagaacaacggcattaatttttcttttattcagaatttttattattgcatgctcacagacaatgtttaaattaatcttatttctaatggaatgctttgcagaatttttcgttttaaataattattttaatttaaatgtcataatgttcaaattttattaaaagaatttcattttcccttcttttagtcaaaaattaataatgcataaattttaatgcttttcctttatttgttgcaaataattttagctaaaatttatactaattataaccgttttgtttaattccattaaaacaccaattaaaaatg

SEQ ID NO: 106448 - DNA, 592 bp, Heterodera glycines
cgatttgtctcatcgagacgaatcgaatgatatatataatttatataaaaaatcaaaattaggattttaccaaaaaaaaatttatggggttgggaattttttttttttgaaaattagagtaagcccattggaaggtaaaattttaatctgtaaaatttttgatcaaaaatttacccttttaaggtatatggcttggcgccaaaacgtgggcgccaaaacgaccctggcgccaaaacgtcggcgccaaaatgaccctttcccagcctaaacagctttaaataaacgatttaaagttattgtataatttttgaaagaataactataatctttcaaaaatcataattatgttcctaataaaccgaaagaacgagttttattaaatttaagctgtttaggatctctaagattgaaaaaatgtatgtttgagtccgattttggacataggcacaaatgtccgaggcgcaaatgtccggcggggcgcaaatgtctggacgaattccccatccctcccgatcatgcttttaaattaattacatagattttgacaacacgcaaaaataaccgagaaatttggagtgtgtaccatacaatg

SEQ ID NO: 106449 - DNA, 200 bp, Heterodera glycines
ttcttgggattttcccttgtaaaaatggaagagccgatctcgagttaaaaacttaagtttcacaaaataaacttggaatcgttagagggggtcaaaatatgggcctatgcaaaatttcaagaaaattggtcaataggaaaaattttttttcaaggacaacaaaatcaaatttatttgcaacatttttagcattaaaaatg

SEQ ID NO: 106450 - DNA, 1003 bp, Heterodera glycines
gaaattattggcgtgctcataaattgttgtacatatttttttttgagtattatatgaaaaatgtccaaatttttgttgcaacctttgggtcttatttcacactaaatggaaaagcatttgctttttatgcggctttttttttgttatttatgaggtaataaaaatgaatctaatcaatgatatattcatgatcagcgaccccgaaaactcttgattgaaagcgtataccgtacatactctttttatcctccatggggtattatttttcaacatcctcagaaagggggggggggataactggagactgggggattaagatagagtaggaatgtgatctgaaaatcaatttgttgacagattttgtcgaaaaaatagtctaaattttactattctggaatgttttttaagaaaataaagaatttttaggatgacgccgcaaattttagaaattttggctagtttttcaacagatttttgtccaaaaatgaacaaatttgtgtcaaactttgaatttcttgaaaaataaagacgctatgccataaaatttcaaaattatgaatatattaagaaatccgaacaattttggtcaataccccaaaatctgaacatttcttagaaataagaacatatcaaatccctgagatagagggattatttttcaaacgcctcttagactgggggataattgagctttggggattaatggagattgggggataattagagaatattcggtaaacactggcactccttgataaaaaattaagcggaaaaatttttcaaatgttcaattgaagtcaggggttcgatcgaaaatttttgaaaacaaggtcatagctaatcaaaaataaattttggaccgaaattcaaaacattttgtgtatcattcgaaagcttaacatgtttagaagctttttctaagacattgcttcgcgattagacaattatcaaaaaaattataacataaaaatagtaaaaaaaaaagttatagtccaaaagcatg

SEQ ID NO: 106451 - DNA, 151 bp, Heterodera glycines
attaattaaaatgttttttgaaatttttaaaattaattttatcttttttaatttttaaataaaaattattcagcaaaatttctttctgattgccaatttcaaatatttggtcgattttgccgagcagcaaaagattttccggcagaaaatg

SEQ ID NO: 106452 - DNA, 333 bp, Heterodera glycines
tgaaatctatccgagtcaataacagtcaatctattctttccgttgttgatttcgttcagttgaatagatttggtgcaatatattgaattttgatgaaaaataaattttcgactttttgttcgaatttgagttcggggttcggaattgggcgaaatggatgcggattcgtgatcagcgaccccgaaaaccccagaaaaaatgttttacgtgacttttaaaaatttgaaatttttgccaaaaaaggggggggggaacaaaccccagtattaccttattttttttcttcacttttcagtgtttttaatttttcacaattcgctaccttcgccaatg

SEQ ID NO: 106453 - DNA, 1003 bp, Heterodera glycines
attgtccgttccatttctgtcattcacccggtccccctcattcaatgatcagtgattggcccttcacttctatcccatttcgctgtgatttgccccaattgtgataatttccagacccccggttttggtctttgttctgtggcgccggtggtccccttcaattctttcccatcccggtccccaaatcatttgtgattaatcccccggtgatggcttttttcctgtgatcaatttgtgataatttcgttcaccatttcaaatatttggtttaattacccaagttcgaggtcatttcccggaataaattttttattcattctgtgtctcgtccctgcctgcccctgaaccccgcaccgtggaattcatttggcccgaccccagagcaagtcgggacaaattggcgctcctgggtggattggctgtgaaccacggactgaaatcgacggatcccggtgacaaagggggaagggaaaagcaaattagagagcctagacaagaccctctgaggcttgtctagtgttcatagtttcgtgtagttattgtcctccgaggcataacttcacgagggacgtagcggacttagtgtttaccctctgaggaagcacttcgtccgaacagagggttggaaggtgttgtgtagtggacgaagtacttgccctccgaggaatacttcgtacaaaagggtgttcaagcgcgcacaaggccattgacaaataaggaaaaaaggcaaactaacagtcctccgaggctttagtttagccataaggcaaaaggcaaactaacagtcctccgaggctttagtttagccataaggcaaaaggcaaactaacagtcctccgaggctttagtttagccataaggcaaaaggcaaacaccttgtcctccgaggcaggtgtttagtcacaaaaggtccaggaccaaggccagactgatctcggaaaaagacacaaaacaacaagtgcaccacaacacacacacacgcacaaccaaactgcacgcaatg

SEQ ID NO: 106454 - DNA, 70 bp, Heterodera glycines
aaaaaaaaactaattaattcaattaaagtaaatttgcctaaagggccgcatactttacgggccaagcatg

SEQ ID NO: 106455 - DNA, 390 bp, Heterodera glycines
aacggattaacaggagatgatcattagagacaccatagtgccgcttatacagaacgataattctactaattgatacctatttttctaattgagcccccctcttctcccctgccccggtggttcattttgtgtggggctttacgtacataaagtgggtccccttaaaaatggggacactctccaactcacattatttaaattcataggtttttcctctttgttctttcaaattcttgaacctcaagtatgaaagaacaatatttgctttacagcaaacaaacactttaaaacattctttgaaacttatttaaaatatttgaagatttaagcattccatcagttaaattcggcaaaatttaaatttaaacaatttattgtaattttaaaatg

SEQ ID NO: 106456 - DNA, 87 bp, Heterodera glycines
aggcgagcacagaatttttaaaattacatttatttttaattgttttttaaatgtttggtaatttaaatgtttgtttaggatgtaatg

SEQ ID NO: 106457 - DNA, 101 bp, Heterodera glycines
acattgatgggcggctgcacagctcttttaacttaagctgtgtgcattttaccctgccagccccgccaacttcaattgccaaaaatactgacgcggcaatg

SEQ ID NO: 106458 - DNA, 186 bp, Heterodera glycines
tttttaaaacttttataatttaccccaaactagcgggtgcgtgaaccgtcggatctgggctgggaaaaagcgcttcgcgctttgtgagcttcgctacctaggcgcgttttagtctgttagggtctttgcgtcagccgacatgcacttggtttcctccaataattggagttgacacatcgcataatg

SEQ ID NO: 106459 - DNA, 385 bp, Heterodera glycines
ccattgactaattagtcagttccttatgatgtaattccttccttacaaataaaaaaaataccaaaacaatgaattgcaataaattaattttcatatttttttgttgctgtgattgtcccccgaattttaagcaaacgattaaaacaaaaaatgatcatttggttgtactcgtgtagactaactatatcgcatcaatttccaccgggattttaccttttggtcctttaaaaatcaaaattaaaacgcactttccatgacgtcacctcaaaaagccacaattacataaatcaccatttcaatcacatttaaccttttagatttaccgatttcaatttgtgcataagaaagcattcattttgcctattcctatttttcttgataaatg

SEQ ID NO: 106460 - DNA, 220 bp, Heterodera glycines
tgccctccaatgtgatggctttgggccggaaggttaaaaacacgtgtagggggtgacctatgcgcgtttttggctctccaaaaatggcccaaatcatcgctcaggagaggggtcatgcccgatttttttttgggtggccattttctttcattttcgatcaaatcttattgttttcagttttcataaaataaaataatcaaaatcaattttagaaaaaatg

SEQ ID NO: 106461 - DNA, 545 bp, Heterodera glycines
  unsure (1)..(545): unsure at all n locations
attttattcataattttgtcaaaaattattcatattttcctttgtagcctttttaaatanaattaaaagagtttgttataatgttcaattttaattaatttttaaattaaaattaatttttgtttgagccacagacggacgaatattttttagctcttcttaaaaataggcttaaaattataaaagtccgtttttttgcatgtttcaaaaattttcccagcggctcctttaggcaacgccggcactcttcttttccaaaaaaatattttttgaaaaagcatgtcgcgaaaaagaagattccgatgaatttttcattttaattgcatttttattttaaaataaaaaaagaaaaaattatttataaataaaaagagaaaacccaaaaatgaatcatgaaaaaattgcggaaattttttaaatacaaatcaatattagaaaatgagttaattttttattaaataaaatcaattgtctttagattcacattatttacaacaaattgtttcagatgatttaattcatttttattatttattcaaaaaatg

SEQ ID NO: 106462 - DNA, 555 bp, Heterodera glycines
gaaaaatatttgttttcattttttgttttgtttccattgtctattgttgaaacttgcatattttatttcaaaattcaacaaatttattaggttttgaaaataattagtgctgttttattgttttccctacatttacttttgtgtcaaatggttgctgaacccaataaatggataactaaaataactaacacatgaacataaattcgatcgtaaggatttattgaaatttcaaaaccgcgaatattttttaattagctctaaaaacaaaattaaaatttatttttattgttttttgcctaaggcacagaattatcccatgcaatctccgctcacatcgccacttgctcaaaatgctgcagcgacaccgcctttaaagggctctttcccacttgattatcagcaggcgggcatttcactgattaactaattgctttgtattttgcgggataattagctaattaccacaatgggaagggccgaccgattaggccactcattttgcattaaatcattgatgttttccctggtttattttaggtctgtcacctggagatg

SEQ ID NO: 106463 - DNA, 309 bp, Heterodera glycines
tttaattaattaatttaatcaatttggttaattataatttagaaaatagagaaggtctatttcgataatttcaatgttttcatatattcaattttaaaaatcataagaaaaaaaagtatttttatgaaattattaaaaaactaaaatacttttatttaaaaatatttcataaaaaaagtacaaaaaaaaacaaaacaaattttttgttttaaagcgatcgtggacaattccagggatggcacagtgatcgtttccttcggcacttttgccgatattaactcaatgaaaagggaaatgaaaatgaaaatg

SEQ ID NO: 106464 - DNA, 125 bp, Heterodera glycines
cgtttgccatcatttcttgcataataccaaacatttcacactgtttttttcagtactggaaaacctcccgtgccggtgacaaatgaggcggtcaacgaagtgcggacggcactgatgcgggaatg

SEQ ID NO: 106465 - DNA, 555 bp, Heterodera glycines
aacggacacttgaaaaaatcgatttttttgttttcggggcagtccccccgagccgatgcgcccagatttatggggagaccgaatccttccggaatagcttccctatagcctgtactttaattctgcgttggatttttgctcctcataattgtttgagtaccccaaacggacacttgaaaaaatcgatttttttgttttcggggcagtccccccgaaccgatgcgcccagatttatggggagaccgaatccttccggaatagcttccctatagcctgtactttaattctgcgttggatttttgctccccataattgtttgagtaccccaaacggacacttgaaaaaatcgatttttttgttttcggggcagtccccccgaaccgatgcgcccagatttatggggagaccgaatccttcgggaatagcttccctatagcctgtactttaattctgcgttggatttttgctccccataaatgtttgagtaccccaaaacggacacttgaaaaaatcgatttttttgtttcattaaatatttttttcagaaaagtcatg

SEQ ID NO: 106466 - DNA, 296 bp, Heterodera glycines
tgtccatccaaaaattcttagaattagaaaaaaatatccttatcaccacccacagtaatgtggctctttgtcgtttagcctctgatattcttcctaatttagaccaaaactccaaagcccttctcattctctctgcctccgcaaaagaaaaatatttttccctttttgaacctttcatgaaaaatcttctaatcaaaactttagctgacttaatgtgcaaaaattaacacgaaaagaagccaaaatcattaataaatataaaatcaatgctctgaaaaacccccagaaagcagatg

SEQ ID NO: 106467 - DNA, 357 bp, Heterodera glycines
ttatttagtttcgttttaattacttgctgctggttcattttgtagttaataaatgcttaactgtcaaaacattaaaagtaattaaaaaaaagattaacaaattatttgaatgtaattttttttgcatatccactcgtacgaaaacggcggtacgaaaacgtccgccgtacgaaaacggcggtacgaaaacgtcccccgtacgaaaacggcggtacgaaaacgtcccccgtacgaaaacggcggtacgaaaacgtcccccgtacgaaaacggcggtacgaaaacgtcccccgtacgaaaacggcggtacgaaaacggcggtacgaaaacggcggtacgaaaacggcggtacgaaaatg

SEQ ID NO: 106468 - DNA, 91 bp, Heterodera glycines
aagtaaaaatcgtaattacgctcaaaaagcttctcaaacaattttagcgcttccaattccttctacaatcgcctttatacatcccattatg

SEQ ID NO: 106469 - DNA, 384 bp, Heterodera glycines
taatcatcattttaaaaatttaaagcatataaaaaatattaaaaagaaatgaattggccgaaaattccatcattgatcatataatgtaaaatttggacattttttaatataagggatatgttttaacaaaattagggaatacaagaaaatcaaatcaatagcgcaaaatttaactattgtaatgcatttgtaattttaatcgccttataatttataattttccaatattagataatatataaaatatacacacacaaaaaccaatccataaggaaaaaatcaactaaagaaattatgaataaatacaatatttgcataattaattttacattatcttttcttcaaaaaatttaattattaaaatttttccattcacccaaaatg

SEQ ID NO: 106470 - DNA, 397 bp, Heterodera glycines
aaaattcaattttcgaaaaagttcaaaatatgccacaacaccatttcaaatgcaggaattactatgttttgccttctgaatcgagactcctttttatttaatgcatttggctgcatattttgaatttttcgaaaattgaatttttgttcgagtccgggtcaggggttcgaaatgggccgaaatgatatcagcatcaaattctacggcccacataaaacagttttatttcgaaactttttttgaaaattttctttttcaaaaaaggggggtacaaagtacactattaccgagcctgggaatcatacaaaaatggagcaatagagcagttcgcgcacaataaaaaacaatgtaataaataaagcttaaggcttagcctagcacccaaataataagcatg

SEQ ID NO: 106471 - DNA, 649 bp, Heterodera glycines
ttttttttggcttccaaaacttcatcgaccctggttcttttattttctttcaaatcgccccaatttttttttacagctaaactagcccctattaagcttatttccagaaaatctcgcatgaattctcatttttaaattttttatagatttttaaatgttggattttttttgcttaccaaaacttcatcgaacctgttctttctattctctttcaaatcgccccaaattttttttacagcttaactaggcccaattaagcttatttccagaaaatctcgcatgaattccatttttatttttttaatagatttttaaatgtttggatttttttttggcttaacaaaacttcatcgaacctggttctttctattctctttcaaatcgccccaaattttttttacagcttaactaggccctattaagcttatttccagaaaatcccgcatgaattctcatttttaaattttttatagatttttaaatatttggattttttttggcttaccaaaacttcatcgaacctggttctttctattctctttcaaatcgccccaaattttttttacagcttaactaggccctattaagcttatttccagaaaatctcgcatgaattctcatttttaaattttttatagatttttaaatg

SEQ ID NO: 106472 - DNA, 508 bp, Heterodera glycines
tcgtcaatcgctccccggtccgatcattgatcagatcaaaggccaaaacggacacatcttccaacgtaacgtaaaacagagatgtcttattaatgaacggacgtaaaaagcggaagacgatgatgaagcagacgggcgaagaagcggaggcaaaagccgaaaaagggaaaatcaaaaacatttaattaaaatagtatttgaaataaagagaggcacgaaaagctttgattgggattttcgctttcatggattcatcatcgtacagtactattcaacacccaaattcccttgtcgggaaatcaaatacatttataagcattaagggcacgaaaaccaaattttggataggattttctcttttttggggaggcgatcccagtcaatgaattttataagccctatccgatccgacagccatacgtgagtatgcgatcaatcgaagcgatggacaatctttgagaaaggacggtgccacctgacgacaatcgcgcattgggcacaacaaatg

SEQ ID NO: 106473 - DNA, 188 bp, Heterodera glycines
agtaaaagcgcgagggggagcgggtcgaagtccaaaatttcgtgggagtaaacccatgcgaattgatgatatatattttcttattttgctgtgaaaagtatgggattggcgccgccgggaaattaaaagtttgaggcaagttttggcacgtacattccttttacagtttcttcgtcgtcctcaaaatg

SEQ ID NO: 106474 - DNA, 638 bp, Heterodera glycines
taatgaggaattcgtaaaatccttgtcgcttttagaattgcaaagagccctttgagattagtaattaagacttgatttctgttttttgtttgtcatatcattaaggatttgtttcattcaaactttgggattagggtaagttgatcaaacgaaataataatttataattcatatattatttatctttcataactcgacagattgtcctagatctaaaattctgcaaactaaattttcaataatatatgatccttaaaataattatctagaataataatatttatgtagacagcgtgaaaaaaatatattataaatattttacctatgacagtgaatgataaacaaaaatgaaataattaaatagcattcttattcctttatgttttgttttattttgtttgttttccacgtctccctcttttattattttgcctccgtctgtcccaatgaccgcccatttccgatttttgttttgcaaatgtttggcaccaaatggcctaattgctcaattaccaacatttaaattgccttagaataaataattttattcaattttctctcactaatatttattattttgttatcactgaaaccattgtaaatgattgttataattaatacaataattacagaaaatg

SEQ ID NO: 106475 - DNA, 174 bp, Heterodera glycines
tgctgaccaacttggagcctcggccgcccccggctccagcgggtcgtcttccgcggttgccgcctttacctatattccctttatacgagaggcttttaaacacaatgctctccgacctttcgacgcatttcctcggctcttttttccgcccggcttttcctccgctttgaaatg

SEQ ID NO: 106476 - DNA, 515 bp, Heterodera glycines
cgtttaatatgtatagtagaagaagaaaatgatttttcattaataattttttgctccaattatttaaataaatttgggccttttaaaatatattagctgtgcaagaggggagggggtcgagaaaaaggaagacgaggcaaagaaaaggagaaaaatgagaaaagggagcggcaagatcaaagaaaaggtctcgcatttgcgtttcgaacgcaaaaaaagtgggacttgaaaattgacaaatttccttaagaaatttcgctaaaattttccaatttttctgcgttcgactttgcaaaaaaaaaatggtcgaacgcaaaaatttgccttttttaaaaaaaacttaaaatttccaatttatcgactaaacaaacttttttccttgcgtctataatcctagtgtttcttaaaaaaggagcggtacaattaccgtcggtaacttttctataaaatttggtttgtatctgtaatttttttagtttctacggtttattgcatataaaatgggtttaaaaatg

SEQ ID NO: 106477 - DNA, 194 bp, Heterodera glycines
catcagttcttcaccatggactacgattactcgacctttggccgttcaatcagcagcaacctcgttggtattatccgtcgaacggtgccgggaattgcaattcaatggtagcaaatggataccaacaacaactgctgcagcagccaaataatcttatcaacaattccttttatctgcagaccgaatttgcaatg

SEQ ID NO: 106478 - DNA, 533 bp, Heterodera glycines
agcaaaggacgaagagcaattgggttggagcgacgaaaggcgtaaaaagtggagaggaaaatggcaccgaagaggggccaaaggggcagagagaagggcagccaaagggacagcagaacagcggaaatgaccgcgtcgacgaacgcggacaaaacagccaaagcctaagtcattccgtcttgggagtgccgaattgggcacttaccacgacgcgttcattggctttgacattttggcacggatactccgcttcctcagaaagcaaagccttggaatactctgacatcagaagaaggaaaacggaacaaggctaggaggagcaaagttgggctaatcaaagcaaatcccaacaaaacgactgatttattcgagtgggggttgagagggaatacggatgaatgaatgagcaaaacgggcatttgctctcttcccgcgtcgttcggctgattttatctcatcggaggcgaaaatgggcggggacagaccaaaggacggcagaggaaaagcattcgaacgggaaaaataaagaaatg

SEQ ID NO: 106479 - DNA, 1003 bp, Heterodera glycines
tttaatcattaagcaaatactttaaaaaattaaaaacgtccaatatttaaatgacattttttaaaaaataaaaataaaacccgttttttaaatgggcgttcactcatatttacgaaaaaattttggaaattcgtattcatcaatccttttcagaaaaaatattttttttaaaatagaaatttttaaatcatccataaacagaggttgtctcaggccaaggacaaggacggccccagccagaggggaggggggagggcatacgcggggtacgtaccctcctcaagacatttttaactatattatttccattagaattaattttgtttttttatgaaaatgcttaattgacgaaatcttgccatttgctaataaaagaaatgataaatacttaatcaaaatcttatttttcccgaattttagtgcctgattattctaaaccgtattttaaagaaataccggtttaacacgtatgacattatccaaattggcatataaaatttttggcacttattttcataaaataagcctcgtcatttaattagttcaaaataaaataatgtccattgattctttgggctaggccacgtgacctgctggacggaatgccagtaattaattttgacaatttggacacttcagtgaccagccgttttgtgagcgaaagctaatcaaatgtgtcttctaaccaaaatggtaaagcaattaattttttaatgatttaatttttgacaaaagtaatccaataaaattaattttatgtatcgagagggtattttttcaaaatacggatcaagataagcaaataaaacaaacttagtttttaattttttagttcacaccattgtttcctgtgcatggtcaagaagggcacctcaccgattaacattaaacttgaaaattttgaaaaatcttttaaatacataatctctttaactatgacggcattttttgtaaaaatatgcgaatttgctaaaataactatattttttagaaatattccatg

SEQ ID NO: 106480 - DNA, 162 bp, Heterodera glycines
aaattttacgagtttatacccctacacttgaaatttttaccaactatttacgcattaaattatattttttttatgtggaaaattccactttctttcataaataatattatacacacgcaaagttaaaaaataatttttaaatctactcgatcaccacaaatg

SEQ ID NO: 106481 - DNA, 56 bp, Heterodera glycines
ggtatacgttttttaaacttctatttgaacaaaaaaaaatgtttaggggaaaaatg

SEQ ID NO: 106482 - DNA, 95 bp, Heterodera glycines
tcaccaaatcattcctccaacagcttacccaactcttaagtatgtcctttatgtttatttgttccttatttttctgttttaggcatttgaaaatg

SEQ ID NO: 106483 - DNA, 82 bp, Heterodera glycines
ctgcttctgctgataatggtggaaaacgtgaacagtcgtcaatcgtttggccgagttggaaattttaatgaacggtgccatg

SEQ ID NO: 106484 - DNA, 744 bp, Heterodera glycines
tgtgtaatgtttgcatgtacgttcatgtaaacaatgttcatttccgattctgcttttttaaattaaaattaaaagaattaaaattttagcataatttttttcaaattgttaaaaattcaatcagtttaagtgccgctttgaattcgtttgatcggcaattaaatcttttcaatgcattaaatatattctctcagatttttcccgaataatttacatgggtcagggtcattcattttcggcaatttttgctcacatttcattaataacaataattaatgaaaattggcgcctcatgtcaattttgttcctcactcacatcaagcggagatgggtcgcgcggataagagaggaccaaaaatggcatttagatgaagatttgtcaaggtcaacaaacagaaacccaaaaaaaaacaaaaaaagaataaaataaatttaaatttttttcatatgccattaaaaatgcccaaatttgaagttttcaaaatccaataacccatccaatttcactgaaaatttaatttgttatgtgcgtatcaccaaatttgaccaatccatctcttgccccccatattcatcgcgcggtgaattggacggggtcgtcgtaaatgaatgggcgtcgcggcgggggcgccgccggcacaacgcgccataaatgcccaaaatttgaatattccgtccgccaagcgagtgagtggcatacggtgaagagggtgagagagtggggaatgaattaaagacaggatg

SEQ ID NO: 106485 - DNA, 229 bp, Heterodera glycines
atttaatggccattttcggcctccaaaaagtcaaaaaacgccaaatttagctcattttttgaaatcaaactcactcatttgacatcatttatttttagtaaaaattggcattttcagcccccccccaaaaaaaaaaatcaaaaaatgccgaaattttgctctattaaaaaaaacaaccactcatttgactcgctttcctcctacaataggccaaccgcctcaatgcatg

SEQ ID NO: 106486 - DNA, 565 bp, Heterodera glycines
ttacggggcagctgcctcacgagccatgcttttggggtgcttccatacgttggagctgtggtataccgctcagtgctgcacatgtgaaagcctgtgtatggctgctgcgtggcaatgtgtcggtggcgggccgcctcgcttggttggttcgctgcgccaatgtgggatgcacgctcgtggggcgacctaacggctgtgctggcgtctgtgcgtcgttgagcggttgttgtggcaggcacataacacactgactggggatggtggtttcgttcccggtcttacgtgccgtaactagcggtgtgtttgtgcttgctgctacgtccgtggccgtgatgagacgacgcggtagggcccgtgcttggcctagcacgtggcttaagactcaatgagtgtcagctcgggcaccgccagctttttctttttttcattatttttttacacttctgttgaagaatgaattctagtcttatcggtggatcactcggctcgtggatcgatgaagaacgcagccaactgcgataattagtgcgaactgcagaaaccttgaacacaaaacattcgaatg

SEQ ID NO: 106487 - DNA, 148 bp, Heterodera glycines
ggtcttaaaacatttataaattgatttaacgcaaatcagcatctttcaggatttgaacttgttgtattttcgtatctcgtgggacttggaatttctgaaggaagcacaccaacacgtgatcccttccgatgcattcactcgaaaaatg

SEQ ID NO: 106488 - DNA, 662 bp, Heterodera glycines
tttcctggatttttgtccaggaaatccaggtccaggtccaggcaaaacacgaaaaacctggattttcctggacaaaattttagaatttattatttcaagtgaccaatgtttttttaaattttcaaaaaaagattaaattaatttaaaaatacattattattattattaattagatatttttaggtgtttctaagcaattaattaattttttcaaacctttttttgatttttaagatgagtttcaaaaaatccaggtccaggcctggatccaggtctcgaagagcctggatttttcctggacctggattttcctggatttttgtctaggaaatccaggtccaggtccaacatggaatccaggtccaggtccaggtccaggcttttttcaaaataccgatctctagaaaaaattaatgttttatttattagggctgaaatggttttaccgagtaccgagaccgaagaatgacaatgagtaaaaaaccgagaccaagaaacgtgaaatcataaaatccgagattaactttttagtttttagcaatttcaattttagtacatatgtagaatttctcctctcggtgatttcaaaaacccgagacagagaagtgaaaaattgagaaatttaattcgagaaccaaaacatcccgaacagccctaaaatg

SEQ ID NO: 106489 - DNA, 146 bp, Heterodera glycines
ttcaagaagaatgctcaatttgcaaaataggacacaaatttatactctaaaattttagtcatgcccattaaattcaaatttgacaccgcccattttagcgaaattgaaacaaccggccaaaacccaaattcattttcgtcaaaatg

SEQ ID NO: 106490 - DNA, 218 bp, Heterodera glycines
tcttctaccgtccacatgccattgctaactcgccagttgtctatgagcaaatctcctgtcccatatgggaataccgcttgcgcacttcactcaaactgtcggtcaacgcaaacttcacgaaagagccgtccgtgtcactcacacccggcattactttccgttggaaggatttgagcatcacacctattgcctcttcggttcctccggccccaatcatg

SEQ ID NO: 106491 - DNA, 429 bp, Heterodera glycines
aataagatagaattaacaactataattggatataatatatataaccacataacattatgtcaatgttgtataaatatataaaagttatagcttataacaaatttttctaccggttaattactacctaaaaatgatctaatttatattgctgttcgagagtctcggcctcaagtctcggtccatgtcgcaagtctcggctttaacctttttgtttcttaatcaatcgctttaacatttacaattaaatatataagaattgatagaaagatgattatataatttatatctggttcattattttaaaaatttttttgaaatttatttaattttttagcagatttattatcaaattatgaatttacaaggatttttggaataaatgacattttttcatttttgttttccaggacaagtcataaaccaaatatg

SEQ ID NO: 106492 - DNA, 424 bp, Heterodera glycines
aaaaaattttgaatttaaaaatttatatatgcaattttgattttttttttttttaattttttttatgctcaaattaaaatacttttttttgtatttttgcatcaaaattttttttcaaaagttcttataaaaagttaaaatttctcgattttcaagagtgtattttttcatttttattgcatttttcttatgaaaatttgccaatgaccgaaatatgctttaaaaacgaaaaaatgctttatagccctaatcataaggtacagcggggaaaattttttttattgaaaattattttctaacgaatctcttcaaaattaaaatgagtattgggggttttcgagggcgctaatcacgaatccgaactgggatttgcccaattccgaatcccggacccgaataaaaatgaaatatttttccagggatg

SEQ ID NO: 106493 - DNA, 843 bp, Heterodera glycines
acggacgaagaagacgcgtccattgagatggaagtcatgtgatgaatgtgcagatttgttacatttaaatgttttttctttcctctgtgaataatatacgctaaaatgagttcatctctttgcattttctatttatcggttcatttcgttaatttcgttaattttacggcaataaattataaaaatggagtcaaacagctattagaaacatttctgtcgttttctgtttgttcaattgaatttcattttcgcctcatccactgaatggaaaagcttcaatgccttcgcacggttcgctccaaaacagcacattcagtccgttcgcttccaactgagcgcttttgtttttgtccaccagcgcaacggcacagcctccccagccggcacctgtccatttagacacttctcggcctcccccccttttcagaaatttgtaaaattgaaaataatcttggagcgaacatttcctgaggacttacagacccggaactgaagtggctaaatacctttgggactgaaccgcccactgacttaaaacaaaggcacaaaaatcccaataagggcatttaaaattttttaaagtattaaatatttctaaaacaattactaattaatttccttttaagtcccttcactttggccatttccgattcgttttccggcgcttcctccaatggcgccgtgcccaaatggcaccactattttttggcgggttggcgcggcattttggagagtttggcccaacgggagggtgtcaacacagaggcagaagccttacaaagagttttagcttcgaaaataatcaaaatttcattgtttttttgtgcgtaggccaaaggaatg

SEQ ID NO: 106494 - DNA, 194 bp, Heterodera glycines
tttttcatatcgtttttacaaatactttttttacaatgtgcaaattaatttctttttcattaaaattatcgtaaattcaggtatttgtctttaaattgttaaaatcattgcccgtctcgaacctgcaccatatatatttgtgcgtttctgtttattaaccatttatttttaggggtaatttctaaatttagatg

SEQ ID NO: 106495 - DNA, 1003 bp, Heterodera glycines
caattttaaaaataatttatacgactgcataaatttcttttaatagatcacttacacttattttaatttaaacgaattcagtaatcatcaattgttccatttgttttttaattttaattttaaataattaataatttaagaaaaagtgaaaaatgaatgaactgtaaaattgtaaaattaagcacggctttgtaagttttccagcctggtccgtggcccaatttgttatgtcattttctgtgcgagaaaatgcttattgtaagagtgacattaattgtcgcattaaaaatgcggttttaagatattagctttgtcttctttagactaaattattgtgataattaaataatgacctcatttgacttttaaagttttaattaatttggcattttgtttatttttttgtgtctttcattttcattttatgttttttggctctcttcgcccggacttaaaaatttgtgatgcggattgtgtgtggtaattttaatggtacttttaattgttgtgttgtttaaatttaattgattgggattgctgtggctttaagtgattttaaaagtcttccttctcattcttctccttcgccccgttttggaattcggcaaaagagcagaggaggaccccggcaaaaaggcggctaattttacgacgtggcgctcctggaaaaaggtgacgatcaacgcggtactatccggggcatttgtagactataagtccgacagcgtctccaaaaaagtgaaaagtaactcacaagctgcgagattcggaaaagtgaaaagtaaatcacgagttggaaggagtgtaaaagtgaaaagcaaatcacatttggtggagaaaagcggaaagaagtcgacagttatcagctcggtaaagtaaaaccgtcaacaaagctgagtttttatcaaaacggtaaagtaattccgccgcttcgatatccgacattggcacttcgaatttgaatttggaagagaaattgaaaaacggcgaagtaaagccaatg

SEQ ID NO: 106496 - DNA, 259 bp, Heterodera glycines
atttcctaaaaatttttgcgcgctgacatttttaatacttaaatccatctaatcataatttaagccagcttgtaatttgctttctattcagattgaattttataaatttgtacacgcttttgtattgacaataaaaattagacaaacttcggaccgaaataaataattcatgtaataacaatcaatgaatatatacattttcatctaatttgttgtttatttgattttcattgctttcctacagaatatagtgaagatg

SEQ ID NO: 106497 - DNA, 1003 bp, Heterodera glycines
tgcaaaaaagccaaaaatttggaagttttttattaataaatttttacaggctagaaaatcttttgctttttgcaaggctaaaatagagcacgtgaagagctttcgaatgatatcaagatcgttagatttggttaacaacaaaaaaagttatcgtccgaaaaaacagaagcctgatttaataaattaacgcaatatttatattaataaaatttgaattaatatcagttcacttattttcttcaattatttgcagaagatatgtatagacagactcaactgattttttaattttttcagaatttagattgattattcccatgttcaccgtaattgttccatattatccccccccccccccccgtatttaaggggtgctaggtcatttcttaaaaactgccactatgggcgtttcttaaatactgccaagttgtagtaaaataaaaaatgtaagacatataaattcgtatcttggcccaatttcatccaaattaataattattggtatcattcaatagcattaagtgttgtctatcagaatagaaattttgaaaatttttttacaaaattttaaaaaagttatggtcataaattttcaataaattttcagtcaaattattttaccagaacttttttaaaactcgatggaattttttaaaattttattcataaatagagaattcttaggactatcgaatatataaatttattttctcttaattgcattttaatgccttgaaaattttaattttttctggacaaaaaattctgacttaaggttttgtggagttgaataaccatatctttttatatacttaagtaaaaaatttaataaaataatattctgatagagaacacctatagctattgaatgataccaagaattattaatttggttgtatttgagctaagttatgaatttatatgtcttacattttttattttcctacaacttggcagtatttaagaaacgcccacttggcagtttttaagaaaaacgcccatg

SEQ ID NO: 106498 - DNA, 511 bp, Heterodera glycines
cgtacactgaatcgtcgtcatgaatcgtcggcactgaattgaccggctccgtacaattttattcaactttgtagattttttcattcaacaataaaatgaataaataaaaaatttcactttgtttgatcaagcgctagaagactttgtgtttgtaaatcatcagatgcctcggaattccgatttccgaaaatttttcaaaatattctggaagaaattcgataccattttccggtggcaggtgatttcgccagtgagtgaattcgccagtgagtgatttcgccagtgggatttcgccagtgattgatttcgccagtgagtgatttcgccagtgaactatttctctttttctcggcgtctgtatttgatttcgccagtaagtgaactcgccggtgattgttttcgccagatcggaccaaattcatcccatgggcaaattaatactaaagataaactgcgtgccgatttgccaattgaagttagggcagcttctgctccttcaccatcaaatatg

SEQ ID NO: 106499 - DNA, 125 bp, Heterodera glycines
agtttgagaataggttaaggacatttcgtccccaagtcctctaatcattcgctttaccgagtataactgcttaacgagctccagctatcctgggggaaacttcggagggaaccagctactagatg

SEQ ID NO: 106500 - DNA, 70 bp, Heterodera glycines
ggtgccgcaaattatcaaccaatttgctggaaaattgttttttttcagaaaaaattagtgccaaacaatg

SEQ ID NO: 106501 - DNA, 351 bp, Heterodera glycines
tttctgagttcaaattatcaaaccctttaatttttctcgatcaaacatttgacacaatttgggtaattgaaaattaatattaaaaaacaattttttactgatgagaatcaattgaaattataaattttttattgataacaatcagtgattgttaagcatatttgcaaaagaaggttatctttttaatccctcaattaatattttgttttttaaattttctaattagataaaattaaaaagagaaatttgaaaattattaaaatttcccgaaaatgtcaaatctatggacctttcattacccgtagaaaaaatttgattgcttagattcaccggaatggcattgtgtcaatg

SEQ ID NO: 106502 - DNA, 226 bp, Heterodera glycines
gctgaaagttaaaaaaaagtgattaaaaatgaatgaaataaatgcgattaaattgcaggaaaactcccgaaaaattaataaatttgtttaggaaaaaagggctcattcattgtcagtaaattctagaaatttaagcacatattccggaaaccaaaaagggtgtccaataaattcagaaaattggcctggactaaattgaaaaaaaaaaaattcaattccagaaatg

SEQ ID NO: 106503 - DNA, 107 bp, Heterodera glycines
attaattttgcaaaaaataaataagtaatgaaaaagtcagaatttcgaaaaattttaaaaacaacaagcgttggcattttttcaggttaagttagtcctttacaatg

SEQ ID NO: 106504 - DNA, 1003 bp, Heterodera glycines
catttcttttgtttgcctttgttttccatccaaaaaataatttgcatttggcgaaagatttgtttatgttttttttgtttatgcatttatcgtcttctgagtttttagggatttgttgatcacgattgtccctttttattatatgacctttctcccaacattggcaacaaaaatatttgagtataaaaatggttgggtgcacaatttatgttgcatattttccaccttgactttttagcatatattttgtttgcataattttgcgattttatgtgtatataatttgcaccgtattcatgcgccttccacccccttgcacagtatgccaacccacaaaataatgtactgtatctgtatgacttttttttttactgcctttcaattgaaattcaattaataatttggttgattaaattgtcttcaattgaaatttataattgattccacattttctaatttcgaataattttgtgccgcaattccttcctctgataatttccgcagtttcccaatctctgataaaaggtgccgcattttcgaatgcctaataatatgatactgcgattccttcccatggtaatttccgcagtttcccattctctgataagcgattcctttgcctgataatttccgcagtttcccaatctctgataaaagttgccgcattttctaattccgaataatttgatgccgcgattccttcccctgatcatttccgcaatttccaatctctgctaaaaagtgccgcattttccaattttgtgtatttgattatgtcgttccctatgcctgataaaacagggccataatccctaaatcgttcacaatttaaacttttcccattcaccctttcgcgcatttgcttttctaattggcctatcactgatttagtgccattgtcatttctaatttttatcccatccattgtttgtctttatgcatttcaattttacaagtatactttaatcacatcatccctttattttgttagattaacaaaatg

SEQ ID NO: 106505 - DNA, 873 bp, Heterodera glycines
tatttaaataattgttgttttcacaatcagctttttgcaattgttgcaccgaaaagcgcctttttggcatcgatggtcattggatgggcatttttggaaaatgctttacatgtgttgggccaggatttcatgaattagccgggaacgcgctaaaccccggcattttctgggtgtttggcgtcagtgccagatttttccgcatttgatagtttagtcgatttttttgggtttttgaatttctatggtttttttaaaaaagtcatagacaaaatcatgattttttttaatctgagttctgattcgtaatcagagtgtttttctgcccctgagaaaaatgctttttaaaattttactatttttccatcgggaccactattctgctcttttgcctatatgtatatacttacatctaaatctgtaaaaccctgcgggttttgatataaacgaaaacaatttttttcattttgttgcttttacatatgtagtatttcggtcctccccccaatgttgtgaaaggcgtttcattctctgcgtatgtgatgggaagggagagagaagggggggggggggcaaagcaaaatggaaaatgatgaggggggggggggggggaagtgtagtttacaaaaaattaggattttcttgaatttttaagtcttattaatcataacttttgatgctgaatcgcttagcttttgcttactaatatcttctaaacacgtagagttttcgaatgataccaattttgaagaaattaacgaacgaacaaaaaagttatggccattcccgtttgaagttgtatgaaacgccattgtacgaactgctaccgacccgttggtggtgctgctggacggaggggctgccacgaccaaaatg

SEQ ID NO: 106506 - DNA, 139 bp, Heterodera glycines
ggtaaggcatttgaaaagtcacaaattcgtcatttatttagctaacaataaactgttttcccacttcagttggatttgcaacgacgtttggatggacattttcccctgttttgatcgtccccaactcggcctcaaaatg

SEQ ID NO: 106507 - DNA, 161 bp, Heterodera glycines
atttttgatgttccactttccaatgcaggatcaaccgtgtggagtgttggggtggtgtcggtggacaacgggtggtcaaacagactgcccaagggtcagccttcgcgtcgttcaatctgtacaccaatgtggaccgtcggctgtccagcgggggcacaatg

SEQ ID NO: 106508 - DNA, 1003 bp, Heterodera glycines
aatttatcaaatttataaaactaattttagtattttttattttaaaaaaatattttcaataataaaattcatcaaattatttttacggtttttatttcaaaaagcatttcctatataaaaaatttagttgatttgttaaatttatttttactatttttatttcacaaaccattttcccaccataaaatccattaacatatatgtatataaaacgttttttttccttttgcacagtaaattatgtacacattttgtggaaagattttttccctagataataggcaatttaatcgtcgtgtcgtcctccaatcccaatatatcccttcccattcattcattctttcatctcatttatgtggtggtgctgctgttcatctgtgttagttagtccgtccgtccgttctgcttgccacaccaaaaaaactttttgccatccatcccatcattatcatattcgttttgcctttgcctttgccctccgcccctcccccaaatgacagaatgccaatatgtattttttttgattttttcccccaacattatgccaatgcaaatgaatgggatgggatgaaatgagaggggggcagagagaggaagaaggacggtttacccaacacaaatgtacacaaaacattgtggttgggtgttggattgtgtgtttgttgtgtataaaattggattctcaattccccattttgctcatttacgccgcggtacacattgaaaaaaattttttgagtgaattctgctggtaaatttttttttgaataccacctaaatttgaaagatttaatggatgtctcaattcgtgctcctctccattagggaaagtttttttaaatggctaaaaaggctcataaatcgggaattgatcaaacttcaattaacctctcctttgttaatccgttttgattttccataatttaaaaaaaattgcacttatttaattgatttcagaaaaactttccacgccttatcatcccctaaacactttgtaaaaatg

SEQ ID NO: 106509 - DNA, 564 bp, Heterodera glycines
tgttgccaacaaccggaaaaacaaccggaagatttcacgtttcatgttgtcaacaaccggaaaaacaaccggaagatttcacgtttcatgttgccaacaaccagaagatttctgcatatttgggcctttttctttttagggcatagactcgcaaattgcgaaatcataagccatgcaatttcatcatttattgcctatgccatatgaatattaatattatttgtgcatcagtgggcgtaaacggaaattaattttaatcgatgtttgaatgttgttgacattcattctttcggcaagcgtttttttatgttatttaaattatttatttttttctgactggcacagtggtagtgagcagagatggcatggaattccgatttccgaataaatttttttcagttgatcaaagcgcaaatgcatttttttaaatttatgcctttttaattttattggtataccttcgaattttttaattgtcccattaaattgttcttttgaatttaattttaatattttcgcaaaaataataatttaattgacttaaatattttttagaatataatg

SEQ ID NO: 106510 - DNA, 778 bp, Heterodera glycines
ataagtccgtcgagattctcgactccattgcctcccgtcccggagtctcagttgggtctctaatttcctggaaaacactatcatccctaagctttcgggataattctcgacattgggggtcaaccctcgggtcataactggtctgactgatcagctgatttaagtgatcagaatgatgccacctttcccgcttcttcagatggcgtgtgtaaagaagcgcccattgtgcaggtgaagccccaaacttcgcagccccaatcgcccgcggcgcacagtccgccggcacagccgacgacgcaacaacgcgccaaactgttgaccaccagaaagtaagaaaatgccaaaaaacaaaccaaaatttgaatcggaaaaaccaactcacaattcatagccaaggggagggattaaacaattaaaaaaggcaattatgttaattagcagactgacaaaaatgccataatttattttaaaaattctttaatttacgtctgttttgctaatcccaatttgaatagatttaactacgctttttgaggacattcaataacattgcttaaatgttctatttgtatgccaaaacgccaaactttttttttcgtttaaccgctgcccctttaccgtatttacacaccatttcttggccagctccgcttcgccgtccccaatgcatggtacggtagtcgcttcgccgccgtccccgctgtttggtacagtaggcgccgcgcccgtcagtccatcgtcggttggcggagcggcgaccgcccgtggcggcgctatg

SEQ ID NO: 106511 - DNA, 1003 bp, Heterodera glycines
tatttggcatccaagcagaaacgcaagcgcagaaaaagggattggaactgagatgaagacggacggggagaagcagaaggttgggcgagagggtggacagcgaattgttggagaagtcgaccctaaagagtaattattgagaggagactgatcagtgatagggaaggatgaaaggactgatcagagacggaattgtaggagcaattggaacatactgatcagtgatcgagagaaagaattgatcagagaaggcattagagggtaattggacaatactgatcagtggtccgaggacgggggaaaggactgactcaaaaagaagtgagttgttggagaaggcgcccggggacacaaattggagctttggattgttggccaatcggacgaattgcaaatttggcaatgcggcgaacgcccgcctttcgaccaaacgcagaaaatgacagtcgcaaatttgaagcgtctttaggcgaaaagtgaagcggattaattggttaatgtatttttattgcctgaagcattggctgggccaattccccttcggcaattttctcgatgggatttccgctgaaatttagcattcgcagggccacaaattggcggatgtccggcggagttgcggtgaaattattccaggaaaggtcgagagattccaactaaatttaattttaaaaaataactgaataatttaattacttggaaaagtggagaaaaggagtcatagtcgaatttgtggagtcgattatgagacaaattcagaagacggagatgttgggcagcgaaaaaagacgaactctgagggggggggggggagtgatcagagaaaggaaggacaaaatcagactctgatcactttgagaagagtgaatcactcactaatgagccaaagatattttggtggataagcgaataattaattagtcaattaattattaattttgctttggataattaacccatagattggtgattttgtgacctgagctgaggccaaataattatg

SEQ ID NO: 106512 - DNA, 537 bp, Heterodera glycines
acctgccaaattaattattaataagattatgtattgcccttttcccgaccctcaaaaaatgatgggattcggagtttttgagaaggcattatacagttaaatcttacttaaaattaagacatttttttgtgcaatttgattttcggcttttattctgagtttttggctaacggaccatctcgtataaaaacggttgttaatgtaaaacaaatgtcagaatcatttttacgcaaatttttattttataaatatattaaaatgaatattgataaggttaagattggggggtttcaaatttctgaagtgtatgtatgtacctgccgaaaatttggatttttgactgcatttcttcccttcaatttggcccagaaataaagattaattatgtttttttttaaattttaatttagaattcgatttcgttggcgatggagcacggtcaagatcagcgtaagcatataaaatacaacaaattgtttttcttttttacgcattcattttcaaaggcatttttgcaagaagtgtcccaccggaatg

SEQ ID NO: 106513 - DNA, 192 bp, Heterodera glycines
ctccccacccccccccccaaggcccctccgcacccgaattttttaaggaaaaatagtattttttgctgaaaattttagattttccctggtggtacccccccccccccagacctagcctcaaccaaattttccaaaaaatttcgctaaattttcaaaaaaccgacaatttttgatgaaaatctgctaaaaatg

SEQ ID NO: 106514 - DNA, 603 bp, Heterodera glycines
tactttgttaattagtgcgtgtaatcatcaaatgtaattcacatgaaaaacacattaattaacaaaaaatgaatatgcttaagtaattcaacgaaattttattcgcctattaaatcattttttataattttttcttcaacaaaacgtaaatataatcacacaacggaaccagtccatcaattaattacgatgtaaagcataaaaatagaagaagaaaatgcagtaattagctttaattcatatgaaaggcatgcccattaattaacggaaaatgactatttaaattaggcgtaaaaattcaatttcttataattaatgacgaaatgtaaccatcaattagtcttttttcctgtttggaagcattacataataatatcaaaaaaaattcccattggctttaattttgttttgtcttagtgccaaagtcagccaaggtttttatttatgtaaagattttcaaaaaaacgaatactttttgtcacgattctcgaaaataaagtcccaaatctcgagaccgaattagtttagttacatgataattaatattttaaataatttattaatttagaaagaaaaaagttatcatctataaaactgataatg

SEQ ID NO: 106515 - DNA, 236 bp, Heterodera glycines
attataacaattaacgataatatagcttaatttagaacaataatccacatatgattatggtaatcaaaaaaacattaaaattttttcaaaagacaaagacaactttgtaatataatgaattttttaatttcaataaatgtgtgttaaactcaaaattaactttccaaccttaaatggattattgaaaagctaatcgaaatttttaaatttattttagcccatttcttccggcaatg

SEQ ID NO: 106516 - DNA, 75 bp, Heterodera glycines
ttctatgccaattaattgattaatatttgtataattaattatttattcgtttataggaatcgataaatgaaaatg

SEQ ID NO: 106517 - DNA, 490 bp, Heterodera glycines
tttccatttaattttggctactgtattttttgattatgcctacagtatcggtgatgccgttcttcaaatgccattgcttaaaacgcaaaaacatcaaaatttgttgaaatcaaataacggacgaaataaattcttgcaacattatgaagtgaattaaaatttttgaaatttcatttttcgtcggctattagtaaaaacatggggccttcaaataaaatttcaaaaaaaaaaccgaaattcaaaggcgagagaataaacaacataattagcaatatttcgggaagttttggaaaaacctcttactaaattttcgaaatattttggtatttaaatgtattccaagagccataaaacacataaatatagaaagaattttggcaaaaaaggacagttatgaaatgaagtttgaaattgagtccctaaaaaataattttcaaaaaaaaatatttaaaatatagtttagaaaaaatttttcatattttataggatg

SEQ ID NO: 106518 - DNA, 385 bp, Heterodera glycines
ttctgatgatgaactacaattaattttttattgtaattattagcatttttacatgtcaattaagaaattttattaatttttctatattccagttgagtaaatttagtttctattatatcatttttatatttttaaactcgatttcaataataatattaaaaatttgaatatccaattaatttcaatcaaaaaatagatgaacgaagatagtattgagttattctaaataatttaatgattttaactgcaaaacaataagaatttaaccggagtgccaatttccgaaagtctttttgtgaacaacaaaaagcccttggcatggcttcaaacgttttgttgcaggtgtcaactatttttatttaatccattttttataacaaggatg

SEQ ID NO: 106519 - DNA, 825 bp, Heterodera glycines
  unsure (1)..(825): unsure at all n locations
ttcatttttagtccggttntattgatattataattgtttttctattaattataattattgggtttattattgctaggctttttttttgccattattagtaaatttacttttttggcactcgtaaatcttccatcttcctttttcaaaggttagctttttcttttatatttaattggtcttttaattaagcaattttactgatttgttaaaaaacgtgctggtttcattttaaactctttcatcttattaaattttggctgataatgaattttcttattttgcttttagtgaatttaattgaatttccgtcggttttatttaatctgttaattaaattgttttactaatatttttattataattattttcttgatgtctcgcaaaaagttgtaccaatcaatcatattgttttttatatatgtattggttggtaaatcgaaattccaattaataaagcaataatttattcagttaaattttatgaattattaatgtttgaactctttgggtagtaattttttgctttttaaattaatttttttatataccgactttgtttgtctatatgaaatagattttttaaatttaaatttaattaaaatcaaaaaaatatattgttttatttaattctttaattaaaatcaaaaaaaatattgttttatttaattctttaattaaaataaaaaaaatattgttttatttaattccttcgtccatttttatttacatttcaagtcaatcttatcgtctaagactcgtttggacaatagttgaaaattatttttttttattttctcgagttttcagtgcctttcgaatcaaatg

SEQ ID NO: 106520 - DNA, 902 bp, Heterodera glycines
  unsure (1)..(902): unsure at all n locations
atttatgagaaatctgaaaaaagagatactattgtgatgaaattactactaatatttgtcatttgatatttgagaataataaatatgaaaattcatttttaattatagatacaggcaaatcttgatcagcatttaccagggctgtcaaaaatatgcaaatgcatttttttcctgaattctacgtagcctatgaccaattgttactctttagttagtttggcccctcctgcttttctacatttttgctttacggggggcggtccctttgtactctccccgccccttatgactccgcttatttaaactcttccctttgaactcccctttccacttttgtcggatccggatcccgaccaacctcccctttcccgttacgagttggagaatcacaatgatgtatttaatttcagaaaagaacattggaaagtacgcacaaacgaatttggaaaaaatatttaaatgcgtggcttttgggacagaatttgaatgtttttgaacaatgaagctgataagattctgttgggaattcgtgaacatttctaatttaatgatgagtgactttcgananccaatggggaaaatgagacttattgggaaanagttggagaatttaacggccaaattttagaacttcaaagaattcccgaaatattaatctcccataatgaaagcaaaattgaaaataaaagggacaatgatcaaaatggggatttaatgcaaaaacagagcataaatgctattactgaaaaagatttgttcatgagtatattcgatttaaatgaagaaattaataatgaaaaaggagaaaaaacaaaaacgaattaaaaattaatgacaaaaaatctaatgaatgtcataaaaacatggattttataacaaaaagttttagcagcgagacaatg

SEQ ID NO: 106521 - DNA, 387 bp, Heterodera glycines
cgtgtgtcccaatttcgagaggccgaatcttataaatttaaaatgtcctttgatttctaagatttgtcctttattttaaaattttgttttataattttgggaagttcaaaaattttataatggaaagatatttgtttcgaaaaccaaaaaaaaaacagcaaaaactttctttctttttttgtaaatttaagttttcaattttaaaaaatatatttttctttcttttccaagagtttgctgagaacggaatttcgtcggacgccaaggacttcatctcaaaactgctcattctcaaaaaagagttagttttttttgcgaggggggattttcaggaaattttcgcgagaatttccaaattttcaccccttcccccttaggcgtcgaatg

SEQ ID NO: 106522 - DNA, 555 bp, Heterodera glycines
  unsure (1)..(555): unsure at all n locations
agaagaattcgcccatttttacttaaatganntaaatagttgaaaaagtttttcaataaaaaagaagactttaactgtaaaaattaagaaatttttgacgttcgatcaagaagtgatccctgctgaacgtgatttttggttcttttccaatattttttttttataacgaatccatttttaagtctgatgagtccgtttcagtcccagctgtctagtcccttgtctttgtccttttagtttgtcctcttgtctgtctcttaattcccaaaagtgcaagaaaagaagcgaaaaacgaaggccgccctatgtcccatgtcactttgccctttgttttgcctttgccttcctccgttcggttgctcagtgccaaccaatcacagctgtccgtccgtccgtctgtctgttcttacaaattagttctatttgctgagtttgctatattgcattttgtttccgcgttctaattttgtgctttaatttcgaaattcctcttctgaattactgacaaaaattgtactttagggcctaattctgactacctaattttgcgaaatg

SEQ ID NO: 106523 - DNA, 97 bp, Heterodera glycines
ggtgagttccttattcctttcctgtttatgcgtttcttctgctgtttagaatgttcctcctcgcaatccttaccaccagaacaggaaaagcgatatg

SEQ ID NO: 106524 - DNA, 217 bp, Heterodera glycines
ttttcaggtctaatcgcacaatggtctgacattaatttgcatatatttgaaaaaaatatgtaatttactcggatgtctgctgattatttgatgcgttgtaacaggaaattaattatttagtcaatacaaaaatataaattatgcgtttctcgtcaataatattaaaattatattcatattaaatattatttccattttagttttttatttttctatg

SEQ ID NO: 106525 - DNA, 84 bp, Heterodera glycines; identical to SEQ ID NO: 101616

SEQ ID NO: 106526 - DNA, 416 bp, Heterodera glycines
ccttaaccttgtatttttttattttattttttttaactgaatattattatttaataaatcacatacttttattttacttataatttcatttatttcatcaaataaattctctgaaactgttaaaatttcgttaacagttaataaaaaataaataatatttgttgatagttttttcatgatagctaataggaattacaaatgaaaatgcattttatgtattaaaaatttatttgcattttataactaaagaaatttttaaattgaataaatatataaattaataaaatcaatcaaaatgattaggaaatccggcagaattaataaaaaaaataagcatttatatttaattttcacatgaacattgttaacgtttaaatttcatatatgtattttctagggttgcacgggtcccgatg

SEQ ID NO: 106527 - DNA, 1003 bp, Heterodera glycines
taattatacggcccccatttcttttttccattttaaaatcgaaaattgtgaaaattcgttaattgatttgtttatttgacactgttgcagcactctttcctttcttcattgatttgtttattttttcatctttaagggctactgtaattattttggattaaaataatgatgcaaaaaattattcaaaaatcataaattacatttagataaaaaaaacattcaaaagccaaagggttagaaaaaataaatgtgcatcaaagtataaacattcattgagtaaataaataattttaattatttgcaaattaaaaattatttctttttttaaataataattaattaattagaacattttttaaaatttaataaataaatattatttaattatacggccccccatttctttttcgctttaagtcaaaaattgggaaattccgttaattgatttgtttatttgacccccttcccttctcgccacccgaactcgccatttcccttatccctcgctgcaacccttcctcgccactctcgctgccgagcaatttctcgccatttttctcgttgcaatgtactctcgccacactctcgcccccctgccactcgctgctgcctactctcgcccccctgccactcgctgctgcctgctctcgcccccctttccccgctgatgacgtcattttttccctttatgagagcaaattaatgtttatcatccattgccaatgtggccgagtggttagtgcgtcagtctggccgccccctctggggttcggatccgcttggtgcggggaatttttgatgaattttaaatgaatttaaattcaacgtctttgacctttaagacgtttaaaataatttaaaattaaataaatttaattaaaataatttgcataaagtcgcgcagtcaaaaaagtcgcgcaccccctgcaataggtttgggtttcaaaaaaaaagtcgcgcaataggttttggcttcagtactgaaaagtctggcgctcaaatg

SEQ ID NO: 106528 - DNA, 108 bp, Heterodera glycines
tgtaaataacgggcaagaaacaattgatttttaatcttaatttagtcgggctttttgttgggaaacctcttggcaacaatttatgctcgggcgctggttcataacatg

SEQ ID NO: 106529 - DNA, 936 bp, Heterodera glycines
aaattggcgagaagtgatgtcaaaaattaaataatttgaaaatgacttgcgtcccgccgtacattagtattaaccggactgcaccgtgttttgtgacttgaataattaaatttatttatttaattttatcgatcactgatttttttgtggaacgacctagtaacaccgaggggaacaacttggtgggggggaggagtgacatccattggatatttctttatccaaaataattcatcattttttttatcaattttcatattaatttctgtcggcatttatttatctttttttgccagtatgataaagaaatttttgcagtaaattttttttaaagcgttctgtgcctaagtcattttataagacagttatgtttggcattttctgacaatcattgctgataaaagcaaataaagttttgaaaataaaataaaaatgcaatataaacaaaaattaaaaatacgcgaaatggaaattctttctatagcttttattataagaaataattcgtatttccaatgacatttttggctcagacaatggtattatgcaatataggaaactacgaatttattgacagaaatattaaataccaattatttgcttaagcttcctttcccgaatctattataaaaacaataagttcctcaaattgtaaagcatattttttttggggtccaatttaaatgcggggatagaaatacactggtaagattttgataaaattaactatttttgatttaaaatctgataataaaatattcgaacttcagagaatttttactattaattcaagaaagttttaaaatttgaccaaaaaccgcacaaaaaaacaaagcgattcaaagaagtattttaaatattcaaacatttttctcatctttcttttccaccaatcatttccataaatggcaacaaattgtgccaactttcagaatg

SEQ ID NO: 106530 - DNA, 242 bp, Heterodera glycines
gctaaaagaaggcctctgatcagattatgaaactaatgtaatcttccgaaattcccacaattatatttattttatactaactcggctttaaataaaagccaggcaaaggaaagtattgcgaattgccttttattgggctcataaaatgcgattggacccttcatggaaattttttcaaaaacaaaacaatcaatcacaaaacaaaaaacaaaaacttgattgatatttctctattacagatg

SEQ ID NO: 106531 - DNA, 699 bp, Heterodera glycines
tgggtatctgtcatccggcacccggacagatttggaaaattgagatattgggactccaataaatcgtaaaattttaatcattcaataggatcaacggaaatagactaaaatatgttaaataaatggttgtattaaatagtgacaacaatgacatttagataattccttcacaaatctctccgaaaatgtaaagcaaaaatattctgacttggaaaaattagaaattgtaaagaaatttttcgaattaaaagcaaaacgagtagcagcgaaagataaagcaaaattaaatgagcaaattaacaaagaaattgccaacgaattgggcacaggcgtgacaacaatttacacttggaaaagagaatttaatattggtgagttaaatggcaaaagttcaatgagtaattaatgaataagtaaatttattaatagcatttagattaaaacatttatttaaaaaagtttactgtaaaaaagtcaattaaaaaaacacaaaaaattgattaaaatatgttcaaacctattcctattgttaaatatgtgaaaatgacaatatataatagcaaaataattaaataaaatattgaagtattaaatgtaattaatgaataaattaaatctattaataacatttaattacaaatattttattttttaattaaattaatgcttttctccgtttgaatatgaattttaggaatg

SEQ ID NO: 106532 - DNA, 122 bp, Heterodera glycines
cttaagttttacaaataaaactactaattttatcggaaattttctttttttctccggttttacttaaaatttggcgacaccctttttaagcccgaaaaggcatttaaatttgtgtcaaaatg

SEQ ID NO: 106533 - DNA, 329 bp, Heterodera glycines
ttctaatttccaaattgagttacaaaaccctgactatttctctccttaaatacctttttgtttggttaatttataccttttaatattagtaatgacacatttttcaattttatttctgaataaacattcaaatgaaaaatacaagtgtaaaatagaaaataaagagaaatgataaaaagaaagtatgcaactcttttgatagatttgaaggcatatcagaattcttagagttccctttgaaaaaagtgagcaaacacacccagggaacggcttcacccttcggtccccaatccaaacactcacgcaccaggctgtgcattacaataatg

SEQ ID NO: 106534 - DNA, 87 bp, Heterodera glycines
tgtaaatggaaattggaaaaggaaattccaaattcatttgaatttagcacggccaaagtttgtccaagggttggccaaccgggaatg

SEQ ID NO: 106535 - DNA, 581 bp, Heterodera glycines
aactgacactttttgttgtacgcaaatgcgtccccacattttgcttgttttcattttcctggttctttcaccactagtaattagagcagctgtttcctacgaaacccattcaggtttttcaactgtttttttatttgtttgtaattgtgagacacggttcattattattaattaatacggtttcaccacacttcgtttgttcttcttcccgaaatattcatcttcattaccactaagtgtttatcatattccttctttgaactgtccaaacactaatttattctgttgtctgttattgaatgtctatctgttatacctaattccatttgctgttaaatacaaacccatttcattgttgccaatttaccaaattacactttcctttagtacggtaaattctttcggttgttgcattgtattgttaaagttactgttgccttaatatccattcgaaaatgtggagaataaagacaatgcgcgaatttctttttttcgattctttgccgtcgatttccttcgatttaatattatttttttaaatttgattcttttttcaacacaaataactttgttaagcaatg

SEQ ID NO: 106536 - DNA, 86 bp, Heterodera glycines
tttttaatcagaaaaaaatcatttaaatgcctcaaaaaatgaattgccatttaattgaagaaaaataaaataaaatcttgaaaatg

SEQ ID NO: 106537 - DNA, 165 bp, Heterodera glycines
atttcggccgttattgggctgaagccaatgttgattaactgttgcataggaataaaatttgaagaaaaattttttaaatttgatcaaactgtttcgccaaacaattatttttgcatttaatcactcttttccttgaaaaagaacaccccaacagcctcaacaatg

SEQ ID NO: 106538 - DNA, 631 bp, Heterodera glycines
gagtaaaagttggacaaaatggtagacctggaagggaatcgaaccctcggcctttggtgcggtgatcggcttcccacccaaaccagtgctcttaccgtctgagctaccagaggctatctcccattaacgcttcccttttatggatcttttgactccgctttaagcgttttaaccgtccactagcttaatccttacaggtggatggacgatcgttcaatgagtttggtgagccttatactgtgaaagtggaaaaaacgcactcagtgaaaacattgaaatggaagatcagtcatgagattggcattttgcccaacaggcaaacactgagacataacaaccaatttgccattgtgcttaaggtatcttaacaattcgtacaaaggcaatttgtacaacacagggttggcttaggccgcagctttaggctttggctcaggccaaaatttgaggcttaggcttagacctaagtttgaggcataggctcgcacctaggtttgagggcttaggccaagtttgaggcttaggcttggccaagaattgggcttgcttggcctaggcgtaggctttatttgtaaaaaaattgttttgtacaagttaccattaactcattcttaaggacgagaaaaaaatg

SEQ ID NO: 106539 - DNA, 734 bp, Heterodera glycines
ttaggaagagaggcatggcaaagcaacaccacaacacattgatgatggatgggagaagagatacatttgggagggtgtgaaatgggcggatggataagaaatagcggaacaaaggaaatggaaatatgggagagaaagtgaaggggggggacatgggcaataatacgcacacccactcatcacacaacagtcatccatttttagttggattatttccatttttgtaacggaaactttcattaattgatagcaaaataaaaaagactatactaattatgtactaaaagaaaaaagatgagtgaacggcaactaaaaagttatgatgttttaagcttggctcagatgcaactgacccctaccgcacaaaaagggcgtttcgcgaaaaatgcaatttgaacaaaagagagcggccatatcagtacagttcttgtgataaaaataattttcaattatttcaaaatgtgtttcggcctttaccataaacaggcaaagcaaaccaagttataattaagcttataaaaattaagtttttttaattttaaaaaatcataaagaagcagagaaaacttaaaataatttaatttcgcccagccgttgacccgccactgtacaaaagaaaaactaataaaattgaaaaaattgagatttttaaaattatttattaatcattaattatttagagaattcatttagtattattttattttttggactatatatgatcgtccgaaatg

SEQ ID NO: 106540 - DNA, 311 bp, Heterodera glycines
tattcctaggactaaaaaaagaagttgtttttttgttggatttaaagtaaatcaaataaattaaagctaacaacaagaaacatctctattaattatggaaatttgtgggtattttctcatcagcaaaaaaaacaaacaaaaaaaaaaacaatgtataggtgagataaggacgaaatttgtaaagtatagaaaatgaaggatttaaaggatttatgtgaaacaaacaaaaaaaaaaagaaagaaaattaaacttggctaaatgtaattaaaattttgaaaaattataaaaaaatttgaagggctctcgaatg

SEQ ID NO: 106541 - DNA, 177 bp, Heterodera glycines
tttacccggccattttgctgctcgcccgcagcactctcaccatgcgtcgacaggactcctacaaaatttttgtgtttcttaaatcatctttaattaattcaaattttacctgtgtcgcttccacacagtcccgtctcagtctctgctgaaattttgttctggtgaaggagcacaatg

SEQ ID NO: 106542 - DNA, 72 bp, Heterodera glycines
ttttggtcaacaaaaagtatcgcctatttgttgattattaatagcgtcttctttcaaaaaatagaaaaaatg

SEQ ID NO: 106543 - DNA, 1003 bp, Heterodera glycines
tgcacagccctccgtctctacgcaagcgcttttgtgaggtataaaatttctcaaaaaaagagatagacatttttctgggattgagtataaatttaaaaattccctcaaaaataaaaggtctattgcgcaccgccctccctatcatgctcgagagcatttgtatgtgtataaaatttatcaaaaaaagagatagccatttttctgggatagagtataaatttaaaaattccctcaaaaataaaaggtctattgcgcaccgccctccctatcatgctcgagagcatttgtatgtgtataaaatttatcaaaaaaagagatagccatttttctgggataacctctaaatataaaaatcctctgtgaaataaaatggcgattgtgcacagccctccgtctctacgcaagcgcttttgtgaggtataaaatttctcaaaaaaagagatagacatttttctgggattgagtataaatttaaaaattccctcaaaaataaaaggtctattgcgcaccgccctccctatcatgctcgagagcatttgtatgtgtataaaatttatcaaaaaaagagatagccatttttctgggataacctctaaatataaaaatcctctgtgaaataaaatggcgattgtgcacagccctccgtctcatacgcaagcgcttttgtgaggtataaaatttctcaaaaaaagagatagccatttttctgggatagagtataaatttaaaaattccctcaaaaataaaaggtctattgcgcaccgccctccctatcatgctcgagagcatttgtatgtgtataaaatttatcaaaaaaagagatagccatttttctgggatagagtataaatttaaaaattccctcaaaaataaaaggtctattgcgcaccgccctccctatcatgctcgagagcatttgtatgtgtataaaatttatcaaaaaaagagatagccatttttctgggataacctctaaatataaaaatcctctgtgaaataaatg

SEQ ID NO: 106544 - DNA, 381 bp, Heterodera glycines
  unsure (1)..(381): unsure at all n locations
ttcattttttaaattgccattgcntcaggtcaaaattaaaattcgatttgcgtcggtcgcctttttcgtctttcgccatgaattatttctcttttcttattcttttgaatattatttttttgaatttggccctttcttccgcaatcgaagggacggcaaacgaagaaagcggtaataaattaattagaaataaaaattaataaaattgaaaattaaatatttttagttaaaagacaaccgaaaaagacatttaatgtttttatgaccaaactcaagaaataaaataaaagaagacaaattcacgagacgaaataaaaagaaagtaatgaaagatggacacaaaaacaaagacataaattttgatttaataccatcaaaatg

SEQ ID NO: 106545 - DNA, 1003 bp, Heterodera glycines
tcaaaaaatagtcaaaaacaaaattgtcaaaatcagtcaaaaaaaaaaagagagagaaagaaatcacacattcaaaaatcattcaaacacaaaaaaaaaaaaacgttataactcacaaacaactcaattcaactgttattcaaactgtactggtccaatgtctacactgcgcaagatgctttcgagtattaaaatcctgacagtattacgaattattaatagaaaaacatttaaataattaactcaaaaaaaaagataaagcaacaattcaaaattatgcaaatcaatttaaccaaactcctgccaaattgccaaatttaaaaatagaccaattctccaaaatttcaatcatttcacaaacataaaatttaattattttcgatattcaaaattcaaattcaatatctttttaacaattaaaaacgcaaaattgcaaaatttttctcacgattaaaagccgattcataatcagatttaaaaaaagagattacttattccgtttttctcacgatacggcgaacaaatttcaatttaatgaaaattcacagcgctcattctttattgcgattaataaacatgatatgacttccgccaaagcacaatcggagaaccgacctttcgcattaatcactttggaataaaatgctaataattattattatgactgacaataactcattaaattaaaaaaaaaacacaagttaaagcagtcaaattttttcaattcaaaataatcattagtcattaaacaaatttagacaaaacaaaattatcatttctattcaaaatcaatcactctcgccctcaatccccgaacttttataaatttacgtttctttcacctttacggccacaaatcttcaactcgtcagagactttagagtctattaacccgcaaataaacatggaattcggacaaaataatgatgatgcgcgggtggaagtcgtagccatagaccgacaattttgggcgggaaaaacaaaagttacagtagcagacatg

SEQ ID NO: 106546 - DNA, 584 bp, Heterodera glycines
ggtggcttaatggggtttttctctttttgctcgccggaaggcgggcgttttgctcgcgggaaggcgggcgttttgctcgccgaaaggcgggcgcattgctcgccggaaggcgggcgttttgctcgccggaaggcgggcgcattgctcgccagaaggcgggcgcatttctcgccggaaggcgggcgatctcgccggaaggcgggcgttagctcgccggaaggcgggcgttttgctcgccaaaaggcgggcgcattgctcgccggaaggcgggcgttttgctcgccgaaaggcgggcgcatttctcgccggaaggcgggcgttagctcgccggaaggcgggcgtttgctcgccggaaggcgggcgttttgctcgccggaaggcgggcgttttgctcgcgggaaggcggccgtttgctcgccggaaggcgggcgtttgctagccagaaggcgggcgtttgctcgccggaaggtgggcgttttgctcgcgggaaggcaggcgttttgctcgccggaaggcgggcgttttgctcgcctgaacttcgaaataaaccgcttatttttcagctttgctcgcatcgccacatg

SEQ ID NO: 106547 - DNA, 480 bp, Heterodera glycines
cccccaaaatgatcgaaaaaaaaattatcaaagtttcgaaaaatcaataagattggtcagattttaaaaactcataagtaggtaatgatattttatactctaaaaaatcccaaaaaataggcaataaagaaaataggctctgaaaagcctaaaatttagggtataaaattacaaatttttcagagtaacaaaattaagccaaagcagtattgagataaacaatttataaatgaattttggagatccatttttgagaaattgtgattcttagggatgctttttaaaacttttcgggtcgtttctcaggggtgtattttccgtttttaatgaatttttgttaattttgggcactaaatatcattcctatgaaaatcgtactaaattgcatattttcgctggtagttttattttatcgattttttctgataggtttgggtgtcagggccaaaaaggccggaaatttacaaaagcaataccatg

SEQ ID NO: 106548 - DNA, 106 bp, Heterodera glycines
catccggcacaccttccgtgacggcagtgatgagcgatccaatctgaaggtgcgcagtttccgcctctcctactccgtcgagcagctgctcaactttgacgccatg

SEQ ID NO: 106549 - DNA, 127 bp, Heterodera glycines
tccttcgcttcgaggattttctttacgttcagaaattttatgtcaatgcatccaaattggctgcttcggttatttcgattatttctttgacctttcatccccactttttcagatttatttggatatg

SEQ ID NO: 106550 - DNA, 232 bp, Heterodera glycines
ataaaatgaaattgtccaaattccatgaaatttttaaatatcagttatcatttttatgcaaaacttttatgacagttcaatgatttactgattaggaatcatttatttatttaaatgattcaaaattttgtgattttctgaaaattttatgccccaataagtggaagtgaacattggccaaattgctgggcccggctgtgccacccagaccaacaaataccatcgcaaaatg

SEQ ID NO: 106551 - DNA, 849 bp, Heterodera glycines
tccccataattcacgagtgggatggaataataacctttattccgaaggtggatcatacaaatatgtgattgattagttggggaagggtgaaccgattcgtccggggcaaattgggggagaggtggaattggaagagttcgggattagccaattccccctcccgaaagagtgaatggtacaatgtgctggagggcagcaaaagacttaaagtgggcggagcagaaatgatcaactaatgagagattagggcatactgtacttagtaaaaggtctacggtaaacacaaaacaatgagctacgtcacaaggaaaatgcttaagaaattctttaaaaaaaagttcgccaaaataagtatattagagaaagttaagcgagactaacgtgaaaaatagactttttttgacaaaaatatttcaataaatcacaattaaatgaataaaaatttaaattccctggcgctggcgcggaattatacattcagtaaatatttttgaaaaatcgttagtcaaaaaacatcaaatggaaaatttttgacataaaattattcataacttcgcccaaaattaagcaaatattaagttcttgatatatttcggtagctctatgtgttcttttatccttcaaaatctcaaaaaaattcgttaagtttaaaaaaaaaaagttatgacccgaggaactcaaaaaaccggacatacaatccactaattaacatttgaattcaaaaattgaaaataatcattttacgtacaaaatctgttatcaaatcacgattaattctcaaattcggacccccatttttatttatttatttattttttttgcaaaattgacctcaaagtggcaaaaatg

SEQ ID NO: 106552 - DNA, 293 bp, Heterodera glycines
ttgctgttgttgtcgctgttgtcgggctggctttgtgggtgcttgatgtgtgatcgttgagagcgttgcttgaagtgttgctgctgctgagtgaggagaatgtgcaaaatccacctccttatatacaaaattcgggtgcaaaaattcatgcatcaaaaaaaagtgtataaaaggcgacggttttcttcacttttcaccagtgccagccagccttcaactcaacgcaacatcaacaccagtgcgcgccaagctcgtctacacatttcgtcgcgacaactcatcacttcatcatg

SEQ ID NO: 106553 - DNA, 67 bp, Heterodera glycines
  unsure (1)..(67): unsure at all n locations
ttttagaanattttatccgtcaaatcggcttttggaattttaatgagtaaatcagtaaccgtaaatg

SEQ ID NO: 106554 - DNA, 183 bp, Heterodera glycines
attgaattatctgtgtcttaagattttggcgcccatttttcatgctacaaatcaactccaaaaaaggactaccaaagtttcagtaacaattccagtgttccgtgtcatcatttttgccttagaaaagggggaagacctaagaaatgtcagaatttcaataatagatgggttgaaaaaaaaatg

SEQ ID NO: 106555 - DNA, 131 bp, Heterodera glycines
tggcggcaccaagcccattgattttgccattaatcgccgactaaataattcacaaaaatgtgtaagaatttaaattgtttcttttaatttaaattttgtatagccaaacattcattgactgattaatgatg

SEQ ID NO: 106556 - DNA, 186 bp, Heterodera glycines
attttatttattattacgcgcgttttacccatttaacatattaaattttctgcgccaaaatttcaatcgaattaaatttcatattaacttaattgatcattcgttttctcaatttcaaagcttttgcttcttgcggtctcctttgagttgccatctcttaattaggctccattttctgccaaaatg

SEQ ID NO: 106557 - DNA, 80 bp, Heterodera glycines
ttacaaaatcccttttattacaaattgaacatgcggccatttattttgaaaattggcattttatagggggacaaaaaatg

SEQ ID NO: 106558 - DNA, 299 bp, Heterodera glycines
ttccattccggtcctggtatgtcgtccgaacctttttccgaccagctccttcagtgccttcactcggtcctcaggatgattgagcttgtcgcggagtgatttcggggaacagccgagaatttgggcacaaaattcgatgacaaggaccattgtagcagaacaaatgagacatagctgacaaattgctggggcttttatactcccagaaaattaggccacgcccacttttgaaagctatttaagccgagattttctcacacaatcaaatcattcttgcaaaatcatcatcaacaaccatg

SEQ ID NO: 106559 - DNA, 288 bp, Heterodera glycines
tcttgaaaagggaaacccgatttagacagggtcagtaaaacaaatccatatttaattttctttatcacaccccctttttgcatattttaatacaaaatgtataaacctgtttgacacaatgcgtttttgccgagtagacaatgaagaggacaaagtgaaaaaacataatcattctaatgctaaataaaaatttaattaattaaatgttaatatttttatatgccgaggaataaacccgtttctgtctttactcaatttaattgatttacaatccctcctctccctatg

SEQ ID NO: 106560 - DNA, 284 bp, Heterodera glycines; identical to SEQ ID NO: 103000

SEQ ID NO: 106561 - DNA, 835 bp, Heterodera glycines
ttaaggttttccaaaaaataaactaaaaagtctcagtaatattttttctctctgttgtcattttgaatttttttctatttatctgacacagaaacatacaactatttgccccccttaattaatttattttttgcaatttaattcattaaaaattttaaattatgtaaattgggtggcaaaaaaaaatttttttttgtagccagtaaaattggtaatgatcaaaatgggcaaaatgggtttgccaaatgtgcacaaatccatgagtttgctaggattattcctctgatcaaactccagcagcagttcatcttccctgcccttatttgttaggggggggtgatcaatttggggaggaccatcttcccccgtgggaatgggagggatgcttccaagcggaccttgcgcgggggatcaataaaaaaaattccatctcacgacggtgggattaatgggcaaccgatggacgacgacgattggtgctgaatggaatttcaaacataatattttcaaatattagcaatttagtgagccaatcaaaaccatagagggttcctaactaatttgttagcaaagccaaaaactatcatttattttccaaatgtgaacaattcgtgtcaatgttccatcaaaaatatatatgggtcaaattgtgccttctgttctctccaaataaatttcacttttacgtgcacatgtacataagaaaacgtgaaattacaaattacaattttgtgggtctaaaacgatttaacttttacgtacacttttacacaagaaaacgtgaaatacaaattacaattcatttttgggtacatttcacttttacgtgcacatg

SEQ ID NO: 106562 - DNA, 101 bp, Heterodera glycines
atgacaaatgtttgggcttttatcttttgtgcttccctccgaaaaatggtgaaaatgggagaatttctaattgaattaattaattttgattgccaaagatg

SEQ ID NO: 106563 - DNA, 500 bp, Heterodera glycines
aaaattaaaaaaaaatttttttttgttcttttttatcataattgttttaagtaacaaataaacggtgaattaggtatgtgtttattgggtacaattcagcgatttgtgaccacaaattataaaaaatatccggtcctccaaattgcttacgccacaaaaaatccgaaatatatgtggaaaaaagtgatctgtgactgccaaatctcactttatgctcatctttgaacttctgccacgtcgattcaattgtatttgtatgttgaccagtaacagaattgttacttaaaacaattatgataaaaaagaacaaaaaaaatttttttttttaattttgaccaaaatataggatacaaaccaaattagtacccttagggttgacggtgaaaggaattcctggtacttatatgggttcgtacgccacaaatttaaaattttataatcatctaaggttgcttcgaaagtcacatatatggttttcaggggcgctgaacacgattatg

SEQ ID NO: 106564 - DNA, 67 bp, Heterodera glycines
agtaggaaatacgcttaaaaggagaaaataaatcgtcaacccccaatatttgttttaggcaaaaatg

SEQ ID NO: 106565 - DNA, 102 bp, Heterodera glycines
ttgccaaattttatttcgcatttattttttcaaattccctaaattcatgtgaaacgacgggttgccgagacagtgcacatgcgacggatcttagccgaaatg

SEQ ID NO: 106566 - DNA, 263 bp, Heterodera glycines
gggcctcgcgctttcgggacgagaaaatgtcggagccatgcttttttcggggtcagctattatcagggttgggctagattaaaccagcaagggtgggggttcgagtttggcctaggagggccgggggggggggttactcagggctggttttttttttgatttcacaccgctttttgggatgagccttaaatattttatatgaaattttctaaaagatttcgcactaaaaatgatcaattttagaatttttggctaagataatg

SEQ ID NO: 106567 - DNA, 121 bp, Heterodera glycines
cacaattttatttttaaaacccctcaaataaatattaaatatttatgaagcatatgactaaattgttaaacctaatattttaatgagcatttcttaatattttttgaaattatagccaatg

SEQ ID NO: 106568 - DNA, 328 bp, Heterodera glycines
ttgttttactaaaaatgaaagaaatgaaataaaataatcaatgatttttaatattgcattaaaaagttgaaaataaatttaatattgttaattaattaagaaattaattaattaggtaattactcgtttggttgcgccagtagatttgtgtacaacaaatagattgtgtataacggataaagcacagaaagaatcaagagaacggcagaataaaatttggcatttctttttctatacctaaaacaaattaagtaaataagataattaatatttctttattatgacaattaaaacaattattattatcagtttaaaaactgaccaaatg

SEQ ID NO: 106569 - DNA, 135 bp, Heterodera glycines
  unsure (1)..(135): unsure at all n locations
ctttgcttttataatctgttttaatggaaataaatttcatttaattataatgtgatctaataaattaactttacattttnaattagatgcattatacgcattttaaacttcatgatttttaggtacctaaaaatg

SEQ ID NO: 106570 - DNA, 477 bp, Heterodera glycines
aaattttaaatttttattacaaaataacaaatgttgatttctaattgtttttcttatcagaaatgataattacttaatgttttctcgattaactaggaaataatccaacattcattcttctccttcaccttattttattgataattttgttcatattttaatttcgatttttccacaattatttgctttttcaatcaattaattaaatcactccattactttttatttttatgttttacttttattattttttaaatcctttttcctcttccgcctgatgatcgttcgtctctcttttgtcgagagtgattaaaattaaaagggacggacggaatagtgaaaagaacgaaaacagtcattcttttattataatttactgcctgcccatttttcaataaaatattactttatttatacataaatttaggaaaaataattttttgaaatttattttatgaattttattttttcagcatg

SEQ ID NO: 106571 - DNA, 425 bp, Heterodera glycines
ttttctcccaatggcatttagttatttatttttattaatttagcaattaatttttaagggattggtcaaatgttcctgtcgaattggaaccgctaaatgccgttccattaaacccaattgtgtgcctttggccaccgcccaaaattggccaatgttcaatgaatgtaatctctcctaagtttcctgaacaaaatgccgcgtttaatactaataaatttacatataaaacaatcagtgaggaattaaaaattggtaaaattaaaaaaaattttgaaacttttgaaataaaataaaattcagccaaagaaaaattaaaagaaaatcctcaaaattggaaaagaatttttgaaaaaataaaatatgaacaaaaattcaaacatttcgctgccattttctgttgtgaagccaatttggagaagcaaatg

SEQ ID NO: 106572 - DNA, 305 bp, Heterodera glycines
tatttttattctattcatgaattcccgggggattttggggtcccttatcatgaatttgtcaggtatttgaccaatgccgatttcctaacctattttgcattgataaaattcaaaataatccactttttaactagcgcccattaatttctgttatttgaagcgtaagaattgcaaatttagcgtttgggagaaaaatttgcaattttaaaatttataattttaagcttactgttgttagcacacatttagtaaaatattttggcattttttaaaatccgttccctattaatcactcagatgcaatg

SEQ ID NO: 106573 - DNA, 402 bp, Heterodera glycines
ttgtattgtactcaagcattgaaattggtcaaagtaaaaaaaaatggcaaaaataaatttaataaaataaattttcgtaaataaatattttctaacttttttttaaattttcctaattttttttaaccccattttttaaaagtaatttacgtcaattatttgtttaaattcattttgtttttgaaattaattatttagcaaataatatttctctttaagaattatgatttattaatttttaattatattttaattattaatgcatttttaaaaatttaattagaacacctttgtttaaattcaatttgtttttgtaaataaatcatttcgaattattattttttaaattttaaattttaaatttttttaatgttgctttaaaaatttaattagaatgccatg

SEQ ID NO: 106574 - DNA, 375 bp, Heterodera glycines
aatatctcttaggaaaaatttttgaaaatacctaaaattaaatcaaaatctgaattgatgcgcgagtggttaacagtgagtttcactgccgaaaacccttgagaaattttgatttgaaattgcaaaaacaagcgatataatttatgaggaataaaattttttatttattttttttgtgcatatttggcaattttatttgcatatttatgtacatattttggtcatttttcgtgcatattttttgcagccctgattattaataataaaaatttaaatctattatataaacgaacataactatcgcctttttcccaaaaaataaattttaaaaacacaaattttgatttttaaatttagcaccaaattttaaaaatg

SEQ ID NO: 106575 - DNA, 428 bp, Heterodera glycines
ataataaataattaatgaaaaagtcagaatttcgaaaaattttaaaaacaacaagcgttggcattttttcaggttaagttagtcctttacaatggagaaggcctgcaaaatttggagagattatatcgattttagtgcgctaggttcgatgaaactttttaaaatataagcctaaactttttggcctgtttaaaaaggaattaaaaatttttaaaatatttattcatctcccttttgatagaaaaagcatcagagagccttatttaacttttaattaacatttggtgcgtttcagagcactttctgaaaaaatacttatgaattaattttgcaaaaaataaataagtaatgaaaaagtcagaattttgaaaaattttaaaaacaacaagcgttggcattttttcaggttaagttagtcctttacaatg

SEQ ID NO: 106576 - DNA, 229 bp, Heterodera glycines
atattaattaactaattagttaattaggtgtcacaatttttcaattaataaactcttaaaaatgggggaagcttttcaattttatttatgcttgctaaataagccaatatttcattctgctgcacagatttggacactttcaatggcattccttcggttgtcgtcggcgccagaaaactgagcgaggaagaacggacggaatgcgcaatttgcctatgccaaatcgatg

SEQ ID NO: 106577 - DNA, 494 bp, Heterodera glycines
agataaacattttttggtcaaagaaattttttttgtttgcgtttcaaatatcgtaagattgtttgatagggccagacaagagaaggcaactgttggtatcaattttgcggtaaaaaaatgagaaaaaagagataaccatttttggtcaagaattttttttgtttgcgtttcaaatatcgtaagattgtttgatagggccagacaagagaaggcaactgttggtaccaattttgcggtaaaaaaatgagaaaaaagagatagacattttttggtcaagaattttttttgtttgcgtttcaaatatagtaagattgtttgatagggccagacaagagaaggcaactgttggtaccaagtttgcggtaaaaaaatgagaaaatagccattttttggtcaagaattttttttgtttgagtttcaaatatcgtaagattgtttgatagggccagacaaaagaaggcaactgttggtaccaagtttgcggtaaaaaaatg

SEQ ID NO: 106578 - DNA, 138 bp, Heterodera glycines
aaatttgggacaaaactctgggcggaggcagctctgtcgcgctggtcagatcagatgagatggctctttgtgagcatcctggtctatggccagccgagtaatgccatagaattgtggaacaagtacaaagaccaaatg

SEQ ID NO: 106579 - DNA, 566 bp, Heterodera glycines
ttggcggccatttcctttttaaaagtttccctttattttcaggttcctgtacatttcctttgtgagtctgcatttttttaaaataaattccatcgccgcaaattttttttttatttttcataaattttggtctttaattgaaatttttgaaaaaattttgtacaaaattccattgtactaactaccatgccatcacaaagcccatttgaaaaaaacttgttaagaaaattcagggaataaaaaaaaattgaaaacatttttcttgaaattttgagcattttatttttgctcttcgagactcgttttttcgccgtgttattttcaaaaaatgcattttcgtggcacagccggtgacagtttttgtggaatttgtttagattttgctccttaaaaagcaatttgcggtttttggcaaatgggttccccactttttgccttttatgtgcttaatgatcctttcaactttcccgataacatttaatcgcttatgagactgttaattgatcagtttttccctcctcttcgctccccaggttttcatgataccgaagatgaaaagggccatg

SEQ ID NO: 106580 - DNA, 492 bp, Heterodera glycines
aaggttcgccaaaatgttttaagccgataattcatttaaaaagtactgcaaaaatccaatattgtttttcttgatatcatataatttaactatcgaaaaatcggtttcatgtcagttcgtacaattggcagtttgttagatagaattaatacaatttttttaagaattttcaactaaaacttagaatttttttcaaaaatcaaataaatttagtttcaattttaaacatttttatgtttttttaatttcaaaatttattttgattttttaaaaaaaaatcaatgttttaattgaactcttaaaaaagagtgtttttttgtacgaaaattcattgtacgaaagaactggctattgactccgaaatatcattaaaatccctgctccccttttttaaaataatttgtttaacgaaaattatttcataaaatatttaatatttaaatttaacaaatcatctccatcattggttatttacaggtgaacgaactcatg

SEQ ID NO: 106581 - DNA, 1003 bp, Heterodera glycines
tttggaaaattggctatctctttttctgctcaacagtaattgttagagaaggaagtaattattgattaggtgtatgaccccacgccacttcgccatcttccccctcccattcccctcattcagttgattattgtgcccaccaatttgacctctccaatttattctctgcattaattattttatttatttctccggcaaataaacttatttaatttgttatcttcggacataacaaattttggcgcagtcagcaactcaacgacagcgtttattttccaagctttatctcgtgctgatattgcttgtggtgattcatcataaaccgatctttgccatattttacggcacggtttatcaacaatctgtgcaactaaaccgcatcttctatctctttttctgctcaacagtaataggaattccaaccgcattctcagaataattacgccgatactaattgttctggaatttgtttctcggcgcgtttgtttgggaaaaatttggaaaattggctatctctttttctgctcaacagtaataggaattccaaccgcattctcagaataattacgccgttctggaatttgtttctcggcgcgtttgtttgggaaaaatttggaaaattggctatctctttttctgctcaacagtaataggaattccaaccgcattctcagaataattacgccgatactaattgttctggaatttgtttctcggcgcgtttgtttgggaaaaatttggaaaattggctatctctttttctgctcaacagtaattgttagagaaggaagtaattattgattaggtgtatgaccccacgccacttcgccatcttccccctcccattcccctcattcagttgattattgtgcccaccaatttgactctccaatttattctctgcattaattattttatttatttctccggcaaataaacttatttaatttgtaaaaagggcatcccgatttatgccgcgagccgcctgcaacgctggtcaatg

SEQ ID NO: 106582 - DNA, 645 bp, Heterodera glycines
  unsure (1)..(645): unsure at all n locations
ttttctaggtttttatttntagagcctaaaaagccaaaaaaaaatttaaaaaaatttattttgaactattttggtgttttgcccaaaatttgttaacaaaaatgcaataaaaagcaaaaatagacccctaaggatcggtctaaaaatttttcaaaaatacactcctaagaatcgacaaccgaaaattaaaaaaaatacacccatgagaaataaaaaattttctcaaaaattcatttccaaaattatttatttatttcttaacaagaatttgtgtttaaaacattatttaactcaatactgattttgtagaatttttttacttttttgaaaaattttgtcattacactcctaaagttgagactttttagtgcctattttgggggtcttttagagcctgaagcctacctaccgtatttgctctttttatatgccatggtatattatttttcaacctcctcagaagggggtagataattggagattggtagactaatggagactgggagattatttttcgatgatttatttagtggaaaatttttttgaaatttattttgaacatgtcgccaaaaaatgtcatcgcgtcaaaaaaaaacatttttattgcatttatgttaaagaacttctgaaaatgactccaaaatg

SEQ ID NO: 106583 - DNA, 669 bp, Heterodera glycines
tgtcttgctgaatgtaattctcccacaaatgtttgttgttctatttaactatgccatatatatgtgtatttttaataattgtaatatgtttgccctgtttatccatgttttatggtcatttattctcattgccgaataaaaacggtaaaaaaagtggttgaagtaccgagtcaaaagctctttctattcgagatttaattgagacgagtcgggatttgttgcttaatgatccaatcaatcgcaaaatgcctttgtcattttgcatttcgacctcccttttccgtcattctctgttcctttggtcgggaagggtactgataaaatcccgatccatgtcgaacccgagcaattaaaaaaggatcggatacagaggtcggaattccggattaaaccttttcgttttttaatgcttacaaaacattttccatagctttttacaaagactttttctattctcagagattattaaatccaatttccaattgaatttttaagtaccatctcaattggagccattcttatttaggtcgctattttgctcgataattaataaaaaaaaagagtaagaattaagaatgagaaaaaatgaatagataaatgagtcaattataatattttcttttgctcttctccaatttttgagtcatcattttgctccttgaaaaaatg

SEQ ID NO: 106584 - DNA, 299 bp, Heterodera glycines
actgtgggacaaaaacggagagtgaattaagggatgaattgaaaatgtataacattctattaggaaatttcgacaaaaaatctcaaaatttcccacggcggcacctatcggcaccgcccggacccaatattcctataaaattttcaaaatttgacccaaaaattgtttaaaatggcaaaaaaatccctaaaccattttttgatagaatattttaaaaacggttaaaagcttttggaccgttcatatcaaaatcacttggggggaaaacactcactgtgtaaagactgccttcgaaaatg

SEQ ID NO: 106585 - DNA, 302 bp, Heterodera glycines
  unsure (1)..(302): unsure at all n locations
cgacttaaagtgaaaattaatatgcatttaaaanttattatttaatttactttttatttttatataaaatcgctaatttaatatntaatttgaaatttatttttaaactttttatgatttattagtntattaaaaaattatttatttttcttcaccgataaaattgtaaaatattattctttttaaatatatttttattttataaattntaatataactttctctacgatttaaaatcgtataaaataataattaattaaattcatttgcctattaaattttgcagaaatatcatgagaatg

SEQ ID NO: 106586 - DNA, 276 bp, Heterodera glycines
tatttcagtcccatccctttaaacagatcttcaaatggcgcattttcatcgatggtccgccggatacaccatagtgagtgggcggcggcggcagaggaaaagtgcaaatcaatcaaattaattgtttccccattaatccctcctctcccctttttttagcgcgggatgcacgtttacggcactgctcaaattcccagcttcgttcccgtcttatccgccaacaatgactttcctcaccgacattcttcatccgaacagtaagaaaagcgcgcaatg

SEQ ID NO: 106587 - DNA, 362 bp, Heterodera glycines
ctccataactttgtgagttcggcacggatcgagaccgggataagaccattggaaagagcagctcgagctctacaagaaggtatggaaagaaaaaatagttatttctgggactttttcagaaatcagaattaattctccaatgtggcccaaattttaggcccccagccacagccccttgcttctcccagttttaagtcttggatttgtcaaataaattcaagacttcaaattaataatcaaaaattctcttaaaatttttttgaacccaattcaaaaaaggaaaaaaatttgcagtcaaaaaattattcgaatttctccaattttgtttccataatttccgaaagttattcggtatcataatg

SEQ ID NO: 106588 - DNA, 249 bp, Heterodera glycines
aatctgctttgtttaacaacgattatcaaacggaatttattagatcaaatgaacattttttgtttttattaccaatttattatttgcaatgagcttttgattaaaaatgactttattaacaaagtgaattatggggttctcaactggtatttaaatgatgccatttttattataatttaacacacattggcattttctatttttatatacacactaattaattaaaacttgttagcatcctcaccaatg

SEQ ID NO: 106589 - DNA, 368 bp, Heterodera glycines
tggccgatcggattctgcgccacggcaatgtagagatgcagttgtgcaaactgctctcgcatcgttaaaacggactatttcgtcatcgtcatcatcatcggcatccccaccacctgaggaatcattgcccgcagcatcgtcgccaccatcaaaaaagcggaaattattgtccacttcggtaccaaaaggcttatcggaagtggacagaggtactgtaatgcttatttattattattatttataataaacatttgttcattttttaaagattgttcatatagatgccgcctctttgacaattgccgcattcaggcagatgaaacagctgctttccgaatggagatgggagaacgattggatcagaaatg

SEQ ID NO: 106590 - DNA, 105 bp, Heterodera glycines
ttttcgtacagaaacaagcaggtgaaccacgcccgaaacatttgggaccgggcggtgaccattctgccgagggccacgcagttttggctgaagtactcctacatg

SEQ ID NO: 106591 - DNA, 107 bp, Heterodera glycines
aggagccaaagcagaaagtcatagaaaagcagcagaagaagagcagaaaaagcgcaaaaattcgcactgatagtatctatgttggcactgttatagaaaatgccatg

SEQ ID NO: 106592 - DNA, 878 bp, Heterodera glycines
  unsure (1)..(878): unsure at all n locations
ttttgtgatattttgcgctattcttttttcgtttttctaaatgtcaactcagaaatgcncaataccttcacaaattctttctgttttccttggcaatataaacttttaaattcatcaaatctttcaatgaattctttctttttctgttcataaaaactctttttcatcattttatttttatttaaattcatttcttttttcatttgtatattttttttttgcgattttgcgcctaataatttaccaatttttgtctcaattctgcttctgttttcccaaagatattttccaattgccttcaatttctctttaattgcatcaaactttgtgataatttgtcttttaatatttatacgaaaatgattttatttgataatgtattgcatcaaatattatttaatttaactataaaaaattcaataaaaataatttatacatggcattttttaatgccatatgacaccgtcaaaaaataataattttaaatttttataatatgaaaagtttgaattcattttatttactcagccattttctgccttttaaatattttattaaaatccagcataaatggcattcataaatttgtttgattagttgtattggtaattctcaattatatttcactttcattaatttcatcatttgatttaaaatttaaaaaaaatcaattttattcaataaaaatcttattgtgataataaatgcattatttttaatttttttatttatcttaatttaaagaaataatttagcaatgaatttacttcaaattttcttatttattgttatgataaacgcacttggttgttcaaatggtattaaatttaaaataaaaaaagtaaatattaatctttctttctagcccagcttaaatg

SEQ ID NO: 106593 - DNA, 264 bp, Heterodera glycines
aaaagaaggaaaacaacgaaatgaagagaataaaagtctttaattgaaaaatattataaaataaaagagaaaataaaggaaaaaggaagaaaatatccaagaaaagaatggagtaaaataaacacgaaaatagcgaagaaattggggacaaatcgcacatatatccaacaatggaataaagaatttggtcttcaaaaaattaaatgctataaatcaaaaactgatgaacaaaaacttgaaattgttcagaaatttattgaaatg

SEQ ID NO: 106594 - DNA, 73 bp, Heterodera glycines
acgccgggaattcaaacaaaatacacaacggaatggtaaacatggaggaatcgacattctttgcaaagcaatg

SEQ ID NO: 106595 - DNA, 878 bp, Heterodera glycines
tgtcgtgccatttctgagttttttggacatttcatggaccttaccgaccctcccccccccctcacatcggcacttttttgccaaaaattccgacaattcaaattttgaatcctaaatagaagaaagaaaaatatataatgaagaaaatattgatagagagagtgtgaggaggagagagggaggaagagagagagagtgagagaaaactcattaagcccaggagaattatcaaaaaagattatattaaagacatttccggagttaatgaatggccaaaccaatcgttggcgcgggggacagtcaaataaatggacaaagtcgccccgggggatgtaattaaataataattatccgtctgtccttttttttggtttgttttttccgcgtggtgccattcaaaaaagcattacccttactctttaatgaacactggcagaaaatgataaattacttgaaaatttaaatttaaataaattgtctttctttttttccctaagcattgattaaataattatttctccttccccccccccccctccgttatgcttttgacacgttttgaatggcttttggaaagtgttcattttttcttctctctctaaaacaaaaccattttaatttactataaaatggggaaagtttaatacaaatacaacaaatgattaatggaaaacttttttcacattttcatatttatttataactggcaaaatttaaaatattattttaaatgtttttttatcggaaatttgccactttttacagccaatcactggcaaattcaaggtaaaggaaatattgtgtcaatctcttcatctcaatttgatcagcaaaacattcgttttgtttgcaattttcaaagaagaaactaataaatg

SEQ ID NO: 106596 - DNA, 501 bp, Heterodera glycines
tctgaaaacggaatgctgttctggcgttatatatcggttgaagtgtttttatggttttcctgagcatattcggtcgctattcaaacatctaaaattgaagtaaagtgaaagaaatactcctctccctctagatgaaaagtgacgttcaaaattgaaaaggattggagacgaaaatgttattcatccacttaaccctcagattccaaaagctgtgcatcagtgtatttgatttatagtacaaacataatgccaataaaggaaaataaatttttaattctttttttttccttagctagtgtataaaaggtggaccatttttgagttcttcatactaacattttatgcaactacctattttcttttgccgaaaagtgaggggcgccatcggtattattgttattatttcgaccacttcatttaatcgcttcatatattcgtttaatcattttttaatgaccattcctaatttagccaaatattcaaatataaataaaaccaatg

SEQ ID NO: 106597 - DNA, 199 bp, Heterodera glycines
ttgaccaggtacacctcgcacaacgatgggttaaatatcacatggaaactcaatttcctggcctcgaataaattaaccctggaaatctcaaagaaattaaaaaagattttctactaaaaattgacaatttttaatcaattttcctaacaaaatgcattaaaggctaccttatttttttgaaattttgaccccacaaatg

SEQ ID NO: 106598 - DNA, 1003 bp, Heterodera glycines
cattttataattggtagttttttcgattttgaaaataattttagaaaattaaatgattattgaaaaaaatatttctaaaaaataaatcatttaaaaataaacaaagctttctttttctcaaaaaatagcaaaaactttataaaattaaattttttttttcaaatcctttttttccttatatttagttctttccaatatttaatattagagttgagcgggaccgtgaattttgggcttaaccgggaccgggaccttttcgggttgaaaaaccgggaattttttgctgggaaaaccgggaaaaaaccgggactagtcccggtcccggtcaaaaccgggacttcagtactcagttgtactcagttgtccgtattcgggtcccggtcccgctcaactctattttatataaattaattctgtttataatttacattttccaaccaaatattttaaaacaattttatattctcaatgaaatattttatttttatatttttcataaaattttgcttacgtaagcgtataatatttattatttttaataataatagtaattagtcgatataaccaaatacaaaatttaattgtatgaattttcgcattggcaaattcatagaagcagaaaaatagtaataataaaatgtataatttatatttaatattgcaaatatatttaattgttgtctagttttgtttgttgtttacatcaaatttgctgcttataacattaataaattcaatatgatattattactttttcactgttcgacagaatcacaaatttattcattttcataaaataatgaaaaaaaaaataataaattcttttttttaagtattcatttattcagaaaataaaaaataaattcatatttatatttttttaatttaaaaaaatctaatacaaattaaaatgaaattcaaagtcatatctataaaatatatttttatttattaaatatattttttaagcataaattttagatttcaatatttggatgtaatg

SEQ ID NO: 106599 - DNA, 214 bp, Heterodera glycines
ccataattagtttgagtaccccaaacggacacttgaaactatcgatttttttatttcataaatattttttcagaaaatgctctgaaacaaaaaattttcaaaattctgagtctcctattattttatttttttttcaaaattttgaagggcgggggggggggcgacataagggatataaacatgaaaatagactttttatcaaatcgagtgcatg

SEQ ID NO: 106600 - DNA, 797 bp, Heterodera glycines
tattttatttccatattttagcatttttccataaacctctatgagaagggcccccagcagctaaattagcctttttgagcccaaaaaccgaaaaatttttcaaaaaaaatcattttttcgccaaaatttctcgagaatattgaataaatttaaattttcttaaaaattaataaatttatgtcaaaaataagcaaaaaagcgaaaatttcgcttttgttgttgattttgcgctaaaaaaattaataaattttagctttcatgtttttttttcttataaaatgattgcacagaattgccgaaaaaattcgagaccaatttccgaatgttgaccgactaattgccaaaacgaaagccgtctttgtcaaagcgccttaccgagtcaaaaaatttggaaatgtatctcatatgcaatttcaaccaataaatttgaagaaattttgcactcaattttgaaaaatttatgtccatattttgagatttttgccattttatgtccatatttcgcgatttttggtccatattttgcgattttatatccatttttttggcatccctactaattatattaaaaattcattgatttaaattcctttaatccaccgaacactaaatgcacttaaaaaattgaaacaacaattagttgagtaaaatgttattatatatcagataagaaatagacataaaaagcacaaaatttgataatcaaattgattttgtccctaataattaatttgtgtaaaaaataaataaataaatgacgcaccattccttatgaccttgatgtgacgtaaaaaatg

SEQ ID NO: 106601 - DNA, 80 bp, Heterodera glycines; identical to SEQ ID NO: 101884

SEQ ID NO: 106602 - DNA, 425 bp, Heterodera glycines
tttcaaagagtgacgaatagtttgtgaattatactatatcactctcatattacaaacaaataatgccaaattcttttttgatgggaatcatataaaaaagcagacattcatccgctttgggttttttaaacacacttttgacccttcttcattctccagcttattgggaaaaaagagggagcccatcaatgaatgcatttcataaatgttgtccagaaaattgagggaggtaaactcaacacttgagggattatggttaacgatataatcttaaagatcatagggatgctttaattttggatggaagatttagaatggatgttaaaattaatttttaaaaatgaactaaaacccactggtctaaaacagcaaaaatatttcttaattttttagacattcctcacttccaaacggtcataataatg

SEQ ID NO: 106603 - DNA, 1003 bp, Heterodera glycines
aaatagaaaaaatttttggcctgagcgggacatttgagtcccgggcccataactcgttaggggttggttttatcgaaaaaacgcattagggcaaaattgtagagttttttaagctctatcgaatggtgtgcatatggccggaaattttcaaaaattttcgagctaggccccctagaaattttcggaaattttttttgggttgaaaatgggggtcaaaaatatttttctggggtattttgatgtgctgagcacgaatatgatgtttatttttcgtttcaaaatttttggaattttttaaaaattcaaaaatattttccaattttttggcccacgggattttgggcgaatattgaaaaattcatatctagcctaaaggttgaccaattttgagcaaataaagcccttaaaaatagagaaaaatcaggagaattttatgggatttatttgggttttctaacatcaatatgaaaggaagttattccagaaaattttgaaaattttagatttttcagaaaaaaattcagaactcgcttctgaaaagtcattctgtaaaaataataaactacaaaaatccgcaatttttttctctataatataaattttattttacatttttatccctttttaaaaaaaagctcccccccccccccccacaatgttcccaaaaagttttttggaaccgcccacaaaaacgcgatttaaaaaattaatagattgttaatttattcaaaaaaatccagaattttgggactcagaaaatccaagattcccccccccccgcatgaaaatttaaaaaaaaatttctatataatggaaaaattcttcgaatgcctcccccaatgagtacatattttaatataggcaattttcgtaacaaagtgcagtcaaattttcaaattttttttcaaaaaaactttcacttgggaaaattttattgattaaattgaaaattttgaaaattttgtttttaaatgcgtggtccgcggccgcggcaatttgaatg

SEQ ID NO: 106604 - DNA, 167 bp, Heterodera glycines
  unsure (1)..(167): unsure at all n locations
ttcccttgtttctcncatttttgctaccaacaaatgttggatttggttgacaaagaaaatttctaaccttttaccttatttaaggccttagtttggactttttcgcgcttaaaaatccgttccctagtcatcattctcggcccaattgtgctaattgccaaaaaatg

SEQ ID NO: 106605 - DNA, 473 bp, Heterodera glycines
aaaaaacattttaaatgaataatgggagaaaatttttcctatttatagtcgaacaaattgaatttagttataatttatttaattttataatttatttttatttaatttaactttaatattaatttatttttaatttaatttactttaattaattttattatgattttaatctctttaattaattttatttttattttgaattttattttgaattttatttttattttttatttgtttaataacaattttttaattgttttgcgaacattaataatattcgatgatgaggagagtaaaagtataataaatgactgtaaaagagataggacaaaatgggagagcggaaagggttagagaggaaatagacaacaggaagggcactgggaaaagatacagtgcgcaaaaggatagagaaacgataatgtgagaaaggatagagggaaagtgacagctggaacggacagagcgaaatg

SEQ ID NO: 106606 - DNA, 423 bp, Heterodera glycines
tttatgaaatgacagaaagtactttctaacctgtatttcttgtcttttgttcttcttcctacacctttccatgcactaacatacctacctaccttacattcctctcggaggaaaacaatcgagtggaccagaatccgctaataaaaaaataaaatactcggccttaaaaacaacataatgtgaataaaccaaagccgaaactcaacgaagccaaattgtttttcgaagcacaaaattaaagtccaaaaagtctcaaaattttctaagcccgaaactctgctgccccatgttttaagcgtaggccgattcacccacacagccaaaagtgtatcatcatcgtcattttatacacgaacactcaaattaataacgtatctctccatctgtagaagactgagtaacgatacatttccggtgcatatg

SEQ ID NO: 106607 - DNA, 426 bp, Heterodera glycines
ttcattggcgaaagaaactcaaaaaattgaaagccaatctttttttaagcatttcttgtgaaaaaaatattgaatccaaaaaacgaagtccctttcttgtttggcattttcacggaatatgggcgcatcccctcattcattcattcatcaatgcccacccactcctcaagaggaaggaatggtggaagattcttagatttgggcaacgcgcacttctcttcccccccccccccccctccctctctttcttcctctctcttcccatcatctattcttcccctctcacccttattccctcacttcgcagacttcaagccctgcaaaaacctgggcgacaccgaagaattcctcctgcaactcgaacgactcacacgcgaactcaacaatacaggagaagacatcgaaggcccaccgaccttcctcatg

SEQ ID NO: 106608 - DNA, 799 bp, Heterodera glycines
ttttcgcgtgagggccattttcgcgtggccattttcgcgtgagggccattttcgcaaaattttttaattaatttataaaaatccagaattttgggactcaagattcccccccccccccccccgaaatgaaaatttttaaaaattttcttcgaattcgtcccccaaaacgaaactacaatatttatgggaacatttttgaatattggcaattttcgtaacaaagtgcactcaaattttcaaaattttttcaaaaaaaattttctcttgaaaaaattcccggttggtcccggcttttctcgcggtcccgatcccggtcccggtcaaaaaagttggtcccggtcccgacttttctggtcctggtaagtaccggtcccggtttttgtcaaatttcccggtcccgaccaactctagttataccaacctaaccttttaaaaagtacgaattagaaaatgaaataggaaaatttatcatacctaatactaacaccaaaatttcttattaatttttaaaaattctcaatagtgtcgaatttactcactgtcgaaatggtccagtgtcgaaaatgctggaaaacagtgaaagtttttgaaatagttcagtgtcgaaatttctctatgtcgaaaacgtagtgtcgaaattacttagtgtcgaaaatactcagtgtcgaatttacccagtgtcgaaattaccagccaccggaaaatttgtgggtgatggattgcttgagaaattaaaaaatggcggataacaatgcttcttctgctggcgttaaatcccttaaaatttagtgatgaaatg

SEQ ID NO: 106609 - DNA, 222 bp, Heterodera glycines
atgtggcccaattttaggcccccagccacagcccctttcttctcccagttttaagtcttggatttgtcaaataaattctagacttcaaattaataatcaaaaattctcttaaaatttttttgaacccaattcaaaaaaggaaaaaaatttgcagtcaaaaaattattcgaatttctccaattttgtttccataatttccgaaagttattcggtatcataatg

SEQ ID NO: 106610 - DNA, 1003 bp, Heterodera glycines
aggagaattttaaaaatgtgctttttacaacaactggcaaaacaaaagtgaaaaaaagcaaaaccaaataggtaccaacaaataatgtagaaagtagaaattaaaaattctcattgaagcaaaaacagaaataaaaaagggcgggggcgggggtgagccccaaaaacctgtcccgtccccggggacgggggcggggctcgaaccctagtttttagcatagtaaaaaaatgctctttgaaagttataatttttggataaaaaagaaattgacaaaagttatgggtcctcaaaaacctcaaaaaatgactttgattaaaaattaatttaggtgagccaaaaaaacgtaaagcacttcaatttttcaaatttgacgaatttttgttattttttgactgaaccggttttgaggggacctataacttttgttgcattttatcgcaattccatgcgtttaagggtttggacggttcagtcccaaagccatttggccatttcagtcccgggtattaactcttcagggattggtttccgcaaaaaaattctttcgtatcctttcattacagaccgagagctatcaattggtgtatattttgaccattttgggttctgggccatatgatcaatattttcccacgtaaacgacctcgaatttggtcgggttttcatagtaaagaaagaataaaaattttactggtcacgttccatgtatgactcaatttcaattccgtggcacgataattctccgagtccaccggcgcaccgctgcgcattgaacaaattttatataacatatatatatatatatatatatatatattcgctatttttaatggggccctcttattttttgttcaggacaatcatgtcccgatcttcatctcccgcatcggccgactccaggccagacaccgacgaagtttcaaattttgtgcatgggacgcaatgtccctgcgccctgcagcacctgcgagctactcagctcagaatcttccgacacaaaatg

SEQ ID NO: 106611 - DNA, 159 bp, Heterodera glycines
ttcattggtaaattccgatttccaaggaattcaagacgcaatgcccagatccaaggatatacttataatccgaggactaatgtgaggccgcttgcttaaaattgacaatcaaaaattaaaataatttaagacttttttaattcagcggaaaaaactatg

SEQ ID NO: 106612 - DNA, 191 bp, Heterodera glycines
ggtgggaaatgccattttaaatcactaattaaaaagttaatcaaatttgctggccgaaaaaaaagaagaaaaagaagtggctgacagggacggtcccaggggggggggggggcaagacctcaccacacgcgaaatttttaaggaaattttgctgaattttaattttttgttggatcccctgatcaaggatg

SEQ ID NO: 106613 - DNA, 162 bp, Heterodera glycines
gctgtaaatttttgtcaattaatggaaatattttttcaaaaaaaaaaccatttaacattccgaaaattattgaatttttttttattaagcaacaaaaaatttataaaaaaattaaaattaaatttttaattatattttaagttaaacaattattttaaaatg

SEQ ID NO: 106614 - DNA, 281 bp, Heterodera glycines
gaaaatttttttttttttaaattccaaacagaaatttcaaaaaaatccaagagagtttcaaaggaacaaatttttgaaaatttttcagcgatttgtttggaaaagttagtaaaattcatcataaaattttaataagtcgttagaaaattttcatattttttcttataaaaagaaatttctagttatttttttgaaaatttctacttgtaaatttgggcttttgcctccctttggaaaattgttggccacctatttaaaattgtcagaaagtaatattaatg

SEQ ID NO: 106615 - DNA, 330 bp, Heterodera glycines
ttctcgacggggaagacactttgcgacttccctcattgccgatggagcccgtgtggatgttgagcagcatgtccatgggcagttcggcacgtgggatggtcaccgaattggggggcagcataatcttgcgcaatacgccgaagtcgcattgggagcgaagctgccggaagcaggtcgagtgcacgctcaggttgcaccactgacaccggaagcccgagaagcactccgccgtgtagcagcctttcctgcataccgcgcacttggcgtcccttgccaaattaccctcgcgcatgtggtgctgctgtttgtgagtgacgaggtctaacgatg

SEQ ID NO: 106616 - DNA, 110 bp, Heterodera glycines
gagaactggtcaagaattcctcgaaatgtattctgttcactatagtggagaaattaaatgaagttcgattagaattaataagagatttattcaacattcaagaccatatg

SEQ ID NO: 106617 - DNA, 1003 bp, Heterodera glycines
cattttataaaattaaatattaattatttttattcaaattgtatattttattttcgaatattcttttaaatcttttcacttttgggtaattttaaacatttaattttgttccttttatcatttcagggtatatgtctataaggcttaatgtatacaataaaaacattttgttattttcttattcgattgaattttgaacttatttttgtgttaaataactgtagagctttgtttttgtttaaatgataaatagtttattttgttaactttttatattttaatttttgctttcctttattttaaaatgctgaccttatttttttatttttaaattattttcaacaaattaatttggcatagaattttttcgtgatataataagtgtattttcaaaatttaatatacctaaaacatctttggaattacaataaatttttttcatctttttccatttaaaggttttcttggaaatgtaaataatatttattagtaaaatttatcactccatctgcagaaaagtgctgctttcaaggggtcaaaattggaattttttgttggccccgccgggcattaaaaattttttgcttttaaaaattgactaaaatggcaaaaatcattcatttatggtgaactaatttcactcaaaatttcaaaaaaaaatttcccggcgccgccggcccttttttaaatttatataaattttgtttctgggagaaaaattcaaaaaataaaataaataaaagaaaaatcaccattttttctacaaattctccgctaatattttcatccattaactccactttaaaagttccatttgaaaagagtgataaaattgcttcataatattttaagaaatgattttgttaaaaaatattaaattaattatttaatttaattaaataaacacatgaattattttaaataagttttgactaaaaattttatgctttgaataatcattttcttacttttttcttttttctttttagagcatattatcatg

SEQ ID NO: 106618 - DNA, 56 bp, Heterodera glycines
ccgtggggaattggcgcaccctccgcacaaaatgggcggggaatgtgcgggaaatg

SEQ ID NO: 106619 - DNA, 568 bp, Heterodera glycines
acgagggagaaaacgaagcaaatacactcggattagtcattcattcatttgtggcaacttatttccgttaaaaatttatcaaaaatggcttcaatgagaaagacagacaccctttaacagtcagttgtttatgccaattgcacagtctaccttcatcccccctccctccaattgacatttttgaggctttctttttgcccaaaggtgcaaagaagccaatggcaccggcattgatagcttttccatcaaaaattcagtgtacaattgtatctgacggctaatgcatctgctgcttaaaatacatctgctgtccctctcccattcgcactttcttcatatttcatttgccagattcaattaaggccatgcgaagttttggcggaactgcgcctcaatgggcaattaaattattccatcatttgtcagccatcattggcttatttacttggcttttcctttccttctcgccaaaagtgatgcttattcactttataaggtgaaaacaatccgctaaatttggaagtgttaggttccaattaactatttgtcctccttcgacttggccatg

SEQ ID NO: 106620 - DNA, 523 bp, Heterodera glycines
tttttattgggatttcgtcgtcactcgccgccccaatccgacaaaattgggaaaaagtaaggggggggggtctgaatttgaaaattagcaattctccgtttaattttgctgattttcatgcgtttggtcccggtcccggtttgtccaaaattcccgatcccgtacaactctatagtcttgaggaaaggaacgaagaaaaaaatttaaatggaaggaaaacattacgccaaaataatatcgaagttaaatttaaatttaaactttaaaaaccgtgtatcgagaattgataagcagattttttgcgacaacattccagtttttcccgaaaaggggaatatggttcccaagaaatccttgcccgcttcttaatacgatccctaaaaaggttaaatcctaaacataattgtttatcccttccaaaaacaaattcatatatattttctcttgtctgtttagtaaaaaaattgaacgcaatttaagtcaaatggtgcgccagaagcacaacttttcagctgagaaaatg

SEQ ID NO: 106621 - DNA, 113 bp, Heterodera glycines
attaatatagtgagtatatcaattaaaattcttaatgaatcatctttacggaattttttgatgaaacaaaaataaaaattgagacaaaattcacatacattttgcgtaaaatg

SEQ ID NO: 106622 - DNA, 494 bp, Heterodera glycines
ataaaaaatgacgcaatttattaatatataaatcatacatgacaattttaaattactaaataattacaacattaaagccttgtgaagaattcaggcttgggaaaataaactaaatgtcggtaattttgaaagaaagtaattttgaaaactaaagtccgttagacaattttccataagtatttattaaaatgaaattgttcaaaaaaataaatttcatctcatcttttaagcaacaatttttaaataaaatttattcaaacatttttacttaatttaatgattgaaattaaaaaaattaattgttataaaaaatcaaatattcaaaatatacataaaattgattttaaatcaatatagtaaaaatgcaaggatatatataagaaaaattcaaataggaaaaactatatacagccaatgttaattataagaaattatttataccaaatttcaaaaatataaaataaataattatttttttaaatcttttaataatg

SEQ ID NO: 106623 - DNA, 102 bp, Heterodera glycines
aattttaaaattttagagggaaataaaatcttcctagtgaaagtgcggaagcagaaaaggcgcaacccaaacattgtattccgggattcgttcaacctgatg

SEQ ID NO: 106624 - DNA, 98 bp, Heterodera glycines
acagttttcaatcgcaaattgggcgtggcgatgtccgcgacggcgtcacaccgaacttggaaagtgccgagaattgttccggcggagttttccaaatg

SEQ ID NO: 106625 - DNA, 902 bp, Heterodera glycines
  unsure (1)..(902): unsure at all n locations
cagcgagtcagacatatctacaaggaggaagacgaaagntagtagaacaaaatgaaaaattgcaaaatcaaattcaaaacaatgcagtcatagaaaaaagcaaatgatgaaactactagaaatctcacactttaaataaaaatttccgtctcagttacatttgttgttttcattacttctaaacaacctctatataaagtcaaaaaatttccaatttcgtcactttcggaatcaaaattttttgttgcaatggcagcgcagcaacctattttacgccgtattatttccaacaaaggaaaacagcaaatttacgaaaacggttttctttatctttacgagaaaaacaataaactcgaccccgatcttcttttcatgagttggaatttcgggaagaagaacagacatacgaaggggaaaattttcttttaattgataccgggcatgaagacccgcacagagtggttgtgttcgggaaagaatcggtcattggatgggtttagcttgtgaaaaacctttacgttgacggcactttcaaaatttctcctcgcccttttcacaatggtcaagtttttatgatcctgggcaaaacgaaatttgcagacaagtaggtgtttattagggctatcgatgataccaagaatgttttatttggatgcttcttgaaaaagttatgttacattaaagttgcaaaaaatttttatggtcgtgtgaactgtaatagagccgaacttcttcccctcccctctccgccgcttctccaaaccgattttttttttaattttcaaattcttccagcaataatttcatctattttatttttatttttttatgatttcgagatttttttattaataaatgaatgaagaaaacgaatattgttttttgtttgttaatttcagatg

SEQ ID NO: 106626 - DNA, 484 bp, Heterodera glycines
aaaatgtggaagtgaaagaagaagagagtgaagaaaagtcattaaaaaaatatcaaaaagtgcaaaaagaaaaaaaagaaaatttttgatcatttttggatatcttgccaagaatttgagtgcaaaaaagctactttcgtaaaaaataaaaataaaatttccaaaaaatccccaaaatatgtgctaaaaaaattagtgaattaatgacatcagatgagaatgaaaatgtgatatttgtgatagttaccttaaaaaccttcataattatagttatctcatattaattactacccaattcgctgataaaaggaaaatttaataattgaattattataaaaatgttgtcaaattaatgaaataatgattaaatgtggttaatattgattgaagaaaaattaagccatgctataaaattaataattacaaaattcattgcgaaaaatatttttataaaaataattcattatatttttacaaaaaaatg

SEQ ID NO: 106627 - DNA, 57 bp, Heterodera glycines
aattatatttattccaacaaatatggttatttgaacggtgcaattttgacaataatg

SEQ ID NO: 106628 - DNA, 95 bp, Heterodera glycines
ttgtataatcttaattggactaaatatatcaatagtattatttaatccatttagaaaaataatacttcaataataccttcttataattcaggatg

SEQ ID NO: 106629 - DNA, 69 bp, Heterodera glycines
ttttcagcccattgaatttgtttaatttaaatcctataaattattttagaaaataaattgtaaaaaatg

SEQ ID NO: 106630 - DNA, 673 bp, Heterodera glycines
agactaacaatctcctctccattacaaacaagatcaaaagcatctgctataatatcctcatttcgtatattcttttttaaaaacaaatctttttaaaagctgataatgcaatcttagaaggttgtaaaaatgagttaaaaaatagcataaagaatgaaatagaaaagtgtactcgttacagatcagaaataaaagatttagagaataaagttattggattatgattctgttggcttttcttcttctgatgattctgttggcttttcttccatagaatgatataaacctataattatcgaacataaagaacctaactataatctaacaaaagagtaatatttttttaacttcaacggtcagatttatttatttatttgttcaaaaattttttccatttcccggcggaattcgggtaaaaaaaatgacgaaattttatggtaacgcgaaaaaggtcccttttgcggttccgctttctcggtgacagccccgtttactgttccctgaaaattttttttatcggtctctagtttttcgaatgaattttcatcagcttgtcagagtgatcagtagggtgagaacttttagtggcaaaaaatcccaaaatacagccacactcaaaagtattggagcaaaaaaaaaagtttttttttaaaatccgattttatcagaaatg

SEQ ID NO: 106631 - DNA, 298 bp, Heterodera glycines
  unsure (1)..(298): unsure at all n locations
aattgtatnnagtttggtggggagatttgtgcccaaaaaaattaaatgtggaacatttatttaaatttaaatattctttattttaattaaattggataattttaagtaactttattatcacttggtggaatttatgaaacaaccttgcaccttttgcttttgtctcatctaccaaaaaaaattttccattttttgtgatattatggagagttcgaattcgatgtctctgttgtcagtactgtacgtcctgcacaaaaaaaatttacattattttaatgtcagatcagtgatcacaatg

SEQ ID NO: 106632 - DNA, 376 bp, Heterodera glycines
tttgggcaatgtgacgggccaattggcacgcaccgatttcagcagccgatggtaaaaacaaaccacaacttatgaaacatttgtccaatttttgttttgtttttttgccgaaattgaatcaaaacaaaacctcaatttgcttgtttttggattacagattgcctgcccaaaatgagtgttaattgtaaggcgtagtgagtaggctttaaattggacaaatttttaaaaaaattctttgtctttcgccgggcctttggctttccatgaaactgaaaatgatctgtagctcaggacgttcccccgtctgttctacaaagtgcgtttgtccttcgacggtctctcccctccctccgccgtccgtgtcgatttgctaatg

SEQ ID NO: 106633 - DNA, 235 bp, Heterodera glycines
  unsure (1)..(235): unsure at all n locations
ttaaactctacataccgtctttattttaaattttcgaaattttacgcaatacctaataaaaatatatggggccttacaactaatggccgaaccctttcaaaatttttgaaaataacgtgactaaaaattaatagtgacaataaaaaagtggacaatttnaaaaaagcggagaaattttctgcagttatccccaatatcttcaatgttttcttatatttccaattttagaaacatg

SEQ ID NO: 106634 - DNA, 209 bp, Heterodera glycines
agaaaagtgggactaattagagaaaagggcaaacgacttggacttgatgaggcgaaggaatgaatgccaaagaaaaccggacattttctcaaaaatagtgagtgaataatagccgaaatttacagataaagaaattataattaattaaatttacaattcttttcattattcttaaaaatattatttattcgtttaaggagcttaacatg

SEQ ID NO: 106635 - DNA, 377 bp, Heterodera glycines
  unsure (1)..(377): unsure at all n locations
gaaaaaatcgatttttttgttttcggggcagtccccccgacccgattgcgcccagatgtatggggagaccgaatccttcgggaatagcttccctatagcctgtactntaattctgcgttggatttttgctccccataaatgtttgagtaccccaaacggacacttgaaaaaatcgatttttttgttttcggggcagtccccccgaaccgatgcgcccagatttatggggagaccgaaaaaatcgggaatagcttccctatagcctgtactttaattctgcgttggatttttgctccccataatccacgcccacttttgggtcaaaattattcctagcaagaaatcgaaatcattctttattcaaattctagaaaatg

SEQ ID NO: 106636 - DNA, 621 bp, Heterodera glycines
ttactatgatttatgctatataaacaaatctaaaaacgctacgattgcgacaaaagctttagcaaatgtttgtatgaaagtgctgaatgttcattaacaaaagtctgttttatttgtattttaaatagtttattttagagtgcccacgggtaccggagacctgatattgtccaaaattcccggaccccaggtactctagataatattctaaaaagtcaatgattctacagttttgtgcacattttcacattaatctacaaacaaagattaaattaataaatattaataaatttgaacgcaaattcaaggtgaaattcattaaaattgcccgacttattgaccctttctcaattgtttctccaatcattatctcttgcatccatttaggctaacattagcccctttagtttaatgtatgcgtcatgtacattgccccgccttcttcgcacccatcggtcaataaattcttctctccatagccactcattttcattttctgatttttttttctctcaccttgctcgtttatgaacatttttcccctcttcttagatctaagcaaaaattaatcccaataataatccaaatcccttcgcctgcaggcaagaaacagaaaatatg

SEQ ID NO: 106637 - DNA, 330 bp, Heterodera glycines
ttttctggattattttaatcagtgtattattctcttgacaaaaagacacatttttaaccatttaaaaaatgaaaattgtgtaaatacgatcatttgcagggcatattttggtgaaatcttttggcataaaatggttattgagaaagaggagtgacagcagaagcagatcacagatgatcagcagatatgggaggaaaatgtggcatcatagtcagaggaattggaagggggagaatttattgtttaaatatgtatttaataaatttaatttaataataaaatcaattcatttttaatagattattcttttaagttgatcatccgaatatg

SEQ ID NO: 106638 - DNA, 156 bp, Heterodera glycines
atcaaattgcttagcatttgcttagaaaatgcttctcctcatcaaaggcttcgaatgatattgtccaatttgattgcaaaaaagatcaaaaaaaattatttccgaaattagtatttttttaattttttggacaaaaataaataaaaaatattcatg

SEQ ID NO: 106639 - DNA, 1003 bp, Heterodera glycines
agggaaacccagggaaaatccccaaaaaattttaagttttgcaaagttttggcgttctgattactaaataaataataaacctatttgcactgagagcacaaaattgggctgttgtgtatagtatatcctttttttgttcgaattgcagttaaactgaaaacttttcggcgataaattcgcaagtccctgcggtgaagtgatctgacccaaaatttgttaatatagaacaattttgtatttgccctttctggcctactcatttttccagaaaaaatttccaacccccagaattttcgaaaattcccgattccaacgttttttttttggtgtacaagatcaccatggaaagatctgatcaagttgggtgatagttttttgaacattcttccctaaaaaacgagagatgaaccaataaatagagagtgtaggcatattattaacgagagatgaaccaataaatagagagtgtaggcatattatttctttaccttttgcatattgatagcgaaaatttcaaaaattgacgtttttttgtaaagcggtctcgaacctccacccttttttcaaataatgccagatttccattggaaagagcacaaaattctgttccgaattgtcctttgaatgtgggtctacgacttatatccacagagcaagagagggtccaaaaatggaccactaaaaaatgactgcaaaaattgtatgtttgttcaaatacttttccacaagttccttccgttatttttgtggtactgaatttctctttcactttgactcattctcagcgcgattaatggtcgcgctccactcctgatccagaacctctcaattttccggggaggtgaggcttgtttcggaagccttgtactcagtgctttttagtcataagtgtttttttattttatatttttaaaaggcaaattaaaagtagcaaacgaagggagctgactattttaagttatgattggaattttttgttaaagtattgaatttctggtcaatg

SEQ ID NO: 106640 - DNA, 209 bp, Heterodera glycines
tattgtccaacccctcgggcccatttgcaacaatttaaggcaaacaaaattcaaaagttgtttggataaaatgtgattttcgttagaatttttggttttccgcttttctcattatataaaaataaagtttccaacgcaattaattcttctgctatttgtgtgacatcattcggaactcgtccaaattgtgcttatttctgccaaaaatg

SEQ ID NO: 106641 - DNA, 286 bp, Heterodera glycines
ggtgagacgaattgacagatgacatggcaaaatcgaattactctcctattttccatttagcaactccgttctcggctggtcaaaagtggtggcgaagaattgaagctgttcctcagcgactatttgctcactgtgtccccaaaacggcgcgccaccgctgccacactgccgaagacggcggagatgaggcggtggtgcctaacgacggtggaagaagatgccaaattcttacgccggcacttcattgacgaagtggactttgccaaccatctgaaattggagaatg

SEQ ID NO: 106642 - DNA, 254 bp, Heterodera glycines
ttgtgttgttgttgggcgcactgaagtcgttcgttcgttgattgggtgttgtgtcagcagcaagtgtgcaaatggacgaaaattcccccttttatattcattttctgttgcactttttttcagtgggaaatttgaatataaaaaggcgtgaaattgagagaaatttcattctcgtcacattcttaattctattctctgcactattacatctgattgctgctgctcaccgactccatcgacaacgacacgcgatg

SEQ ID NO: 106643 - DNA, 235 bp, Heterodera glycines
gttgtttttttgctttaccagttttttcagaagtgatcgctcgcactcttactgttataaataggccctcgatatgccaaatcttcatttaattacttgaataaataaaattatttaatttattcatgaataataaactgttatttaatttgaatttattattattgtttaagcttggtgtacctatgtttttaattcatcatttagcataattcatattacagaattagaaatg

SEQ ID NO: 106644 - DNA, 110 bp, Heterodera glycines; identical to SEQ ID NO: 98226

SEQ ID NO: 106645 - DNA, 82 bp, Heterodera glycines
attcagaaaacggctgccaatttgaaaggtcacttcctaaatcccccttttgggtccgaactaatcttaacgcccttaaatg

SEQ ID NO: 106646 - DNA, 571 bp, Heterodera glycines
ctgataatttctagaacaccgataaaattcgtaattcaacgctataaaactgggttcgaaccatacatgaaaataaatacattttaatttgtgtaacaaagttaaagatttaaaaatcttgttttatttaaattttataaaaaaaaattttctttagtgaaagtaaaccaaaagtcgaccaaaaaaatgactgcccatggggcccaacggcggggcccattcgacccggtccgaattccgagtgtcaaaatttaatggctcctactaatgaataatcagcgattttcggattttttacatcgtaatttagcaaatggaacaaaaaccttttctccttaggacgaattggaacatgcttattcgctaagtttttcattggatgggcagtgcatttttggaggttatcgcaatcggttgcgaattttcgaatgcgaacgaagcggcaaacagtcgcgagaaattaaaacatttggtaaacatttgaaatccgaagttgaaaccaattaaatgtttataaacagtcaaaggaaaatttggcggacaaaagggaattgtgtctgccctttcgatg

SEQ ID NO: 106647 - DNA, 830 bp, Heterodera glycines
gtccccccgaaccgatgcgcccagatttatgggagaccgaatccttcgggaatagcttccctatagcctgtactttaattctgcgttggatttttgctccccataattgtttgagtaccccaaacggacacttgaaaaaatcgatttttttgttttcggggcagtccccccgaaccgatgcgcccagatttatggggagaccgaatccttcgggaatagcttccctatagcctgtactttaattctgcgttggatttttgctccccataattgtttgagtaccccaaacggacacttgaaaaaatcgatttttttgttttcggggcagtccccccgaaccgatgcgcccagatttatggggagaccgaatccttcgggaatagcttccctatagcctgtactttaattctgcgttggatttttgctccccataattgtttgagtaccccaaacggacacttgaaaaaatcgatttttttgttttcggggcagtccccccgaaccgatgcgcccagatttatggggagaccgaatccttcgggaatagcttccctatagcctgtactttaattctgcgttggatttttgctccccataaatgtttgagtaccccaaacggacacttgaaaaaatcgatttttttgtttcataaatatttttttcagaaagtgctctaaagcgcaccaaattttatttacaacttaattttagcactctgatgctttagtatcaaaaaggaagatggagaaaaaattttttaaaaaatttttccttatattttggttatatcgttttgcttttggtggggtgcttggaacagtggaatcatg

SEQ ID NO: 106648 - DNA, 58 bp, Heterodera glycines
atcatcattaaaattgcaaattgttttacaaatttcagggaatggcactttcacaatg

SEQ ID NO: 106649 - DNA, 1003 bp, Heterodera glycines
aactgctccgacttgatggagtccgggaagagagggctccgtcactcgaatatgagggtgacgtggagctggccacatcaaacccgtccgtcaattcatccacaacaagtaattggacaaaaaaattttttggaagggtggcccggtggaaaaatttcaaacaaacaaaaaaatttttttttcaaaaccgttagagtttcgctaaggacatggatctttggttatttctaaaacaaccacttttttttttgagaattcctaaaattttcatcggcataccaaattaattcaaaatcataattctgtaattgggcagaggctcgcactttggaaatttttttcaaggataaaaaacattaaaaaaatttcaacgtttcaattttttcttgaaatatttcgtaattgaaatatatatttttttaatttcgaagttgaaaaaaatatttttttttaaattttcggcaggggcgggggttgcagggaaacgtagtgcacccctataattgtgtccttccaattaagcgctgaacgaattcttcaattgccaccaaaaacaacagcctcacaatccgcaacagtttcaccaccacaatgttcagcaccgtccaccaccgccaggtgaccaacgaacaaacgcatcataatgcgggacttaaattcgagtcatatgtacctaattcggttggccagggtcccaaaaaaaaattaaaaaattcttctttctttacgttgatttttttttttaatttcggaaggggaggggagactcgctttcattattagtaaataggtaaataaatctatctgctctatgtaatggtttaaactcagaatttttttcaaaaaaaaaatctggattttttttcatttttcttaaacattttcgaaaattttgtcgaacggagaaagatacgggggatggcgaaacgtgtgtgcacccgtaactaatggcttttcaaataatatttgttcgttgtgttgctcagattacaacgaagtgatg

SEQ ID NO: 106650 - DNA, 191 bp, Heterodera glycines
cgacgcaattgggagatggatttacagaacagatttcctttatttttgaggaaacattgggactttgcaccaaaatcacgtcccatctcaaaattaaagaaaattcatctcccgttttttgtgcagcacgaccaattcccatcggcgttaagcaagaagtggacaaggaattggaccgtctcatcgatatg

SEQ ID NO: 106651 - DNA, 59 bp, Heterodera glycines
ggtggcatttatggaactaattaggtgcaaaaatcgcttaattttaggcattggccatg

SEQ ID NO: 106652 - DNA, 747 bp, Heterodera glycines
  unsure (1)..(747): unsure at all n locations
tagtgatcgcagtaccggcatctgctntagtgaagaataccggtgccgctctattcaatttacaaaattagttgaaatcttttcaatattctatattaaaatttgttaattattatagaatttaatacacatggcatataaaatacaaaatcatttccatatgtcggttttatttcaagattaaaaataaaatattttgggctttagaatctcttcgaccttatttggctgctcgaatatgtttggctttccttggagtttctcgttggcactcgcgtacatgcaaaatacccatttggtgcctatctgttccgtttcgtcaatttttgcattgacactttttacatcgaattagcattcaatcggtgcaccgctttccttttcccacgtctttacagcaaaatttgcacagaaaagtttgtccatttaactaatgagaaaaaattgtatttggtgttgccaagtggacattttttgccttcgagggaaacctttggggtttttagagaaatttgaattaattcgagaaaggatttttaaaatgccaaaacatttaaataaatattttcgaaaaatggtttaaatatttacaaaaataatgactaaaaatgaaaatttcgagaaaataatgaacaatgcattgaatattatgaaaataaaaacgaaaaaaatcggttttcactttgcattttccaaattttaaataatttaattttaaatttatgccgccatttgttaaggaacatg

SEQ ID NO: 106653 - DNA, 433 bp, Heterodera glycines
  unsure (1)..(433): unsure at all n locations
agtaaccccggccccaaaccccaaaaacttcccaaaaaagggtccccaagctcaagactcgaaaattagggataatttcccccccaattcaaaaaaaccacccacacaacacacaaacaaatcacaattcagtgagaaaggaccaccccacccgcatcccgcgcaaagagtgaaaaaccaaaagaaaagaaagagcattttcggaccgaccaacncaaaagaaacggagacgaaaccaagcaaatcctcagacagacaacagtaataaaagtgaccactgtgatcaaaaatttctaaactgtgatcaaacccaatttaattttgtgataattgtttacctcaataaaatattaactgattacaatcgcagaagggaataaattggccaaccaaaattaagaaacaacacaaatcatttttaaaggaaaaaatg

SEQ ID NO: 106654 - DNA, 799 bp, Heterodera glycines
agttaaaacgaaatacaaattgttacttcattatatctatcaacttcgtctttttgtcatattttttgtctattattattttttgaaatgccataaaaagccctgagggtgactgagcaaataatggggcgtccgtgccaaagttttgaaactttaaaggattaaaagagcaggttccatttggaggtggggttgtaatatatctgaaatatatcactcccatgtttagtattttagggactagggtataataataaacggtataatattactaaatgaaaaatataaatatataataaaaaaaatcccatcagtaaattaaaaaatctaatcagtaaaaatttgtaattttctttaatttacttctttcgcaataaaatcaatttaatattcacatgggcttattttagcgacatattccctttccaatttcactcttaaaataataataatattttataaaaaaatattgattctttttttccctattttactccacaaagcatattttattttcaatattcacttgtatttaatatattgcataattttattcgtttttgaattttaaaagatgaagcctaactttggtaactcaaaatgtgcggtatgcaattgtcagtgtcaatattactattatggggcaaaatgttgtgaaagtaatcaaatttaaatgaaccacaaaaaagaaaaagtgaagaaaaattaaaaaataatttttattaaattttcaaaatttccatttaactcgagatataagaaataattgaaaaatgtccaaaccctcgaatttaaaatg

SEQ ID NO: 106655 - DNA, 654 bp, Heterodera glycines
tatctaatggtatattaaatctgaacttttttaatgactttttactcttataataaattggatcatctaattaattaaaaagattattaaggggtagtaagttttttaaaatagcaaaaaaggaagctaagatttctgtcaaaaattaaaataatttttcgggtttttaataaatttgtaaatattaataaattttaaattagaaaaaaattgggcaaaatttgagcaaaatttaacatgtaaaatactatgtatatgtagttaaaaaaaattctgctccataaatatatatttaaaacactaaattaattctgtggcaaaaaaaatctagatttttttgactaaataaattccaatgtcaattatgcacaaatattttgttctccctggctgctaaattcgtgttaattaattcttagtcggcctatgcattaatcaatgtttaaaaatttttgaaagaaaaccgtcaaatatctaaaaataacttaatttttagaaatatgaataaaaaatcaattccataaggaaatccgaaaacaaaatccaaaaaatatgcattttttaaaatttaattatcaataattaaaaaagaagtgattataaaataattatattgtatctattctatacaaaatctccagttgttgccagatg

SEQ ID NO: 106656 - DNA, 344 bp, Heterodera glycines
atgtctcaattcgccctttaaaatgtttaaaaagctcactttaacaaacaaaattatttgtgttttcccttttatttttgccgtttaaaaatgattctttttgattctttttcagttgatttgttgagctcttttcgggaattgctgaatacgagtgctactccctccacgcacacattccctcgcctattcttcgcgctgctaattaattaattaatcgcccttttgtcaattgctcattcatttgacggatcaaacggtcgccccccaccaacaaaatctctgccccaccgaagcacaacgaataattgacactgctcaaaaccacacaatccgaagctatg

SEQ ID NO: 106657 - DNA, 138 bp, Heterodera glycines
tgtaagggcaacggatttggtaattaattgtgaaattgaaataaataattaaagtgatttttgataggatggcattctgtgtttgcgaaatttcccatctccaaatgttgtcgtcccttaattttctactttgaaatg

SEQ ID NO: 106658 - DNA, 471 bp, Heterodera glycines
gaaatcggtatttttaatttcggattttttaagaccaagaaatttaagactgagcggagaaatggcataaaaaattttacttatcaaagcaaatatggaccagttgtttttggcactgtctactgagcccgttgcagaggaagaagaattagattttgcttatttggaacttaatgaagatcaattttgaatttttcatataatctatgaattttaatgaaaattttggaaattttataaaaattttaaaaaatttctcttggaaaaatttccggttggtcccggtcccggtcgaaaacttggtcccggtccctgattaaaaaataaatatttaaataatgtttcaaaatttattaaaccaaatttattctgataaaattctgtcttgaatttttttacataaaaaagcaaatccgttggcaatttcagtaagcaaaaatattttataaaaaaattaataagttttagatg

SEQ ID NO: 106659 - DNA, 632 bp, Heterodera glycines
aatctgggcgcatcgttcggggggactgcccgaaaacaaaaaaatcgatttttatcaagtgtaccgttaggggtactcaaacaattattaaaaaatttttagatttttattcatctccctttttgatagtgaaagcatctgagtgcctaaaataacttgtaaataaaatttggtgcgtttcagagcagtttgtgaaaaaatatttatgaattaattttgctaaaaaaataaaatagtgaagctttaaaaattaataaaaaattttaaattcagaattactggagttagcatcatagcagtgcttttccttgtctttttgatgccctcgcaaaatctggttcgcttctgatcagtttataaaaaaaaagttaagcctaaaatttttcgcaaatttaaaaagcaattaaaaatttttagattttttattcatctccctttttgatagtgaaagcatcagagagccttatttaacttttaattaacatttggtgcgtttcagagcacgttctaaaaaatatttatgaattaattttgcaaaataataaataattaatgaaaaagtcagaatttcgaaaaattttaaaaacaacaagcgttggcattttttcaggttaagttagtcctttacaatg

SEQ ID NO: 106660 - DNA, 645 bp, Heterodera glycines
tttcgaccaactttttctgtaattcctccaaattttggaaactttatttttatataatgagaaaagcggaaaaccaaaaattctaacgaaaatcacattttatccaacaatttttgaattttgttcgtcttaaattgttgccaatggccaatgggaggcgaaaaatcattgatacaaacggaaggcgcggaaacattttgacataaaaaggccaaaccgttttttattagcctataaaatttcaaaaagtttcgttaagtttcaaaaaagttataacttgagaagctcaaaaacccaagttttttacaacattttagctcataactttcttgaaacttaacgaaactttttgaaattttgtaggctaatggatttggatgccaaagaaaaaagttatagcgaaaaaaaatttgaattttcgaacttttgttcgaattcaggtccgtggttcgaaattggtcgaaacaaatgccagattctgattagctgccccgaaaaccctaggaaacatgctttcatgtcttttgttaacaaaaaaaaatttcaaaaaaggggggtaccatcgacagtattaccaattcttctgctatttgtgtgacatcattcggaactcggacaaaattgtgctaattgctgccaaaaatg

SEQ ID NO: 106661 - DNA, 148 bp, Heterodera glycines
  unsure (1)..(148): unsure at all n locations
ttcattatanatgcattcttaacggagagagggaagcagtgaagagggtggcacatgcgaatgactcaatttgatatgcgagtgattgtctcaatttgtttaggtttgcaagacatgggaatattttatggagcaagtgcaaaccatg

SEQ ID NO: 106662 - DNA, 112 bp, Heterodera glycines
tgtgagtgttgagcagaaaaagagatagacgttttttcaaaattttcagagccaaactcgcccagaaagaaaatccagaaaaattagggtcgtcgctattattccgaaaatg

SEQ ID NO: 106663 - DNA, 68 bp, Heterodera glycines
caaactacaacaacgtcctcctgcaccttcctccacgtgaagactactgcccaaaccaaaagaagatg

SEQ ID NO: 106664 - DNA, 70 bp, Heterodera glycines
ttttgctccagcatccctctctttcgtggcacattgctccgacccttctaaagtgccattctccgccatg

SEQ ID NO: 106665 - DNA, 1003 bp, Heterodera glycines
  unsure (1)..(1003): unsure at all n locations
tcaaattctaatttttcataattgnatccggagtcgctcattcttaaagtaataattgcctattttgtcaaattcgttcgttggcatcgctttttccatcattttctcctcctttcgagtctcatcttcttactgagttatctccattttctccgccgttacttactgcctttttcagtggtggtcatcctccatctgctgatgttttgtttgtgctgctagtgaaaggtcgaagaggaaaaggaggagggaaggaaaggggcggcggagtaacgatgggaaggggcagcagacgaatgaatgtaaaaacctcggggaaccgaaggtccaacaggcagtggcgccattctcatttaaatttgcgcgtcattttgaacggtcaacgattcgatttgtaattgctcattgtcggctttactcaccgattcctaagaaattcccacaaaaacaccgaagttatttttggcctcgaaatagtccacttttctcggaacgtcttcggaccggaagtaaagaatgaacagagaaacggacacaggccacccaccctcatccaaagccattcccaacccacttttccttcgcccgtcctttcccatttattcatccgatggtccgtccactcggaggaattcatttcttaactggtttataatttcaaaattatttcattattttacagcacaaattttgtaattgtaaaataggtaatcacaaatttaagaattaattcaatttttattaaatgccggtggacacggatttaattaattggaacaaggaaaattcgtggcctcagtctctgtcttcctcttttaacagttcaaaaaccgaaaaatttcatttaatttctgctgctcgcaaaaaaatttggtagcattttacataaattaaaaaaaaataataattaaatttgatgttaggaatgagaattttttagtcctcctgccgaagatggaaacaatcagctgatgaatggactgcttgatttctgttcaagatg

SEQ ID NO: 106666 - DNA, 531 bp, Heterodera glycines
gtcaaaactgcggaccaccaaatcggacattcacaaaaaatgggaaaaaataaatttcaaaaatgaaaaaatatttaaaaaacacaacaattaaaaatgtattaaaaaagaaagcaatgaaaattaaaatattaatcataagtaatttattcgtaataaaaaggggaaataaataaaacagagaataaatataaatgtaaaattaacaattggtggtcattcgtttttaatgttcataaaatatggcgcacgagaaatgacaacaataaaaaaagaagagatttttgggagaaaaaacaaaaaaaatggaagtgagaattgtggcaaaatgacaataattatgcgcaaatttaaatgaataaattatcacattcatttcaacaaaaacaatgaaaacaaaagggggaagagaattaattggcaaattaaataatttggtgtaaaaaagtaatcacttcttgggtcattccaattattttcatcataaatccgcgtccaacacatcctcaaaattttcatggtccaaaaatg

SEQ ID NO: 106667 - DNA, 792 bp, Heterodera glycines
caatcaaaattaaattttccaaattttcaataaattttcctcccttcttcaaaccaaacataacattcattatgaatgtttttgcacaaaaatgttttagcaataattaaccaaaattacaaaattcaattgcgtgcatccatataaaattcattaatattactaataaaattcattaatattacttaattgtgatttgtaaattttttgatatttttaaatgtttattcaattatttcactttacataaaaaaaattaatattttagtcaattttttaattaagccagctgtgtaaaaaaacggcaatttaagcattaaaaaaaaattgaaaatggcaatggcaataacaaattcagaatttttcttttcaattaattcacgaattttcattcattcatcagattagagagtttaattctttttcgcatattagcccattgtttgtgcatttttgccctaattgtgcaggttcgcccatccaattctatttttgttttgatgaaaatcccataacatttctcattggtaaataggcaaatatttatgaaaaacaacatatactatttaatcaaatatttatttaataacatttaaatcccttctccaacccttgtgtaaataaattgtgtgtttattttaacgcaaaaatgaataatcctagtataattagatgggttttcattttgtatttcagtgctaaaaaaaaacgccatttgctgaaatttaatcgattttattttgttaaattttggatataaattttaagttaattagaaaataaaatataatg

SEQ ID NO: 106668 - DNA, 51 bp, Heterodera glycines
ggtttgtaaataaccaaaaatcctttttttaaatttaattttagtgaaatg

SEQ ID NO: 106669 - DNA, 1003 bp, Heterodera glycines
aaaattcgctttttatcgcaaattgattttttttgctcaattaatcacattattcggattcccccgtcccggaaccgtttaaaagcatatttatatcgacagttaaattcaaaatcaaaaaatgagagtaatctttcgtagattagatattgcacacaaaaaattacaagtgaaaaacaatcaaaaaactgaaaatttctctgcgattcttcccccccccctcattttccgtccatttcgcttccgttgtcgggacgcattttctttgatgtcggagtccgcaagatttcctgaatgtgctgcacaatcagatcaatggccacgtcgttttctgctcctcgcggaatgattacgtcggcgtactttttggtgggcaggcaaaagtcttcgtacgccttaaaggggagggacagaggtcgttttcccgaaacatctttttttttttaatatgagtagaaattaggtagttattttccgaatttttaaaattggggttttttaagaaatcattataattatttgtttcaatttttttcaaaaattttggtgaaaaaaacttggaatttgggaatttttattcattgttagttgtttttcttcatcagcagataatagccttaaaggggagggacagaggtcgttttcccaaaaagtttcaaatgatttttaagacaaaaatgaatgaattttttcaaattaagtagcaattagggaattgttttttaaagaaattattaagtgaacgccccgtgaaaaaatgggtcaaatggtataccaatcgattcatctcaagaagctaagcacggaaaaatatgtctcgagttgcggaaatgccaaaaaaccgctttttgaaccggttcaaaactcgaaaaattgagagatttcgcactctaacttacgatcaaattccgacaaatttggtaccatttgaaagctcttcaaagcattgttttgtgtggttaagcatttgccatttcacacaaaatgccgaagtgagcacatg

SEQ ID NO: 106670 - DNA, 223 bp, Heterodera glycines
taaaatttcattaaggtagaaaaaatatgtcaaatgaagcacaaaaaatgagttgtttgcccttagattggttttcaaaaaattccggttaatttttaaactgattcaccattttgatctccatccaaagaattaagcctcaatgtgatgccgttgctggcagaaggcaaaattgatagtcgaaatttgccgaaaaattgtttgaccatcggcggcacagatg

SEQ ID NO: 106671 - DNA, 96 bp, Heterodera glycines
cggccgaacaatgttttgctgaagcaggaaacggatattgtccaactgctcggccgaagaaaagacgatttgtctattcttaaagggtgcataatg

SEQ ID NO: 106672 - DNA, 401 bp, Heterodera glycines
aagagagatagagagagagagagagagaatcagagagagagagagagagagagaaaatgtgtatagagaggtaaaagggaataaggagacaaagagagaaagagagagagagagaatcagagagagagagagagagagaaaaaatgtgtatagagaggtaaaagggaataaggagacaaagagagaaagagagagagagagaaagagagagagaaagagagagagagagaaagagaggcaaattctgagagagaaatattgagaaatgcaaatgaggtttagagagatgagatagataaaaacataatgaaaatataataaataaaaaataatgaataaaaaaaaaaaaaaaggtaaatcgattcggttgtgctgaattggactttgtcactgggacaatg

SEQ ID NO: 106673 - DNA, 1003 bp, Heterodera glycines
aaatttttgtgaaaataaaaggaaccttttacttcttaatgtgaattcaccagtttgaaataaatttttattgacacatgataaaattgtttttacaacctttttttgaaattttattttattgaaattttttgctccgctaatatccattttccattgtccgtaaaccgcggtccgcaaacgacccgtcccgttcacttatttttttccaaaattgttaaaagagataatgggcggcgaaaaatataaatattttgatcgaatagattgtaaaaataactgatttgaagcaatttcgagaaaaattctaattttcggccccaaaatctattttttgagcctgagttctgattttgaaaaaaattttcgatcatatccctgatttaaatatgaatttttaaaatttatttcgtgataatatttgtgaatattttttccggggatgacctttttgttatttgatttaacatttgttccaaaatgtccccaaatatatattatctattagttattattagctaaataaaataaagtcatatttaaacaatttagcacatttagcttcttcctttttttcttatacataattttaaagaaagttaaagcattttaaaatcattttacaaaataaaaatgcaaactttgccagtgctttttaatttcctttttccaacaaaacgtacaattgattttacgatatctctgctgctgacattaattagcatttgcaaatgcattcacaacccattcaaccatcacaacacatcaaatgatccacaccatcattttgtgatgaataaaccaaaatataataaattctcaaataagttttttgaattaatgagctttgccttttagttccattcttctctcttcagccattttggatggaattcgatttaattacctaatttgttttattatttatttttttaattttcatattttgaatattcagcaaaatttaagagaagtttttagtttgattttattcataaaaatg

SEQ ID NO: 106674 - DNA, 112 bp, Heterodera glycines
tgacgcgaagaaagcgcgtctcttcattacattcacgaacaacagggaatggcctgagttcaaagagaatttacacaaaaacggtcaagtatttactgaccgttttgacatg

SEQ ID NO: 106675 - DNA, 410 bp, Heterodera glycines
ttccgtgccacaatcatcgtcaccacagtaggcaccgtcaataccgtaaccggccagtgatcatccgcagcattagcagtaaaagcagcagaatctttttgttggtcgcagcattattcagcgcttttgtcgtcgtttgtaatggacaactgcagcaggtgaattttaggggaaaacaaaaaggaatgatcaactgatgtgatcagtggtcagcctgatcagtcatgggcataaacacagtttgtgcttggtgattagggatgccatttttaggcacaaaaaatcgtgaaatcggcattaaataggcacaaaaataggcaaataaaaggcgcattggcaattaagcataaaaagtcataaataggcaaaaatgatttggattatatgagagcaaagatttttcgagaatg

SEQ ID NO: 106676 - DNA, 263 bp, Heterodera glycines
aaatccttgacatccagatttgcttttggtcataatgtttcaagaaattttaggattgattatatttgaccccgaatttttgactttaattctgttccatggcacaaatccgcgtcttttttttggcattttctccaaatcccccgccccatatcagattaattttttgttccgctacgaccgagttggatactccgaatttaaagaatattataaattaattaataaattaaattttacatcttccagtgcttccagccatg

SEQ ID NO: 106677 - DNA, 316 bp, Heterodera glycines
catttcatcgccgacgtggccttttctgtgctaaaatcttcctaatgaaagtcattttctgacacatttcattttactacttatggaactactttttattttaaatattaaaaaatcatttttgtgtctttttctcattagctattttagagtgtatgacgtaactgataattaattactattaattgaagactaatgaactttggtaaattgactttttgtgcagttgtaactatttgttaataatcatttaattttttcattgatttttattaatgaaattttactttttagaaaacattttaattttattatg

SEQ ID NO: 106678 - DNA, 171 bp, Heterodera glycines
aaacggagagagatggacaaaagcataattatgagaattgtgtaaattgtaaaattaaataatattaatggcgataattttcaaatttccaggcagtcgaatttgctcgagactgctcgagaaacggaccgattttcggcaattcgtcttctcaatgggcaaggaacgatg

SEQ ID NO: 106679 - DNA, 591 bp, Heterodera glycines
agatcttttaaaaggggaggtgttcgggtggtcaaccccgagagatgaaagaacacatttgcattatttccctttgcatttgtatttttcttttcctctccattttccccactctctaattattgtgtcttcctttatttatgtaagacactattgatttattatgtccattgcatgtcctttcccctcattcattcagttgctttttatgcacttatttcacttcgcctaaatatttgttctcctccaatttatttattcacgccaccgacttcgcccatttttatttaaattgtttaatttatttgttcatcaaataaacattttattgtgtcggttcaaagaccgaacaattggcgacgcccgtcttaaataaagactcaacgacggatattttggcaatttcggacagattccgaattgctattcaactttcttcaaaaaagcaatagacccaataagggtgagcttccgccaggtgcggtttattcatcgaaaaaaaccaagatacccaggtggttgcggtttccgccaggtgcggtttactcaacaaagacaaggaaattcccaaaaagttgatcaacaaaaatg

SEQ ID NO: 106680 - DNA, 363 bp, Heterodera glycines
atggtcgaccgaatcgttccgtgtttttgctgcactcattaaattgtctgatggattggccaattcattccattcactatttggcccggttttcgcatttttcttgaccaattaaaccaattagaccgaaatgggcgaggcaaaattcaatttgcgctttcgtttcattgatggactaacggagggaaagcaaagcaaaattttgccgtgttgtggtagggattgttgtgcttggagtagcccaattccaacgcgagcagaaagttctccagcacttggacatttacctggaaaagggcgaaacggaggaggaaaaataaaataaaaaagggagaaagggaggggaagaaaaaaaagaaaatg

SEQ ID NO: 106681 - DNA, 203 bp, Heterodera glycines
  unsure (1)..(203): unsure at all n locations
ggtaaatttttgagagnantnanataaatntnggnntatttnaggagtaatttaatatggatagntttaagttgaaaagtttatagtttgagagtgtaaagattaatttgaatngttgaattngnnggaatgaatanggnaaaatgtttgggnaataattatttgatttggttaattatnnggagaagnaanattaaataatg

SEQ ID NO: 106682 - DNA, 320 bp, Heterodera glycines
aatgccaaatgcgagtgtccgtttcagtcccaattcgactctctttcgaaatgattcggcgtctgtctctgctccgccctttcagtccgtcccttcccattattcccattggctcgtccattcgctcctccctctgcgcgaatacgaatgtcgcgtggctgcgtttgaccaattcggtcggatgggcccaattcgcaccgacggagtgagagcaaagacaaaagagagagcgcccgaggggaaggccgaaattaattcaatgaaagtgggagaaaaggtagggaaagggaaaatgccgaaaaggggagacaaaggcaatg

SEQ ID NO: 106683 - DNA, 62 bp, Heterodera glycines
agtgcgtttgccctccgtttctgctttgatttcctttcgctttcagatgatgcgcaattatg

SEQ ID NO: 106684 - DNA, 352 bp, Heterodera glycines
attcatgacagcaatgttctgaggtttaggggtagacaaaatttccaaaaaatatattctcaaaacagaaaatcccctaaacctcatcgtaaattttctcatgctaatgtatcggcactgtcagagccacaaaattatttttgggttttttcccttcatttttataccccagaaaactgatgattggcaccatttcccggcaaattcaaaatttgagacaatttttattggtcacgaattgttaaactagtttaaaatgggttttcccattcattgctgtcttggtccattttccaaatcttgtggccatttttcaaaatgtacccattttgttttacaatactttaccatg

SEQ ID NO: 106685 - DNA, 1003 bp, Heterodera glycines
  unsure (1)..(1003): unsure at all n locations
gtggaggggatggggccaaattttggggccggatattgggccttatactactgatttgattttgtaaaaaatcacctattttttgatttagatacaacttttttaaagacaaattaaaggttttgtaacgcagacggagaaaaattagaactttgaaacttttttgagaaaaataatccaagttttcaaaaaattttcgccgcgaaatcgcggtcgcgtaccacccttgatttgtgcccaattacaagtctcaattttcctcaaattaataaatttagtttttttgttttgtttttttccatctgaaatgctttttcataccatctatagccatattcgagatttttagcttaaatttcaattgagaaatttaccctcacttttagaaaaaaaacacagaaaatataattagtaccggtagtgtggggcttatccacccctaagcgcatttaatccaaccatttttgtgtctcgttaatccgcccatttgcactagtgctcttctctaagcccaattttactgttgttcgtctcctaaaatttgggcacctttcgttgcccattgaatataaattatgaactggactaataatgatccgaaattctaatacattagctcatttttattttttaaattaaatttataattttgaaattanattttatgcaaagaaagatccaaaatcgaggtcgacagaaataaaaagcgataaaatgctttcggcttatgattgatcccatgaattattctcacctttattttatttaaaatactttttttaagttcataatattttaattcttataaaaaaagacaaccaaaattattgtccttttttaatttattattttattttggtctttgtttttgtccgagtgccgtttcgagaatcaaagaattttcgaattttgtattttaaattaattttcaatttttttacatcatttcttgcattaatttgttgcagggttaggttaattaaataaattgcacaatgaaatg

SEQ ID NO: 106686 - DNA, 349 bp, Heterodera glycines
agatgctgttttgaacgaataaagggcataggttattttgaagaagtgtcaaataacatcagcaataagcctgcaaaatctaatgagtggaaaatacatgagtatagaatttattttcagaaagtgtcaacagacttttggaaaaatatatttgcaatttatcaacaattttgagaagtgagttagaaatgataaacttcacgattcaaaccagttttcggtgctctaattaaccgcgataaaaacatccgaatcaattaaatagcttctgagataataaggtttatcataaaatttcatttaaaaataaaccctcaattattggtatgaacgatactttccaaacatg

SEQ ID NO: 106687 - DNA, 445 bp, Heterodera glycines
ttttctgagccaatgttaagcattttaaatttaaatttaataattaaatggatttaagagtattttttaaatagttaatcaatttccaagagtttttttatatgctattttagaatatattaaactaaaataattcattttgaaagacggaaaatcaattagatcttattttacaaattccgataaaaacttactcaaaaatggaatgaaactgagaaagtgtgggttggcaaaaggcaaaaaaaaattcaaatgcgatcggaattcaatttgctgattgccgaattttttgagagtgtcggcattatccctggtgtataccgaaaaggtgaagcccgtaacattttttacacaaatattatacattaaattaataatggcaaatatttaaattttattgaaggttaattgcattaatttaaaaataattttccaaaaaaaaatg

SEQ ID NO: 106688 - DNA, 313 bp, Heterodera glycines
acttttggcacaaggcaacgaactgttgctggtgtccgccccgaaaatgaggccaattgtttgctggccgatggcgaagaagaacacggaggaggaggagaatgattaaatgataaatgaatgcctcaacaaatgtgtcttatttatttatattacctacttttcatttttctcaatcgtataaatccaattcatatccttttttttaatgggttcagtaaatcactgaatggtttcaattccatttatttttacatttctatacataaaatccaattttttatcattgcagcagctgctgttttttgtgatg

SEQ ID NO: 106689 - DNA, 69 bp, Heterodera glycines
  unsure (1)..(69): unsure at all n locations
ccccagcagtttcaaaatttctttaataaaaaaatcaaaatgttccatttanccaaataaattaagatg

SEQ ID NO: 106690 - DNA, 334 bp, Heterodera glycines
gggttgggggggggggcgggacaaaatctcgccgcagaaattttaaaaaaataaaaaatttaaacttaaaactttttcaaggagaaaattcttagaaattttttttataagaaaaatttaatgaaaaaaaaatttgaaaaattttcagcaatttttttgaattttatgataaattactgttttttgaaaaactttaaaaaaatttaacaaacaattctttttgaaattttcttataaaaaattttttaagaattttttccttgggaaatttctaagtttgaaaaaatttatagaaaaatctgacgtgaaataaaataatttcctcgtccagatg

SEQ ID NO: 106691 - DNA, 511 bp, Heterodera glycines
catcagcgtatgtttttagaccgattctttttaagacttttgctcatacttcttatgtttcaatcgggctgtagtttttagcaaacatacatgtcccataaatattaagaacccaaaaagtttataaatatagaatacaatttttatatttttagaggtgcgccatttgttcattttttgcgcattgccacatgaataaaaaagtgattgtaccttactataagcacatcattacttgtattatcgctatctgcgaagagtttggccaaaattctcggttttaaaacataagtagaatttatcattttggggcattattaatttttaaaaaacgtaacaaattttcctctaaatttttaaataaatttctttgctttttaatttgggtcagtaaacttagtaaaaagttcagcccgatgcgatcataggaagtatgagaataattatgtacttctaattttgggaaagaatgtattaataaatgtagataacaatcaaagcggatgccatg

SEQ ID NO: 106692 - DNA, 88 bp, Heterodera glycines
ggtaatgtctttttttttaccaaaaagatggcaaaaaacaattgtcggttctttagttttctgttcgataatcatcaccctacccatg

SEQ ID NO: 106693 - DNA, 734 bp, Heterodera glycines
ttcgctcttggggagcttcgctacctagactgtgaagcggattcaaattgatcgaatttggttagagagatttttttgaatttttaaaaaattattaggaggttttttagtccacattgagggctcaagacgggcgcttcacgcccgttttttagcttgttagaccgtttcgcgtcctcagtcgggcgcttcgcgcccgtttttcaaattttgttggccttacagagattataagagatacaacagtgattaaaagaggtaaaaagtgattaaaagaagtacaacagtgattaaaagaggtaaaaagtgattaaaagaagtacaacagtgattaaaagaggtaaaaagtgattaaaagaggtacaacaatgattagaagttagctcttgttgtggagatttggaattttttttaaattatctgggacttttaggccgcttcgcggcctcgaacgggcgcctcgcgcccgttttttaaattttgttgggcttatacaggcgcttcgcgcccattttttaaatccgttgaactcatacgggcgcttcgcgcctgttttttagcttgttaggccgctttgcagcctcagtcgggcgcttcgccggtttttcaatttttgttggccttggacgggcgcttcgcgcccgtttctaaattttgttgaacttggacgggcgcttcgcccccgtatttaaatgttgttgagctccgacgaggtacaaaattgttggaagatg

SEQ ID NO: 106694 - DNA, 819 bp, Heterodera glycines
ttgcggaaatcgggaaatagaaggatttgatataaaatatgaatacctaaaatgattagtagggctcggattcttagggttttacttgaccgggcccaggctgcccattcaaaaaaaagcccgttttgcagggcgacccgggcccggtccaaaattttggccgggcgctcgccgggccggttttaaaatttgtgaggattaataaaattgaaaataattggcgctactgtaaaagttggcctttttgaaaattttttaaaaaagtcatgaaaatacatttccgggggttttcggggccgctgatcacgaatatgacattcatttcgaccaattttgaaccccggacccggattcgaacaaaaagtcgaaaatcgtaaattttcacttttcaacactgaattcgcgccgcccaagacacatttatgtaattcaatgttaaggagacacactatccatttccagcatatcggggcagtattaggaaaataggatagtgtgtctgtcctatataatgttattatcataaatgtgtctcataagttctgagtaccacatatgtctagagatttgaaattacaatgaaaaatttctgatcataaatccgggtccggggttcgaaattggtcgaaatgaatgtcatattcgtgatcagcggccccgaaaacccccccggaaatgtattttcatgacttttttaaaaaattttcaaaaagggccacttttaatatagcgccgaaatttttgtttaattttattttatgaattcggaaaatttagttccatccatattttgctgatttcccgtttcataatcaaatg

SEQ ID NO: 106695 - DNA, 283 bp, Heterodera glycines
atttaaaaaacccgatttagttacagttttgggcattaaatattttcaaaaaggctaaattgtttctgaattttaaatttgttaaagccttttacccaaaaaattagaattttgaaaagaaattaaaagttttaaaaagcgtatttgttattatgttattttagacatttcattaaaaaagtctaaattgttttcaaactgaatttattaaaaaaaaaaaatttttttttacctttattaagaaacttttgtcataagcgaaaatctgccctggcccttgatg

SEQ ID NO: 106696 - DNA, 575 bp, Heterodera glycines
tgtgcaacaaatagtgaataatttatgtataggtgtatatcgtactaatgtgattgaggagacggtggatatggtacttgtatactttttgagagagaatgtttggttggctccaaatgttttttttgtcagcggtgtttgtataccaatttagtgacagcccccggtttggaaatgaaatgtaaaacgtttttttttttcttgaggggtgagagttgttcaaccaattgtattctagtttgacatttactttgaatcccggattcaaattcaaaaaaaaagtagtcgcagaatttaatgaatttttggggtttacaactcagttttttgttcaaattcgacattaatgcactagaaacggtcgagaccaaattatgtattcagacaaatgtaattataggcctgtaactgggcaatttcgtaattttccccaaaaaattgttggccctcttgaaacaagtatacgagtacctttgtttaagttaacaattttttgttttgtgacatatctcatctcattgcttgctttcatgtacaatattattaatgtgcactaattacattattagaaaatg

SEQ ID NO: 106697 - DNA, 785 bp, Heterodera glycines
ttgttgcacataaaatatggccataatgccaaaatatgggataaatatggaaatatggacataaatcgcgaaatatgaaaaatataaaaaaaacgggtatagaaatccatcctagaggcttcataccaagctaaaaacatatctttcgtgagtttcaggcctaccacagtccaggaaaaaaatatagatttccataaattgggaaccctattgatcagtgtcagcttctccctaaaatgggcaaaattaattatattaatttgatcgaattttccatatttatttaatctaaaatgcaaaaatgtatcattttaaaacagatcgctgcttcttctttatctccgcgaaccatcgctgaatttgcattttttaaaattattttttcccatcgtttgtccgccatttctcccgtcccatttccctcttttttgctcctccattaattttttgttggccttcgtaactttgcaatatttcttttaaatgattttatgtcccaacttttaatgtcctccgtccgcttacgtttatcagtttaaatccaacaattcaagcaaatcatttgttgaatgaaatgactgaattacattttttggaaatttgcaatttgctgccatcgaaggggacgtgctgattcataattattttttaattgactgaccaataaaaaaggttcccaaaatttaactctgtatgacaagccggctaacatttcattatcacatatttcgaagtcaaaaaattttacaacttttttaatgctttaaattatagtgaaaataatg

SEQ ID NO: 106698 - DNA, 220 bp, Heterodera glycines
tttttacaatgttataaaaatgtgtgggttcttaggtttcatttgtatttacctgttttttatttaaattatcacggaaaaaaacatttttagcccggaaaatcattattaaaacggaactggcacatttgcgcctgtaacatatttatttattcaaaaataaaataaccaaaagaagggcacgtgccgcttacacttttggtagaaatgaggtcaaatg

SEQ ID NO: 106699 - DNA, 58 bp, Heterodera glycines
atcattcaaaaatttatgcaaaaatgacaaataaaaaagctttcagtcattgaaaatg

SEQ ID NO: 106700 - DNA, 129 bp, Heterodera glycines
tatcctcgaattaataaagttttgaattaaaaaatcttccttgttccatgtgaatgaatctttaaatttatttttggttaaataattcaaataaatttcaagattatttttttcaaatatttcgaaatg

SEQ ID NO: 106701 - DNA, 67 bp, Heterodera glycines
atgatccagtgggaccacaggagtgggaagaaatgaggaagaaacgacgaaaaagggcgaagaaatg

SEQ ID NO: 106702 - DNA, 124 bp, Heterodera glycines
ttgaaattgcaaaagaaatgacccctcgatttagatgctttccttttaagctgctttattatttataacaaatctgtcattttcttttcatttcatctaaaatttttgtttctagaataaaatg

SEQ ID NO: 106703 - DNA, 380 bp, Heterodera glycines
tgggggcaacaacaaactttttgttagctaaccacaacatttttaaataatgaatttcactgagagttaaaaattaacgaaataagcgaaataaaaaataaaaaattttgttcggtgaatttcaccacaaaatttacaaatttttaaagagttgatttttttaatcatagaaatggcagccaaaaagatggcacaaattttccaaaaaaaatatggcaaatgccatcatttgtgccatatcccctctatttttcgtcacctcgggccaagtgaccgtaccgccgaccatcacttgcatgccctcgtggaactgttcgccgatgatcatcgccgtgccaccactttgacaccaaacttcgcccggaaaaatcattttgatg

SEQ ID NO: 106704 - DNA, 287 bp, Heterodera glycines
aaacgattgcaaagtgatcgatcactgatcagacatttccttcctcttttttggaccaaatttcctttcacattattatttttagcaagaattaattgttcgtttaatataatttaagattttttattcaaatttatgcaaataacaaaataattaccctaatttggatttaattaaccttttttaagtaattttttttctttaaaatgcgttttcttcacgcgccaaaaacattcgttgcaattttcggcacttttttaatttgggcacccaacggcgaagcgatg

SEQ ID NO: 106705 - DNA, 267 bp, Heterodera glycines
acaataatattattattattattcaactgggtgctccacgaggaaatgtcagtgttcggggccaaaacaccgattaaattcatccattggtggaaaatgccagggatgaataccttctggggaccagccctaattaatgaattaaaaataatcaaaaaaattttaaaattttcattatgttatagcaatttcgatttatgcaattttatcggccgcaatttgtgcgaattgttgcaaaggccaggcaatcacacggtgcgcgagatg

SEQ ID NO: 106706 - DNA, 131 bp, Heterodera glycines
tgaccgaccaaacggcattcaaattgccgaaaaagggagtccccctcattttagtccatcagaacacgcccgcgcaacgcgacgaagtctccacctcttcggccaatccgggccaaaccgacacagcgatg

SEQ ID NO: 106707 - DNA, 1003 bp, Heterodera glycines
gaaaaagtgcctgaaacgcaccaaattttattgtcatgttattaatgaacagggctgcaaaaaatatgcacgaaaaatgaccaaaatcactcgcgcacccattcaaatttggatttaattttaggcataatcaaattttttttcctaagagatattcgaatcggaaaatatttgacgaaaaatggcaaaatatgcaaaaaatcggaaaatatttatatttgacgaaaaatggcaaaatatgcaaaaaatcggaaaatatttgacgaaaaatggcaaaatatgcatgaaatatgcagaaaaagccaagatatgcaaataaaagtcccgacttttatacgcaaacacaaaaaaaagaaagtgttttttatgcaagtagtaacccctgccacaccttcgccgcttgacgctaattagaagtgacaggtggcggaggagggtgtcaattagtcactaattgggggggggggtgtgctaattggtcagcggtcaagagggcactaattggtcagccgtagggtgtggggtggtgtcaattaattagggaaacctaaacctatgcgaggggtgtgtaaaattttcatgtactttttttttgacataaaatttgattgatttaaaaagtgacagccgagggggagggggaatttgattggtcagcgaagtgacagatgagggaaaaattcaaatttctgatgggcggggatcggaaaattatgattgatcaacaatgtgacagtttttgatattattaaattattcaaatgaagtgaaataatttgttttgcatttggactttatcaaacttgttatgaaggtgtaaatttgcaatttgttgacgatttcgcgcaatgtttcgaccgaaattaaattgtttgtcacttataaaataggtcaatttgtgaatatttaaggtttccaaaatggaattcattgtaattgctacatttgttccatacttttcttccaaaaattttccaacccattctattgtttacccaaaatg

SEQ ID NO: 106708 - DNA, 671 bp, Heterodera glycines
aattatatccgcgggcctccgccattttgagttttggcattccgtccattgccatttatccccaaaaatcgtctcgtccactcattctctgattacataattttgttaaaccccgaaacactccgtccattcttttgtcttttggtttttcggctcaatctttttaaaatcatccgttcttttaatagctgtaattttcatttttaacacaattgaaaagcgaatattttcaaatgcttgcttctggtttcttgcatttgtcgtaataaatttgttttggtaaagctaaaattttaattcataaaatagcaagaaaaaataaaaattagtctgatctatgcccaacactttcagattttttttattgctcaattttacgctgattttttctcttcactcaaatttaaataaggaaaatttaggaaatttaatcggaaatcggaaatccgaccccaaaaaatttttattttttctatattacacaattttttaaaaccaatattttaccaatgttaaataattataatcatataataaaaattttccacgtaatattgtgattaaatcatattttcatataattgtagaatttataaatttttttatgtcaccacttcattaataaaaatgtaaaacaaatttattattatttttatattttttaggaaatg

SEQ ID NO: 106709 - DNA, 423 bp, Heterodera glycines
aaattttccatttttgacttatttctgcataaatttccaattttttataaaattattttcctattatatttttcgagaaaaaacacctaaaaaaatatgatgtaacgacaatgacttggattttgtttttaagattttgattgaggcacaatattaaaatttttaatactttattattgcgtcatttgaataaaaaaaataccaaataacaaaatacaattttctgtttaaaattaattttttttccggagagatcagatgaatattttttaatattttgtagtttattttatttgaaaaattgtttttatggtaattttatttcatttatgaataaataaatgtataaataaatggccatcaataatcaaaagaaagaattttgtattttttaaaaataattttgagaatttttgataaatg

SEQ ID NO: 106710 - DNA, 439 bp, Heterodera glycines
tctcacactaaaccaatttactttacttttcatcctttttcctttgcttaattcttaaacacaaataaaccaatcgcattcccccttttgtggacatttggaaaagttaatatttggtgaaagttggaattaaataaggcacatcggagtctaagcttagtcaaatacacaacaatttttggtgccacgacccgggagaaggtcaaaaggctaagcaagactagctgaagcagttcagctgtggtaaaggctctgtgcccaaaccaaatccatcaaatgagctggtcttagttgtgtactaccagccgggctgtttgtgccaatcaccaaatttaaaggagctggtcaagtgtgttttccagccgagctgttgtgctgaaaaaaggactaagtgtcttcaaaaaaaaaattgtttaaaaaaaaagaattttggaaaatg

SEQ ID NO: 106711 - DNA, 212 bp, Heterodera glycines
tccttttttatccaacaatttttgcacttttgctgctgatggggttgtaaccaaaaattgtcacgtctcactttaggttttttttcattcttttttttcattctccaaatatttcattcccgtactaaatgaccaaaaaacgacggcaaaattccccaaatttaaatgagggggaggacattctcgcccgtctcgaccgacttgaaaagatg

SEQ ID NO: 106712 - DNA, 1003 bp, Heterodera glycines
gccagaaaagtaaataaagattatttgaattctctttccttgtctacgtgcatttgaattgtttttgagaatttaaaataattaaaaattatttcgcgaaacggcctttgtgtgactgcatcatttttacacttttcgcgaaatgacctagcaccttcagaaaattttggcattctgtcctttcaaagttcaaaaaacccaatgcggatgccggtgcgctattgggattcaaagtttttgcgggaagggatgccgctgtatttatcccgtaaatccctcattttccaaaattacggactgggatcacgcaaatcagtgcgggattccatcccgcgcgaatcggacaattgaaattttgcttattgatagcgtaattgtaactgttcagataacaaaaatgacatgagaaaaactcaaaagttgtgattttgtcaaattagctgatcatttttatgcagaaagatggattaaacgaactgactgtaattgaattacttttattaagagacggtaattgcaccattactgctttgaagaatacattcgcatttaattagtcgaaaaaatttttctattatttaaacgcgtccgatgaagtcgaaattttttttcttaagtatttaaacacatccggagaaatagaaaatttttttctaaagtattaaacgcacgaagaagtcgaaaatttttctaaaatatttcatcgcatcagaagaagtcgaaaatttttctaaaatatttcatcgcatcagaagaagtcgaacccgattgagtgcattcgaacctacagcattttaattaaagtgcattagcaccatagtctgactctgtactaatccctacccatttctgttttctaaacctaatgatcggcaatcagggttgtatgtgatcgagggaattcttatcgtacttcgttctctaggatttttgaaggaaaatgacacttttcggctgaaaatcgatcacatacaaccccaactacggtagaatttagtaaatg

SEQ ID NO: 106713 - DNA, 543 bp, Heterodera glycines
  unsure (1)..(543): unsure at all n locations
tttattcatctccctttttgatagtgaagcatcagagagccttattnnactttnnaattacatnntggtgcgtttcagagcacgttctaaaaaatatttatgaattaattttgcaaaataataaatagttaatgaaaagtcagaatttcgaaaaatttaaaaacaacaagcgttggcattttttcaggttaagttagtcctttacaatggagaaggcctgcaaaatatggagagattatatcgattttagtgcgctaggttcgatgaaactttttaaaatataagcctaaactttttggcctgtttaaaaaggaattaaaaatttttaaaatatttattcatctcccttttgatagaaaaagcatcagagagccttatttaacttttaattaacatttggtgcgtttcagagcactttctgaaaaaatacttatgaattaattttgcaaaaaataaataagtaatgaaaaagtcagaattttgaaaaattttaaaaacaacaagcgttggcattttttcaggttaagttagtcctttacaatg

SEQ ID NO: 106714 - DNA, 692 bp, Heterodera glycines
  unsure (1)..(692): unsure at all n locations
taattgagcagtttgnctctctctcctccanaatggacatgaatgaatataatgnacaaatanattccnccattttttggtgttaatgatgctaaatgtgggggaaaaattttatgttatgtgaatgaatgggttgggcgggttctcttcttctcatttgtgctttcacattcatattaataaacaattttattacatttggaaattcaataaaaaacaaaaatattttccaaaatccataaataattatttttaaattaacaaatcatctttttgtaaattcaatttattttagcgaagtgatttatgtttaataggattttttttttgttgttgtaaattcgaaataaataaatatttgagaattttaatgttgttttatatatgtttcgtggtttattatgaaaaattctcattttttttgtcaaaattagttaaaaattgaattaaaaaccaaaaaatgatgttttaaataaatattttagttttattttaggatctaaatacttaatttaaaaaattctttttaatttttaaattagttttttttaaataagtttcaaatacttactgaatttaaatgcttttacaatttcccctttttccagtgcttctaatcctgctgagatgttcgaactgcgcgcggaattgaacgcacacgaaaaattggcggaagaaaaaatcacagaatg

SEQ ID NO: 106715 - DNA, 179 bp, Heterodera glycines
atgaataacacggtggagacgggcgtacaggtacgacctggcccctcgaaccgaaggacaagtccgtattgattgctggcgaagatgaagagattgaagtgcctacgccaataagtcagacgccgggaaaaagccgattgcccaggaccaacaagaaagcgatcaagcagaaagaaatg

SEQ ID NO: 106716 - DNA, 1003 bp, Heterodera glycines
gtagagttacaatatcatccaaattttgaaagattcaaagcggtttttacccatccgagaattgaatttatctctttttcgcctcagctcggctatgtcttgggttttgaaaaacctcaaaatgtaaggaataatgaaattgctaaatatggaagtgatctccgtggtggatttgcaagctttgccgtctacgcaaaaggtctaaccgagaatatgattgtaggaaattcgttgagctcgctccttcgtgttgtatcagtgtcgggggcggtaccaggcgcgtacacggaaaaaatttacgactcaccgctttatgcacgtgttttgccaaaagaagcatcagaaattgaaattgaattgcgaactatgaccgacggacgactggtaccattttcctatggtacagtgctgatcgtattaatatttaagaaggtgataaatttttaaatcattcattttttgttaacattcttaattgataaaatggtacacactctttatgacacttcggtttcgggctatgatgcattttttgtgcaaaatggttgtggaatcggggaagattcctcctaccaagtttttcgaggagcgccaccatttcagcgagggtggggctcagcacagacgggtgcaggaataggggatatttttcgtggtctctggcgctttttcctaccattaattcgcagagccggagataccgtagcagatgaaacaattcagactggaaaacgttttataaatcgagtaatcgatgaaaagcctggcttgaagggaacagtagagacattggcaactgagagtaaacggggagcggacaatgttttagagaaggtaggatttcggcgctaatttggcacaggaggacgaagaaagcatataaaagctaacaattcctccattctatcacatcaaacgataattggaaaaacaataacaaagccattaattaaaagcaaaaagaggcttcgatcagacgcgtttgggctttattaaaaaaatg

SEQ ID NO: 106717 - DNA, 819 bp, Heterodera glycines
tttgattatgaaacgggaaatcagcaaaatatggatggaactaaattttccgaattcataaaataaaattaaacaaaaatttcggcgctatattaaaagtggccctttttgaaaattttttaaaaaagtcatgaaaatacatttccgggggggttttcggggccgctgatcacgaatatgacattcatttcgaccaatttcgaaccccggacccggatttatgatcagaaatttttcattgtaatttcaaatctctagacatatgtggtactcagaacttatgagacacatttatgataataacattatataggacagacacactatcctattttcctaatactgccccgatatgctggaaatggatagtgtgtctccttaacattgaattacataaatgtgtcttgggcggcgcgaattcagtgttgaaaagtgaaaatttacgattttcgactttttgttcgaatccgggtccggggttcaaaattggtcgaaatgaatgtcatattcgtgatcagcggccccgaaaacccccggaaatgtattttcatgacttttttaaaaaattttcaaaaaggccaacttttacagtagcgccaattattttcaattttattaatcctcacaaattttaaaaccggcccggcgagcgcccggccaaaattttggaccgggcccgggtcgccctgcaaaacgggcttttttttgaatgggcagcctgggcccggtcaagtaaaaccctaagaatccgagccctactaatcattttaggtattcatattttatatcaaatccttctatttcccgatttccgcaatg

SEQ ID NO: 106718 - DNA, 147 bp, Heterodera glycines
ttcgacctcaaagagaaactacctgaataatgctgcaacgacgtccgaatcctcacccacgcccttgcagaactacgccgggaattcaaacaacttacacaaagggacggaaaacacggtggaatcgacattttgtggcaagccatg

SEQ ID NO: 106719 - DNA, 231 bp, Heterodera glycines
  unsure (1)..(231): unsure at all n locations
tgtgctgcagcagcggctaaacattatcccgaatactcagattctgtaangcttggtgaaaagaagtgctctcattgtggggcactactcttcccgcatgaggacagcagcctttgctgtcgacagggaagagttgtgttgccgaagcttaacccgcacccaaaagagcttgaagagctcatcacgtgcgacaaacaatcccgtgaagggaaagaatttgtgcggcatatg

SEQ ID NO: 106720 - DNA, 484 bp, Heterodera glycines
ccttgtatttccaagtgaaaaaggacgagaaaaacaaaatttaacaaaagatttttgtaaattcgaacttaaaagttcactcatcaatagctgcaaaattcacgtaaataatgtatgttttttggtatttttgagattttagggcgattcttagtgggtggttttatcagaaatttttgggttgattcttacaattatgggtgcatttttcgttttattgcattttgctaataaattttgggcaaagcgccaaaaatagttttttttcaaaaaaaaaaatagattttttaggctttaaaaataaaaaattagaaaataggccctaacaactcgaaaagtagcgtaacaaccaccaaaaaaaaaaaattgtcgtgcgtttcagaccataggagttcaggaaaaaataggctaaaacctaaaatcttatctttaatttattaaacaattttactaattttttcatttttatcagctgttgagaatg

SEQ ID NO: 106721 - DNA, 379 bp, Heterodera glycines
ttgctgatggtgatcgtcgtcatgtaatgtgcatcaaaagacgtaaatgctttttcaaatattttgcttggggacatttgcccttacaattttcccaggataattatcaacagtaaatgtttctacaaaaatttttaaaaactttagcgttttttttaaagtttatgatgaattactaattttttcaaaatttttccaaaaaaaaaatcccttttgttttttaaattaaattccagtgtttttcgggaggtgggaggttaaactggaagcaccgagggtgccttggaatgattttaggattcgaaaattgactccaattatcatttttttatttccaattttagtcagcaaaaaggcgagcattgaactgtccaaaatg

SEQ ID NO: 106722 - DNA, 851 bp, Heterodera glycines
atctgagtctttcgtttttatttattttttgcaaatctcactttgaatattttttcagaaagggttctgaaacgcaccaaattttatttacatgttagtttaggcactctgatgctttttctatcaaaaagggagatgaataaaatttttaaaaatttttaattcctttttaaacaggccaaaaagtttaggcttaacttttttttcagaaactgatcagaagcgcaccaaactttgcagggatactgaaaggaagagaaataacctattttaaatattatctagtcagttcatttaaataatttttatccaaaaaatttttttttgggttttcggggcagtccccctgaaccgatgcgcccagatttatggggagaccgaatccttcgggaatagcttccctatagtctgtactttaattctgcgttggatttttgctccccataaatgtttgagtaccccaaacggacacttgaaaaaatcgatttttttgttttcggggcagtccccccgaaccgatgcgcccagatttatggggagaccgaatccttccggaatagcttccctatagcctgtactttaattctgcgttggatttttgctccccataattgtttgagtaccccaaacggacacttgaaaaaatcgatttttttgttttcggggcagtccccccgaaccgatgcgcccagatttatggggagaccgaatccttcgggaatagcttccctatagcctgtactttaattctgcgttggatttttgctccccataaatgtttgagtaccccaaacggacacttgaaaaaatcgatttttttgtttcataaatatttttttcagaaagtcatg

SEQ ID NO: 106723 - DNA, 651 bp, Heterodera glycines
atataaaattattaatcatctacaaaatgaaaaacgcggcttataaaaattttataaaaaatattcgaattattgtgttattaagcgtgctggtaattaattattcttttaaattaatctcataaagtttactattgctttggtcttactttatttacattgcatttttactatacgataatctaatagtaatcgcaaaaatgcaccggcagtgcttgcgagtaaaattaatttttctcaaaataaaaatgatttagacgagtaacaaaaaaagtcctcgctactttgttatattttttgaatgtatatttttctctacatttctaataaacgttttctattttttctttttaatcttggcatctatagttgacgccatgaaatctactactctcgatttcggaagttctcgttttaatatgtatttgtaataatttatttttacggattttgcatctaaattccaccataattttaaaatttaatttgtttatttttgccttaacattgttgaaaaggctttaattttcttaaattaaagtattttatatagatttattttcctttattttaattcttatattttaattagttttcatttttttactatatataaaaagtcctccatattcagttgaaattttttatatg

SEQ ID NO: 106724 - DNA, 303 bp, Heterodera glycines
tttcgaccgccgactttcatcgcgtcaaaaaaccaatagaccctaaaagggtgaggttccgccaggtgcggttttcaacgcttcaaaaaaaccaatagaccctaaaagggtgaggttccgccaggtgcggttttcaacgcttcaaaaaaccaatagaccctaaaagggtgaggttccgccaggtgcggttttcaacgcgtcaaaaaaccaatagaccctaaaagggtgaggttccgctaggcgcggttttcatcgtccaatttcaacactcaactgaaaagcgatcgataaccaccgacaatg

SEQ ID NO: 106725 - DNA, 69 bp, Heterodera glycines
tgtcggactggttgacctgctgatcaaccgtggtgagaagatgccctgttcatcttttgctgtcaaatg

SEQ ID NO: 106726 - DNA, 401 bp, Heterodera glycines
tttttcgtgcgttggccaattttttaatgttttcggttgctttttgatttgttcctttctcttaacccactcaatcgctgcgctgatcaccgccgcctcgccttttctcggaattgctgccaattcgtccgccgattggccccaatcatcgccccctccccctcccccccccccaatcattttctggtgctgatccaactcaccgaatttcctccctttcttcccattccaatcgttctcctcctcctctcttcttcgtcctttccatcatttaattatcttcctaaaaatctttccttcttaaacaatgacgtcacttacaattttgaacagtcccattttttttaactatttgaaaatttccctccttccaagctcagtcttctgaccaaaacgaaatg

SEQ ID NO: 106727 - DNA, 921 bp, Heterodera glycines
attgcaagaaccacattgacgaagcccactctcctgattgctttaaaaatattttttcaagctatttttttttctaaattatctgcaattgtccgtccgaaaatgtccaacttcgcctgttatactgcaagaatacccatttttttggccaaattatttacaaagcataatgctattgaattcttttattatttaaatttttagtaaaataattggccaaatgttttttgtcaccaaaagttagccaagataaataacttttatgtaggtagtacaataaacatttaaaattatgccacttttatacagttagttggggtcgaaaaccaaagggggatcattttgatttgcaacaaaagattattgcatatttaaaggtggttgattatgaattgtgcaatttatttttgtcatttgtgactttcaccaaaaaaacttatgtttttagtcaaaagggggtccgtcctttagtgtttaaaattttgacagtttcaaaagaattaaaaaatgaatgaatcaaaataaaatttagccttaagggagcatggctctagtgcacttagacatccaattggctttttggcatccaaccgatgacttccttcagtttctttggcataacttttttcttgggtcagtgcttggatcaaacgaagcttaaatcaataatttataaatacaagaaaagagagcaagaaccggtaataccaagaatgtaggtattgaccaagtaagaaagatgatttaaaaacaaggataattttgattgtacgtctaaagtgcactagagccgagagcgctttggactgatataatttattacaaaaacctaacgtttaagtgtttacccttcgtttgatatgtaatttctctaaataattaaaaacgcagtttttaagttttattttctaggtcacaatg

SEQ ID NO: 106728 - DNA, 125 bp, Heterodera glycines
attcaaaaatttaaatattttaggttttacttaattttaggattattttcccgtgaaaatttcaatgtgggcttcttttgtcgaaaatatgttatacgataattgtaatttgtggatacaaaatg

SEQ ID NO: 106729 - DNA, 474 bp, Heterodera glycines
tttacgagcaaaaataagttgaaaaaaatagtgtttaaagtaaaaatagttgttaaaaagtttcataagcgaaaatagttgaaaaaaagttgctaaaaagtcgctctaaatcgaagtgttttttgcgtttatctcaccatatgttatccgcaaaaaaaacatatgtgaaaacctaaaaatccgggccctgggtatgacacatcattatggggttggggactgttaaaatgagaattgaaatggtatggaaaggttacggtaaacaaaaatcgtactttatttctttattatttttctgttttttttaaatttggtgtaaattaaagtgccattaaatacaatcaaataatgtacaagcttcatctcggcgagacattaactaaaggagaaaaagaagttgatgcgtttttcgaaaaattgtcattaattttgggtgccaaaacgcggcttttgaaatatttgaacgcaaaaatg

SEQ ID NO: 106730 - DNA, 165 bp, Heterodera glycines
  unsure (1)..(165): unsure at all n locations
tgcatagatgaaaaggaggggaccaagaacacttctcaatttcagtcnncatataaggagggaagtgaggggtgaaggtggatggaagaaaatgcaattaaatatatgtacggatggcgccgtgggggtgggaggacggcaaaagggcatccatcgccgcccatg

SEQ ID NO: 106731 - DNA, 213 bp, Heterodera glycines
tgccttttttagggcgaccccgaaaagaggggacattcgaccgctttaactccgtctttaataattttccatgtcttgctcttgagtctcgacaatttttttactctcgaacgcaacatacacttaattttgtaaaattatgaatgtgttaaatgtcgtgtcatttagaaaattttgcataataataaaacaataattgccacaaaaacaatg

SEQ ID NO: 106732 - DNA, 823 bp, Heterodera glycines
aaaaaagtgcaaaataggtgcgaaaataggtgttaaaaattggaaaaatccaatgtatttatgcataaaagttccaaaagtgactaatttttttataaatttcgcccgcacaattcaattggtcaagaaaataaataacaaattttattttttattttttttcatttcttaattgtgtatttgaaaatttttgggtcgattcatacgggtgtatttttctgaaatttttgtgatcgttttataggggatgtatttttcgtttttattgcacttttgctatgaaatttctggaaaatgccaaaataggtgctaccccccccccattttaggtgtttttaggtgctaaaaagttgctccaaatcaaaaattgttcggagaaaatgtgtttttcgtgcttctctcatcaagtaatacccgcaaaaaaataggtaaaaccctaaaaatccggtctctagtcattagtgcgtccataattgacttgcacccggacaatcggacaatttaaaatttgacactaaatgagaaaaaaaagattataaaaaatggaaaaacaaaaacaaagaacataagggcaaaacagcagatgcttttggaaatgtcaacgatttgggtgacttttgttgatagaaacacttgccaatgcttaattaaaagcctttcccatttccttgcgcaaataatttgcccgttttctcgcaaaacaattcctttccattaatttgaggaatgacaaatccatggacattacctaaccatccaacaaaatcccaattcaagcgcaaatccgcaatgataaattttcatttttataaattatccaatg

SEQ ID NO: 106733 - DNA, 98 bp, Heterodera glycines
ggtttgttttatagccaaaaatagtaaatggattcaaacaattttacatttattcttagataaaacttcgaattctccacgaaaacttccagcgaatg

SEQ ID NO: 106734 - DNA, 144 bp, Heterodera glycines
tatgtgacagctctgtaagaaacagctattctatctaagttttaatgataacacacttaaattcaccttattaattatttattgataaatctttaggcactcattgccacacaatgttccaatataaccaacaatggcaacatg

SEQ ID NO: 106735 - DNA, 214 bp, Heterodera glycines
ttattttttatgacaaaaaaattagaaaacaaagggtcccactttggttttaaacagtaaaagtatcgaatttgataattcaataataaaattgtcttaaaattcttatcttcagcgctcgctaaagcatgcgtttgattgctagaaagaagtgtgcgctaatgacgcctttttcaatcaaagaaagttccatgtgtcgatattccctaaaatg

SEQ ID NO: 106736 - DNA, 85 bp, Heterodera glycines
ataatttttgttttgataattttgtctcatgtttataacatttaatattttaaattaatcaaatttgtttcttttttttagaatg

SEQ ID NO: 106737 - DNA, 265 bp, Heterodera glycines
ttcttaaaattcaatctaattgcttttgctaaagtcaattcatccattaattttataacagttttatttatttatttatttccaaatttttggtttattatttattatttcaaatgatgaatcattggttttatatgaaactaaacattttccattttacattgaataaccacgaaaattattcatttttactaaaggcccttttatactttttgtattagattaaaaataagaaataaacaatttcacttttccaattcaaatg

SEQ ID NO: 106738 - DNA, 289 bp, Heterodera glycines
tattctggtcaatttgtgcaaattcctccgattgcaataaaattttcgtattttggtcaatgaaatccaagcagcgaagagcaaaatccttaaaaaaggcaatttaaaatacattaaattcatttacaaaaaattcctcaaaattcagtgcaaaaactttactttttcgctgagaaaacgagcatggtcaatgacaaggaaaacattggacaattgaccaattagactgaagcagccaaattcaaatttaagccctttcttcggatgttcaaaaatttaggaattgatg

SEQ ID NO: 106739 - DNA, 369 bp, Heterodera glycines
aataaattttcaagaaattttccttaagctgttcgtaaacaaaaatttcatttatccaataaaagtttcgtttttttttctaaaattgacataataatatctgtcatagacggggattgatttgtttgggatttttttaaaaatcaatcaaacaaataatccaattttcatatttcattcagaagagaaaactttatgctttttcttaagccataattttagatttttattttgaatttcgaattttcatttttttaacaaatttttatacatactaatattacaaatttttgctttttttacgcattcgtctttgttaaaaaaaataacttaaatttgctttattttttaataaatcattaaatgatg

SEQ ID NO: 106740 - DNA, 973 bp, Heterodera glycines
tttttgagaaaatttgaaaaatacattcctaaaaaagcaattttttgcgtatttcttaaatttatttcaactgttgaaagcaaacaaacaaatcgaattcttaattaatgtcatgggaggatttcaaagttccctgttggaacttatttagctgaaagttttcaatttacaaaacaatttatcagaaaaaagacatgacccccgaagaacaccaccaaatgtattatttcttttataacaataatttctaaaggaaatcgaatagaataagctaaaaaagcatttttattctatgtaaactaagaatacattttctatacaatattcgttaaacgaaaaggtgggattacgcaattatttctttgatgatctaaaatctttaaaaaaattaatgtataagcatacaaaaattcgaatgagattcccaatagagaaattgtgaacaaaatttaaaatgtaaccaactattcttttcaatttactaacataatatgtaaataaaaatatatatatatatatataatcatttcgagaaatgttgcgtgaattttcggtaaaaaaatcaaataaaaatattaaatactaatttaaaaaatatgtgattataatagcgcttgttataattatttaaaattaaaatgcaaataattacgaaatgcttaaattgtctaatgaaaggaacgcatataaaattttaaaaaatgttcatctttttatcaaggaataaaaaatgaaattatattctcaattgttagaaatatataaataattttaatattgaatacaaagaataactcgtattgcctctaaacattattaaaatcagaaaaagctataccttaataatcttttatggaaaataaggaaccatatttaaaataaaataaaatttattaattaccaaatattattattaattttatatttcttgtaaaaatataaacataatttcttttttaaagattttcaaatg

SEQ ID NO: 106741 - DNA, 131 bp, Heterodera glycines
ggtttgttctttattgcgctgttaatagacaattgtaaaaaatggattcaacacggctactcttaaaatactacttttgttaaacaaaaacaacttttgaaatttcagggcaatttctccagaacgacatg

SEQ ID NO: 106742 - DNA, 431 bp, Heterodera glycines
tgcctattaaatgggggccatgatgccgacactattggatgttggtggacatcgacggccgcaccaatggcaaccaatggaatgctatgggacaattgtcatgtgagaacggggattccatcaaagatgacaagaccaaaacaccaaaaaaaacccaaaatatggataaaacgctaaaataccgacaaaaatttcattaccaaaaatcaagatggaaaaactaaatagataaaaagtaccaaaatatgagcaaaatatttcaaaaattgggttcaattaacaaaaataaagaaaccatcaaatttttgttaaaaattctttttaaacagaatttttaaatatgtttttatttgattttttaggccaaaataagtccaaaaaatgccatataaatccaaacgctctaatgacatttatcccttctcaaaatg

SEQ ID NO: 106743 - DNA, 591 bp, Heterodera glycines
cgtttgtttttagagtgataattgtttaaaaacttgtaaatatatattaaatgggttagtgcggttgttcaacatcgacacaattcaataaccacaaacaatctgggatgtggggtccttttgttggtatttggaattggttgcaacaattagcgactcaggaaaatccccgtgtacaagttttcatgacatgacaaaatttgaaaaacaaaatagtctcccctttggaatttttggcggtggaccaaccgttttacaatgcttttacttctcttaaaatttagtgtcatttcgatgttctttgaactcgagcgcaaggacttggagtttgtcaaaggtgaaagctttgcgtatcactgaccgtgcattggtggtggtcgattgcgtgtcaggtttgtcatgaaatcgtatgctttttttttggttggcacaaaccaacaaattcgcggttgcatttctatatcaatttggcttttagtttcaatttctatttctacatccgctctttagggtgtttgtgtgcaaactgagacggtgttgcgtcaagcaattgctgagcgtatcaagccggtgttgttcatgaacaagatg

SEQ ID NO: 106744 - DNA, 179 bp, Heterodera glycines
aaatgaacgattttttgtttgtaaaatgattccttaactttcacagatacgtcgaccaaaatgccatcgcttttctccaacattttcgccaacttttcgccttttctcagattaatttggccataaatacgtccgatgaccgcactttggtgtcgtttttgcgcaacatttttccaatg

SEQ ID NO: 106745 - DNA, 486 bp, Heterodera glycines
  unsure (1)..(486): unsure at all n locations
atcagtttaaacaataccgactttcgaaccttaaataaattttgcacatcaccagagtcccnccttagggttttaaaaaaattcgaaatctacgattttattaacatagcgctcattattcaaatatgaattcgaaaaagaatttaaaaaaagtaaataatttaaattttgtataaaattaaataaaattgtgtaaaaataaaatattgaaataaggaaatgaatattgaatttgcaaaaacaaaaaaaaatcaatcaaattttgttggcattaattttgtcattaaattaatacaatgaataaaaataatgctactttaaatcacaatgattcaattatttttatttgttatattaaaatttttcatttcattcgaaattattttttttacaataaaaaaatttaataaatcattttactttatataattttaattttttagataatttcgttgcaataattgtaatttcagagacataaaaatg

SEQ ID NO: 106746 - DNA, 1003 bp, Heterodera glycines
ttgctataaaaatgaatgaataaaaaattaaaaaccaaatattgggaatattttcttcaaaattaccaagcgaacatttattttcctgaacaattttttcaataaaatattaggtaaaagacaaatgtgtttctgattaattaccaaagaaaggtaatttaccaaaaatatttgatttatttccaactcgccgcacattattttaacagctttcacgccaccatatttttcgaagcaaaaactagaaaccaactcatatttttgcatgtattaaatataaatatttatttaaaaacattaattagcaaaatcatgggtcaatcaatacattcactttcctattggattttcttaaacccattgacacttggaaactgagtaaacccggtgatgaaaagatagtcaatgctttggcgcggagcttagaaggcagttccgtgcagaaatttacggtatttctctttacacgtgctgtctcttcttcattggcttattcgcttcgtgttatgacgaaaggccacggcaaatgggccaaggcgagaaattcgcggcgagttgggagttgggccacggcgagaaactcgcgccgagttgggccatggcgagaaactcgcggcgaattggccccgccgaagtgccctgacccccaaaacaacccctgcgttcactctatgtgctctctcattccctcccaaagccaatggccaacaaaacaacacagagtcaattgatttctttcattgctttcccaattccgtctttcatctgtgttcttcacttatactaaatttttgcttcttttcacattattttatcttttaaatttatcggttaaagatttttttttgattttgaattttcaatattacacaaaaaattgtttacaactgttgcaggaccaccaacttatttttttggccattggtgaaactgaacggcaatcgtggtttcatttgtgtaagaatttggaaattggcaaagtgttcgtttggaaaagaaaatg

SEQ ID NO: 106747 - DNA, 146 bp, Heterodera glycines
agtgggtcgaactttggttgcaccgggagaaagcaaaaacgtaattttacagctaatgaatgcggggaaagcaccagttaaaatttatgggaattcacatttggctgacttagaaccaattcaaataaatgcgttaccaggtgatg

SEQ ID NO: 106748 - DNA, 863 bp, Heterodera glycines
  unsure (1)..(863): unsure at all n locations
tatcgtgatctntagggcattgaattatatgaaatttccatattttttttcctggactgttgaaagcctgaaacgcacgaaaaacatggttttaacctggtttgaagattctaggatgggttttcaatatccatatttgtctatttttggcaaatttaagtccatattttatgtccatattttggcattttccaaaaatttctatttgaacggccctcatcagctaatttggcccttttgactccaaagaccgaaaaattttcaaaaagatcataattagcaaaattttctcgaaaatattgaatgaatttaaattttcttaaaatttgataaatttagcgaaaattttacttttcagattgatttttcgctagcaatgaataaatttgagttttatagttgttgtttttttcttaaatttgatttttaatattatatattcagccatttttgaaagttttactttacattaagcgaattaaattaaattaaattaaattacatcctcaatttggaaaaatttatatccatatttttgccattttatgtccatatttagagattttcgcaattttatgtccatattttcgtggtttattgtcaattttttatggccagattttgggattttatatccatataattctacgccctagtgattttaaatatggattagggatgaaaatttttgtgttaaaaagcacggattttttgcctgaaccgtcgaatgtcctaaaacccttttatgaattttattaatccccgctttctgcattttaaccagccagcccagcttcttcatttggtgccgggttgttactcaaaaaattcattaagtttaaagaaagttatgacgaaaaatg

SEQ ID NO: 106749 - DNA, 72 bp, Heterodera glycines
actaaattttggaaaacaaaccaaattataaaaattgttattgaaccgaagctgaatccatgacctgaaatg

SEQ ID NO: 106750 - DNA, 189 bp, Heterodera glycines
caaatagtgcaggaaaatgggataaagtagttttaaaagtacctaaaaatttcaaattatgtagaataattggtaaagtaattttaaaagccaaagggaattttaggggttcaaattagagcccgacctggacatggacccaggcctggattttccctggatccagccccgccgcttctttcaaaaatg

SEQ ID NO: 106751 - DNA, 62 bp, Heterodera glycines
gagaagccaaattgcaaatccttgaacttgaacccgatggacaaccattcactgtacatatg

SEQ ID NO: 106752 - DNA, 62 bp, Heterodera glycines
acttgagctgcgtgaatagcgacagggaattgcctccccctgtagccgagagcgatgaaatg

SEQ ID NO: 106753 - DNA, 193 bp, Heterodera glycines
tttctaagacagcccggacacttttcattcaatacgataattgcacggcttcggaaaatgggactactgtagtagaagtatacagtaagccgtatcttttttattcagtacggtatttaccggctcccggaaaatgggggccttatggagcatactgtaattagaagtatactgtaagccgtaattattaatg

SEQ ID NO: 106754 - DNA, 461 bp, Heterodera glycines
ataaaatacatgcataatgcccaaatatggaaataaaacgcgaatttggaaaaatatgaaaaaagatggattacaaataattgacagccatattaatcactatttgtgtaaattcaatatatttttgttataataataaggtaagtttttggtctttttaataaattctttttttctataaataatccttttattgcgcacatcattaaattgagtaaatccaacactaatcaaatgcgagtgttgatattattattatttttatagaatcctactgagggttaaatttatttaaaaatgaaattttattctttatttttatttaaaattgtttcacaattttgtgtgttcgactatggtaaagaaggtacctcaataatcatttaaaaacacattaacattgttttattatttttctataaatatttataaatattcttttagtcttttgccaacaaatg

SEQ ID NO: 106755 - DNA, 1003 bp, Heterodera glycines
cacttgaccaccgagtcgcttgcttcttccccgtttaattcccttttctttttccttcttttttggaagaaagcccgaccaaaagtgcttgtcctccctttttagagcacttcccggacacggaccaaaacaaccctggtatcattcgaaagccaagagtttgtagatgtgcacaaacatattaaagttttgatttgaccctttttaaggtatgcaaaaagcgttcaaaaatgggacacccaaaaaaagtgcaaattttgactcgttttccgaacgcagttcgaacaattcttaaccgattgggatgccgatagtttttccttatagccagtccaaaaccctatcgaatgataccactcccgacccgtaacattcggtagaaagtcttaaattagtttttaagcttgaaactggggtatattattcttatatagggaattttctttggtcacctcccgcccgtgtgatctttaccaacttaggcccaccggcggaagcttaaaaatatgatactcatcttaaaactacagtatataggcggatagtcagcaacataaactcgaccttttgtgggattatgaacagattttgcgccaaaacaggcccactttttcatgtatttgtatccgctctacagatgatgattattttgatttttcttccaagtattttccatctagcacctatttttcagttatactattttattttatgatattatttttatagagaaatcttgttgatcatcattaaaaaagttaatggctctagcatgagttgaaatatcatgaattttttaaaatttcatcacttttatcgaatcactttttctgatcagttttggggtagggttaaaaaagccaaaaatttccaatagcaaatcgcctatgctctacatgatatcgatacattcccttgtaagcactcattagggatatgtgttaacgaattaatttaaattactttaaaaatttaaatataattttttagacaatccataatg

SEQ ID NO: 106756 - DNA, 728 bp, Heterodera glycines
atctacatactatcctcctacaattattttacaattaactcgtttttgtttaagcttttctgctctctgtggaccaccttttctccggaagagcgagcacagattgaaagtgttgccggtccgttcctttcgtccgctgtccatttgtgccagagggactccccccgtgccgtggtcacctgtttcatggaggcgtttgttctttgctctccacccattaaattggagccgttcatgctcaggttgttgttcagttgccatttgtttggcatatcaaatgagacttcccattgtttagctatcttggctccacctttaactgttggcacgtcgcagtgacacaattagaacgattggccagggatattcgtttttcggttgccgacccaattctgctgaacacctcggagccggccagcgaaaaattggcgcgttccccatcaccctggactttatttccaattattagaacaaccaaattattatttttgttgcttttccaggaagtgctagactgtttggctaaactctaccgccaattggacgaattggaccagttcagtgcgttgtggaagaggcgttcattctttgacagaactgccaaatgctttgcgttgtttcagcaggtggttcgatcaattcatatatttcttggaattattgcttttcattgaccaatacgtatttgtttttctgcccagggtgaattcgttcgtgcgcgtgaaatg

SEQ ID NO: 106757 - DNA, 601 bp, Heterodera glycines
gaaatggcatttttgaaatgattagaattccattccgagtgatctgaaagttttcggcgggattagttaacggaaaattgtttgggattaatataatggattctctaaagtgattaaagaaagagtgtctttcgaatgattaaaattgattaagtctgatctaaaagatttgaatgatctgaatctaatttcagacaaactgttagaattttgagtgatttgtggaattaaaactttttttattagaatgggtttccgagtgatcggaagcctttttcataaatgatcaattatatagaacatttcttggtgtaattaaacagaacaaattgataaaattttgagtgattgggggattaaaacttcttttttatttgaatggaataccgagcgataagaagcctttttcttaaatgatcaatttggaatggagttccgggggtgatcagagaaaattttttggggtaattaaacagaatttttggatttccggcaaccacagacactttgactgatcaatttttatttttaaattaggtgatcagtcaaaatttaaatcattgatctccctttcaaaggcgacgacgggcccgaaccgatg

SEQ ID NO: 106758 - DNA, 96 bp, Heterodera glycines
tttgagcacgcagtcacttttcgtgtccctccccccgtcgctttttttcggaattttgcgcatttaatatttattttagtttttttgtgtgaaatg

SEQ ID NO: 106759 - DNA, 222 bp, Heterodera glycines
tgcatcgagaatgagagctggcgagaggcatcgggagggtgtgaggtgtgcgggccaaacagaacggtcgccttttggcaacgccgcttcacagaaacaacagtcgacaagcaagtggtcgcagacaatcctgtggaggaatttgtcgattgggtagtcttccaactcccgctgaagtacgacacttatgtttattcgcactttggtggccgcttcgatatg

SEQ ID NO: 106760 - DNA, 280 bp, Heterodera glycines
tgtgagttttttgggagggatattttgttaagaaaattgcctctctttttcccttcgccggcgaccccccccccccccctccacctcttttctgtcttttttcccttaaattaagaacaaaaaacacattttgtctaaaattcggtaaaaatttttttataaaatatcaagcatttatttgtcgtgatttaattgactataaagattcaattaactataaaacaaataattttccaaaaattattcatataaaacaaaaatcccttccagccttggcatg

SEQ ID NO: 106761 - DNA, 867 bp, Heterodera glycines
  unsure (1)..(867): unsure at all n locations
ttattantccggtaattaaactattaacttgacataattcaacaaacacgctaatttaacattttaaatggggaaaatttttttaacatttttctcattagatttggagcacaattagtttaaggttttcatcgttaaaaaataaatcaaccaaaatttttaattcgtgcctctattgtttttcagcgggtctgatctgaaggcttgcaatgagaaaatgcacaaaagaatcgctgaaaggataattatgcattaaaatgtgaaacattttctcaattaatatgctggcgcgttttttaaatctgtcatcccccccccctcacaaaatatgtactgatttaactctttgctcttcgtttatcatttatctttatatgattaagaatatttaaagaaactttgtattattatttctctcaaaacttagcacccattttttgataaaatttagcaaatgtttatgtcagaaatcttcagaaatgaaaattttgtttcttttagtgacccaagatttaaaaaaattcaaacttttattattcggttaatttttgtgtgatggtcatttactccgtgatcaagaaaatgtcattctgtttaaaatgtcatgtcgaaaaaaacggcagcaaactttttcccctctctctgacaattttgccaccaaaaaattctcagactcatactcagtattaaaatgcttttttaaaggagtgattctgggcttttcattcataccattttctctttaattttgcttcacctgctggtcaaaacactttgttatgggtgagcttcgatttgggagcaaacaaaattgccccaggcaattaggggaggaatggaactccccatattttcatgcccaacatg

SEQ ID NO: 106762 - DNA, 274 bp, Heterodera glycines
aaatagaccggaaaaattaaagtcgaatttttaatccattcaaactaaaagtgatttggtcgctatttatttatttgtattgatttcatattatattttattttttggcggcgatctcgtttttaattgttttgcgctttcttgaggacattttttaaattaatgttttgtcctcaatgtaagcggatttttcccttttgtggactttttctttattgacaataaacaaattaaaagcttccctgattatatattttttctttttataattatg

SEQ ID NO: 106763 - DNA, 519 bp, Heterodera glycines
tttgatctcattgctcaccattttgctgctgctcctctgctacacagcggtataatctgttgcttaattaacaatcactgatttatacaaacaaattttatactggaaaatttgaaattaaaaattcggttgttttttaccaaaagttatgatttggttcacattttccgaccacaacttccatagtgacggaatttatggaagatacttaactcccaacgaacgtgacgcccttaactcattaagaattaatttaattggcatattttacagaaaggcaatattttaaattggcacacagttaattggaggcgcacttttcgacaaaaaatgccatttttagtaacatttttaagaatgtaaaagaacaaatttatcggtggtgccatctgtactctcataatatggcctggttaattcactttttaattggcttttcacttggaaaaattaggcaaattgaagtaatggaataattttattaattttgtattaataatttaatcgtttctcaaaatg

SEQ ID NO: 106764 - DNA, 280 bp, Heterodera glycines
caacaaattaaaatgaaaattagttaagaaatttcgtctttctttccccttctaaaggtttaatgaataattgctttttaattttcaaaaaaatttcatttaagtttttcgaaaaatgcatttttagttaaatattatttaaaaaaatttgtattttgtgaaaaaagaattattatttttatttcttcataatttcaataattttctgattaattaatttatgataaatgttttgtcagaatgttttgaaattttgcaggaaattacgtttggcataatg

SEQ ID NO: 106765 - DNA, 54 bp, Heterodera glycines
agctatgacggcaagtaaggatgatcctgtgagacactattatcccaggaaatg

SEQ ID NO: 106766 - DNA, 1003 bp, Heterodera glycines
tacgcgtcccatcacattttacgcgtcccaacgacagtttacgcgtcccatcatttacgcgcacaaaaatttttatctctttttccagtcgggacaccaattccgaaggattacccttttttcgaaccgtcaatcaaaactttataccttccgaatcgtataattgttcttgattgtatactttgattatcgaaatgtgcaaaagcaaccctaagcaaacttattgatgtcaacagtcagtaaacacaaaagaaattttcaaaagcctacgcctagtctaagccattgatcgagttgcctgtgtatgagttgacatgatactttggtttagtaacgaaatttttagttgaaaatttactaaatacacgacaaaaaaataggtttcctcttagttagggatggcacggaaggcaatctttcggaattgtggtcccgaaaaaattttttttatttaaaattcatagtttaagggttttcaagggtgctgattacgaatctgaacttggattggcccaaatccgaactcctgacccgagttcgaacaaaaattgaaaaaaaaatttcaagaatgcatttttttgggataaaaaactctaattcatgcaacaactattattttttgattaaaataatgcttcaaattgttaattggataaaaatgcgcggtttacgccaaaatttgatcgattttaacgtatacttttgaaaaaataattcaagtttttgttcgaattcgggtccggggttcggaattgggcaaatccgagttcatattcgtgattagcgtatttttaagcctagaaaaagtgccatacaaattaaaaaattttcgggaccacaattccgaaagattgccgcacggaattccgaaaatttgtggccggaatgccatccccgccatggacacaaaaaaatgtcatgggacgcgtaaactgttgttgggacgcgtaaaatgtgatgggacgcgtaaaaccgactagaaccaacaattatattttagatg

SEQ ID NO: 106767 - DNA, 91 bp, Heterodera glycines
ttttttcatatgaatttctaagaaaataaagcccatttacgaaactgaaaaagtgccgaaaactgtcttaataatttgctgcaacaaaatg

SEQ ID NO: 106768 - DNA, 254 bp, Heterodera glycines
ggtgggcccatttcaccaacccatttcagcaaagtgttcagatatcgcccaataatttgtttctgctcagtgagaaattgtacattgaggagaatttggcaccaaaatacctcgcggcactgaagcaatttttgcgcaaagtgttggaattgttgtacgaagacgaccaacggcaaacggtgttcagaagggcaaacaaagcggcggacatcgaacggagagtgaacgcatttgtggaggtggaagtgcgaatg

SEQ ID NO: 106769 - DNA, 264 bp, Heterodera glycines
gcgaccgggcactgctttatgtacagattgccccaaacacaggtgacccgtcggcgtggcctatttcccagcttcgatctgctcgactttggcctcgtccgggcgggcggtgggccggtgcgtccgcgcgcgttcagcgtgttcagctcgctggagcgtggcgtggaaattgagtcggtttatgtggagggccagagccgtggcgtgtacctgcagttcgagtcacggccgcccatttcggtccgaagcgacgcccgaggaatg

SEQ ID NO: 106770 - DNA, 574 bp, Heterodera glycines
tgccgcgctctttcaggcgtgggtggcgcagcagaaagctgtagttcaggtagcgtccgtcgcggtaccaatggacgcgcggctgcggtcggccgatggcattgcatttgaagcgaatggtgtcgccgagataagcgaactgatcagagggggtgggtgattggagaatgatcagtggagaaaaacgctgccattcaccattcccacctgatgggtacgcacgttttgtttgaagcgcggcggaccgtctgaaaatgtgtcaaaaacccatcattaatcaagcaaaagttaattattccggtccaaattctggttttgcagttcattttttgccatttttttgtcaaattcgcctttttattttagtccttcttccgtccgctgctaatttccctttctttcatagttttattacactcaaacgcacaattcacataaaaagaatgtttggcaattcgtttttcatttgtcatatttttattttgctccccccacaaactcacatcttgcggcaaagtgttcaccgatattccccgacaaagcacttctgctgggaattgtgaagaaaaggatg

SEQ ID NO: 106771 - DNA, 201 bp, Heterodera glycines
ttttcggcgaaaagctgaaagaatgcgcaattattggtgagaaataaattattattaatttcgtaaaaattcttttttaaatttaaatccaaatttattaatttccttagctttttactaactcagaaaaagtacatttgttttctaaatgccaatttaaatgagtaaaatcatttttttattttcattttactaattatg

SEQ ID NO: 106772 - DNA, 1003 bp, Heterodera glycines
attaaaagaaagtgaaaaataaataaataaataattgtcgaaaatataaataaatgagcaagcatattgaaaatgaacaaaaaatgagcggagatctgtggattatgggcagagtttgaaatcaacgaaatggcggaacaatctcgtttaagagaaagcattagctcctgccacagagcattgagtggccatgaatcacgtgaaccataaatgaatggatggctaatacattaagaatagctaaaaatatgatgatggacagagataagttggataacggtggcaaaaagtatcaattataagtgaaatttgacaattataaattaaaaatatgtttaaaaaaaataatttgtctatctttattagtagaaagtgtaaggattaattctttttgttttttgagcaccttatttggatggttataagtcggacgagaatcaaccgaagaagtatttgggagatgattcaatagtcctaattctgctctttcgaatgagcatttatttgttcaaaactattaaaatttcagagactagttaagttttttgtaacagtaacgaaatgagaggacaaaaaacaaatacagaaaatgtttaaaaaatatgaaacatttaattttaattttgtttggtatttattaattgcaaataatgattgtatataaattgaataaataataaatattaaatggaaaaggccagcggtgtgagtaaaaattagcattgaagggacattcattcaccttaccttccttcacatttgcgcaccaaaaaaaaaattaaaaggcggccacaacaacggtcaaaggagaattatggatggaaatttgaatatgcatttgtgtgtgaataggagagagagaatgaaaaaatggtgttattatacagtatattatatataagaaagtgggaaacataataattttaatttaaatataaaataataacaaagaaaatattttaattactatatatattttgagttggattcattgcttttcatg

SEQ ID NO: 106773 - DNA, 1003 bp, Heterodera glycines
gggttttaatttcgcctaaattacctagtaagttttttggaaaatttttctaaaaaatcgcttaaaaaaatttttccaaaaattacgccgtggcgcgactgtgacggttcaaatttggcggaggagtgccggaagcacagctcgacacaggcgaaacagcgcaagtcgccgatgggaacgacggcgccgaatggacgcaaaacaatgccaaacaaactgacgaacaacaacggcacttcttttattggaatgctctctctctttcttttcttctctcctctcctattctctctctctctctatttctttctttctctctctctctctctttcttttcttctctcctctcctattctctctctctctctttcttttcttctctcctctcctattctctctctctctctctttctttctttctctctctctctctttcttttcttctctcctctcctattctctctctctctctatttctttctttctctctctccctcactttcgctgcgtttgttttgccttttcttttgttcattttttcaaagttatgtgtggtgtgatatgtttcttttcctttctgctgagtctgttgcggcgtttggaatttaatgcaaaacgctttttcaattttttccagaatttttttgaatctatgaataatttgatgatttaattttatgtacaatatgtacctgtatatgggtttcatttgcctataatcgttttgtgaagaatcaacaaaatttagtgaagagagagagagaggcgagaaaccggttgtacgcattttcattcgtccggtaataaatgcgcaaaaagaagaagaagagacccatcccttcaattttttatcacattttgttggaacgagcaaaatatgagcagggcaaaaattgaaatatttttaaatttagttttggcagatgaggggaccaataacaaaaaccattacgcttaattgattaattagtgtttggtgctcagattggctaacatcagcatg

SEQ ID NO: 106774 - DNA, 828 bp, Heterodera glycines
tagagtcatcgacattttgtagcaataaaataatttttgaaaatggattgagagagaacatattcttgccgatattaaataacaaaattgtaaaacttgccttgatgattcagttttgtcatttagttagaattttttattaaaattatgtttccatatgtcaagtgtttaatgagactgatgaatgagtaatactattttgtttaaatttttgacattttattaaattgaaaaaatgtcaaaaagtggctgagaaattatgaaaattttaattaactttaattataattaactttatattaattttttttcagtgttttaggagaattcctccctggaagattatatttacattaaaatagaaccaaaaatagtttcatttattcttactacctaatcgtttataaaaaatataaaatattatttgactttttatgtatattagagtgttaaattgcttatttattacttatttttatgatttttcatacattaattatttaacaattattataattttaatacaattaattttatgtgtttaaagagttacgaggttttttttattcacttttcttttatatttcaaaatttttaaatgtttcacatgaactttcaagataaaaaaaaagaaacattaattcacattaattattagatcagataaataaatacctgtttatccaaaataaagcaacatttgcttcactcaaaataattttaaacaaatgtggtaaattcaggcaaatttttttttaattaaaatttattttaataataatttaataaaagaaaatttttttttataaaaataattggtgcgaaatg

SEQ ID NO: 106775 - DNA, 90 bp, Heterodera glycines
tcctgctgtacaattaaaattgttcccgtcagttttttattttttgtataatttttttaaatgactaaatgttgtgcccttttcaggatg

SEQ ID NO: 106776 - DNA, 62 bp, Heterodera glycines
aaaatttcatgaaaattttaaattaaaattatttttatgtgcataattacagtgttccaatg

SEQ ID NO: 106777 - DNA, 439 bp, Heterodera glycines
gaaaacggattaaaaatgagaattttaattcccattgtccgtgatgacgcaaaaaacatgcagcgaatggctagggtcttaggaaaatcaaggtaaaacattttataagaacgaaaattattcgaaaatttaagtcatcaatgtgtggctcattttttacacataaattcaaattattcactatccaacagttaattctttcgttccaattattaaaacatttattttcttgattttttttggacaatttctttattaccaatgaaacgattgtctagagaatttagaaatacagtagttaaggtgtttccctccagcccgcttagaaaaaaaaaattaaaaattactagggtaatacataagtagggttgcgattttaatgaagaaaactcgaaatagtttttcatgaaaataagcaaattttaaattttctcgcatg

SEQ ID NO: 106778 - DNA, 71 bp, Heterodera glycines
atgaaaattaaataaattaaggatttctttcgttggttgtgccttcgccaaaaaagtgtgaagggaaaatg

SEQ ID NO: 106779 - DNA, 381 bp, Heterodera glycines
tttttttcttcagttgtgcctttgttgcgaatgttgagagcggatttgtgaagcgaccgttagaagtaaaaaattttggtatttaaaaaaatctaaaattacacaaaaaaggtgaaagatgctcatatttttgagcaaaagccaacatttgtccgacacgacagaaatataatcaggtaggcccgacataaataaatactgaaaagtacaaatttgtcactgaaaatttattaaataaatgatgtttttaaacatttattcgtttttttttttgtctttttacatcgaaattcattttttcaatgtttattttttgaagttttcggtgtgaatcctcaaaaataaaatgaattttggtgcaacttagaattgaacgagatg

SEQ ID NO: 106780 - DNA, 261 bp, Heterodera glycines
agcgcaatgtaataagattagtttgtcgacacaatgcttaaaattttgatagaaacaaaaggattgtactttttggcaggcttcccagaggaaatgaaataacttttctttttttagtgttttttatttgaaacaaatcgccaatgtctgaatctcttttaaatgcttgcacttgattccattaacagtccgttaaattgacattttttataaaaaatttcctattttgtacatacacatacctatttttcagaaataatg

SEQ ID NO: 106781 - DNA, 1003 bp, Heterodera glycines
actataaatttgcaaaattcatgaaaaatggttaagtttcaagaaagttatgacaaaaatgtttaaaaaaacttaattttttaggcttctcagttcaaaactgttttgaagcttaacgaattgcatagaaagcacttagggctaccgaaaaatatcaagattttaaaatttggttgcttttgtgcaaaattatgattaattttctgccaaaaattttcttccaagtcatttttcgtcagtctgcattttcctagattgttttgttcaggaaatctagacccaatggtcagattaaaaaaaaaacttcaggcataggtccggttttagcaggaaaaaccttgatttcagggatagaaattttagaatttgtagtaactagtttaatggtatgcagttagctgaaatttttggactgtcatcggactaacatttgcagaccgacttttgaggactgacatttgcggaccgacatttgcagaccgacttttgaggactgacatttgcggaccgacatttgcagaccgacttttgaggactgacatttgcggaccgacatttgcaggccgacctttgaggaccgacttttgcggaccgacatttgcagaccaacttttgagaaccgacaatggaccgacaatttacatatgctgactgaaaattacccaatttccgctaaaaattacatttttttttgctatattgaatttgcatatatacttcctttttgttaattgctaaaaatcctaaattatatttacgtgaaaagcattcatacgtatgtaaatatatgcttaatatttttaataatgccacataaatgactgagaactgcccaatttccactataaattatcaaaattattattgcagttgatttattcataaattcgaataataattcacatgtacatgagcacaaaatatgcatataaaaggcggttgtcaattaatgaaaaccttacaaaatattttaaaaatttccttttaggaggtattctcaatg

SEQ ID NO: 106782 - DNA, 470 bp, Heterodera glycines
gcagtgattggcatttggggaggggttgttgcaccaacaacaaagcttaatttgacaatgctaatatgaaaatgaatcgaaattacaatttttgttgaagaagattcagcagagccctcgagcgaattcatacttgtaaaaaaatcagtgaatttttaatttttaatgcaagctttattaatgagaagcaattaattttaaattttataggtaataaaaaaattaaaaggaaaatttctttgatcttttccgcattcatttgtttttctctttttgcaaatttattgttgaaatgcgttaaacgcttaaacgcccgatttattttttgctttagctcatcgcgcttttatccaaagttttgccgactatttttacgataaattttaatttgggttttttaagcagtttttttttggttgttcctttttacatttcgatgctctgttaattttagtctgaaactcggaatg

SEQ ID NO: 106783 - DNA, 73 bp, Heterodera glycines
ttttcaatgtttacctataaaatttttttttaaaactattgtattttttccacatttgtaggagttggagatg

SEQ ID NO: 106784 - DNA, 754 bp, Heterodera glycines
gcttcattttttgcccctgtcttctgttcaaactcaaacttcaatttgcactttccatttttttgaaatcgtactgattttttgacaattttcgttttctaacggatttccgtcataaataatcgtaggtgaacaaataaatgaggaatttgacatttcaaattgaggtacagactgatctctttctaaattcaacaattcattttatttgttagttaataaatttgctatttcgaaagcttttgattttaggatatgtgttaggtcttttaaaaaacgcccatttgccgattgaatttttttgtttgggattaaattaaaaatttaaaaaaaattcctaagtttttaaaaaaatttgtcaacaaagaaagaaaaataatgacagaaaaactaataaattcgaaaatttttaaaattttcggttatcgagtcgagaaaatgttttttaatattttattttagttacattaaattgaaaatttattatgcaaaataaatttttaattagaaataggagtaactttattaaataatccattattattattattattattagactcagaaaatttctcgtgtccaaaattctcagcaattggcatttcagaaaagctttgctcattccaaggtgttatgacattatcataaaagaacaaaaaataatgatgacaggctgaaaaattaatctaagaaataaggacaatccttaaaagtaaggacaaaaatacagacaaatcatagaaaaggacaaatg

SEQ ID NO: 106785 - DNA, 286 bp, Heterodera glycines
tatttactctttttatatgccatggtatattatttatcaacctcctcagaatggggtagataattggagactggtagactaatggagactaagagattatttttcggctgatttatttagtagaaaatttttgaaatttttttgaacatgtcgccaaaaaatcatatttattgcatttttgttaaagaacttctgaaaattgacgccaaaaatggcaaaaatgttaattttttgcttccggtatgcataaaaatgggaatttttaatgaaaagttcagaaaatatg

SEQ ID NO: 106786 - DNA, 267 bp, Heterodera glycines
tctgaaattaaattaaactaataaattacttgaataaatttattaaacttcgtatatgcttttaactagaaaatgtggcaatgaattatttacaaatttatcgataaaattaagaaaaattttaagcataaaaatataaaactaaatccaaagcaatatacgaaaacatcgaaaaggttatattaatataattttgatttgtgatattaaaaaaacatacttctagtttaagtaaatggattcaatgcatcaaaaaatttaaaaatg

SEQ ID NO: 106787 - DNA, 478 bp, Heterodera glycines
caaaagcctcatttggcaagcaaaaaagcctcattttgggttaaaaagcctcattttcacaaatttattcaaaacacatttaaaatgttcaaatgtgatattttctattgtccatgatcaattgcaattttttcttagaactaagcattttatgaaattctgagcatgaaaaatcgacgttgatttttgcggcgctttttccaattttttggggaacaggggggtccggcggtgccgataagcaccgccgggaaaatttttgtaatttttaatgtgatttgttaacagaatttgcccacaaaaatggcttaattttgcaattttaagcaaaaattttaagaaaataaaggatttttgggtccggcggtgccgacaggcgccgccggggaaaaaagtgagaattttgactatatttttggactttttgtgcttattgtgactatttttaggattttaaaaataatccttaacaaaaatg

SEQ ID NO: 106788 - DNA, 1003 bp, Heterodera glycines
tcccgatgccgtgtctcaacgtaatttcgggtcccactcttttaatattctccaaattttcaaacaaaaattgcttaagctgccgcccaatttttaaaaaataaccacaaaagctccactaactctcaaaaatgtctcccacaacaaataaggtttccccatctccaagaaattcttgaaattgcccgagaatggctaaaactgtcacaaaattattccaaaaattcccacaaaactctaatttgtaaggaaaatttcccgttaatcccccccaaaaatgcccctccccattcacatatggtgtttgtgtagtcccccttcacccccccccccctagtgtccgctgaatgtccccttaaaaatcgtcaaccgaaatggcgctgacaattccatccaatttgtgcccccgtccgtccgttcgtccgtttttgtgcccccccacccccaatctctcccacgaccgcccccccgccaccaccgaaagtcattcattcgtcgtccaattccccccattcattcatttttcattttcattcattcactaactcattcattcatttgctgaaaccgcaaaaatggcaaaaagcaatggcaaaatgccaaaaagaaagtgccagaattcatttgggatgccaaatttacatcaaacggcggcggcatcaaaaccaaaattggtgaccaaatttaagccggattgacttgattttaacaattttaatcaatcgactatcattttaatcaatccgaaaatgctaaatctgtttaaatttagcactaatttcttggcaaaatgccaaacaacaataatgactcaaccgtcatcattctcttctgctactccataattctgcaaattactgtcatctgctgttgatcaatgatcaatccaacaattccaatgccatcatcatcacctttatttcgccgctgtttttgtttttcaattatttttttgtccgccgcccttttggcactgtgccgttcgacaacgacggcacaaatg

SEQ ID NO: 106789 - DNA, 443 bp, Heterodera glycines
tttgtgcgcttttaatcctggaaagtgatttttttccgcagatttcacacatgtaaagaacttaacaatatttttttattttttttaatttcaattttacatcggtgtatgagtctcaatgtgcgtatgtaaattgcctttcatattgaagcttttttggcatatgaagcatacaaaaggttttgctttactttccattgtaaaagtgaggttgcttagataggaatatttgaaaattaatttagaatattttatttactttggaatatgggttcgatttaaaattatttaactttgaatttggaaacaaatgtgtgtggatttaatggaggttgtaataaaatgaatgatgtcgggtattcattttgtgaaagtttaattctttatccgccattacttttatatataaactgccaaaacgccgatgccggatcagtcccatg

SEQ ID NO: 106790 - DNA, 106 bp, Heterodera glycines
gcacagagagaaaaagcgaacgagaaacaaaggccaaatggacgacgaagggagaaagagacgaaacagccaaagaaacatccataaaagaacggcgaaaagaatg

SEQ ID NO: 106791 - DNA, 84 bp, Heterodera glycines
tcccccccccctttccccgtatatcaaggccttgctataaaattgcctcctcatgcgcttctaaatcattcactttcgcaaatg

SEQ ID NO: 106792 - DNA, 328 bp, Heterodera glycines
  unsure (1)..(328): unsure at all n locations
aattcagcagcaatgacgatgtgggaggaatattccgagcgagatntgattaattttgcatattntatgctcgccgggtccggatttcaggcaaatttgtgcattntaatgaaaaaaatanttaacttattaaaaaacattcaccaattttttcgggttaaaggtacgtctttttgaaaagttatgggcaaaaaaatatnttcttgttgattgtatgaaaagaaaaacttttaaaagattgatagttgaacgaaaaaaangaaatttaattttgaatttttcttaaaatttttcttaacaaattattttttaaaaaatttagaaaatg

SEQ ID NO: 106793 - DNA, 308 bp, Heterodera glycines
ttatatcgattttaatgcgctaggttcgatgaaactttttaaaatataagcctaaactttttggcctgtttaaaaaggaattaaaaatttttaaaaattttattcatctcccttttgatagaaaaagcatcagagtgccttgattaacctgtaaataaagttttgtgtgtttcagagcactttctgaaaaaatacttatgaattaattttgcaaaaaataaataattaatgaaaaagtcagaatttcgaaaaattttaaaaacaacaatcgttggcattttttcaggttaagttagtcctttacaatg

SEQ ID NO: 106794 - DNA, 79 bp, Heterodera glycines
ttagtagtaattggttctgcttgctgcgcgagtgaatttttcaaaattttgtgtaccgtccccttttttggcacaaatg

SEQ ID NO: 106795 - DNA, 368 bp, Heterodera glycines
ttaagaaaatgaatgtaattatgctcaaaaagggagaatattgcgaaggcaagaagcggcggcgcaagcggcggccgcggaaaaagcgaagggaccgctgacgacgcggccaccgaaggaagcggaggcgaaaagggtaattaatgaacaaacgaacagaccgacgaacggagcggacattgtgccagtttagaagatcagcgaattggcacggaaagcgaacgcttcgaaattggcggtggcgggcgcaacggaacagccaaaggcgggctcatcatcggcagaaaaggcgagaaaagcatgccaattggacgacaaagcgatttggccaaatttagccgatgctgcgagagaaagcgcgcgacatg

SEQ ID NO: 106796 - DNA, 107 bp, Heterodera glycines
tgttcgggatattggcatgttaatgcctaaacacctcaaatcctttttttatataactattgactaaatttttaaaaaatcgggatgtgaacataaaaatagccatg

SEQ ID NO: 106797 - DNA, 144 bp, Heterodera glycines
aaaccaatttttggtgttcctaatttacccgcgagtcaaacatccgaatcaattaaatagcttctgagataataaggtttatcataaaatttcatttaaaaataaacactcaattatcggtacgaacgatactttccaaacatg

SEQ ID NO: 106798 - DNA, 531 bp, Heterodera glycines
ttcaggtgggaagggagaggaaaaaaatttttgatggagaggggggggggggggagagtaatgcccaggggcatcattttcgaatgtttcaattcaaattaattgaacaatttgacaaatggggggaagggaaaaggctattggccatttcattcatttgccattcctcttttctgatctttttcccttttcctccttcagatcgctgcttcgactggtaattttgccctctgtgagcttttgctccgtgccggtgccaatcccttcctctgcgtccctttgcccttttcgtcccttcccttcggcccttcccaaatttgtccctccgcctttgccatcgccgcctcacgcggtgatcaaaaattggtcggcctttttctcactttttgttcggttttgcgccaacaatgggacaatactaaaggttaaactgaaacaattcggctcatattttccgtggcttttcctcaaggccaaaatgcgttgtgccgttcctccgacgctttttcccctcagccgccctttcaaatg

SEQ ID NO: 106799 - DNA, 250 bp, Heterodera glycines
ccgccacttccctaccgccatgtccctaccgccaattccctaccagccatttccctaccggccacttccctaccagccatttccctaccgccatttccctactaaggcatttgggccatttccctaccaaaattttttttgaaattttttggcaaaatttcaaaaatagaaagggtattttcaacattttgatgtttctcgtgaattataagacaataagttttttgtttaagttatagattagaaaatg

SEQ ID NO: 106800 - DNA, 529 bp, Heterodera glycines
caaaccaaaatgaaatggtcttaaaatattcctttctggacttgactgggaagtcttgatatcgaagctgttttctgcggctaaaaacggttataccaaaccccagatttttgaatccggttttcagaaaaaatgccttggtggtgaaaacaatatttcacatttcactccataactttgtgagttcggcacggatcgagaccgggataagaccattggaaagagcagctcgagctctacaagaaggtatggaaagaaaaaatagttatttctgggactttttcagaaatcagaattaattctccaatgtggcccaaattttaggcccccagccacagccccttgcttctcccagttttaagtcttggatttgtcaaataaattcaagacttcaaattaataatcaaaaattctcttaaaatttttttgaacccaattcaaaaaaggaaaaaaatttgcagtcaaaaaattattcgaatttctccaattttgtttccataatttccgaaagttattcggtatcataatg

SEQ ID NO: 106801 - DNA, 496 bp, Heterodera glycines
tttgggggccattgttgggagaagcatagttttgttatttggggtaattagtgagcaattagctgattagcattgaacaaaaaccgccgtcgtcacattggcactttgaacttggtttggcccgtttcgtctcgccagtaacagtagcagcagcagaaggaatggccgttttttttctctcctttccgtttgctttatctcttctgcgttgtctgccttttcctcttcactctctatctctatctctcaccttctctctctctctctcctttttattttctctatgccttgcgttgcgttcgtcctttcgcaatgattcggtcgcttttcgtcctcgcccgaggggttttgcgtagaactgtctcgcttttctgcttccacttctaacgtgcacacttttgtctttgcttctctgttctcgctttttctctcctgtggcaacactctctgcgttctctctctttcacttctctgtttagaatagggcagagaaatg

SEQ ID NO: 106802 - DNA, 405 bp, Heterodera glycines
  unsure (1)..(405): unsure at all n locations
attagaactcgtaaaaaaaccaattttgctnttgctattcaagatgatattaatnnntcaagtgtagaaagaacaaaattccaatcattaaattataattctttttttcctttactagtttttttaaataaaattatgagccgaggtcaacaacaattagccataataatacacacacaattcatttaattaaaaatttcttataaaatgtccaaagtttcttttttgaatgatatattcgcaatgaatttcttaaatttatgcagtaacaattttatttaaaaaataaataaataaattttcatattttattatgatttttttccggtctcatttctcaacccttccgaccttaatggccaaccacccatcgtgcaagtgttaaaaaattctttttcagagatg

SEQ ID NO: 106803 - DNA, 87 bp, Heterodera glycines
tacccagtgcttatgagggaaatagtccagaggagccctcttacgcgtccgtaattaggccccgcagggcttggaagggaagggatg

SEQ ID NO: 106804 - DNA, 1003 bp, Heterodera glycines
gcccagctaatatcaatgaaatcagagtagttttcgagtccgaaaatttaccatcggaaataagacaaaaaaaaattggtctttttcgagtcgatgcttgagatagagactttttcaaaatatttcttgtacacccaaaaagaattaaacaagcaatttaaggttttgtttagcaaagtctcggcctcgggtctcgagaataaaaccgaaaaacccgagaccaaaaaaaaaattcagggagtgattactgttcataatatgtacaattttaaacatttatttaaaatagcatttttaaattataatattatataaagtcaataccaatccataattctaagcagtatgataattacgtaatttgcatttaatgcgcttcattacaacatctcaattgccactctctccgatgccaattttgcctctctccccaggtttgatgccgatttgtgtcggcattgcgtcatctcatttcatgccagttttgtctcccccttcccgattttcatgctaattttgtctctctcccatgtttcatgccaattttctttctctctgcctctctctttctctctctctctctcctctctctctctctctccgatgccaattttgcctctctccccacgtttgatgccgatttgggtcgatgccgatttgcgtcatctcatttcatgccagttttttctccccttcccgattttcatgctaattttggaaacgaatttgacaattggaaacaaaacgccaagcaatgacaaaatgcaaaaggatttgatgattgatagcaaagcgcttcaaagcaaagtcaaaacgaaaaagaatttgacaagtggaaacaaattgccaaacatttgactaatgatggcaaagtgccaagatcaggtaaaatatcaaacaacaacaaaaccgaaacaaatttgacgaatgatggcaaaacgccaaacgatgacaaaatgcaggatttgacaagtgatggcaaaatgccaaaatcagtaaaatg

SEQ ID NO: 106805 - DNA, 444 bp, Heterodera glycines
attgaatttcaaaaagtatggtcaaaattgttgagtctatattttttttgcaagtttttggtcacaacttttgtaaatttttgctaattttttaaaaattataaaaatagtagagaatatatatatatatatttttttgaatttagctacattctaataccaagatgaataaatttgattaagtttaagctaagttatgcttattattttgcaaataaaattgaaataacaattaaatttaattattattaacactgatatttttgtcacttaattcaccagcaatgcgcaccaatgcccaaaaatggaagggttccaaaagcggaattctgaaaattttctggaaaagcggtccgtactcacatggatttacatttttattttttcgaatttttaattcgacttttgttttaagacttctcgacacaatttccagctcaaatg

SEQ ID NO: 106806 - DNA, 57 bp, Heterodera glycines
ggttataattaaaaaatcgtttttttttaattttatttaatttttagaaatcgaatg

SEQ ID NO: 106807 - DNA, 91 bp, Heterodera glycines
aaatgcttttcctctcttttccgtccctcgtcctccgccaaattcgcccttctttctgtgctgcttttcctttctgctgatgttagccatg

SEQ ID NO: 106808 - DNA, 194 bp, Heterodera glycines
gggccctttgcaatgtatgtgatctctgcataatcctttcacatattctgaccctgaaaggcgcccggggcatataaaaaattaatgcatagaattgcaaaaattacgcgcctaaataatttcggtgatgcataaatgcatcaatttaaagcaagaaatccttcgaatggatctgcataacttttctaaaaatg

SEQ ID NO: 106809 - DNA, 360 bp, Heterodera glycines
ttcggcgcggccagttcgacgcggccacttcgggcgcccctatataaaatgactttttcggcgccgaaaaaattttcaaaatctggagcaaaccatatcaaaagcaaaaaatttcctgctgaaaactacctacacactaattttgagaaaaagtaaaaaaaaaaatgttgcattgttgtttacaatcgaatacctggtcagtttggaacttttaagtccaatccaatataaatattcgaaatttgaatccggggttctgagttaggcaaacctatggtcagattgtaatcagcaccctcgaaacccccgattggtgattttgaaccaaaatataaaagttaattagggaccacaattatg

SEQ ID NO: 106810 - DNA, 278 bp, Heterodera glycines
caattttgggctccaagtacaaataagtttattatttatttagtaatcagaacgccaaaactttgcaaaacttaaaatttattggggattttcccttgtaaaaatggaagagccgatctcgagttaaaaacttaagtttcacaaaataaacttggaatcgttaaagggggttaaaatatgggcctatgcaaaatttcaagaaaatttcaactgcagaaaaattttttcaactgggtgaatatttcaataactttccgacacttttacagttaaaaatg

SEQ ID NO: 106811 - DNA, 702 bp, Heterodera glycines
attaacgccaaaaaaatccctccccccccccccccaccttttcaattccttcatcttattcaatggaattaacttgtaaacgcaacacaaacaatacgattgttataaaattacaaattgcaaaattatgtgcaaggaactaatgggaaatgagcaaaagtcaaaaacaaaactatcaaagtaaaacggtaaacaaaaacaaacccaatattttacgcactctgttaattttgagaatgaaattagtttttttaggaagactaatttattcactgtttacagttgaaaaaatgaaaatttcataatacatatttcacgattcactttttaattttgattttttcatagtattgtaaataaggaatcatttgcttatttaaaattcaactctttttttttctttaacgtttcgtttatttgtgaatttgcttttttcaaatttagcgtgacttaagataaaagaaaatgtcacatggttcgcaattaatcgcatcatccatcatttttatattactaatttcgctaatgaaatgatgcaaaggaaccatttacatttgtagcaataaataatgaatctaatcagctaatcgcttctgattttcactgcttttttcaataaaaaattccgcgttttatacagaatattttgcatttgttaataattttgttaattgtcatcaattattattattattcattatg

SEQ ID NO: 106812 - DNA, 1003 bp, Heterodera glycines
cgtaccaattctagaaattttaattagcccatcaaattagtttttaatacatacgttcaacttcctcgttatgcggaaattggtgaaccaacaaacaaaaataattgtaaagtggttcaccaacaggcacaaaggcaagagcgaaaaaacattaaatatccgtgtgttggtctgcgttttgaaaaaagtgagtgtgaagttgaggcaggcgttgtaatttgcggtaaaccgcctggcaaaagtggaaaagacagcccacccttgtggcatttgggaaaacctgagtgggactgattgaacaactgcttggaacatcttaaaaattttggcactgatcactaatttaaaaaaatctaaaacaaacattaaggtattattttctgattttgatttaagtatgccataaacacaggggacggccaccttatcgatcagtacagaaattgtgtagacttgggtaaaatgagctggggagcacttaatattataaaaattaaactattcgaatttttcgggttaagtctctttgaaggttccatcaactgtggcatggtgtccatatagttacaaaatgtttctagcaaccggagaagccaactcgaacaaactctgcccatcgacaacgttgtcacgaataagtgcatctcgaaggtgtcccgtaacttctattcacgcgcctccgtttccctcttataaattctcccccgtaactcataaattattcttgaaaaatttctaagttagcaattttttttttttaaattttctcggggggaaacgatgcgggggggaactgattcgggggggaaacggcgggggggaaacgagccgccccgctccctttgaaaggtttaaaatgcaaggtgaaattttttggggattttcccttgtaaaaatagaagagccgatctcgggttaaaaactagacagctaaaaaataaactgtgattcgatagaaggggacaaaatataatgtcctcaaaattattggaagccacacatg

SEQ ID NO: 106813 - DNA, 545 bp, Heterodera glycines
aattaaatatcattttcgatcaaaaaatttttgaattttttagaatttataaaattgcaaatatgttctaaaataaaatttgtatataaaattttctttagtttaattaattaattagaaatttcttattaaaaataacaattaaataacattattttttaattttaaattttgtctaaattaaaaatatattttttaaatttaatagcttaagaggcgcttatcacaaacaaaaaaagaatatattaaaataaaattaaaattcccataatttctcataactgatatgaaattaaatacaattaatttaattttatttattttaaaaaatctgcaaaatataaattaacaattaaaagaaaatccctctttcagaacattgatcagctgcagaaggtcagcaatcgctttgcttttgctttcgttttacgctttttcgcttttgcttgtatatatatattttttttgcgggcatttcaaaaatatttaacttcggacggcacattctcttaaatttgaattttttttccaaatttggcataatg

SEQ ID NO: 106814 - DNA, 167 bp, Heterodera glycines
ttcttttcatatcgaattacaatttacttttttatttacattgtttttttaaagagtcgattacggtatcccctttggtaattactgtatttttcgattatccaattttccaggcgggtgacgaccttcgccaggatgctgttgtgctgcagttggtccgcgcgatg

SEQ ID NO: 106815 - DNA, 176 bp, Heterodera glycines
tcatttttagttcgtatgcgacgagaaaaataggaaaaaatagcaaaattaaagtcgaaaaaatcttttggaagtgccaaaaaacacttcaaataattcataaagaatatttttgaaaaaatctaaataaacaaacaaaaatatatagatattcactctctttttcaccaacaatg

SEQ ID NO: 106816 - DNA, 332 bp, Heterodera glycines
  unsure (1)..(332): unsure at all n locations
ttgtttgacttttttccccattttaaggttttttgttcgctnngganctccaacacttccgaaaaccttcngtcggtcagtgctaatggcataagcaattagtccaacaattgcccactgcgggacaaagagcgacagtccgtttttatgtcttttggtgttcgacccccgccggcntttcggatggtatcccaaattcattcaaatcggaaagtgtgaaaggagttatagccaaaaacggactgtctctcagttggccatcgctcagttgtcccttccgttaattgtcccgtaacttttgcaatttttcaaaaggaatgtggcaaaagatg

SEQ ID NO: 106817 - DNA, 355 bp, Heterodera glycines
acagttcgatgaccgatatattagctttaataatatattgtgctgaattcacatgttatgctttgatttggccgatcaattatttctgtcacggacaaacattagggtgattgttaaatttaattaatcaattaaattttaattgctttcttcatttagaatcgaaaggaacagacgtttattgatttcactgactgttattatgtcaatcggtctcatctgcttcattggagtaataatattattattttaattatgattatgtttaaaaccctaatttaataataaacttattcacaattactgtacattacagttcccgtttaagacttctgtgttctttcatggcataatg

SEQ ID NO: 106818 - DNA, 235 bp, Heterodera glycines
aaggaattaaaaaatttttaaaatatttattcatctcccttttgatagaaaaagcatcagagagccttatttaacttttaattaacatttggtgcgtttcagagcactttctgaaaaaatacttatgaattaattttgcaaaaaataaataagtaatgaaaaagtcagaatttcgaaaaattttaaaaacaacaagcgttggcattttttcaggttaagttagtcctttacaatg

SEQ ID NO: 106819 - DNA, 60 bp, Heterodera glycines
aaaattaagaatttgttcaacccaataaaccgcgtatacgccgagaaggaggacgcaatg

SEQ ID NO: 106820 - DNA, 573 bp, Heterodera glycines
tcggccaaaaccttgggcccagggtaaggtcagaaccatcaggtgctaccagttagagttgtgccggtcccacggatcccctcttgtccatcccgggccgtaaccctcgcgctgagtactccctgggctggagaagggggacgagatcgatggatagggaattgaataggagatattgctgataagtcgcgactgagatctcttgggaaggaaatcccgagcttataagggggccctcgggagagatccaaggggcggtcccttcccgctattggctgaacccttttacgccttacaatacaaaaaagacattaccagtgtaaatttttgaattaccgcgcaaataattacgccaattacgctatttggcgttatgagcaattttgtctgggtaggtgacggttcggtgccagccgatgttttgggctacaacttttttcattgttgaccaaattcaacattgttgatatcattcgagagtttacatgtttagaagctttttctaacattttttcattgtgttattgtgtttattcttttttagacaaaaatatttattggcctcccaaaatg

SEQ ID NO: 106821 - DNA, 225 bp, Heterodera glycines
ggtgggcaacagcagaagcagaaatggcaaaattgaaaagagtgtaaaaaacaattaaaaaaaaacaaaattattggctttatttttaaaacccgggcaaaattttatattccggaaaattgataccattttaaaccccaagaaaataagcgcgcattctaaaatccagaaaaagggttctgatttaaaacgagggaaagcccaaagaaagatatagaactgatg

SEQ ID NO: 106822 - DNA, 166 bp, Heterodera glycines
ggtggttgcggagaataaactggaagaatttttaaaattaccatcattttttcgcatgcttttttataataaatattaaatgttcatgttgtttttaaagtgaaggttttgacccaaatatttaatcaattttaatttattatttttggtagaattccagaaaatg

SEQ ID NO: 106823 - DNA, 358 bp, Heterodera glycines
aatatcaaaaattaaatggatcggagtcatttttggacgcccccattcttaggcgcaagagaaactaagaaacaatcaaattttgggttgataaaatctctaaatagtgattgaaattgtccaaaaaaaaagttttatttagcgttttatgtgacatggacataattaaattatttgtatatttttttaagatggcccaaaacagacgaaatttttaaccaacgcatatggcaaaatcgaatggaatttctttaaacacatccataacgacaaagtgatccatgatatacattcacattacaatgcacaggaaaagatcactattctagtcgaaaaggcaccagataagcgaattatg

SEQ ID NO: 106824 - DNA, 1003 bp, Heterodera glycines
gcctttttggggagcatttatcaaaaatatgggaaaatagggtccggcggtgccgataggcgccactgggaaaatttttaaatttgggcgtgcttttttaagcgaatgctgaaaattttcaaaaatttaatgccaattttagtgcctatttcgcaatttttgggcatttttcaggatttccggaaaaatccttaacaaaaaagcattaaatcaacttatttactatcagaaatttgttaacaacaattttgtttttacccatttttctacctatttcagcatttacgtacctattacacagaaactttaaaaagaaaaaaaagaagagggaaaggatttagattaaagaaacaacaaatagatagggctggcaaaaatatgtacaaaaagtggtcaaaataagtacataaaatgtaaaaaaaaatcgggatccaaatggttaggtataaaaataagtacctaggtaataggtagaaaaactcccaaataggtaagaataggtattatgaaagtcatcgtattgaccccaatccaagtggaaaataatttttttcgtgcttatctgtgcctattcaatgcgcaaaaaaaattttttggaaaaacgtacagcaaaaaaaaccttttattatattttttaattggaataaaatttttgaaaataatgctttttaacgccaaatgctgatttttttggcaaaatgatagatttcaaatttttatctggcagcctggttatagcacagccaattttgtgcaggaatgggggactgggtcgttttggcgcccacgttttggcgccgacgatttggcgcccatgttttggcgcgaagccaaaaattaaaaaaggtaaaaatttaatcaaaaattttacaaaaaaaagtgaaaaacttttaccttccaatgggtttttcaaattttcaaaaaattcacaaccccctagaattttttctcaaccttcccgattttaactgtgttttatgggtgtagattagagaacaacatg

SEQ ID NO: 106825 - DNA, 349 bp, Heterodera glycines
tttcgttaataacactgatttttactcttttaaaatggcctttaaatttaattggcctaaaatgtcacttgcttaatcatttacttatgttcaaacataatcttttaatttgtcggaattgaatgaataagccataaaattcactcggaaaccaatgagtaatattcaaaagcatttttttgtcgctcccggcaaatggcaacggtctgagcaatggcggacaaatttggagctatttataagcgaaaaggtgcagaaatgggcatttcttttgttgcatttaaaaattcatttaaaacatttttatgtatgattaaaaattaatatttcagccaaactcttccaaatg

SEQ ID NO: 106826 - DNA, 485 bp, Heterodera glycines
taatagaaaataaattaacacaaacattatttttatttatcaaatttaaaatattgatttcatttcaatatagaaatatccaacaaaaatccttctttcacttttctttaaaattttttccaaaaatataaactaaccagcataacagattctaaacatgaaaaagtctttaaaataacagtaaagacaaaaacttttgtcaataggcattcaaaagcttcatacaaacaattacaaaaaggtttatcacaatcaaaccgttgtgttttcctttctagatagcatatgcgccatgttttgtcgaaaattttgataaattggcgcattttatgaacgacccagaacgatttagaaaatagacaggagaataaaattattattaaaatattacatttttaattcacctattaaatattataatttttacccaatcagataatttataaaaaaaaagaaataattttgcagcctttcgataaataatg

SEQ ID NO: 106827 - DNA, 1003 bp, Heterodera glycines
tttgtacctcttttatcacttttgcacctcttctatcactgttgtacctcttctaatcacagttgtacctcttctcatcactgttctacctcttctgatcagatttgtaccccttctaataatgttgtacctcttctaatcacagttgtacctcttctcatcactgttctacctcttctgatcactgttgtacctcttctaatcactgttgtaccacttctaatacacttgtacctcttctaatcacttttgtacctcttttatcacttttgcgcctcttctatcactgttgtacctcttctaatcacagttgtacctcttctcatcactgttctacctcttctgatcagatttgtaccccttctaataatcttgtacctcttctaatcagatttgtacctcttcctaaaaaacgggcgcgaagcgcccgtctgaggccgcgaagcggccgaaaaggcccaactaaatttaaaaacgggtgcgaagcgcccgtctgagctcaacaaatttaaaaaacgggcgcgaagcgcccgtcagagcaaaacaacatttgaaaaacgggcgcgaagcgcccgtctgaggccgcgaagcggccttaatagcccaacaaatttagaaacgggcgcgaagcgcccgtataagcccaacaaaatttaaaaaacgggcgcgaagcgctcgttcgagcccgcgaagcggcctaaaagtcccagataattttttaaaaattccaaatctccacaaccagagctaaaaaaaccgtagttgtacctcttctgatcacaattgtaccttcccacccgtggtagcaacatttttgcgtagacctgacatggatctgcggatcagcactccaaaaaatctgctgcagtatttggtcaaccaatacaacaggcagcaagcacggcaaaaccccaatgcccaacagaaaactgttgatgacattggcagtgttgttcggctttccgaacacaacgtaaattctctccaatattggaagaaaatg

SEQ ID NO: 106828 - DNA, 705 bp, Heterodera glycines
ttgaaagttttaataaaaacttattttttattcatttgaagcgttacacaaatttgtgacgcaattgacagagggcaaaaggaatttgagaaattcggtcgaagcggcgcattaaaggtgagaagcatttattagacgtagcatcgagtgagaggtgatatttaattgtttacaaaaagataataattgaaataataaataaaagtgccatagaattttcgaaaaaatagaaggcagaaaaaaaaagatttgataacacaatgttgagcgatttatgtttgggatattttcaaaattttcattttaattctatttttataatagaatactggagatttgggtccggcagtgccggtaatttttctccaaaaatggacaatccattaaaaaaaagaataaatgcacctccggtaaggcttttttcagactttagattttaaaaatgattttacctttcgctgcagttgcatgagagtactctttgtactctccttttcatttcgagcgggcattctgtgctataagtgccagaaaaaataataataaatgcaaaaaagcctttattattattattatttaacatattgaaatgccaaggttttcgtgttgatcagcgacggccatggccacgaattatggccaaaaactttggagaccgggaaaaacttacgccagcaaaaattgcaaaaattcgctgtttcaatg

SEQ ID NO: 106829 - DNA, 505 bp, Heterodera glycines
ttaaaccagggcttccatcgaaaatttttcaaaatcagaacatcaagtccaaaaaaatagattttagggttaaaaataagaacatttcgcaaaattgcttcaaatcagttatttttacaatttattcgattaaaaatatattaaatattatattttcacctcccattattgattttaacaattttggggaggaaataagcaaagcgtatatttcagtgcattcgggatcaaaaaaatgagattttaacaatttttttgcggcgagtttttccaaaaaacttttggtgaatgggcaataggcgccgccggaaaatgttgtaatttagttttgatttattaacagattttcacaaaaaaattaaatttttgcaattaaaaccaagtgacgacttttttttttgttttttaaaacgctttttgcggcgcgcttcttccaaaaattttgggaaacagggggggggggggggggaacgattagccttctttgtgtttttgccgagtaatg

SEQ ID NO: 106830 - DNA, 409 bp, Heterodera glycines
aaaaaacagttattttgtttttttattttcattttatcattttaatattgaaaaaagttttgagattttgctcattttcaaaaatgtctcaattttaaagcaactcaatgtgccgaaaatttttcattcattttattttgtaaaattaaaaaattaattcttacttactacaaaacacaaaaacaatcctttttaataattattcgactcaatgaaaatatgcaataccaatagatatatggattagcatattgattttaaatgtgtaagattaatatatttttataagaacacatgagaatatgcattattttattatattcatttatttgtatattcaaatatattactttgtctatagcttttaatttttgattttttaagtttgtgccaataaaattttaccatg

SEQ ID NO: 106831 - DNA, 69 bp, Heterodera glycines
atgtcttttaccaattaattagatggttcttcgctgcatcaaaacaatgccaaatttatcgatgaaatg

SEQ ID NO: 106832 - DNA, 51 bp, Heterodera glycines
ttgaaaaagtgtcggaatggcgaaaaattgaaggaaaacactgagaagatg

SEQ ID NO: 106833 - DNA, 1003 bp, Heterodera glycines
atttcgaacaatttcgaaatccggacccaaattcgaacaaaaaatctaaaatttaatttttcgaatttcgtctaaaaatggtttaatgatcttttattgcatgagtggatagctttcagtttgtttccatgtgtttaaatcgtttttagatgaaaaagataaattggataattaaatttttgattttttgttcgagtatgggtccggatttcggaattgttcgaaataaacgtcatattcatgatcagcgaccccgaaaactccagaaaaaaaattaaaaattattttatgtggcgtaaagtgaaaaagtaccgattttcctggacaaaattttagaatttattatttcaagtgaccgatattttttcaagttttcaaaaaatgattaaatatatttaaaaacaaattattattgtaaattagatatttttagatgttcccaagcaattaattgaatttttcaaacatttttttgatttttaaaatgagtttaaaaaaatccaggtccaggcctggatccaggtctcgaagagcctggattttcctggatttttgtccaggaaatccaggtccaggtccaacatggaatccaggtccaggtccaggcttttttcaaaataccgagctctaattgccacttctccatttttacacctattttggattttttataacttaaaaataatatcataatatccctagtcatatgtttagcatcaattacaaaactatttttgtgggcctaaaatcctaaataattcattctgttctaacttttattgctgatcaaaaaaaaacttatccaacttgatcagatgatccacttcctcatagtgaaacactcctattatggatgaattgagtataaaagagttgcgtaagatgagttgggtctactccatacatacgccaaacaccttcattattgcctttaattttgcaatagtttaggataatttaatttgcttttttctcttccatatattcacaaactcccaaaatg

SEQ ID NO: 106834 - DNA, 125 bp, Heterodera glycines
tctgctggaaattcaaattatatacataagtttttatttttcctttcctttttcctttccacatggccgaaatgactcccccccttaaacaaatataattagtgtattttaattatcacttaatg

SEQ ID NO: 106835 - DNA, 260 bp, Heterodera glycines
tttcctccccccttttccccttttcttatcgctctcctcccccaatcgtttgcctttccttttgcttccccccaatcacttctttcactttccgtttttggttgcttcgttggcttaccttttttgccttcccatttttcccctttttggtggtgaattattttctcaatttttcgccttctctttgagcaattgccaattgtcccttccttttcgaccgttttttctatttccgtcgcttttcctcccctcccaaaatg

SEQ ID NO: 106836 - DNA, 720 bp, Heterodera glycines
ctaattatccataaatggcataataatgcccttccccaccattttttgttggcgagaatttgaggcggagaatttctcggcttttgctactaggctcttagtaggtttttttgaaatttatcaggtattactttcacagggctcatttttttttgcaaccccatatgaataaaaaaattttagttttaaaaattttcctttttcgaaaacgttataaaatatttaataatcatttaaatgaccaaaattatgttttttggttaagttttacgtgttttgcgccctaaaaatccttaataaaaaatttttaaatgccttttttcatgccttttttgggattttcgtgccttttcatgccttttttcaattttttggtgcctattataagtgcctttttttgcgagctctcattatggcagataatttgcaaatgaaagatttaaaacaataaaaaataataaaatacctaattacgacgttgactcttcgataagacgactcatttcatataaatttttttggaaaattttttgttaaaaatcttagtgaaaaattgattgcattgctcagaattacgcgacaatttaatgttggaaaagatttattatgagaaaataaataataaaataaatattaatatttaaaagcaaataaaacactaaacatattcatttactgcaatatctttaaattttataaatattctaaatactaaacatg

SEQ ID NO: 106837 - DNA, 503 bp, Heterodera glycines
tggtgaaagtgaattaattgaattggagaaatggccgatgaagcagttcggattttgagtgaaaattgtcgctttgataaatgtgtagccccgtggtggtcgaaggacaaaaagtgcaaaatttgctaaatttttgactaaatccactcataacttttctcagacgcaaccaaattgcacaatcttggtatcatacgatagcccttgaattgcgctattagcctgccaaatttcaaaaaattatattaagtttttcaaaagttatgacaattttttcattttttggctagaacttttgaaaaacttaataaataagcctaagcctaaaccaagcctagcctaacctaacgataaaaaactgttcatacaacaaattttatttcctctttttttgcaaaaattgacaaaaaaatgggcaaaaaacgaaatttaataataatattattttaatataatatcaatcaaaaatattattccaacttttagacaaaggctaaaatatg

SEQ ID NO: 106838 - DNA, 66 bp, Heterodera glycines
aggcattttgttattttcgtacacaaatatgttggaatcgttggtgtataaattgtattcaaaatg

SEQ ID NO: 106839 - DNA, 241 bp, Heterodera glycines
aaattatataaggagaaggaatttaaaatttcgaaaaagaaaaaatttaaaatcggtgatatcgttcgtattaccaaggaaaagggaaaattttcaaagggatacctcccaaactttaccgaagaattgtttaaaatcgttgttgccaattcgacgacacccgattcatacaggatcgaagatttggaaggaaatttaataaaaggcatattttataaccaggaattagtgaaaacagatg

SEQ ID NO: 106840 - DNA, 579 bp, Heterodera glycines
tttttaaatctatttaaattaaataataaatttttgaattttgtgcataaataaaatgatgagatgagagaaaaagcatgcttatataggcatggatcattgtgaaatcggtagcaaccaaccatgacctgatgagcagcgcaccgccacccatgaagcacaagacgacagggcacctaaagcgttccgtgaaattagatatgtctagtgcactacctcaagacctaaaaggcaaattaacaaaattgctgccaggataaacggagctctttaagttgagaaaccgccctggttaacagcaaatttgaaaatgtaaaaataaccaaatagagtgtcagtgagctcttataaagccatccaaatattggtaagctcctcccatcaatcgatgatccccgggaatatcaatatgacgccaggtgtttgcaaggtcatgttgatcaatacttttagaagccaattcaaaattttcccttgggaattggtgtactgtaataataatttatagcccttgcttgacgcctacacccaactctaataatcattcattcattcattgtctatttcactgaaaaaatg

SEQ ID NO: 106841 - DNA, 493 bp, Heterodera glycines
tttaaaaagggttcaaaaaaattgcccaaatatgaaggaaaacgaaaaaaagcgaaatacaccggggttatttgggctaaaaccttcactaaatcaaaaattttcaatacaagaatgctatttttgagtttcttcttttatagcatatgcaccaaaaatatttaaacccagccttggggattaatctttaaaaaaggcgcctaaatatgcacaaaaggcaaaaaaaaaaactgttttctacctaaataaaccggtttttctgttttcaatttagactaaatatatttaattatgcaaaactttaaaaatgaaaaaagttcagaccacgctaaaaagttttcatgcttatttcaatgcaatagggcgaaaaaaggcatcggcctaaaaaatggagccccaatgacatataataaatcaattttagccaacatcaattttccaaattcatttccatttaacctttctcattcatttttttaattttcgtcaaatg

SEQ ID NO: 106842 - DNA, 495 bp, Heterodera glycines
tttcagtacattctacgtcttttacaacgtattctgtaccatctgaaattggataatatagaagaaccacttatatggaaaattttagatatttcgagcaaatactttcaatatgaaattaggcttcataattgttcaataatttcatttaatacttttagttagagtgccactgcaacgggaattgtgggcaaagccgggacagggaccttttcgggttgaaaatccgggaatttttggctgggaaagccgggaaaaaaccgggactagttccggtcccggtcaaaaccgggaccttggtactcagttgtactcagttgtccgctaccaggtaccggtcccgtggcactctacttttaatttatatttctctgtcctttagcagcagcttttcgattttctttggttgccaatggttaccaatgaatgaattgaaaggggctaaagcaaaagcaaagtgattactctttatattatttatttttttgcttaatg

SEQ ID NO: 106843 - DNA, 208 bp, Heterodera glycines
aagccgagtcggctcatcaaaattcgtcaaaagccgggtcggctcagcaaaaattcgacaaaagccgggttggctcgtcaatttcgtaaaaaaaaacaggcaaaagaactgcttattcttctaaagccgggtcggctcgacaaaattcaacaaaagccgggtcggctcgacaagttcttcaaaagccggttggctaaacaaattgatg

SEQ ID NO: 106844 - DNA, 75 bp, Heterodera glycines
aaaccaatgcccaaattgtgatggtaattgcaattttttcaatactgtacaaaaatttttttaaaattttagatg

SEQ ID NO: 106845 - DNA, 427 bp, Heterodera glycines
tttcatttcatcccctgtggcgacgatccacccaattacacgacgaaaagtgcgcctcgcccgcgtttttcgggcggacggtcaaagccaaaaaaaagagattgagcaaatccgaaaatccaaagcaccgaaggaaaacgattttgcgagattgaagttttttgaatgacttttcaaaataaacatttgaaatcgtatttcaatagttaatttaatcatttgttttgttttactaagattaaataaatgattacatccggtcttataacaaaaacagcaattttctttttctccgcgtcttttctcggtgcaaatggtaatttgaaattatttaaaaaataatttattcgaatattttccatttactgtgagcaaaggttataataagcatttttagctctgaactgttacatttgtgctgagaatg

SEQ ID NO: 106846 - DNA, 291 bp, Heterodera glycines
tctttaagcaacgggaaaattcaatttttaaataattttcaattttttattatgtaaaaaataaataaatttaattattatgattattttaatagaaaattataatcgaattttttttaaatgtttacggaagtcagaagagtatttttttgttttgtagtttgtttaataagaaattatttttttgtgtcagttttaattcatgtataaataaataaatgatcatcaataataaaaaataatattaattttaattttatttaaaaaaaatcggaaaatattttaagaatg

SEQ ID NO: 106847 - DNA, 167 bp, Heterodera glycines
gtcctaatttggaaaaatgtttcgaagaagtggagagtcacacaaacgaaaataaaaaatttgggataaaagagcacgtgacaactttctattttaaatgcccagaaaacgaagatcccgaaaaaatgtttaaaaaaatcctgaaaaaattaatgggggatgcaatg

SEQ ID NO: 106848 - DNA, 171 bp, Heterodera glycines
aggggttcggaggcaatttcggaaatttaaaaaaaatcggcactatcgcactgctgtgcaaaccaatttctaagttccattaagtctgtccttgatgcccatcttcttcgcatcggcagacgccaggcagttcggccagaccttcagcatttgctattggaagccaaaatg

SEQ ID NO: 106849 - DNA, 485 bp, Heterodera glycines
tttttcctttgtaataataatttttcaataacacctaaaaaacggttgcctatttttgaactgccaattatgaaagtaaatcgtattgtatcattgtctgtcaactcaagaaaaacatactttttaggaattttatgcgtatttaagcttttctaagaattttttttagtagtctgttttattggtttttagaattgcaaatctgcagataacaaagatcctaattgatttatttacgaaacgatttgcctgtaaatttctttaaattataaaatttacacgtgaactgtgagacgagaagaaaaattaattagagaaatatggaaaaagaagctgaaataggtaacacaaagagataaaaaaattaatttgatagagttgattcatttttattcttaattttgttttaaattttcaattaatcatttttttatatttcgcatgtgaattggatctggtcattaaatggatggagtgtattaatg

SEQ ID NO: 106850 - DNA, 247 bp, Heterodera glycines
aaaaaattcaattttttggttattgttcgagtttgggttagtgcttagaaattggtcaaaatagatgtcagattcgtgatcagcgacatctaaaaccccgtagaataaatttttatgattttctatcacaatttttttttgaaaaacaaaagggccccccctctttactttttgaaaaattcaaaatctgccattctacgatagtgcccaaatttttctgattaatccaatggattcagaaataatg

SEQ ID NO: 106851 - DNA, 350 bp, Heterodera glycines
  unsure (1)..(350): unsure at all n locations
gtcatttcgctntaattaataaaaatgtacaaaacaattctctaaatgggcttaattttgccgggacttaagtcccgctctgcttcaatttaaattaagtattcatagactatatataatttaaaataatgaaactccctttttttgngcagtttaattaaagtatgtttaaatgaggtgtgtgtacttattctaatgttatacagtatacgtatctcccgtcgaacattttctttgttggccttgaaaaagttcgctcaaccgttaaacaaaccttggatgaacagagtacaaaaaatgcagaagtggcggaagcatttgcgctgctcaaaaaacaccgcactcaaatg

SEQ ID NO: 106852 - DNA, 1003 bp, Heterodera glycines
agagtcgtcaaagtcgagctgttcaggccgaacttctcgcggctgtacgtggtcaatttgggcagtgccgaccccccggggcggctcaattggaaccgaagggtttttgtagaagcggaaaacgatacgggcaattaccacgcttttgtgtatgctgctgtggacaaaaatgagcgaattctcctgggatttgcgccatttgtgaaaattgagaatggcaatgagtcaaacgcaccgcaggcaaaaaaaacaaaaaaaaacggatgaaaaaaaattataaaataaaataaatttcagttctccgaatatcaattatcccttcctgtgaatttgaatcccttctttaaacgcaatatttggtttctttccatggacatttaccagtttgaggaggtatggcaaaagaaaataaaatgtgtaaatttttaattgaattaatcagaaatattatttagacaatttattcgatcgagacaaaaaatgagtcaaaatcaccgatatcaaatagtggtaattattagagaaccggaaatttaagtttacgggtcccgctgcatgattgggactcaaaattttagcgggaggtatcccgtagtctcgcattaaaatgtgcgagaacccgcggggtttgcgggatttttggaatttcgaaaaattaagataaatttaagaaaaactcaaaaaactaaatcaaattgcggatcccgctgcgggattggactaaaatttttgcgggaagggttcccttgggattaatcccgcaaaatcccgtgcggtttcttataagttcaatgaaggtgatggtactgatgatgtaactgcaagctgttcaatttgtttggaggaattaacgaacggccaacaaattattaaattacacgcagaaaaaggcgaaaattacttggttaatttggcattgaatttaaaattcatttcaaatcattttagcatttatttcacgaaaattgtatcaaaaattggtgaggaacgaaacagaaaaatg

SEQ ID NO: 106853 - DNA, 104 bp, Heterodera glycines
cgggaatggctttttagttggaattcaagagggaaaggcaaaatggtcgttaattgctttaacattgcaaatttttagtttcaaaggcattttgccgttcaatg

SEQ ID NO: 106854 - DNA, 234 bp, Heterodera glycines
agtttggtaaaacggaggacaatttcaattttaaattaaagaccgcgttaattagggggttgatccactaattaattaattcactaattgacttattcgctcttttgctgaacagccgccccagcagaagcagcctcaagaaaagccggggccgcaacaggacgacacggagacggaggaggacagcaaagaagacaagcggaagccgataaagtgtcaggaggagaggaaatg

SEQ ID NO: 106855 - DNA, 94 bp, Heterodera glycines; identical to SEQ ID NO: 97954

SEQ ID NO: 106856 - DNA, 1003 bp, Heterodera glycines
cttccaaatagcattgaaattttttctctaaatttccttataatatttaaataaataaatattttcccgcgattttttttgtatattttatttttgccaaaaaattcttcacttttttttttgcccaactcatcatgagatgatacaccacatcccgaacaaaacttgtacattttttgttgtgcatgtatgtatgtgttttgttgttttcttgctgctgccaatcatccacatggttaccacccatttggccacaaccatctgcccaaaccccgaaattcccccgaggggattttcgctttcggcggcaaaccattcctttggcaaaagccccccaccctccttccatttagtccccaaaaatcgggaagaagatgaagccttggctgggggggggagtggagaagtcgaaaaaggccccacgggtttgccgatgggatgaataattcagtgtccccatcccttggcccctcaacaagtacttcaaaatgtttatatgctttgcacagttgaggagcgtataatatgtcactgtaatttgaactaatatttttttgatataattaattaggctttttgaatgttaattaatgttggaaatatttaaataaatatttttaagtttttatttaaatattaagttaaatagtttaatttttcaacattaaattaggcttttttaagtatgtaaataaagtataaaatatttttgagttttcaaaattcattaaataattttatttttcaacattattatgcttttccaatattaattaatgctatgaataatcaaataaatatttttgaattttcattaaatattcgttatttgatccttaaaaattaaaggataatctataagtaaatttacaatatttttaataaaattttattctggtaaaaattaaatttttatcaatataattaatagtaaaattttttaaataaataaaaattcttaaattgaaaaaatattccattttaaattatagcacatgacatg

SEQ ID NO: 106857 - DNA, 868 bp, Heterodera glycines
tttttgtgtgcctttatatacaggtttcaagagtaattaatcccaaatctcttgggttgacaatggcaattcatccgatttttccatgcagcaaaaataattttatatataaatgaaataatgaaatttgggtgggcagcagaaaccggtcgatgtaaagcgcacactgatcagtcagatgatcagtcaaggcatattataggggagggaccaaccaaccccgccgatgcctccgactattgaatccccaacaattttaaaggcacgaattccgtcgattttttggcatcctttggcataagtattgtttggtcttgctaagggtttcttctcagattaattaatttggcaattatgctctgttccccctagttttcgccaatttttcgtccacctaatgatttgtcccaacgaatcggagttggacactgccaatggcgagcagtacaaaaattcagcggaaatgaatggccacgattttatgccctcgggcaatgcctaaacggagggaaaagccgacaaaagacaacagcagcaaagaaaactgtacaaagcggacgaaaacccaccatttctgcagacctttttgtttggctttcaggtaaaacaaatgcaagcattgattgatcagtccaataaatcaatgtgcatatcacaatcatttcataccgtaccccaccataccctaaccaatgaaagttgttaatttccgctttaccaagtgatggtgtccctgtccatgctcgtctccatcccgtttttaatccccaaaattcccgccttttttctccgatgactcgaagaaggcgcaacactttaataaaataaaaataatttaattgttgttcagatacaaggcactctaatg

SEQ ID NO: 106858 - DNA, 62 bp, Heterodera glycines
gggaaattttcaaaattttccccatttttcagaattttttgaaatcaatacacttaactatg

SEQ ID NO: 106859 - DNA, 224 bp, Heterodera glycines
ataatcatttattttttgtttactaaaataaatatgcaaattatttaatgaaagaaattcgctcaaaaatattatcactcttttccaccaaaaaatgatgacattatttgagtaatattttcataaaatatgtaataaaaaataattttttatttgcttgaaaaaatataaaaatattttaaagaattatattctcctaaatgaatgaaattagatcaaaaatg

SEQ ID NO: 106860 - DNA, 142 bp, Heterodera glycines
ttttgggggagagaggggaggaaaatgccaaaaggggagagaggaaaaagtcaagaagaagcagctaaaggggataaaagggagaggaaaagcaggaggcaaaaaatagacatacagacaaaacacacaaaatgccgaaatg

SEQ ID NO: 106861 - DNA, 59 bp, Heterodera glycines
ttttaataaacctaaaacaaagaagacataaattatcaattaaaaaaatttagattatg

SEQ ID NO: 106862 - DNA, 844 bp, Heterodera glycines
tccgtgccatccctggtccgtggtattttagccgtccaaataactaagaggaaacctatttttttgtccgctatgcagtaatcttttttaataaaatttcgttgttaaacataaagtatcatgacaattcatacacaggcaattcgaaaaattactgaatataatgcagtttacgcgtccaatcgacttttacgcgtccaatcaatgaccatcctcagtttcttaagccaaaacttttttcttacttggtcaatccatacatccttggtatcaattgaaagcttaaagtctcgggaatttataaatacaagaaaagagcaaatatttgcattacgaaaaatttcaatgaaaaaaacctgaaattcatcatttttcgcgtatattcaacaataactttttatctgttgcctttatcccagaatttttctatataaaaaaatctgtggactttagctctcgattgatacaaataatataagttttgagcaagaaagaaaaaaagttatgacttaagaaaccgaggatagtcattgattggacgcgtaaactgcattagaaccaaaatttcttcctccataaaattccaaaaaattaatatttaacaaaaaagagatgatattatggtcagcgaggaatatttgcagataaacagcagccagcagaacatgttccttccgtcggtgtttccgttccgaattcggcgccccccgcaaaaacgtcggcactgagtctgaccaatggcgccggaattgtccaatccgccaatgtccttccgtcctcccttctcaaaagggacgcggcaccgaccgtttccgccggtgttcgtcgtgccatgtccacgatg

SEQ ID NO: 106863 - DNA, 383 bp, Heterodera glycines
tccggcactgaaattcatatttactggcataatcttaagtgttatccaaactaagggactttattgatcagttggtatttgtcttttcagcggaagtaatagtctggtcattgtctaaatgatcagcaggaaattccgatcattcccaatttgttgatcaagtaaaaatagtctgatcatggccatttgcccgatcattaaatccttccctcgccgtaattgggacagtttttccccttccctctctcttacacttggagcactgctgtttcatttcgtcattctccacacaaatttccctttcctcgtcgcatttgatctcgcacaaatccaacaccggcacccattgagcatccgaaaaaggactcccacctttgaaaatg

SEQ ID NO: 106864 - DNA, 508 bp, Heterodera glycines
cgaaatgacggaaaacgaacggacaaatgttcatttcatttcatttgagaatggaccgagtgggcgggctggaaaggctgacaagcatgaacaaaataaaatgtccgatttcaaacggttggcccatccattctgatgatgttcagtgcatagaaggctgatgagactcattctctgctcgctctttaagaaaacgctttgggcaatggcaaaaggaaaggacaaatcatccgaaccctcgggggacagagtgacccattggcaacgcgtaacccgcgacaaaacaccttacccaagacaattgcatttgtcgtgccatttattcaaaatggacaaatgatcaactcactttcccactttttttccacttttagtctccttatcctcgaaaattcctttctggactaaactctgccccttctccaaacaacagccggaacagcagcagtcttcccccgtcgcagaagacacaattccgccccagcaacaaaaagaaggtgccgcaatg

SEQ ID NO: 106865 - DNA, 255 bp, Heterodera glycines
tttttacagcttaactaggccctattaagcttatttccagataatcccgcatgaattctcatttttaaattttttatagatttttaaatatttggattttttttggcttaccaaaacttcatcgaacctggttctttctattctctttcaaatcgccccaaattttttttacagcttaactaggccctattaagcttatttccagaaaatctcgcatgaattctcatttttaaattttttatagatttttaaatg

SEQ ID NO: 106866 - DNA, 77 bp, Heterodera glycines
  unsure (1)..(77): unsure at all n locations
ggattgtccttntaaaattaaattgtaaataaatttcgtaactttccctgccaaatttcagggactcgacacgcatg

SEQ ID NO: 106867 - DNA, 229 bp, Heterodera glycines
ttttcgaggaatattttttgtgtgttaagatgaaaatgagaaggaaaagtgtgggggtactgtatgtgacgtgacggagagggcggggggtgtcacgtgggaataggccactcccactcaactgagagcacgcagggacctccagacgggaggatttcgaaatccatccacagtatgccctcctatgccacgccccttatcattcacttccctgtcagtcatttagatg

SEQ ID NO: 106868 - DNA, 214 bp, Heterodera glycines
  unsure (1)..(214): unsure at all n locations
tttttttgtcttttgaaataaatgtgaaaaaatatacgaaaattattttcggttttaattatgctgtacaatgcttttaagccccgccgtgcggcggctcccctnttgtgcactattttagtttttaaaattggttccggactttttggctttttgaaataaattgtgaaaaatatacgaaaattattttagcttttaattatgcagtacaatg

SEQ ID NO: 106869 - DNA, 346 bp, Heterodera glycines
taagtagtgcctcccgacaccggggagcaagaatattgctatcttgcctaggcgggattctgacttagaggcgttcagtcataatccctcagatggtagcttcgcaccattggtctatcgaccaagcacatgaaccaaatgtctgaacctgcggttcctctcgtactaagcaggattactatcatagcaacaggtctttagtagggtaaaactaacctgtctcacgacggtctaaacccagctcacgttctccgcctgcaaatgccccattcgccactgaacagaaggacagcaaaccccagtctggaggctagcagcccaacgtacagcaacaaacgggtgaatg

SEQ ID NO: 106870 - DNA, 80 bp, Heterodera glycines
ggtagcgatgcttctgtcgtgactgattttttaaaataatttccctttttcattttcagaacacggaagagccgcaaatg

SEQ ID NO: 106871 - DNA, 410 bp, Heterodera glycines
tggttcggttttatacttttttgggagctggtgtcttcctttttgaattttccaatataatctgtatattttttcatcataattaaaatgaatataaacattttttcgttaattcttatgttcagataattttttagtttttatattatctttttaaaaataattaagtcatttatttaatgaatagaaattaaaaagattttactaattatattattttaagcggagaactgttttaacaagtaaaaataaaaattttaattttcattcaaagatcttaaattttccgggagagtgttactacaaaataaagtatgacataaccataaaataaatttaacgaaaaatctttggctaaactatttaagaattttcaatttttttttattaggaatttgtgcatacatatg

SEQ ID NO: 106872 - DNA, 53 bp, Heterodera glycines
atcaaaaaattgttgctttttttgaaatattaagcgaaattttttggaaaatg

SEQ ID NO: 106873 - DNA, 844 bp, Heterodera glycines
cataaatggacatttgttataacttaataaagcttgacaaatggtctatctccatttcttgcacactaaataaaatttaatctttatccacacagatgccctcgaatgcatgaaaataaggaatattataagctgtcaccggataaaaaatgattcaaaatgttgcaagaaaagaattttcaactccccaaatttactgttcaatttcgaaataatgaactgtgtacttttactaagatgtgtttatttgaaaaaggttggcctatcaaaaggctctctgaataaaggctcacagaattcagctccaattattttgccgatattagaattttgtacggttaaaataaagattaaaataatgtattagcatttggttttcaaatataaaaagaaaacataaatgacatttgttataacttaataaagcttgacaaaaggtctatctccatttcttgcacactaaataaaatttaatctttatccacccagatgccctcgaatgcatgaaaataaggaatattataagctgtcaccggataaaaaatgattcaaaatgttgcaagaaaagaattttcaactccccaaatttactgttcaatttcgaaataatgaactgtgtacttctactaagatgtgttggcgctagtgtaaaagttggcctttttgaaaattttttaaaaaagtcatgaaaatacatttccgggggttttcggggccgctgatcacgaatatgacattcatttcgaccaatttcgaaccccggacccggattcgaacaaaaagtcgaaaatcgtaaattttcactttttataaatgataattttttaaatccttttagcaaatg

SEQ ID NO: 106874 - DNA, 506 bp, Heterodera glycines
gggtgggcaatggcgattctcatcgagcaaatcgaaacttgaaacgaaactgcataaaattatcaaaacgaaactcggaacccaaaaaggcctgaaattctcgaaactttcgaacgctcgaacacatttttattattattttttttaattttggaattaatttattttgatttctttttattccattaaaaaatatcaaaaatttgatttttaatatcggatttaaattagggtaggagccagaaagaaggggcgggggaggagggggcgaatcgcgctcaaaccggggaacggggatgaaatattctatcttataaaagaaatattttattataaattttactcctctttatattttcatttactaattaattgtgatgcgccattttatttttattttttttgcattaaaaattttcaaataaaaatcttttcattgaattaagctgtcgattggagctgtaagtgttcagcttcgcttcgaattctttctcgatcgcaaaatg

SEQ ID NO: 106875 - DNA, 193 bp, Heterodera glycines
attattaaaatagccatgctttcgacaaacgccaaaaattgcgttgttccattaagcccaatcgtacgatgggcgacagcagcaacaaaattcgatggctgttgacccgagtaattaggcgctcattaattggccaattagcttgttcattagtattaaatgctcagtcaattaagatgaatatgtgataatg

SEQ ID NO: 106876 - DNA, 453 bp, Heterodera glycines
taacgcccattttgatgttttttgactaacgctccatcactaacctgctgcacaatttaaccattcatctttaagggcaccaccgatttagtttagataaattttcagcttttgtccatggcctataaactaataataactatgtataaacgataaaattggaatatatgaatattccaaaagtcaccaatcgtacaaaattgagctcgatagcataactttttactgaacaaaaaattaaaaaaaaaattccagtggactgaaatttttttctaaaacctatgtatgacaaatactcactaaaattagcaagtaaattaggttagattctgttcagggaaggtttgaaaaaattcaaattgaaaaatgttcattttggcaacttgttttctgctgtgcatttggaattttgttttctaaaagcgattgtttgtctatttcagtggggtaatg

SEQ ID NO: 106877 - DNA, 896 bp, Heterodera glycines
ttgttatagtatccgctaccatacccgtagcccgccgattgctgtggggctcttatgtgaatgtgcacccgaacccgctgctgatggtgtcgatggtggtattgctgttgaaaatgggtggtcagcttctttcagaaataattctcgatgtttacttgtccgttttcatatccgccatatccgtaccgttttggccgcgaatgatttgccaaagaaacgactgatggggccaaataatgagacggaactgcaacaattgaggagcaaaggacaaagaggaagagaaaagtgaaaagaaaattcattggcaatttttgagaattattttgggaaaattgcggacgattcattctttttataggcacacaaagtcaagtggaggacgaacgtcagcaacaaaattaaaaggggccaataaggccgaaaaggaaacatttgacgaacagaggcacaattgttgtgtttttgagtaactcttcacatgcgatgacaaatttatttttattttgaaatatttttaattataataaatttaatttttaattctaaacttaagagttatgaataaaaatacctaatgtcttaaaatacggtcaaggtcagacggtaggggtcaactccgtgtggccaactccgtctcagcaatgttcaaaaagctataacttttttctttgttggccaaacttcacaatcatggtatcattcgaaagccctagatgtttagaagatatttataagctatttctcagtgattaatcagctctcaaaaaagttgtcagttgaaaaccgcaaaaaaggcagaattttcgaagttttttatttctatctttttttatagttcgaaattttctgtaatttttagtaggctaatagagcctgtgaagagctttcgaatg

SEQ ID NO: 106878 - DNA, 107 bp, Heterodera glycines
ttaagatttcaaaccaatttggattttttttaatggagaataatcgtctgcaaaaaacaattaacaaattaacaccaattaagcgtctaaaaatcggcgaaacaatg

SEQ ID NO: 106879 - DNA, 1003 bp, Heterodera glycines
atgattatataaatccattttattaattgcttttattctcattgatttaataaaacggcaaactactcaaatttatataaatgatgaatttgtaaattttctctttatttgttcccaatttttgtgcaatttttctttcaatttttgtccattcttttctcgagtatttctttcccattttcttaatttattttttattttatgaaatttttccacaatttctctcttttgtctgtcatttaaaatctgattcttttgatcacaaatttgtccaacattttctctcaattgtttcaatcccctaaggtatattaaatgagagcaagccccgccccctcaattaaattggcatttggcgttttgacttaatatgaaaaaaagaagagaaaaagaaaagaaatagcatatacaaagaaaaaagggaagaccagacagttgcttacttatgtgtgatgaaagcgtaggagcgggagggaataagaagtgagagataggaaaaataagagagagtgcgagggatgagaggaggagacaaagggaagaacgagaaaagaagggagagtgggggggggtggatgagagagagagaatggggaaagagaacggagaagggagaaagagtgagagagagagagaggagtgggtgagagggaagagaaaaggcgagataatgggagaaaagagagaatcaaaagagttgagatgataaaaaaaagcagagagagtcggtaggggtcaactccgtctcagcaatgttcaaaaagctataacttttttctttgttggccaaacttcacaatcatggtatcgttcgaaagccctagatgtttagaagatatttataagctatttctcagtgattaatcagctctcaaaaaaattgtcagtttaaaaccgcaaaaaaggcagaattttcaaagttttttatttctatcttttttatagttcgaaattttctgtaatttttagtaggctaatagagcctgtgaagagctttcgaatg

SEQ ID NO: 106880 - DNA, 687 bp, Heterodera glycines
atttaaattgtaaatgtttgcgatttaacacgctaattatagcacttttgataaaatatgatttggagcaatttttggaaaaatcccagaaaaatgaaaaatttagcatgtagccaaaataaaaaatagaaaattacatttccaaaaattcggctaatccatgttagcatgcactgactaccatccgcgatgttgggaatgggccgaggaaggcgaatgccgcaacaatgcatggatgtcggagaattgtaaacaaagctgtggcacatgtgtcagccaatatgaactcaaacaggtactgtattatttactacgtgttttaccgtaaaaattaccgtaatgttgtatacaccaaattttaatcggttcaatttttaccctccatttttcacaaattctctttagaaattgttggaaaatttcttatgaaaatttaataaaataaataattggtaaggtatcaaaacttcacattttctttaagctcaagacaactacaaaaaataagcttcaaaataaaaatttcgaaaaaaatcaatttgtttgtctttgatttaaaatttgataacccattaaaaaatagaaaaatagaatgaagctaaaccaaaatggcgcaaattaaatcgaaattaaaaaaaaaatcaaaaaattttaaaaataatccctgttttctttttttttaagatg

SEQ ID NO: 106881 - DNA, 127 bp, Heterodera glycines
tgtcagctccaacgtttggtgcaccaaattcaaaatcaccgcggccgaaggcaatggccaattgccggctacactcgcccaagtgttctacaaaacttccgttttgcacctccaacctcggcaaatg

SEQ ID NO: 106882 - DNA, 763 bp, Heterodera glycines
tttttccagaaaacctttattataatggcctccatcagttaaattggcctttttgaatttccgaaaaggttattttttaacaaaatttttcgaaaatattgattaaatttgaactttgataaaattggttaatttacgccaaaaataagctaaaatgcgaaaatttcgcttttcgggttggtttttcgctaaaagtgagcaaattttagcggcacatattttgcgattttatatccatatttttccgagccctagttattaaatgtaaattggattgattaacaaaagtattaaaatgatagtaattattaaacatttcactcatataattagcatttttatgcaaaaaaaaaaccaaaaatatttttcgtattttgagactgacatttatcccgataaattcattcaatacaatttcactaataaaaaaggataaaagtctttaaaaaggccctaaacttcaaattttcccttccgaaataattattttattttggcgccagaaaaatttttgtgcatttataaatcatttttaacagcagatgtttagcaaaatgatcaatgttgtacaattttttggggctattaaaaccagggctcggatctgtccttatttataagatttgtccttatttggagggtccaaatcttacaaaataaaaatgtccttatttgtaagatttgtcctcatttcgggctattgttcttattttgttcttatttcttaaatatattcaaaattttgaaattttatagcagaatg

SEQ ID NO: 106883 - DNA, 1003 bp, Heterodera glycines
tatttttaacgaattatccattccacttttaactatttctattctgctggactatataattctttacaactgtaagaattgatgaaataaaagattaagggctttatatttaatttttcaattttcaagtaaagatattttaattgggtcattaaggatgaaaacagcgtaattgaatattatttattttatttaacactcatcaacaaaaaatgaaaattatattgccaaaatgctaaagaaaaagaagtctgaaaaaagaatatgaattcaaatttggcactttccgttctaatgtattgttttcaattttcgtttaattttgtttataatttttttttactttgctcaaaattgaataaagcacaataacttttccaacttttcaaattttcttatttttattttaaaataattcctttattaaatttcaatttattcaatttgagtgtgcacttttctgttttttgactcagcacgctttcttttagcttataattatggatagaattttttaattttatctgtttagcttttattacccgagtgatcattcaaaaagtcaattaaatttaattaaaacgaccaaactaatgatggcgtctgagcccaataatgagaagcaaacaaatttaattgatgaaaatttctattggccaaattaacattagaaattggccaaatgataaatagttcagctaaacaaattttgttcaaattttttggttttccgtcaactcgaaacaaaagtttagtttagtcaactgtcaagtgcataaaaattttttaacataaattttaaataattttaatcgatataaattggcataattgaatgtctggctaaaaagaaagttcagctaaacaaattttttgttcaaattttaacaaactttggttctcctaagcgcaacaaaatttttgtttaaaagcgattaacttttttgaaattccacaataaaaacatcaattaataaattgaataaaaattaattaatcaatg

SEQ ID NO: 106884 - DNA, 237 bp, Heterodera glycines
tgtttttgacaaaaaatcaaataatttgggattcactaatttcgtttcgtttgcggtaagtgccaattcaaacaaatattttaatttgacattcgtggaccagccaatattgaagttcatttatttatttgcctggtgtaaagaaatcataacaaaataaattaatttctaaaacataaccaattgaccacgcataaacaaaaattaaattagatgatttaaattaaggaattgatg

SEQ ID NO: 106885 - DNA, 274 bp, Heterodera glycines
ttggttaagcttttcgtaatttatttgctctaaaaactactaaaataaagtaagcataaatctcagtcaatttgaaaaacttttttaataaaaatttttaaggtatatgtcggttatacgggcacagaatctgactctgtcaataccgcctttttgccggtcgataaatgtatagccattaaaatttacaaaaacgaaaaatatcccaaaaaaggttatgaaaatgcaattaaaattttgaatcgactaaaggtggatgaaatgaacagacatg

SEQ ID NO: 106886 - DNA, 417 bp, Heterodera glycines
  unsure (1)..(417): unsure at all n locations
ttttaattntaaaattattgaaatcccacnccaaaatcttaaaaatttgtacattttaacaatgaaagaggctttaaaaaacgccgagtttggcacgttatgtggcaaaattttttgtttttatcggaataattgccgaaaaaatgctcaacattcaacctcctataaaattttctaggtttttattaggaaaaaaacttcgtttcgcattttttaaaaatctgacattgcaatgttttttcaagggggaatcgattatgtttgaaagtagcaaaatcttcaaaatttggtgcattttagcaattggaataggttttagaaatgttatttctcttaattaggtatacactattttttaaaattcctcccccattctctcaaggcctcgagttttgctgtacggagcagttctacatg

SEQ ID NO: 106887 - DNA, 354 bp, Heterodera glycines
ccccccccccccccccccccttgtcccacaaaatttttggaaaaagcgcgccacaaaaaaagcgtttttaaagcagaaaaaagtcgtcgtaaatgaagaaaatgataagtgaaaacaaaaaaatgttggaaaaaatccattccggtgaaaaatacaagccatttgaataaatattaaccattttgcattgcatataataaaaattttaaatgtccttgaatttcatgaattttccccactatgtccttgcaaatcggcatacccgtccttggaaacggagcatggacgatggcaaccctggttttaatgctttggatgatcatttgttttgtttcagaatatccaaattaaatg

SEQ ID NO: 106888 - DNA, 149 bp, Heterodera glycines
aagggttcttctgcttaccactcattaattgttatctcattgataaattgttttgtttgaaaacctttttcataaataatcgtcgattacgattgaatgcttctcatttattgattgtttttaccgctcattccttttttcaaagcatg

SEQ ID NO: 106889 - DNA, 119 bp, Heterodera glycines
tttgtttaatagttaagagattattattattattatttctgtaaagctttattgtgtatatataatattttttaaacatggataatataagataaaccgttttgcaaaaaaaaaaaatg

SEQ ID NO: 106890 - DNA, 381 bp, Heterodera glycines
  unsure (1)..(381): unsure at all n locations
ctacccatcggacgattacattcagccaaatgccatttaccgtaacaactgnagatcgacaagnaattgaccgacatcccctggtctccttcgtcaaatggattctatacaatttgccaaaacaatacgacaccattgcatacattttggaggacgatttgacatggttttggttttccgagaattattcatggaagggctaaatccgtcaatgatcaaaaacggcaacagattactcgaaatgaaagtaataaaaatatttttaataatatttatttttataattttttggtaaaaagtcggaagaaattaaatccaaatatatcattccgagattcttggaatttggttcctggtccattagcctcactggtcccaatg

SEQ ID NO: 106891 - DNA, 87 bp, Heterodera glycines
gctaaagattttcggctttttgctttaaggtacgacggatgtgtcggaaagacgcgcaacattttcgaggggctcaaacaatgcatg

SEQ ID NO: 106892 - DNA, 951 bp, Heterodera glycines
ttagtggggtccggctggcacttttgccgtaatggaccgaccgctaatggactggtccattagtggggcccgggctggcacttttgccgtaatggaccgaccgctaatggactggttcattagtggggccctggctggcactttgccgttaatggaccgaccgctaatggactggtccattagtggggtccggttggtacttttgccgttaatggactggtccattaatggagtccggtctggctaatggacagacagaccggtatgtccattagtctggtctaattaattgacctgtcgattagtctccggtctggctaatggagaggcccgttcaacgtcggcactttgtgccagttaataaccctctcaattagcagctcaatttttaatttcttccataattttcccttaatggaactgacggtatttcataaaagcaccccccccccccccacctgacccagacagagtcaattagctggctttttttaggtgatggatgaggggctttataagcgccagtttttatgaccataagtaatgatgatgaagcatcgctcgaaatcctttcccccaccctctcgtaaggcacgctcgaaaaggagtttgtccgaaagcggtaggccgggtaccgcttccaacatttgtatgtggcaggacccggcctaccgcttttttgccagattacacgatttgaaaggcggacggcgtttagttagcacgccaaacccggccatctttcaaagagcgcctcccctaagtatgtttgtttttttttttttgaaagtctactgtcgaattttttttgttatttaaacttttttagactttttcccagactttttccattttggcatttttttagcaataaacatgtccgcaaaccgagagcagctgactgaaaatttaaaaaaaatcatcgcactccacaaactccagcaagacatg

SEQ ID NO: 106893 - DNA, 150 bp, Heterodera glycines
aatgatcttatttattttgaaacaatgttgttctttgaaataatttttgttaagtgataaatattttttttttagttactcaaaataattttgtttgaattcaattaaatactttaaattgaaaatttttgtaaatatatttttagaatg

SEQ ID NO: 106894 - DNA, 902 bp, Heterodera glycines
agtatgctaaatgagttattgtttgggaggtggggtctttttgggagtttctttaagtgcaatcgcatcggaagaatgaacggagattgtgatcaatgactactgaccacggtcatcggacgggtgggctaagcaaagagagagacgaaattaagcaattaattaggcggcgcttattaaaatttaatttttaatttaggcttcagaaagttcgaagtattcgggccaaataatttgggatgaaacagatgtttgtttttcctgtaaaatgaagtcaaaactgattaaacagaattgaaattcggtggaagaatggaaaaaagatcttatcaaagaaaaagaattcgaatcggaggataaaacaacgaacggagaaaaagagggggagagagaggaggaggaggagggaggggatggcataagtaaaacgaacgaactcagagggaaaagggcgggcaaatattgagataaatcacttaattaatgcaagcagaggaattggggcattcgcaattagaaaagggcgatgccgggcattgcgcaaaaaatgaaattgatgagcgaagaacgaacgaaacgaacggcggaagggcaaagggaggaaaagggggggggagaaaggaaggcaccgggggaacgaaggaagggaaagaaggggagagatggcacggcacgggaggggggagaccatccattgaatgaatgccgtggcagggcgaaagggaattgccatttcgaaaccaaaaggatggagcgcaaaatattttttcgtaataattcaaagttggaaggagatgtacagtctgtgaaagtccctttctcctacggaattggccaagcggaggagtggggaaggagggggggggaaagcaggtcgggagccatttcaaagagcatttatg

SEQ ID NO: 106895 - DNA, 73 bp, Heterodera glycines
ccaaaaggcacacgacattggaacactggccaagtctgaagaagtcaaatcgatttcggtgccaccagcgatg

SEQ ID NO: 106896 - DNA, 57 bp, Heterodera glycines
ggtgcattcattttgtatttcttaacaaatttttccatatttaggcatttgccaatg

SEQ ID NO: 106897 - DNA, 122 bp, Heterodera glycines
  unsure (1)..(122): unsure at all n locations
aaaaaataaattttgatcttttgttcaaaaagtattaagatttcattgaaacgagaagatatttcggtatttttagcgttgttattgtcncagcgttcgtcgcattttcaaattcggcaatg

SEQ ID NO: 106898 - DNA, 425 bp, Heterodera glycines
tttttccattaccgcaagagctgcggaaattgtgaattaattctcagaaaaatggctatctctttttaggacaattttctatctcgtaaccccgatgctaatccgttccgcagagcctcttcaaaattttttccattaccgcaagagctgcggaaattgtgaattaattctcagaaaaatggccatctctttttaggacaattttctatctcgtaaccccgatgctaatacgttccgcagagcctcttcaaaattttttccattaccgcaagagctgcggaaattgtgaattaattctcagaaaaatggctatctctttttaggacaattctctatatcgaagcgagaatagtaatcggttgagtagcccctccacccgtccatttcagtcccacaaactctctcttttttcagctcttcaaatg

SEQ ID NO: 106899 - DNA, 182 bp, Heterodera glycines
atcgtgttggtttatgggactgcatttactcagtttattaaactcattatttatgagcaaatatatttttgtcactaatttgtctaacttacctattttgagttttttccccatatatctatatttttttctgtggtcttttattcatttaaatttcgtcggacttatttgttaggaaaatg

SEQ ID NO: 106900 - DNA, 697 bp, Heterodera glycines
ataaatatatgaatttggctgagtttcctaatgcattcattaatgacaatcgtccaattatgccattacaaaagcaactcttatttaaaccaaaaacatttgttaaaaatttaaatttttaattaatttattacaaaataatattgaagtacgaccaaaatgtaataattcatgatttacaaaaaaaacttataatattatttattaaattttcatttgtattatttttaaaattttttatatttttataattatttttcaattattaaagtgactctgaggttgtagacattacatcgctttcattctatcatttttagtttattgtttaaattttttgttttaaaaaagaaaatacatatgttggtcatgaaaaagacttaattttttatcttttttggattatatttttattaaactttttatcattaaatgattaacatagtgtaataataataataatattaattaaatcattgcttactaattctgtgtgaatttcaatattttatatatttataattgttgtgaatttcttataaaatttaaatttttttaattaaattattacaaaataattgcgaacataaaatttattttattttcaaaaattaaatacggcctttattccttgatgaattgaaacaaaaaggcgcgaactgagaaaaaaagcatatttctattctatcattacatg

SEQ ID NO: 106901 - DNA, 145 bp, Heterodera glycines
tatcttttgactaatctaaagatataaaaaagcataacaattaaattaagtttttcaatatttacacatcaaaattttagatacaaaaaattggcgtcctattctcgtttaaaacaaaaaagttttttaaatttttttatagatg

SEQ ID NO: 106902 - DNA, 505 bp, Heterodera glycines
acataaaaaacatattgaaaatcttttcaggcgtttttagcaaaattaaaatttttaaaatataataaattcacagctaacaatttcactaggttctacttcaaattttagcacccagaaaaaatggaaccgttggttgaattgattcaacatttcggttgtcgttatgcgcttttcggggcctataactcggctagggttacagattgaccctcctttttataattaaaagaaaataaaaattacataaaagagtttataattatgcaatttgaagagggagggcgggcatacaaatgaaaagttgaagacaatttaggaaaatatgaagaaagagaagaattgtttcatatttctaatattttaaaaatttgagcggattatgtacatattttcccaaatatttttaaacttgtcaggatcagtcagctgggggcaagcttttcgaaaatttaataaagaaaaagtaagaaggtttaattacccaagtttgagattaaatatg

SEQ ID NO: 106903 - DNA, 96 bp, Heterodera glycines
gaaattgccaattatttcatttaggacaaggcaaagcgacaacgggagactcagcagatagaaccgggaaatcagaattgggaattcctcgccatg

SEQ ID NO: 106904 - DNA, 377 bp, Heterodera glycines
tggtcctttggcggctaacaatgaaagaaaaacgacaccgcctcccccccccccaatttgacaatgtccgtccgtcgtggtcattccgctggctgatgcttttcctccgctgctgctcctttgacattatttaaattctcgtcactttctgtttagtcgccttccggcgtttctcgagaaagttaactttttggctggcgctgtaagattcgaccaaattgaacttgtttttggaattttatcattcgatgatccaaaatttgctgggggttttaaattggcaagcccaacaatttcagtcgcgatttaaaataaaattcagaaatagtcctactgtacaatttacccttccctccctccctcaaatgccaaaaatg

SEQ ID NO: 106905 - DNA, 103 bp, Heterodera glycines
tctaaatgagatacgctaatttagataatagatgaatagtttatgaatgcatgatcctatgaaagcacatggcatgaatgaataaatagatgaggcaagcatg

SEQ ID NO: 106906 - DNA, 775 bp, Heterodera glycines
cagtaaaataaatgaaaatagttcactgtagaaatcggtcactgtagaaatgttacagcaccttaagatgtacaaatgaactttatttttggaaaattttttaaaataaattcttattgttagcctttttatgcaataaataattaatttccaagtttacgtcgacactcaaaagatgctcacggcaaaagaattaatttttagctccttgaatatgtcgtgaaacatttattttccaaaagttaaatataaatttagccaatgcttcatgagtccttgcaaataaaacacttaattaattacctgttcctctgagacttaatttctttttagtttggttttaaaagcgcttataaaaggttagattattgaaaaattggctgaaaatttttggaaaatttttgattacagctctgaatttgccatttctgtcactatttttgctatttgcccaaattttaggcctttattctggtaattttcgcctcaaaaaatctaacaaatatttaattctgatataattacaatttacttttactagtttttctattgtattttttttaaatataaaattttaaaaagttaaaaaaattgaaaattacggattatggattacgggaaattacggtgtccttggacccccgtaattagggttacggatttctgtaattgcaaatccagttacttgcagccctgatttaaacccttaattacctataattaaagtgtccttttttgccagaacaacccgttgtgcaaccttcaagcagcgatg

SEQ ID NO: 106907 - DNA, 117 bp, Heterodera glycines
accgcgataaaaacattcgaatcaattaaatagcttctgagataataaggtttatcataaaatttcatttaaaaataaaccctcaattattggtatgaacgatactttccaaacatg

SEQ ID NO: 106908 - DNA, 358 bp, Heterodera glycines
caaactttgcctcaataagtcaaaaaaatcacgaaccaaaagtcgcaaaacctcaaaaaagtcataaaaatccgaaaaagtgtaaaaaaagtcaaaaaaagtctcaaaaaatgcatgttagaagtagggatcggatttttagtggcaaaaatcccaaaataattaactaaatagtggcaaaaatagtggcgaaaagttccaaataattacttttaataaaaaacttttaagctctgatggggttttgaacaagcccaatttcgagaaagaattactcgattgagtaaatttcggcataaatttgaagagaaaaaaaggattttcgatgagagacctattttgattttggcagcaaatg

SEQ ID NO: 106909 - DNA, 380 bp, Heterodera glycines
agagtgtcaaaggtgatttcaaaaaatgtgcactttttacaaaacatgtgctcaacaaagagtgccggcccgctcatccaagacgcctccgatgaacagctgttgtgtctcgtggaaatttgtgtcaacattttgaagggccgtgtccctttgcgagccaaacagctaaagcgtttacgaacaaacgcacagtcacttcgtcgactagcgcgcacacgcagcgcacggtctgccaaaacggtgttgttacagcacggtgatggcctcccggccatcgctgggctgatggccagcatagtgctcccgctaattgggaatgtcattgaaaattataaatagtaatagttcatttttatttgctctttttttttgaaataatg

SEQ ID NO: 106910 - DNA, 364 bp, Heterodera glycines
agtacacacaatttattttcttcaatatatattttttaaataaatttataaattatggaaatttaaaatttttgatgctttcgatttttcaacaattaattaattccgtttgatggggggggggtgaggtatgagaaaaagacagttggcgagagagcgcatgaaataagagaacagtcagtttgagagcgacgagaggcagaagaagttgctccctcctctcgtttatgagataattaataacaaattatccaatctaattaagttaattgttaaacatatttaaaagcatttcccctcttcacagggccaaacgctgtcgcgccgtgaactgttcgatttgattggcgaaagcaagaacatg

SEQ ID NO: 106911 - DNA, 567 bp, Heterodera glycines
  unsure (1)..(567): unsure at all n locations
gctgcacagctgcttaactaagctgtgtgcatttagcctccagaccgccaaactcaattgncaaaatacaatgcggcattgatgaattttcttggcngatgatgattgaatttgccgcctggccaaccaaatcctcggcctcagcaaatcactcctccgccactcaacagcgaccaacaaacggtctttgatgctgttgttaaggctattcagtcggacccaagggattcgactgtcccccgccgtttcttcatatacggcgatggaggcacaggaaagacattcctgtttggccaaattattaggcgcttgcgaaaggccccatacacctacaaagtgcttgctacggcatccactgggtgtgcagccattttgctgccatatgggaaaacagcccattccacgtttcgtctgggtagagaagtgtcattagacaaactcccaagcattccgctggagagcttctttgcccgtcggattcgtgaggcccaactcatcatcattgatgagatcaccatgcttcacaacacggtgattgaggtcatcgaccgagtgtgcaaagagatg

SEQ ID NO: 106912 - DNA, 1003 bp, Heterodera glycines
  unsure (1)..(1003): unsure at all n locations
gcntaagttctatttgtcgaaatatttttcaatggcacgacttnttcacagttagcaaaaaataatttaattaaatcggctggaaaactattggttatagaaagtgatttcgatcacttattactcaaattcatagctaaattttggtacattaaaataaaatatgtttttttaaatcattaaaaaatgaatgagtcaagcatattgaccatatttatttataatttatttattttaacttaaaaattttagtatgaatattaagtattttgaccaattttagtaatcaatttttaaaagaatttgttttttaatctttaacaattttgccataccgtactttagctggctgcccatttgcctgtgcctttttgctattaattaattaattaattaattaattaaaggtaaacatatccaagggatctgcccttccttcactttctcggacattttcagcagaacaaactttagtctttttttctctccgttggtcatttggtctttgtgtcccactgcttaatagtctttttttctctccgttggtcatttggtctttgtgtcccactgcttaatgagtcatccattaatagcgtttgatctttgtcccactgcttaatgagtcatccatcaatggtcgaccgttgtaattagctaattaattaaggaacagaacattgcgacccaatgtttacaattttttgtttattttcactcccaaacatttttctgagcatccgaatgcaataaacacaatatttcgttgcataaattgtgctgaaacttctctatgatattcacaaatgcatttagcatcaattagctaattcatttatttatatcaaattttatttatttatttttaattaaatttaatttattgcaaaaaaatagttgtaatattttaaaatatacggccttttcttggcgaatttagctatttgttgtttaagtaacaattttaaaaagtttgccctattttttaattgccaaattcgacatg

SEQ ID NO: 106913 - DNA, 318 bp, Heterodera glycines
atcgctcatttccacgaattaaatggcaatgcgacgaattgcgcgagaaattaggccaattagagggatcatttgccctgcgggtatagtgtgatgggcacggggtatggtaaagtgatgtcaattgggctcaaagaggcgaatttcttcaattaattggatggaccgaatgaccaaaacggcaaattgagggccaaacgaaatggcttttcagctgtgaagcggacaaattcctccaaaaagaagaaaaaaggcccaaaaaatattttaggataatattccgtttttataaaataaaatatttttattcagcagatg

SEQ ID NO: 106914 - DNA, 72 bp, Heterodera glycines
ggtttggggataaagtatttttcaatatttcattcccttttttgaatattattatatattatagctaaaatg

SEQ ID NO: 106915 - DNA, 516 bp, Heterodera glycines
aatggctaaaatgaaaaccttagaagtcaaattccaaaatgttcaattttttaattttaaagaaagtcaatttgggaggcatatgattagaggaatttttcttgtgaaaaaatgtttgacaataataaaaaattcagttttttaaaatttttaacactatataggctcggtcttctttggcaaaatcaacgtccaaggttggctatagatatgtccagcggtacctgggagaaaaattcggaatttttaagtttttaaagaaaagtttaacattttacccacccatttattaatcaaattcccaaactcattagcatagatttgtcacaattgtttttaattgttttttagataaccgcaacaaaaattgatgaaccttttcgtgatttgttgttttacatgtatttcaaccaaaaattgttgcacattttgaacgaaaatggccaacttcaaagatatttggccaaaatttcggatcattccaacaaaaatggtgataaaatggaacaaaaaatg

SEQ ID NO: 106916 - DNA, 332 bp, Heterodera glycines
tgctagatattttcacttttttgtcggtaacgccggacacagcttataaaattttaaatttttaacgaaaaaatattcaaaaatctgattttttacaaatctgatatgtagcagtttccataaaaattgaaaattcctggcgtccatcggtgccatcatttgtttttccattccaatttattggaaaatttttttataaaaaacaacgccattcgggtttttacaggaacttcttcaacaacggtccgttgtctacaggtcaaccgaacaatatgttggcatttattacccttgtttgttaattcccttttagtaacactgtgcacgcaatg

SEQ ID NO: 106917 - DNA, 94 bp, Heterodera glycines; identical to SEQ ID NO: 97954

SEQ ID NO: 106918 - DNA, 1003 bp, Heterodera glycines
aagaattacctgcaacatctgctggcagcaaggtgataatttcaaattcaattcaaaagtggtgatcgtttaattacattttaaaaatatgttcagtcgaaggcgcgaaacaaaaagaaatttcaggttcatttttgtattaatgtataaacgtagaacaaacaattagtattttaattcgtagtaaattattttttttttttaaaaagttttaattgattattaattttaataaataaaattgaatttagcgccaagcttcgttctcggcgccatcatcacccaataaacattgggtttgcaaaaatacttataatacacagtaaactaaatttattaggttgacggatcctctgaagcatcctcggtttgtttaaaacaaaattattaataatttaaatgaaataaataaatttttaattcaatgactcttaattaaagtaaatatttaaaaaattgataattagtcggagacgtttcaaacgccatcggcacaacaaagtccacaattaaaatcaccagctgccaaactatcaccatatcatgtgaaaaccaattctggcaatgcggtattttttaattgattgccaaattcttttattccaattaatcaaaaatgttgagaggaagcacttattcaataaaagttaaattttttctagttaaattaaattaatttttattaatgaagaaaaagatcttttattaatttttacaaaatgagatttaaaaattgtgaaatcttttttcctttttcttttttaaaattaataagttttacgaaaaattcgtattttataaaatgtattgttgtaattatattttttttttgaaaatattaataatgcgatttatgcacttaagaaatcaatttttaacaaattaataccagattttaaaagactgataaagcaaatattataaaattatttaaataaaaattattattttttttaaatattaattaattaagtcttcttcaccacgtcgcttatcactgatg

SEQ ID NO: 106919 - DNA, 66 bp, Heterodera glycines
ggttttgaacgatttcttatttttcaatttctgatttctttttagaatccgaatgctctccgaatg

SEQ ID NO: 106920 - DNA, 101 bp, Heterodera glycines
ggtcaggctttttttaaaatactgagctctaattattatgaataaaatttaaatgtatttagaagagggatgagaagccttgggataataaaaaaagtatg

SEQ ID NO: 106921 - DNA, 807 bp, Heterodera glycines
  unsure (1)..(807): unsure at all n locations
aatagcatttccccatgagattgagaaaaagcaattcccctaaagaagcattaacggatcatttgaggaaacaaatgatccatttggtcgataattggggttgtagaaggcagaatcggtagttcagctggtagaacactcttccggaaggccaacagaaacggcggttcaaattcccccccccccgacagtttttccctcaaaggcttttctcagctcattactttattcacgaaaaataaaaacaaccatttaaaaccttttggtgaaaataataaatgtatattgacttcatttattagcattaataatcattntttataatcatttcccccccccctccctattaatttctcaattacagtttcattttttttcgtttgaattcattctccccccccccccttccttcgtctcccatttcatttgttcgaccttttctcctcccctcccattggctctctttcgtcccaccaaaaagggaccgccccttctccataacgtcggcgatgcaatgagaaggggcggggggagcgaaggtgaaaaaaagcgggagaaggaggagagaatggtagtcaaaggaaaagccaatggaaaagccaaaggaaaagcaaagccaaaggaatgggcggaggagggccaatgaaaggcgagacgaatcgcacggcacaaacagtgcacgcgcaacaaacaaaacgcgcaaatggccccattttaaaccaaataaattccaattttccctaatttttgatgtatttaaaataacgaaatccaacaacaattaagcaattagtactccaattaatg

SEQ ID NO: 106922 - DNA, 171 bp, Heterodera glycines
tttttcattcattcgtcgcatttcccaattttctgattttggactttaaaattatattttcttttctctgtcaaataaatattatttttgtttgtcctttggacacaacaactggcgacgcccgattgaaaatatggcaccaaaagatgagcttaaagctctttggaaatg

SEQ ID NO: 106923 - DNA, 300 bp, Heterodera glycines
tctgcattttattttgaaaattaaattattaaagcgatttcctttagtcaatttgttcattttatttgcgcgttgtaattgacaatttataattttggtcggactttctgaattggcgcacagacaaattgctaagatggatcagttttttctcatttttttgtttagattgatggcttttcattttgtctatgaaagaaaggtggaataaccagttcaaacatttgtttataattttgttttatttcacagataatttgttaaacattcaggcaaggtcgaaaatattgttttattatg

SEQ ID NO: 106924 - DNA, 524 bp, Heterodera glycines
ttgccaatattcgcacaatgaaatggccaaagtccgctgaccgattaatttacccacaaatccttctccatctcctcattcattaaggtgcgtctgcacatgtcccacaaccatcaggacttcaccagtcagccgatggacatgctcagttttgagatgcaactccaatggggtcttttgatggagcagtgttttcccgagcattccaaagtgaacactgtccattaaatgctaccaaattgaatatctcacttttctttcattagcgtttcggcccctccgccgcaaattcgcagtttcgcaatttggaagagttacagaaatatgtggacatggaggtcgaattgacaagacaatccgtcacaccactcgcacttgtccatttagcactcctacacatgcattgaatgtggcgaagtgttgacgggctatcagctggtcacccacttggaggatgtccaccgtcaagagtgtgtgccatttgcgtgtggccaatgcggttaccaggcgagcaagcacaaatg

SEQ ID NO: 106925 - DNA, 72 bp, Heterodera glycines
  unsure (1)..(72): unsure at all n locations
ctccatttggctgcgtttgcgtacggatgtccgctgcggtcccccgaactgtntgtggacgtcttccgaatg

SEQ ID NO: 106926 - DNA, 518 bp, Heterodera glycines
cgcttcattcccaactaaactgaacaatttggtatttattaaaagattttgaaaaggagaatctttttctaagggcaaatgctaagcaattcgatatatatgaaaaaagttgtgtatctcaaatttttatcacgttataactcaggccattgacaactgattccaatcaaaatgctaaaattattcatttttcaattgattctaaatgtctagagtgattttacatttacaaccaaaattattagaatttgcgaatttctattttttaatgtgctagggacattaaaatagtggcacgatgacatttcgcctactattcattttgcctactgacatttcgcctaccaaaccaaaaacattcatttcgcctattggaaatacataatgccaaagagaaaataaaaagagagaatatacaatatctataatgtttttgcatcaaataaatcattcatttcatttttatgtcatttcaaattttcttcaaaaacagaaatttcagattctaataagaaatg

SEQ ID NO: 106927 - DNA, 399 bp, Heterodera glycines
atgtatttaagtattttttatatttcattttgtatttcaaaatgtatattttatttattttattcttaataaaatatgtagcatgttttaatagtcctattctttaccctgaacgttcaactaatgtaggaatgacagacatttattataaaattgcttcttttgatcattcgtatttaaataaaatgaatcaaagtcaactattctcaatgattgatgaaattattgataaatttcaactttgtaatattgaagagacaaagtcattgtcaagatgggtttattgcgtattattagttttattatggatagctgttgtaatgacaggcatttttttctattttaattctttaatcagaaatttgtgtaaaattatgcgaatatgtagagaagaaaatg

SEQ ID NO: 106928 - DNA, 93 bp, Heterodera glycines
tatactaaacggtacttccgggttttgctacccgctccccccttgaaaaattttaaaattcatattttgaggttttcaaagtcactgatcatg

SEQ ID NO: 106929 - DNA, 646 bp, Heterodera glycines
tttggtgaggaaaaattcaacgggagaatggacaattggggggggggggggggcttgagcgcggaaaaggtaaaataagtcggaaaagtgggggggggggattacagcacaattcgcggttaattgccacgcagggggacggacgaaagggtgccaattagtgagctcatttgcgcaaaagccatctccacaatggcaaacaatgcttcatcaaagtttattttgcattggcttcattttttggttttaaatcactttttcactgattccattcacaaaatcattattttatttaactgcccttttctgttttattttttcccctttttcatttcgacatttttgccactttttcactcgttaatttcttttcgttgctaggcaaaaattgtgccattttcatttccatttatcgttgaatacaattgttcttttcaatgcgctttgcttctgattaatgcccgtgtttggactcgttttgttctcgtcgttaacaaaagtgcttttgccactttttccctgtttttctgtgtccgttgccgcttttcctctcatttttaaatcagtgacttcgtcccattgttcgttctgctgctgcttttggcaatgattggcctttgattcttccgatttccctcccaaaatg

SEQ ID NO: 106930 - DNA, 55 bp, Heterodera glycines
ctgtcagaaccacttgcgaaaaatgtgacacgtgagttttgacggactaagaatg

SEQ ID NO: 106931 - DNA, 639 bp, Heterodera glycines
ttttttttagcaaattttatgatcgttgatgttattgtttagctttttactttccctgcccacaatttgtcgtgagaaaacatgaaaaaatgggcagcgaaaataaaaaatgttatgatcgttccgcgctcattgcgcaacccacggaacacaacagagaattgttgcaatatttaagctaaaatgcgctctctccagactcctttcatttaaaaaatttttatttttcattaactttataattaatttgaaatactttaaataaatttaaattatactaatgtatgacaatctcgaccaattttgtaatattgtcgtcaaaaaaattgtaaattctgcaatttatttattaattttttttacaaatgttcgttaaaggaacctttggttgtcaaatcgttctgaacattcaaatccaattatatctgtatttccaaattctcccaattaatggtaaaaagtaaaaaaatcctaaatcacagtattagcaaatggcgagcaaccggctgaaacgcgtgccggcttctcccaccgagtcagctcaagctgatgaacctcccaatcaaggccgaatcattagcgaattaaaaaataaagatgaaaagaatagcaacaacttaatcaattttcagaaaaatg

SEQ ID NO: 106932 - DNA, 355 bp, Heterodera glycines
  unsure (1)..(355): unsure at all n locations
catggagcacgactcgtgttacattgacacttggaagtgctggccnaatgtgagggaaactttggccncacaaggttggcagggaataaactaacagtaaaaaaacattcatttatactatttgcattcttgggtgtcaaaattctatttaataaaatacgaattttaagacccataaatattaaacttgcaatggttcatttttacagacatcaaaacttcaacaggatttcgcagttttaatatcttggcaagtgtaatagccgacctattgttagaatttgattgaattaagtgttccgacagaagtttttacgtcaacacgacacatttgaatttgttgggtggccgaatg

SEQ ID NO: 106933 - DNA, 91 bp, Heterodera glycines
attattaaaattatatttttaactgaaggcacaacgacagtgaaaattccgcaccgttatggagcagtgtcggggatgagtggccaaaatg

SEQ ID NO: 106934 - DNA, 499 bp, Heterodera glycines
ccagaaaatttttagaaaattttgtgcaatttgttaatagattttgtatgaaaatagccaattttataaattaaaataaaagcaatttttttagttttacatacttctttgtaagaaaactatatttgaatttctaagattttcgcccttcaaaaaagaaaaaaacatcttagaattaaggaaaaatggcatctgaataaaagttaaataaattttaaatttgtccgtaggcaataccttttttgaaaaataataatgcggtaaaaaaacaaattgaaagtacgctataaactgtggccgtaagcgtaaatcatggtcaaaataacaaatattttttcctgttcagaattttataaaaagttcatatgaacattgaagaaataagcattgagtacttttcgccttttttttagtcttggaatgaataatatgcattaaaataaaagtcgctaattgcaaataaagttgatgcctattttccagagattattaaattatg

SEQ ID NO: 106935 - DNA, 388 bp, Heterodera glycines
ttgttgatcattacacttttctgaaacaaaataattgcgttataaaatcgtattttgattttggaaaagaaatggaagcaaattgcgtgttgtagcctgagggcttaattcgcaacattatttttggtggtttttggttacctaagctttatgtaattggcacagcggaatgttctttatggttttctatcaatgaccgggcaaaaccatcggaagaaaatgtgtcagtaaatttttaaaagaaaaactaaattttgaagctctgttttacaaaaaaaaatatttcgccaaaattggaaaagaatatgtaattgcgtaaattcaaatttatgtttgatttaatgtcgagcaaattcttaaattctttttttttcagtttactagtatg

SEQ ID NO: 106936 - DNA, 1003 bp, Heterodera glycines
gtaatttaacaattaaaaaattacctatgattaatatttgagtaaaaaaacggattaattagctagtaatttaaatgtttaattggacttaaattgatttaattaaaagttttttggtaacatattttgcaataaaagttgaaaattcggtaatttccttgtagtcctatgttaatctttattaaaacatttaaaaaataattttacggtttttaatctattaaagtttttgtttcttgtataattatattaaaatgcttttattttacttattttttaaatttatttttttaaataaaagataataaatttgtttgcgttattgttgtaccatatttattaattaacaagaaaattaattttatttaattatcataaatttataatttgtataattttatgtaacgagctaaaaactatgtgcttatttgccaattattatttttttcatctctataatcaatgcacttgcgttaataatgatgatgaatatgttaagtaattgtcgagaaatttattaatttttttattgttattgttaaattatctaaaatttatgaaatgaatgacaaacttggtttaatctttaaaaagtggatcatgttgattatagttaagtattaaaaaaaaaaaagtaaatttaaacaaatttggttcttaaattcatatttgaattttttcaatatttttgaatgcttttttttgaattaaatgtcaaaaatgaataataaatctttcttaacatgtacacttttgctaaaaaaaaaaaaaaatgtttattacttattattattagcaaagttcccaaaataaatcagctttttttaattttttttttttttgctgtttaattttgaaattatgattgtttaaaaaattttcgtcttacgtgttgtgttaaaacataattatttaaaaatctggtatgaacaaagttttggatttcatagttttttttaataaatttttcttgaaagtttaattttttttttcattaaagatg

SEQ ID NO: 106937 - DNA, 525 bp, Heterodera glycines
gggagggggagggggagaagcattcccttcccttcccttcccccgggggaggggcgatcccggaagaaccccgagaacaaacttatccctctccagctgctcttgagtaccactttttttctcttaaagcatatcattatccaacggacagagcgcacaactgttgtcggaagcggacgaaaggcgggggggagaaaaagcatccgaaggatgggccgagagaaccatctgtgatgcgttagtggggcagtgattgttggttggtggccagccatttggccaacttaaaatgcgatgtgccaaaatcatttcccgcctatgacgaagaaaaaaagggggcgggaaggggcgggggatggtcgaaaagccaacaaataacgccattttacaacctccagatggccggacattttcgtaattttcctacaaatagcgacgattttacgtgttaaagcatacttaaaatttaacagcacttaaaaataactgacatttgttttattattcttctgctgctgcgtgatg

SEQ ID NO: 106938 - DNA, 224 bp, Heterodera glycines
ccttgaaacttattttcattaattttttaaatataaaaagaaaatttattaaaatcatatgaaatctgtcacctaaactacataagtaccaaaatatcttggacttttaaaaagctacaatcggcaatacccaaaactattaaaatcacatagaaacataaaatcttttaaatacaaattccctacattttttccaattgcgtttcagcgtaatcataaatatg

SEQ ID NO: 106939 - DNA, 69 bp, Heterodera glycines
cctcttcagattttccccgacccaaaggcatttcggcccgtgcgctttttggacgaacgcggaaagatg

SEQ ID NO: 106940 - DNA, 115 bp, Heterodera glycines
ctcttcgccctaatttaatcttttgttaaccaccctctcaatcactatataagcagaaaaatttaaaataaatatacacatactatccaaatatacattacttaaaataaacatg

SEQ ID NO: 106941 - DNA, 258 bp, Heterodera glycines
ggtagagagacgaaaatttgaaaaaatgcgtaattttttcccgtcattttttcccccacagtcacatttctcgtcgagaatggtgccaacatcaatctgcagactggtgatggggcaacagcactgatgtacgcgtgttacacgggaaatgtagggaaaaatttccattggcgaaatgttttccgacatttttccatttgaattcaggtggacattgtgcgcttgttgctgtcacatggtgcaaatgtcgagcaaatg

SEQ ID NO: 106942 - DNA, 514 bp, Heterodera glycines
atagatatttcaacttatttttaaataacattacggtaatgtaaattaaattaataaaaaaaaaagacaaaaattaaaacatatgacctaaatcacagattatctaacgaatttcaaattaaataaatttcataattaataattcaatccatttgtaaattaaaataactcatttaacaatgaattagtaaaactcaattttttgttctaagaatacaaaattaatatatttttaattctaacaagaaggaatttattgtctgttatgaggaaaaacaaatttaaaaataaattattactctaaaatatgattctgatttagagcagcaaacccccagagtaccaattgaaggtttaaattataaattaaaaataaatttttgaaaagttcatatatatttgataaatgattgttttcttaaaatttaggtgaattaaaaaaataaaagtcgaaattttttcgtaaattaaaaatcttcatttcttcttattttttgttctacgtcaaaccatg

SEQ ID NO: 106943 - DNA, 93 bp, Heterodera glycines
aaagattggtgttccgtctttgctaaatatccgattttgctgaataataattggtccgacactttttactacgaaatttcagtcaaaaatatg

SEQ ID NO: 106944 - DNA, 86 bp, Heterodera glycines
ttttaactatttcacatattgtatatcatacgtatttgttggatttgcatttatcacgatgatcttaatttttttaatcccaaatg

SEQ ID NO: 106945 - DNA, 417 bp, Heterodera glycines
ttggcactgaaaaaatattttgaattatttcgtttgaacctagtggtgcttagaggcatcgcatggaatgtatttaaaatgcgatttagtttagtttttcgaaaattcattctataagcgataaaacagacacttgtactaatgtaatcgccaaaatttttttatgaatttaaacataaaccaaaaaaaagtcggggttctgagaaaattcccgacaaatttgtctggtgtggctggagaagtcttaaaaaggctgaggagaaacacaatcgaaaggaaattttgataaaaagccgaaaagggagaaatgtttctaataatatccataatcagcaatgcatttaattagtaaaaataaatttatattttgtataaaaaagtaaataaataataaatctcatagcgaattaaaaaatg

SEQ ID NO: 106946 - DNA, 92 bp, Heterodera glycines
  unsure (1)..(92): unsure at all n locations
gatgacaaatcncaaacaaaaaagagaagtacgtgaaaagcgtgaagaaaggacagcgtgaaaagnccggacaaaagacgacgaaaacgatg

SEQ ID NO: 106947 - DNA, 810 bp, Heterodera glycines
  unsure (1)..(810): unsure at all n locations
aaaaaaatcaaagcattaaaattnatcgatgtgaaaaaactgaaaaaattcttaaaaaaaaaattttcgagaaataaagtatttttcaaaaataattgccttcctgatatgatttatgaggtaattataaataacagtttctttttaattaaacgacccatttggccagtgaacactcgggctgagactaatggtcattaaatttttgggttctatgattatattttttaatttgatccccgcatccctctcacattttgagtttttaatgtttctggtcagatcagaaaatcttaattgcattttgggtcagaggcagtgccgaaaagcgccgcaaattaattatggcacaacccaaaaaatgtgcaaatgccgctgtaatcaatcagttagacattgatcactctcaagggcatcaaggatgtgtaatgccgatgcccaaataattacggaaattcaggagttcagaagcttacaaaaatggaaatttaaaattctctctagttggcaccattaaggaaatgccaacttaattgttgttgattcgctcgctgctgcaaacaaaggaatgagtgatttctggcatatgtggaatgcttttccaaccattagtcccctgggaggccccatttttctgacgtcacaccatcatttgtccacaaggaagccaatgacgatgccacccgcccctcccatggggcgataatggggcggtgagttcaaaggccaaaaccgaacgattaagcggctggcagcagagagagaaataggtcaagcagcagcatcagcagctgtcattaaaatgtaatg

SEQ ID NO: 106948 - DNA, 603 bp, Heterodera glycines
atttggggcgttaataattgttgaatctaagagagaaccccccccgtaaaattgttaattttttatatttgcaaaaaaaaactaccgtacatcatgagagcaatttgtgtacaatttttgaacagacgcaaacaaaagcacagaaacaaagccggagaaggcattaagcgacgaaatcagctaaaaaaaaataatatttaaaattattagaaaaaaattctttttaatttaaattctattaagataaaatttatttattttattttttattgctattgaccaatttcactccacgacaaattaagaaagtagttttttatattcttcgatacgttgaagaaaatatgaaaaaaaatttggaggggggtgggggggtgggagaaaaaatttaacgcacccgcccccgattctgaccattttccatgtcccggttggcaacacggattcgaccatgtccaagtcgggcagcagcatcaatgcctggaccgagccgtgctgtccgacagtgcgcagcgcacggccaacaatttgggcaatgttttcctcgggcgtcgccggccccgcgaaaatggtctccacggagaggcaaaacagcggcaaatg

SEQ ID NO: 106949 - DNA, 1003 bp, Heterodera glycines
tactctgctattctagcccattaaatgccatcaccctttaaagatacttcgcaagaaaagcttaaataacaaaaaattcgaatctgttatacaattccatgctgtgtagttttctataaagcaaatattcatccactcttaattactctcctattctagccaattaaatgccatcaccatttaaagatacttcgcaagaaaagcttaaataacaaaaaattcgaatctgttatacaattccatgctgtgtaattttctataaaacaaatattcatccactcttaattactcacctattctagcccattaaatgccatcaccctttaaagatacttcgcaagaaaagcttaaataccaaaaattcgaatctgttatacaattctatgctgtgtaattttctataaaatttctagcccattaaatgccatcaccctttaaagatacttcgcaagaaaagcttaaataacaaaaattcgaatctgttatacaattccatgctgtgtagttttctataaagcagaagtagaatatattcatacataaattatcgattttttgccaatcaagtcaatcgatctgattggcaaaccagaagatgtgggttttgtccaaaagcctattgctacatgcgggtgccgtgcctcacacgctgactccgccccctttatcatgatgcaatcaactgactccgcccccttagcataacgcaatcaactgtctccacctcatgacgtcattaactgacccccccccctatctcatgacgtcatcaactgactccgcccccttattatgacgcaatcaactgactccgccccctttagcatgacgtaatcaactgactccgccccctttatggtgacgcaatcaattgaccccgccctttgctatgtttattattttttaatgattttttgagcactctatatcaaatcgctctgtaaggtcctggctataaaagtgcctccccttgtgcttctaaatcattcaacttttgcaaatg

SEQ ID NO: 106950 - DNA, 1003 bp, Heterodera glycines
ttttaaaccaaaccacattaatagcttataaggggtgggaccggtgagtcgggggtcgttctagcgtcaaaaatacgaaatcgcatacatcatggctaatactagagttgagcgggaccggaatttttggcaaaaccgggaaaacccgggaatttcccggtcccaatcaaaactggtcaaaaccgggacttggtactcagttgtccgtcttcaggtcccggtcccgcttaactctagctaatactatagatggtaggggcccttttaggaagaaaaaattttttttttaaatcgtgaaaacatgtttatgggggttttctgggccggataacccgaacccaacattcattttgactaatttcgaattccggacccgaatttgaacaaaaaatctagaattcaaaattttcaaaattctcacttttgttcctaaattgaccataacaagctaaatttagtctaaacccatcgaaacatcaaaaatggtcattctgtacaggtatgaacataaaagtgaattttgaaaatttgaatgtttatctttttagaaaaaaaataattttcttccgaaaagggggacattgcatctatagtattacgcacatgactgtatgccacaaatcttgtattttttgggatttctggcgtaatgatgacaagttctgcttttgaaagtcaggtttctgcggtcagacgctaactgcatgaacctgtcaaaaatgacaggttttttccggtcggggtcgttttcgcgtgagggccattttcgcgcaccccccccccctaataaatgaaaaattttctcaaaaattcgactccaaattcttttacatacttgatatgaaatattttagcctaattcacacaaaatttgaagcgaatttaattcttaatggaatcgcccgttgaaaaaaagaaaaaaatttcctccgccgacaattgcttaatttcttctgccacagttagtgaaaatcagcagcaatcgccgggttcatttacgatg

SEQ ID NO: 106951 - DNA, 202 bp, Heterodera glycines
ttttgccaaaggcggcggaacgagtttagcagaaagggaggacagaacacagtataaaagcggcactccgaagcctgacaaatgcagaaacattcacctctcaaaccaaatattttattttttttatatttttaaaattaatttccgcggattttttaacataaaaaccctttcactttcaaataaaagctcgtgaaaaatg

SEQ ID NO: 106952 - DNA, 284 bp, Heterodera glycines
ggtgagcaataaaaaggggggatttgtttttatacatatccaaatttgagatttgcgcttaattaaggccattgtctccgccaccggcagaagatacgggacaaagcatcacaaattggccgtcttctgctgacaaatgagtgatggacaaaagaacaaaaaacacaatgatgagctgcagaagaaatgaattaattaaaaatgacctaattcatcagtgatcaaatgcattttatgaagaaaaacctctcaatttcggtaaataaatcagatgcataaaaatg

SEQ ID NO: 106953 - DNA, 64 bp, Heterodera glycines
aagtttgcttggtggggatgaattggaagttctgatccacccactgggtgtcttgcccgttatg

SEQ ID NO: 106954 - DNA, 196 bp, Heterodera glycines
ttgcacagaaattttttttaaagattttgtgaaaattttgcaaaattcggatacaaataataataatttatcagttgtttgcttctatcttaatccgatcactttatatgagtctgttttgaatcattttatccattgttccacatttatcagccagtatcaacgcgcattatttggctaatctcacaaaaacatg

SEQ ID NO: 106955 - DNA, 780 bp, Heterodera glycines
  unsure (1)..(780): unsure at all n locations
atagcttaaantagattaaaaaaattacagaaacaaataaattttatagctaataagtaatttttaaaagttagttgtgcattaaaaataacaataataaaaaaaatatctttctaaaatacaattgaacattttaaaaccccattaatttattttaaataagattaaaacataaacctttagtccaattttataacatcaaatttaaaaaaaagaaaccaaaaaatctaggagattacaaaaataatttaaaacctaaaaaaatatttttaatttatcgaaataaaaataaaaattaaatttgtatgtcaaaattattgcacagaaataagttacctgacagattataacctaaaatatatactttaaaatttaattcaagaaggacacgtaaagaattactataagtattataaaagatgaatgaacatttagaaaaacaatacattatttttaaattaataattttattaaaacgaaaggaaaaatatttataagaaattactacggcgaccgtcagactgaacaaaaatctgaaatggtagacatgattataaataaaaatatataactttaaaaccattaatccaataaatatacgtgcaaacaaataaaaattggataattaaaatacaatcaacataagttaaaggaaatttgaatttaaaaaatagaaaaataattgcgagaggaaataataaatttattaaataatttattataaaacagaattaaaatattttgaaaaggatctttttcttaagataatagttaattatg

SEQ ID NO: 106956 - DNA, 399 bp, Heterodera glycines
cattatgacacttggacattttgacgggcagcgaaaagcgcgtgctcaactgattgattagtgagcagaattccgcaagaaaataattgtaaaaggaaaaagtgatcagaaaattacttaagtgatcaatcgatcagaggtgaaaatgctgcggtaaacgattgattgccttacgccaatttgtacgcttcggttggtcaaaagtcctgcaaattgcctaattaaattaggcggcggttgcgcactctttcccaattctgcccaaatttttgcactttcatcaaattcccaaatgttagtaaaatttcctcaaaatgcacttctttccatttttgctgctgttttgaccctctcacaaaatgctcctccaccgatcggtccctttttgattgactcatg

SEQ ID NO: 106957 - DNA, 652 bp, Heterodera glycines
gatgaatgggattgatgaaattttgagttgctagacacactaaataaacttaatatggggaccggcaaattggacaccggaaaattggacaccaagcggaaaaatggacaccgccggaattttggacactaaaggaaaattggacactaagatttcctttttaaaaaaaatcaagaattaggtgaaaataaatttgagtagaatttgatcaatgtgccacaaaatgcaccaaaaatgggtgacgattgatcaatgggccaaaaaatccaccagaaatgagtaataaaacttatttctttatgaatgatatgattttttcttctcctgaagttacaaaaataataacaaattaatttccatattatttacgcttataaacaacatatggcagattaagataaagatcttttaggccaaaccaaaatttttgtttagtaatttattttgtttattttcatttttatttacaacagtgtccaattttctggtgtccatttttccattggtgtccaattttgtggtgtccaatttaccgggagccaataattattgcggggaattatatggataaataaattttatggagttttaaaaaactgaatttcttattcacttcgtaatttcagaatgacttgaaattttgcaggaaatg

SEQ ID NO: 106958 - DNA, 83 bp, Heterodera glycines
atttttcactttaattttcaagtatgtattttaaaggcaattttgataagaaaaatgaatattacgggcgctatcaaaaaatg

SEQ ID NO: 106959 - DNA, 107 bp, Heterodera glycines
ggttaaaaatgttggaaaactgttcagtgcccgcaactattgttttggagtatctataataatatattttatactgtaattaaataaatatgttacagtgtgagatg

SEQ ID NO: 106960 - DNA, 224 bp, Heterodera glycines
actcacgttctcgctcccactctcgctcgcgcagtcgtacgcgctctcgttcccgcagtagctcgtcccgctccgcttcatagaccgcgcgctgacgaaagtcccggatatgcgaacagacgcacggtcgggcgggcggacagactacctgtcgtatgaacgaccaaacggccggatggaatgaggaggaatgacgggatggatttgattggatgcgtcagatg

SEQ ID NO: 106961 - DNA, 60 bp, Heterodera glycines
tgctatttttgtttcacacaacttgtgaatccaacctttcatcctgtcattgcggcaatg

SEQ ID NO: 106962 - DNA, 88 bp, Heterodera glycines
tgtttttccccttttcaaaaaaggggataaatttaattctgaaaattataggcctatttctataacctgctcactttgcagggttatg

SEQ ID NO: 106963 - DNA, 169 bp, Heterodera glycines
gttcacaatttaattaattgtaatattgttttttaaatatttgaaaaaagattatttcctcattttttaaaataattcaattttatcaatttaaattcattttcgattattttatctaaaaaattttgcgttttaaaaaaataatttactgacagattgtttacatatg

SEQ ID NO: 106964 - DNA, 782 bp, Heterodera glycines
tgtaatttggacaatttgcgtcgtcacatttcaccgacacttcttactgatcttgatcaattgaattcaatcaactccggttatctgtgccccgatggaattgctgacgatgggccaaatgcaactgctggccaagctttggccaaatggctgcacactccgacaaaaaatggccaaccgaagcgattgtatcgcatcgctattatgcatccaaaaagtcttttcgacctctttatatacctaccaaaataaaagtgagagatttgaaaacggatgaacggatgggggggagattaaaatgatttgttggccaaaataatggccataacgcattaatttatgcgtatataaagagagagtaatggggaagggtgttttgctgattttgttcaatacatacataatttacacggcttccttatttttgtaaatgcatatatttttttcctggattctccgtatcctaattcaaaattgattgagctgataccgtccgtatatctctaattatccccccggatgattattgttcaacctccttagatagggaggggggggggggctaattagagataataggtaaagtgaattagagtgaaaaaacaatatttttacaaatctccgtctgttttattctgtttcaaaattgttttttgttctttttgctttatcatttttcctaattgtctctgttttaagttaacaacagattttttgccttttgtgacaaaaaaaaaaacaatcgaaaaagggaaaagtgtgctaattgagccaccaaaatg

SEQ ID NO: 106965 - DNA, 99 bp, Heterodera glycines
aggggtttcagaataaaatgcaaagcagtttcattataatttcaattaaaataattttttccaaataacattgaaaattttagaaacgggcgtcctatg

SEQ ID NO: 106966 - DNA, 528 bp, Heterodera glycines
taattaacgaaaaaagctaaaaataattaaaaacaatattgctccccgaccttcggggagaggaaaatcgcggttccccgataaaatttgttggtaaaaaatcgaaaaaaataaaagaatattttaaaaaagccttagagactcatttaaagactctctcatccgtttggaagcaacgaagaggttcatcatttatcgcatcgaatccaacccaaatttaaaaagcaattaataattaggcaaaaatttttgatttaattcctaaaatttaaaattttcggcgcccataaagaggcaaaaggaagggacagagttcgtcataataaatgtgcaaatggttgttgctgactgactgaactgaccacgtccgtccgtccgtccttcgctctgatcgattttggcggaagaattttcactgatttatttttgcgcacagatcgacggaggacaaatgaaaagagaacgggaagagaagagagcgaggggaagaaagaacaacgagtgatcaggagagagtcattaaacatg

SEQ ID NO: 106967 - DNA, 1000 bp, Heterodera glycines
tttttttgtaaaaatataatgaattatttttataaaaatatttttcgcaatgaattttgtaattattaattttatagcatggcttaatttttcttcaatcaatattaaccacatttaatcattatttcattaatttgacaacatttttataataattcaattattaaattttccttttatcagcgaattgggtagtaattaatatcagataactataattatggaggtttttaaggtaactatcacaaatatcacattttcgttctcatctgatgtattaattcactaatttttttagcacatattttggggattttttggaaattttatttttattttttacgaaagtagcttttttgcactcaaattcttggcaagatatccaaaaatgttcaaaaattttcttttttttctttttgcactttttgaccgttttaatggcttttttaatttttaaggcaaaatttgaattttatcaatgaaaacagaaaaataaataaatatttgaagcgagaaaaatatttacgtcacaaagaattgaaatgtttttgattagaatcgtactagcgaaacggataaaaaacgtgattttttcgataaattcacttattttttcgacagttttttttcaatttttcggcacatatcgttggcctttttgagctttttagggtcgggggtcgttttcgcgtgggtcgttttcttggtgggtaagactctttttttggagtctgaaagcggatgcggatctggcccgtattctagaaaagtaccattgtttttcgttcgtttctgaccattaagcaaacccctaaaatctatccctagtaatgatataaaaaataattagcttacctatatgtattggaatttgattttgaaacaaacgaagcttttgaaatagcaggctaatagaaaattatatattgattctattcggttttttcctcgaacagattttttcaattttgcatttatataaaaagttctatcaaaaatg

SEQ ID NO: 106968 - DNA, 312 bp, Heterodera glycines
gtaaacttggcaaaacccggcatggcctcaaatgacggtttttccaggcaaaatcgcatcccctgagaaaaatatttaataaacaaattacttagaagaaataagaaaaaaaaattcaaaattatttttgaaaaaaaagaaaatagggtaacttctcattttttaacaaaatgaaatgagttagaaaagaaaattcaaaaaattgaaaaatttgtgttttttgaccgacagaggcataaaaaagcatcagtgatgagtcagcgacatcattttttggcattggcacagcccaaaaaaacgacgacaaaaatg

SEQ ID NO: 106969 - DNA, 172 bp, Heterodera glycines
tgtaatcagctgtatgtcgtcctcgttctgatcaataaagaatttgtctggccatgagtccgtctgatcagtgaatgataattgattgaatgatttgaacccatgaaaaataaataaataaaaattttaacacaaattctaatatttgaagaaatatatttagagcaaaatg

SEQ ID NO: 106970 - DNA, 121 bp, Heterodera glycines
ggtaggactactgtatggttcttgataatttttaaatctagcaaaatcactattatatttttaccagggaaattaaaaaacatttaaaatagtttttatagaacacaaaaggaacaatatg

SEQ ID NO: 106971 - DNA, 1003 bp, Heterodera glycines
gaacaaaggcatgaaataaacttttaggcgtaaagtttagtttctttgaccataacttttttattacttggtcaatccctacattcttggtatcaaacgaaataataaaaaagttatggccaaagaaactggacaatggacgcctaaaagttcattggacgcctaaagttcactagagccaaccttccacccaacccccccccctcccccaggtctccaattgcttcgtccgccctcttccagctggtcccctgatctgatcgcattcgtctttctcctcttctttatcattatcatcttcatattttttgttcacttttttggaacgagtgaggagtttaacccatcgaccaaacgaaggattggcgcaccgaataaaaagatgtacccatacgcactaaagaaattgtaggagtatatgcaatacaaatgccaaataacaaaattcgattttcatttgagattttttacatgcaaatacatttatgtaaaaaagctgatcgatccagcagttgggaaatggtggtgaaaatttggcaatgattgtagattattggttccataaaaaaaagaaaaagcccgattttaacgattttgcccttcaaatttgagatgacgacgagcttgttttgcatgaaaataattgaccggtgctcataaccaatcacttggaaattttttgccaaattagacactcatggtatcattcgatagcccaaagtattctttattacaagaaggctgaataaagtgcaaaattgagctttttcattttttatggactacatagtattcatttttaatcatatatttatgttatcgatttctgaacaatttagcctgtattagtatcaaatatacttttatgaattttgtaaatatgcattacaatttaaagctgtttcaatgcaaaaactttttattttttaattaacaatgcacatgatgttttaaggtcaataatttcgctttctttgtttgagcttactatttccgcataatg

SEQ ID NO: 106972 - DNA, 123 bp, Heterodera glycines
ggatgaaggagagaaggaagcggaggagaaaaaagagtaaaattaaaaaaattaaatattgaataaaaaatacatataagaaaaattcattcaaatttttgccaaaattattgtagcaaaatg

SEQ ID NO: 106973 - DNA, 303 bp, Heterodera glycines
caatcggatcgaaaatcacagatcagcccaactatcggtcggcacggatcaaaatggcacaactgtatttggaggtgaagcatgataagcacaagttcgccttgtgctacaggttgatcggcagatttccgtgtgctgcagagcgtaaaactcaatcattttttcactgaagggaccttttggagcaggacccgagcccgcagacattcgaactgtcggcgatattttcctatttttgattagcccccattatcggctttaagtcttggtgacgcctacatgagcatacaggagccagaaatg

SEQ ID NO: 106974 - DNA, 1003 bp, Heterodera glycines
ttttaaccgaaaccgttcgaccgaccctcttgtccggtctctaataaaaactatgattttcttgattaggaattagaaaatactttgaattgtttaagtattcatttgaattgagaaaaaattcataaaatcgcgctgtcgataaaaattgatgcatttttgtattgcgttaaattcacgagttaattcttttatcatttttgataatttccgtgtcaaatctaattactattctcataaatgacagctttgctcatatgtacatattgcttctcactggtgaaattattattgaaattgttccattaatttgtttagcctttctattgtaaaaaagtcaactgaatttgagatttaattatctaaattaataataaaagttgccttcataaggcacaatttgacaatgaaaagaatgatcttaaaagaaaagaaaaaaacagaaaagagaataaaaggcaatcgagaatagagaaaataaagagaaaaaccgcaagggaaaatttaaatctctcaatgaaaatatttctgatcaaatttttaaaaacaattaaattatctagaagttaaatttttgtttagctttattttgttttgctggagataataaatggaaattaggtgatatttaaatattttgttttaatggtttttgaagcggcataaatagaacatttagagaatgaatttacatattttctgaaccagaatattttttagaattttatttaattatttcaaaactacctttccgataatttttgaaattcaaataattttatattttatttaaatctgtttttggtcaaactcataaattaaagttagttcgaaaaatctgtatttactgctgttcaaacaaaaattttaatgaattcaatttaatttcaataaaatgacgcaaatcccaattattttcttgatgagtttatggtttaattaactttagtcaattaattagtaaattcattttttaaagcttaaatatttaatatttaagatg

SEQ ID NO: 106975 - DNA, 191 bp, Heterodera glycines
ctgaattatttgctttgtatttgttaactaagcattttcctggaaaccctcagcaactaaagatcgttaatcccccgcatgtctgctccacatttcttgaggctgcccgattaagaggtcttattgatgatagtgatgtttggatccgaacgatgacagaggggtccgcctcactcggtccggcacaaatg

SEQ ID NO: 106976 - DNA, 71 bp, Heterodera glycines
ttggtcaaacgccagaatgcaagtaattcactgatgactcctcccaagtggtgcgcatctcgtcaaaaatg

SEQ ID NO: 106977 - DNA, 167 bp, Heterodera glycines
ccgaaaatgcgagggacggatagaaaaaagggagaaaagcatatttcaaaccaataaataacctacctaaaaatgcatcttatgaaaattgttttgttttttgggtgtaaacctgggtcagcttctcgcgaattgccttcagctccttggcactcgaatagacaatg

SEQ ID NO: 106978 - DNA, 96 bp, Heterodera glycines
ggtaatgataatttttttaattaattttaattttaatttaatcaatttttcgattaatttaaaatttcttatttgatttctcaggctgctgtgatg

SEQ ID NO: 106979 - DNA, 129 bp, Heterodera glycines
ttcatgcctattcttttaattgtcaattcacccgtttctacgtattgcatccgttcccctaggttgttgtagccaattaaacacttcagtttagctccgttattttcatattttcttttgttaataatg

SEQ ID NO: 106980 - DNA, 287 bp, Heterodera glycines
tttcttgtgaaaatttccaaaaaatggccaaaatataggactaaaaacccaaaaatggcgaaatatggatttattcccgaaaacccccaaaatatggatttatatggactaaaaaccttcaccaaatcaaaaaattttaacgcagaaatgctatttttaagcccctttcttcatagcatatgcgcagaaaaaatatgttaatccatataatttacaaccctactaattaaagattaattttaaaattagtttcacgacgcgaaccacaaaaagggcatgtttgtatg

SEQ ID NO: 106981 - DNA, 1003 bp, Heterodera glycines
tgaaccccaaaaaacataccaattttctcgctggtatttcccgaagctaggtgtggcctttatttgctattctttcattttgttaatttatgaattatgattaaattctataaatttgaataaaaatggtaaaattttggtgataagtacatatatttctgaaggttttttcaatcaatccgagtcttgtacaacaactatttcgaaaactgccctcgtagaaaacgatgctgaccgttaagtgtcgggaaagacgtcttaaactttcaaaaacccaacatttttgatgctaccaacaggaccttttataactaaaattgataaaaattgtcaaaagtttttatgtatacatatatttttgtttttcgaaatgtttttgatcagctaatggccattttccaatggtccgaaaagtctcaaatggcggtccataaagcccctgtaccgtaaaaactgagcttttcttataaacaaagaaaattctgacttagcctcgaaatttaattcagattttacccggttcaaaatccaaagaaaatcggcaatattgaatttacagtttgtattttatttattgtgttaatcttttttaacctttcacgttcgcgtacaaacctttataattgttttgttcggaatctgtataccctggagttgaatgacatttaggaaaaacaaaaataacattaatgtttaaaactccaatataaaaatttggtattcagattttaatttcagttttcctatgaaaacctctgtttgtttttatagcttaaatgttgttcttaaaagttattcaaaaaacaaaattttgaagcctcgtatcttttttctaactcatcaaattgcttagcatttgcttagaaaatgcttcgcctcatcaaaggctttcgaatgatattgtccaatttgattggcaaaaagatcaaaaaaataatttccgaaattagtatttttttaattttttggacaaaaataaataaaaatattcatgtgcacaatg

SEQ ID NO: 106982 - DNA, 620 bp, Heterodera glycines
attcctgcaatgctttgtactgcaattgatcgcctcttttgcgtcatattcccttatttgtaaccaaattttttaattaattaatataaataaattaaaatttcattcaaattttattaaattcaattaagacaataagaattaatttagcgtttcgctaaaatgcattttattgtttttttaaaaatattttaataaatttgaccattcaatttattattttttgtactcagattatttattgaggattccatttttcggcataaatattaataacaaaaagtaataaattaatccattaaaatttaattaagggccaattagcattcattcgaaaaaatataatttttgtgatgattattgttactattctagtcaatgttttcactggtttatttctgtacagagacaaaattggtaattaatttattttactaataaatgtaaaaatattgatttttaattaccctaattaggcaaacgttcaaccacaacaacatcatgcactcattggaaagttttcaagtcactttcgctggtaatttttgggcacattggcggctttctatgtcttcggcatttttgtgatgccaattttaatgcaaaattcactaattatg

SEQ ID NO: 106983 - DNA, 99 bp, Heterodera glycines
agaatttacgaatatttaatttaaataattcttataatttttgagaataataaaatgtaaaaagtgggcaatagtaatgcataaatataatgacaaatg

SEQ ID NO: 106984 - DNA, 51 bp, Heterodera glycines
acgtatggagcaccccaaaagcatggctcgtgaggcagctgccccgtaatg

SEQ ID NO: 106985 - DNA, 769 bp, Heterodera glycines
ttttttgaaaaaaaattttaattttaaagaaaaaaaatgttttagaaggttttcagggtcgctgatcacgaatataacatccatttcgataaatttcgaaccccaaacttttctaataaattatactcttcaaaaatttagtaaaacctaaaatcctgacccggttaatgacgaatatccagtgttaattggaattttggatctgattcaattttaaaaaaaactatttaatcatttcagatccataattaattaatcgatcgatcagtcattctcactcatggaaaattgtaaaaaaagttttccatagttttatttaataaaacaaatcatgatgggattttaaaactaaaaactctcttaattttcaattgttggcattgaacgaactgatcagttttgcattttcatgtattatgttgatcattttatttattgctgatcagttcctatgtctgttgagtctgtttgatcaccaccatttttccgctgattcactctgctccaaataaaacaatcttccgaaacagatgcactcatctacacgctgacccggctgcctgccgagctgctgatcggctccatctttggcatcctcgttggtctcctcctccgcgcgtttccgcgtgccgacgcgtcctccgcacactttgttcgcaccctgctgatcagcgcatttgcgctcgcagcacactttggcgcgcagactattggctgcgcactgttcggaccgatcacggcactgttcgccacggcggtggccaaaatg

SEQ ID NO: 106986 - DNA, 379 bp, Heterodera glycines
ttgggccccagcatgtttttggactataactttttcactgtgaaccaaatctaacaatcttagtatcatttgagagctcttcagatgctttaatagcctgcaaaattccaaaaaattttgtcaattttgaacaaatttatggccaaaaaagttggaaaatttggctttttgaattcttctgaccataacttttttgaactttaacgaaatgtttcgcaattttgcaggctaatagaggacacttagggctttcgaatgataccaagaatgttggatttggttgacaaagaaaaaagttatagcggaaaacccgctggggtccaaacgtgccgggcccaactgagccggtccgctcgcatttccatttaaattaaaaatg

SEQ ID NO: 106987 - DNA, 827 bp, Heterodera glycines
ttttttctttctctgtttaccttttcgcctttgaattcattcaaaaaatattgccaattgaaaaaattgtacaaaaagttacttcttttttgttgttcaaatctctttcccaggcggggtttaacaaaatttgataaggaaaaatgatggcacttgaaaagaaaaaaaagaataataaaatggatatttacggaaaagcaaaaaatgaccaaaaaaaacacagccctaagaatgaaaaaatttctgaaaatacactataataaaattgaaaaaaatttattaaaaattcatcccgtaaaaaattttttcttgaccaagatttggttaacttaaaatatccatattacaaaaatttttaaatatttgaattaatttcgtttattttgcgttttttgatatccccccgtaatagagccaccctccccctctaagggaagtcctcggggctctctctgtctgttttactaaatttaaatcgttttatgagagttccattgaaataaactttaaaaatttggttagtgccaacgccatccctttttttcccaaaatttctcaaaaaatacttggttaatgccaatgccatccatcactttcttttttcccaaatttcaccgggactcatttgagcatcagtaaaatgaatcccacgaggagtgggggggggctatgtttgttgagattgagggtcaaataaataataataaaacgcatccaagcagtcagaggtcacattttcagcacagaacacagcaaagcacgaccaccaccactcaaccggagagcaaagaacgcggaggcgaagggataactgaccgcccggaatg

SEQ ID NO: 106988 - DNA, 136 bp, Heterodera glycines
aattctttatgttgtatatgtaataactaagttaaactcgtaaaaccctttttttcttaatttaattgcgttagaattgccaaatatttaaattcttttaaaatttacccctgagattaaatcgtcactagaaatg

SEQ ID NO: 106989 - DNA, 205 bp, Heterodera glycines
caagaacgacaaaaaccttaaaaaatgcaaaaatctatccatttaagccaacacttcaaacaaagtgtaaaatatttttacctcgttttaaagcctttgagtcagtagaacaaaaatcatttgattacgttccttttaatatttattcgtcataattgacatttatatttgggtttttgtgtgcaacaaattattttcagaaatg

SEQ ID NO: 106990 - DNA, 122 bp, Heterodera glycines
atattcctcaattatgttgttattatatatttgtcatattattattattgttattattttctcagttatttaaaattaattacatttatttttaaaaatataagaattttcttttcaggatg

SEQ ID NO: 106991 - DNA, 1003 bp, Heterodera glycines
gccaatcatcacaagtaaaattttaaactttcaaattttaatttttattttttgaaattaattaaattatttgaaacaacgaatagtttttcaaatataagcgcttggagcatcaagaaatgatgaacattcatgcaatcttttttaattttaaacaaatttaatattttattttttaattaattaaaattatttggtacatcgaatagtttttcaaatataagtgctattttattcttaagtgctggatcatcaagaaatgatgaactttccatacaatttttttaaattgaattttacaaatttcaaaatttatttttttttaaattaattaaatttatttgaaatattttttaaatataagtgctatttaatttgaagggtggagcatcaagaaatgatggacaatccatacaatttcctgatgaatcaacgctacctggttaaattttcttaattatcataaaaattaaatttaatcattatgggacaattaaattcactgtcaattttcataatttgagaattaggtgtgtattaaaataaattgttttttagaccaattatatggggttgcatcagcttttagtcagggcatatcatcgttcgtgaattggttgttagaatccaatagtaattttttttaattcaaaatattttaaaataaacattttaaaataaaaataaattttattttgattggaacataatttcaaatttttcctgtagtaatctatttttgagagtgctgggtcatttcgcgaaactacaaagatttaggaattttgattaaaaacgcaaaaatggaccatggggttcttctctatttttttaaattttaattcagttttgtatttgtgaaatgacccatttttgctttttttcacgaaattagctagaacttaatccttaatactaaagattattcaaattcaaaaaacatataatatacccgcattagatagtgttggaacaattatatttacatctttttcagctaatg

SEQ ID NO: 106992 - DNA, 327 bp, Heterodera glycines
tggaagaaacattttgaatgggggaaagaataaaagagaaagaaaaaatggaaatagtgaaaatttattggcaaatgaaaggacaaaacccaaaataaggaagagaaaaattcaaaaatattgaaattaatcgactgaacattttcaaatggaagaaacaatttggagatgaattaaatgaggattaaaagattaaggagataaaatttccttccgttgttcgattttattctttacgaaaataaatggttttcttttttatacattttggtcatattttattactttatattagggttgctccccgacccatccggttgcaaaatg

SEQ ID NO: 106993 - DNA, 1003 bp, Heterodera glycines
gaaaatggcgcattaattaagcttttctcaattaaaatttcaattctttccttaaaataacgaaaaaatgcaaaacggaaattgtttaaaaaaaacaaaaaaataaaataataataattaagcgagaaaaaacacgttttgtacggaaaacttagaaagggaatgggtgaatgagtgagtgatcggtgataatgatcagcccaaagtgatcgggtcggataatggcatggattggggtggcaccaaaatatacccattcacccatcaatcattcattccctttcccatcaatcattccatccgaccatttattaattgcccaaataaccacaaaattttgcacttttttgtcggcaattaattttatttaattcgcttctttttgtgcgatgtctgacagaataaattttatggcttttgtttgcttatttgttgtttatttgttctgtcgtcggtgtccctttgtaatggttgcgctttttttaatggtgtaaaaaattgtgcgcgacttttaagaggaaaaaaaggggggaaaagaaaatggaaaaaggggcaattgaaaccgggaaaagaagaaattaaacatggacaagccacagaagagaaacaatggaaatgcgaaggaaagtgcgaatttatttaactcactttataattataagttatttaatattttaaatgttattttattaaaaagcgaataaattaaaatcaaaagaaacacaaaaaaacaattgggaaagtgtaaacaaaaataaaattcaaaaaagcaaggattaaactcattatttcttcggtttgcatcaaagcctgaaaaatctcgaattccttcaaatgttcgatattttgctaatcgcaattttatgtaaaagcaaaaagcaaacagaattttaaacatttaaatgttacatttgtttttttattggacgaagaaaggctaatttaagtgacatgaaaaaaaatgtataataatttttaaaaaagcaaaatatttcagaaaatg

SEQ ID NO: 106994 - DNA, 328 bp, Heterodera glycines
atatttcaaaatataggtttcaacagtgaaagtgccatttttgtacaaatgttgctcgtaagtaaaaaattacttaaaaaaatgcataagaaaaattcttcggcgacgagctccgaactcaacttttcgaaaattggaaaaaaatttcaataaattttcttagaaatagaaaaaatttacaaattttgtcctttgtctgctggacacattaaaatgtttgttggccacgtatttacgcgtttttcaaactcaattctcattcattttcatatgcattttgacccctgtttttgagcacaggttcactgtgttcatggtgatcagtatg

SEQ ID NO: 106995 - DNA, 1003 bp, Heterodera glycines
gaatcactttatgacacaaaatatttaatgtgaccttagtatcataaatcaaaaacggacagctgcacgagataaaaaaaaagtaaacttttcatagataaataagaaaatacccattgctcctattcagcatctatatacctattgaatataacattctaatcataacaaattttaattacttaacctaatactctattagaataactaggtgtgtaaaaaaactgcaaaaaaaatatatttatatattctatttgtttttattgtgatgcttttcaacaaaggaaaaaaaagataaagcagaataataatataatttttaaagttatttttaatatttaaacaaagaattaaggtttaaatccttttaattttagccatcccagaattgatcaaaaatatggagtatagcattcaatagtcacgctatacgcacctgaggcagaggcaactgctcaaaatttgaatatataaatcttaataagaattataaattttttgcctaatttatatttcgagttaagtctataaaagggaatgttaaagcgtttagaaggtttaagtatttcaaagggattcagatctgttcggccataaattattttatgagccatgaacagatcagacagctttcgcctgctttcaagtgtcggcaattgaaggtattctaatctttgttggtatggaatgggtggaaggctgcatttgaaaagaactcttttggtgaaatatttttgacattttttcaatttttttaatgttttttagaagagatggattccaaacctcaggagcatattccaataacggtctaacataagttttgtacaaaataatccaaatcctagaagactttgatttaataacccgaaataaagaacgcatacgtaaatatgcattctttattatttgtgtgacatgattggaaaattgcaatttattatcaatatttatgcctaaatccctaattgtatccacaacattgctgctcctcctcgacatg

SEQ ID NO: 106996 - DNA, 200 bp, Heterodera glycines
taacattgctttaaaaaatattccttaatgaacgatcaacaaaaacaaattttccaatgtataaaatcaaacttagaacatccttcagaaaattgtaaaagctgtttttatatcgacggaccaggaggaactgggaaatcttttgttcaaaatgctttatttcattagcacgtggtttttcaaaaaaagtaactaatatg

SEQ ID NO: 106997 - DNA, 456 bp, Heterodera glycines
cataaaacaatttttttttgtttgcattaaaatttcggttgataggtcattttttaaatccgccaaaaatgtcacacgtataaattcataagttgtctcagtttcaaccaaattaatattccttggtatcatccaatagcactaggtgttctctattcaaatataaatttatgtagaaagaaaaaagttattatcataaaagtaaaaaaaaattgggtcagaatgttttgtccataccttttttgaaattcaataaagtttttaatattaaatattaatagagcatttcttagagctatcgaaattccattaaagtttgaattctgactgtagattttttgtacttttatggccataattttttataattgaaaaaaaatttcgaaccgcttggcggatttatgaaacaacccaagacgaaaattttgcattaaaaattatcaactgatttatatg

SEQ ID NO: 106998 - DNA, 218 bp, Heterodera glycines
aaaatttcacactttgtcaaatgatacagtttttttttgttcttgttgtttttatttgttgaagggagaatttgaaaggctttgcagttcaatataattatctccaaatcaagaaatatgagataaaaaaatttagaaattttagtgtttaatgggaaaaaaatctttaaaaattcaaaaagaatttgagcattcaaaacattacattcataactatg

SEQ ID NO: 106999 - DNA, 328 bp, Heterodera glycines
gtagttggacatttacggtgctttggctgccaattatggtaaaaaaacttattagtggaatatcgtactgagtgttttgtaaatccgcataaatacagtagttggacatttacggtgctttggctgccaattatggtaaaaaacttattagtggaatatcgtactgagtgttttgtaaatccgcataaatacagtagttgggcatttacggcgctttggctgccaattatggtaaaaaaaattattagtggaatatcgtactgagtgttttgtaaatccgcataaatacagtagttggacatttacggtgctttggctgccaattatg

SEQ ID NO: 107000 - DNA, 79 bp, Heterodera glycines
tcgttacggctgcgaaccaacatatttaagaacgaacaggaggaagaagaaggaacagttgtgttcatccccaaaaatg

SEQ ID NO: 107001 - DNA, 454 bp, Heterodera glycines
tgcaggtcaacatgggcattggggcgcagtgcgtggcacaatgtccgcgtcgatggtgcgcgagtgtgtgtgttctatgctgtacggcactgttctgaacctcgcggagaaattcctattgtaattattatttttttaaattttcatgtcaacttattttattttgcttttagcgattttccatttgcacagctaattccgcaagaatttgtgccctatttgcgctcgccatccattcgacttcgctcacgacttgaatcagtcattgcagacagagaccaacttgctgtgacggtttgtttttcattttctactaaatggttgaatttttaaaaatagatttaatcccttcggttcctctttgaactgccaatttggaagtggcgattcccttttgctttaggttcaaattgaatggtccggtgataattccttgcgccatcagccggcaatg

SEQ ID NO: 107002 - DNA, 275 bp, Heterodera glycines
cttttacatttgcaatgttagctgtggcgcacatttactcaatcttgtcgttcagaagagtattagggttgaaaaaatcgctaatttgctcaaacagtgtcgaaaagtggtgtcgcattttaaacattctaacaaagcattggggatgctgcagaacattcagtcaattcttgaccttcctgaacattcacttttacaagtttttctaaaaactttttgcatctaatatttatgtttaggaaatccctgtgcgttggaattcggcgttggcaatg

SEQ ID NO: 107003 - DNA, 331 bp, Heterodera glycines
tggctgccaattggcattactgaactaatagtaaatgagaagcgaatgttatacttttctccaaaaaaccaattaaagctatcagtagtgtcatcaatttttgcatccgacggtcggacactaataaaagacacgtcacatttttggcatttagcggagagaagtactaacaaacacatcaatcacaatattattttaccatttagttgttttgaaaataaaataattcattcttatacaatagtgctctaatattttttaaataattatatttttagttattcaaaaaatattaaatcctatcactttcaacatccaaacaccacaaatg

SEQ ID NO: 107004 - DNA, 400 bp, Heterodera glycines
aaatgaattcatttgacattcgttttcatttaccgaatttatttattttttataaattatttatttggtataaagcgaagatgttcaaaagttgctgcttttcaaattaattatggtcaagtttctgtcgctttccacaaaatgtgcaatttgcagcccatcggcgcattgatcgggcggatggaagcggcggtgaccaccctccgccccccgaggggaaattgtggggctggcgaccaatcgtcggctttgcattggatccggtcgcctttcgctgttcatctcccaccaccgaattggcggttccttcagcagacttttcacttttggcttgcattggcttttgctctttgcctttcgtattttcccttcatttttcgcttttcccaacttcaaaatg

SEQ ID NO: 107005 - DNA, 80 bp, Heterodera glycines
aatttcattacttttgcggtgagtgctaattgtgcatatttccttaattgacataattatatgcaattaaggaattgatg

SEQ ID NO: 107006 - DNA, 448 bp, Heterodera glycines
tttcaagacaacaaatcttttaaactttttttataggcatcttcgaacagaaaattttttgtttttagagcgattatttgaaaatactttcaaaaaaaatttatataaacttttttaaaaaaagaaaattttttcaaattttctttttaaaaaatttcttaatattttttcttgaaaaattctgctttgaaatttttaagaaacggcgacattttttcacggcgagattttgggcggcgagcttttggagtgctcccccttcgataattaggctaattatcaatcatttctttgttttttaactctttttttcattatcgtattagagcagaccaattctaatttataattttttgagaatccaagaattaaatgggtgcgacgaaacctggtatgtatcatgtttacatacagtaaactcatatctcataccaaaattacacagatg

SEQ ID NO: 107007 - DNA, 329 bp, Heterodera glycines
tccctgaccccctattcaagcacgaaaaaacacacccacacatacacacccgccacacacacacacatacactcatacactacaaaatatgtacgcccgcaatcgctcgccaacgttcaaccaactaggcttacaccgcgtcttagaattatgttaatttatttaaaaaatttcaactatggcaaatttttcggtgtcatcaatcatcatcatcatcactattcgtcggcccactcggccaactccacaaatgagccctccgtgctgttggacgacggcgaaccccacgtgccgaagccggaacagctgggctccgtcgcgcgtccatg

SEQ ID NO: 107008 - DNA, 71 bp, Heterodera glycines
cctatatgtaattttcatttattatttttatttaaaaattaatgcacattttttttgaatagattaccatg

SEQ ID NO: 107009 - DNA, 243 bp, Heterodera glycines
ccccgctccccgctccccctcccctatttccactcacccctcttccccactgctcccacccttgtgtctgctaacataccatttttaagctgaacaacgcagttttgtgttcctttttggaaaagtattgtcaacgcgccgtgccagaccagtcaactcttcgaaaaaattatttggtccaacttttttctgaggttccaaaattgttcaaaaaattttttcaattttgatttttagacaatg

SEQ ID NO: 107010 - DNA, 222 bp, Heterodera glycines
ggaatgccacttaagggaggcactggtaaagcgaagggaagaaaaggaattgataccgtattggagaagggaggcctaccaaaacagtttggcagtggtggaagaatgggtataaaaagaagaagaaaacatgcaccaagtcaccatacaataattggccgaacaatcagcaaaccagcaagaaaacgtgttcgatccgacgcatttggactttactaaatg

SEQ ID NO: 107011 - DNA, 258 bp, Heterodera glycines
ggtggggggtcactttggcgcgggacattttggcgccgccagtttaaaagggtcataattttttacattttgatataattcaatatgtttaagtgttctctattagcatattccgttccaaaaaagatgtatgatatgcggcgccaaaatggccagaaaaggtcactttttgagatttttggccacaaactttcgtgtgtgtcccagatagatttttagaaaaatttttaaaataattttatttagaaatcaattatg

SEQ ID NO: 107012 - DNA, 205 bp, Heterodera glycines
ttgtcgaatcacaaaagcatcccggagggcgtgccaggcgtgccgcttggccaaatgcgtaagggtaagcggaaaagcggaaaggccaaagaaaagcgaagcggacaaaaggagaaagggaaaagcaatgggcaatcaatcgggcacaatttaaccttagcatcaccggatttaaagtgccattttttacattcagaacggaatg

SEQ ID NO: 107013 - DNA, 83 bp, Heterodera glycines
tcggcagcttaaaaggaacggtgcgaagtgcgtttccctctccccccccccccgttgactttgaagtgaaaagcgacggaatg

SEQ ID NO: 107014 - DNA, 529 bp, Heterodera glycines
gaatattaatagccatatctttccaacggaatggcaaaaagtggaggagatgagcatacaaaagattttgatctagcgatttgcttggggagaagggtcgggacaagggggagggggactgaaaacttttagggacaaagaaaatgtacgacggttattgtggacaatggaagtgatcggaatgtgagtatgggaaggggtgggttgggcttattcggctatagccacgggcatttgccatcatttttcatatttgttctgtgctctttttctatgcattttataatttttccaattgctttagtccaactgatcacctttttctgtcatgagcatcattcaacctgtcgccacccaccccaccaatttgacctggatggtgctcgagggctgcgtgtgtccccggccggatgcggttggcatccggccggtggactacacaaagccagttgagtgcatccacgtgtcacacgtgggtgatttttctgcgcacctgatgagcaaaccctgcgacaaccccgacaacatg

SEQ ID NO: 107015 - DNA, 548 bp, Heterodera glycines
tctgcagcccttccagtataggtagaggcctggaattttttttgaaaattagaaaacacttcaacttaaaatcctaccagcaagaattttccgctccctgtcctttaaaaaaagttacgggccttcaaacgcaagcaaaagtgagaaattagccgccgggactcagttggccaccggagcaaaaaacctatagttttcccagatgcgcctcaaaaagttgtaagacccttccactactttcagggcgctcccggccttcggccgggagccttaatttttttaatgagtccccctttttctctatatatatataaactagggtagccagttggctttaaagtagaaaaaatacttctggaaccacaatataatcggtattgacataagcgcttcgcgcaaaggacttcgttgctagttcttgcgcggacatgaggccagtttattaaccgtcattagcggttggacaattatttctcctaaatataaattgtccaacccccagggtccaccacgcggaggagcacggtggaaaactggcaaaaaccatg

SEQ ID NO: 107016 - DNA, 67 bp, Heterodera glycines
cgtaagttttattttattttattttaattgttgaatttaattaatttaattaaaggttggggccatg

SEQ ID NO: 107017 - DNA, 199 bp, Heterodera glycines
aaaactattttcaactatttttgcttgtgaataaaaatttatgaaaaatgcaataaaaacgaaaaatacacccctaaatttgaaatatttagcaactatttacccatttttagcaactctttttggggttttttagaaactaaaaacaaaatacctattttggcagttttagcaactataaatatacgccctgctgatg

SEQ ID NO: 107018 - DNA, 185 bp, Heterodera glycines
tgaaacaatcggcggacggtcccggcgggaaacggttgttcgttgtgattgaggactgcagtctcgaagtggccaaagtgtgtaatttttgttgcccgggggggggggtgttatagctgtttttgtctaaaaaataattcttttaatagtaatttgtgggtaaaatccatgcatatgataaaatg

SEQ ID NO: 107019 - DNA, 686 bp, Heterodera glycines
atttttgaacaaatttgcatttaattatttattaatttaaatttcatttcatttctctattttattattcatccatatctttcatcctttgcttttgcgatcactttataagtcgttggagacaagaagaaaataagcgatagggaatttcacagtttaataaaaagcggaaaatgtccgtgagcggaaaaaagggggaaagatggaaaaattaaaaatctgttctcattcgcttaactttttaatccgttcaacatcttctctctccgattaaaaattatttattaatttcgaattttcgcaccgtaataaatatttgtcaccgggacattgtttgaaggttacggtaggggaaaatttggtactaaaaatcgtttcaccgggaaacgggaattggtccaccggggacttttgaaaacaaaatctgtcaaggggttggcccaccggaaattaaaagtgattggcaaactctaatttgttccaccaaacaaaggctgattgattgattcattgtttgattcttctactgtcattggacgaactgacaaaagagaacagcggacgaagagcggacttcgacacgtggcgacccattggccattgcgaaccgaattgtcaaaggtggacagattcaaatttttgttaaaatttgaaaaagctagttggctagcaaaaattttaaaatg

SEQ ID NO: 107020 - DNA, 444 bp, Heterodera glycines
aaaattttctcacttgtattgcaaattttataacttgttgcaattgcgatcaatttgttgtggaaaagaaaaataaatcgattttatggcatttacagttgacaagattcccggttctaatctatttttaaacgcgttctaatacaaaaagctgcaattaataaaaataaaacctatttaacatcagttttgccgataaaaatccaataaagacagaaggaaatttgtaataaaatcgagcatatatgaaaatttcagaactttctatacgagtatgtaatattcaatttaacgagctgatcttcactttgtttagttaaattcttgacctttttaaagggtggttgtatacatgtagaaaatggaacaatcgaatgttgattactgcagaaaagatagaccgtattacgaaaaataatgaaaaataaagccaacctttaaatg

SEQ ID NO: 107021 - DNA, 899 bp, Heterodera glycines
atttttgttgagaccggtgagacccgtttgtagttatggacacctactccaattccattcctccgacccccgagggcattcgttcgtaaatggtcagaccgccccttccccaccagggacgggcgaagctcggctcggcactcgaagccgaaggcgaagcccaatttttttcgaagcacgaagttcgaagcccaaaaaccgtgaagtttcgaagctttcgaagctcgaagtttttcaattttttaatccaaaaaatttatccagatagtaaaattcaattaaatttcgaatttaaatccataaagaggcaaattctgttgaagaaaaaggagttctttcaacgtttctcctgctaaatcttttctcaaatctgtcacaattgagaaattttaaaatatttaatatatttgctttgtggtggcattttcaagctaaaaatgtaaaatgtgttaaaaatcatttaaaaagagatatgcaatatgtagaatataaaataggtaatattgaagaaatatttaatttataaaattcataaacattatcaccattactcacattaagatcaataattaggggagtatttttacttcgaaaactcaatctttaggggtgcatttttcccgaaacttcgagcattttcacgaagcacgaagctcgaagtttcgcccgtccctgttccccacacggacggttttaaatttattcccggggctgtgtaatgtcttggctgtgtttttggtcgctgtgttttggtgtgcattgtttttgattggtgtctctcaaaactatcagttggatattattcaattttacatcattttttacttttttcaaaatggtcatttttcacaattaatgttttttaaatgtaaaccaagaaaaattctctaaagctgatg

SEQ ID NO: 107022 - DNA, 346 bp, Heterodera glycines
attagcaataattgccttagtgaatgctttaaacgagagaggattttaaatggaagtattaaaccgattcccttcagataacgggccgaactctcatgaagagacatttttgaaattggtcaaacgccatttgacttcggcatttccctccataacttttgtgtcgctattttcctcttttctttcatatattttgttaatttttacgggtccattcatttgttgattaaattttcaactttttttttgtttgttttattatgcatttgtttttttcaaattttttttactgattccatttcctttaccattttatatacttttttccaaagttttcttcaaaatg

SEQ ID NO: 107023 - DNA, 72 bp, Heterodera glycines
aaaatggaatttatttcaatttccatccaatttttaattgttgcttcgcttttatgcgttcccgcaattatg

SEQ ID NO: 107024 - DNA, 91 bp, Heterodera glycines
taatgattgacctggaattttaattgggtgctgcaaaaactttaaaccctattttaaataagaaaaaatgaatataattttttagaaaatg

SEQ ID NO: 107025 - DNA, 867 bp, Heterodera glycines
aatttaaaattttatagaatatataaaaaaatttataatattttaagtagtgacccgtgtacttttgtcgccccttttggcgctaaattcaaatttgaattttcgcgtcgatactcggtgggtggagggacgcttgctggggaggaggggagggggcgcgctttggggtgtggggcggtgccgtagggtgtaagacctatgttattttaattaaattttattttaaattaaattttaattattattttaaattaaataattcccaaataattatttcccatcagtgggggggggcgcactcattgagggaagagatgaactttattatatgaaatgtgaaaaataaataaaaatgaaaatgataaaacaaagggatcagcaatgagggcaatcactgcggcacttctgcttccaatactcaacaatttgcctcatccttttgtcacggtcgcttcgacgggacgaagtggtggacgaagaagcggaagaggaggaggacaccgagctgaaggcagtgtccggtatgttgtcaaacagaattgctctggcggacgcgatctgttcggccgagaggcgcttgtaggcagtgcgcacacattctctaggaatgcgccgtgaagacgaagggacctaattggggaaatgtttatttcacatttataggtaaaagtgggtttaggctaccgtttgcaaaacatcgcacaacggcagaggcaccggggcatcatcgagcggaaaaggcattgcgaatggtgggaagacgggcagtggtggcatgcgcatttgcaaagtgctgatcgcctgttggacggcagctgaaagcatcggcgatggttgttgctggtgctgtgttgccgggacgcaatg

SEQ ID NO: 107026 - DNA, 233 bp, Heterodera glycines
ttctgagttattttctgaaacccgaccccaaaaaagttataaatcgaaaatttttgaaaaattccgaatttatcaaaaatatcggaattcagtgccatccctggtgtgttccaacatttttggcaaatcactgattgttgttttccaatcaaattgtttagcattttctccgtgcgaatgccatttcttccgttagttacgaaattcattttcctgttcatgcgccgtcaatg

SEQ ID NO: 107027 - DNA, 231 bp, Heterodera glycines
agtcaatctggaaattgaaagaagcagttactaaaaacaaccttttgattgaaactgtaaacagaataagagctgatccctcaacagtgacgaatgaagtacaaaaagattaatttaaatgtttaaattaattatttaaacattcctatttttactcttcttttttacaacattttctatatattttttgtttttcttatgtagttctttcccgagagtgtgttatatatg

SEQ ID NO: 107028 - DNA, 451 bp, Heterodera glycines
ttgtatgagaaaaatttaactaaaattgaaagattaactaaaattatatgggaaaaaaatataaattaacaaagttcaatagattcgactgtttcaactttagaaaagcattatagggaatttactctaaaattgaccgggaaaataaaactactaaaatgatagagttagaatttgcggttgaaaaacattattttaggggaaaaaatcataatctcaaaaaattgacactcaaactcaaaacagggatttttaagaaatctaattctttctctgctttttctttttttcataataatttctctcagtttggcgtattatctcttcttttaatagaaaaacagaatttactctatgcatgaataccccaattagttacctgtaaaattactagataaataggtattcaaattatttaactaattttcagatcaatttattaagaacaatg

SEQ ID NO: 107029 - DNA, 420 bp, Heterodera glycines
tttgagaaattaattaacccgttttctttaaaaaaataataatttaatcgctgaggaatgattaggaaaattggttcacaaaagcataaagatagccgctaaaaatgaagaaaagatttcgacgatgatgtcaattttgttttggttccacttaattacctagctgtgaaaaatttttagggctaacggcaaaaaaaaatttactccaaaatttggattgaatttttatggcataatgttttttgccaaattttaaattttcatactgttaaagctgtacaaagagacaaaagattttgccaatttctcttatgtatgtctttccctcaccaaaaaaggcatttttcatttcatctaattgattgttgttttggagtgtttcttcgctttcgtgtcttcaaatattttttgttaaaaatg

SEQ ID NO: 107030 - DNA, 261 bp, Heterodera glycines
attcggccgaccaaataagcaaacaaacattcccaaaatccttcctttcttctcattgtcatgaattgtgtattatgatgatgatgatgaatgggttcgttgtgttgatcggtcgcgttgagaatggatccgtccgatcggtcgccgtttcgcgccttttctccgttttgtcatttcctaagcaaacgatttgcccggggtgcgtaatgaagtgaacgaattttgcacaaacaaaaattgaaattggaaaggagaagaatg

SEQ ID NO: 107031 - DNA, 908 bp, Heterodera glycines
atgacggctaaccagcaaattgcccagcggagaaagacgggaaatcggaaaaattaaaacattggcaataatcgactgactaatgataatattgcaaaatatataatatttgaaatttattttcattcttttaattaatgttgctttgataatattttttaattttctctctgaaaatggactgtcaatcattctcctgcattttcaaaaaagcccaccgaccgacccatcgcccttttcaaatcagcagatgagccacctcacctgtcaaccattcgttaattagtgtcccatttaattaatttccccccccccccccataaaatttgtccgattttaaaatgccaattttatattctgccctttttcgtctgttcctccctttggttgtcccttctcttttttgggtcgctttggcttcgatggaatgcagcgaaagtgtgctcagagtgagcgatttaaccaaagccaaagaaagaggtacaattcggcattttgggcttgccttccatttcaaaaaacggcgattgtttaattttgaatttcgcctctccccctttaccgtaccctctcccatgtacagtacccttccgtttgctgaacctttccctcgcttctttggatgtgaatatgcgccccttttgcgactctgagggccattcggccgtccgattgcccggctttttgctcattttgtccggtattctttcgcccttccctttttctttttccaatgccttcgttttcggccaaattgtcctttcgcgccctttgcctccactgaatgcgtcgtcccttcgtttgtctctcactttggagcaaaactccgtttgggtgggccgaatttgtgacaaagggcgaagtcaaagtgcctttttgtccgacgatttttggtgaatttcgaaatg

SEQ ID NO: 107032 - DNA, 435 bp, Heterodera glycines
gggtcggtttagtctggcccgtttagtctggccgttttagtcagagggtcggtttagtctggccgttttagtcagggggtcgttttattctggttagctgtttttacccacaaattaattactttttataaatttcttttgtttgtcaatcatatacataaacataacttgaaaatgtctgtttagctacaaatcaaatggaaaactccaatcaggaaataaagacaaagcgaaacaagcagaagctggaacatgagggttcactttatgttcttcaccaactcagtgacgatggacttcggaagtactggcgatgcgagtttttcgggcctaacgacaaatgcaaaggtgtatgcaaaaataaaataaagactatttttcaaatttagggcgcattcacactgatattcatggtaatgtcctcaaaagttcatg

SEQ ID NO: 107033 - DNA, 752 bp, Heterodera glycines
ttcaaaatctattggccgttgtccgtcgctctttcattttgaacgtcttttgtgaccacgagtcgctgcagtgtgaattttggtgaaaaataaattttcgatttttgttcgaatttgggtccgggttcgaaatgggtcgaaacggatgccggattcgtgatcagtggccccaaaaaccccaggagagatgttttaagcgattttaaattttttttattttttttgaaaaataggggggacaaaccaaagtattaccaaaatgtttaggtcgtttcttaggggtgtattttttgattttattgcatttttgtttaggaatttcctaaaaatgtcgaaatagtaaattttcactatcgagaccgaaaatttcccgagactcgagaccaattttttatggctctaattttttgactcattttacgaacaaaatctgtgcacaaaaataaaaaaggcttcttcgtgatcgtttcgtccatctttcaccattaaaaatttcaatttttatccatattggaagcaagaaaatgacacatttttgccattttggggtcaattctcagaagttgtttaacagaaatgcaatagaaataatttttttttgacgcgatgacatttttggcgacatgttcaaaaaaatttcaaaaattttccactaaataaatcagctgaaaaataatctcccagtctccattaatctgccggcctccaattatctacccccttctgaggaggttgaaaaataatataccatg

SEQ ID NO: 107034 - DNA, 54 bp, Heterodera glycines
tctttggatttggtaattttattacttttgcggtgagtgataattgaatttatg

SEQ ID NO: 107035 - DNA, 565 bp, Heterodera glycines
ccggtccgtctcttatgcgcatgtccgactgcttaatcgtcgggttattttcacgtgcaatttgttgtcgcaattggtccgctcgttgctgcttctcatgaatttggcgatccaattgctgcaatttttattccatttatttgttttgtcaaaaaatatccataaaattgattttaggacaatgaatattcattaattccatttattatacacagcggcccaattttgggctctcagtgcaaataggtttattatttatttagtaatcagaacgccaaaactttgcaaaacttaaaattttttggggattttcccttgtaaaaatataagagccgatctcgagttaaaaactagacagctaaaaaattaactgtgattcgatagaggaggtcaaaatatgggcatatgcaaaatttgaagaaattttaaaagctagaaattttttttgaaagggacgaacatttaactcattttccagaaattttaatattcatttcaataatgccaaatcaaccaaagccattttggtcttctatgcagaagcaagacgaaagcgaaaggaatg

SEQ ID NO: 107036 - DNA, 78 bp, Heterodera glycines
agctgggtatagatgagtttggcatttatgagttggtttataccccggttattattttttaccacggtttgaaaaatg

SEQ ID NO: 107037 - DNA, 285 bp, Heterodera glycines
tggcgagagggcaataaacaagacattcacataagcacattttgttttttttatcactttttggctccgaaaattaagtccttcaagtcgaaaagacggacgaaatctcttggcaaataattgaaaaaaatcaggtctatttttgttgacgtaaacgctaccgattgtgcgcccgattgaactgttcctcttatacttgtcgcctttgcacttaattgtaattggtaaaattcacaatcaaccgggtttccaattaccttaatgtcctcccgagctttccaaatg

SEQ ID NO: 107038 - DNA, 731 bp, Heterodera glycines
aatgactctgtgcttaattaaatgataaatttggcatttaaacggatggataaaatttgaaaaaaaagtttttttaatcgacaaaatcttttacatgaagctgtaaaaataataagtgcaatttgcgcttgacttcgtttgttcgtttgcttgtcttttgaaaagttcggtcattattttgtttttaaattaaaaacatttttgaatacaaagacgaactccggttaattcaactgtttcgtgcaaattataaaatttcagtgatcttatgaaaagatggccattgattgggccgattggtcagcccggggctgcgacgaggggacccattttgggtgtccccgagcccaacagaccccagaccagggcattgtcaagtgactattcgaaaaatttagatagtttccctctctattggaatagtttaatgagtgtaaattaaattcaacgaaatcccctgctgatttaactgattatgagtcactttccctcccccctccccctccctttccatttgtctcatccgtcgtcgattttttggaccattttactgacaatccttcaaatatttgtgactgttaataaaataatccaaaatttactacaataaaataacggataataaaatgcgttcttttcgccgtttctttgaatttctcatcgttttaaacttttggtcgcacttttcgtatgcgaaagaggtaataaatgcagacaatcagttaacaatg

SEQ ID NO: 107039 - DNA, 289 bp, Heterodera glycines
acctgatctctttcaatgtgaagaaattcctctgtatttctctcaatgctaaataaaaattgtgaatttgagtagtgtaattgagaagggatgggtgggaagaatgtcattcggaactgtcacacgggactcagttctgagtgcccatcttcctccacttttttcaattctgtcttgtcaaaatgggcggggcttagccctttgacaagtgtatataaacagttggtattcatccattcatgtcatttcatttgaaaatttaaaattctgttaaatggctatcaatatg

SEQ ID NO: 107040 - DNA, 1003 bp, Heterodera glycines
tctgtcttacttaaaaatttttccaacccctaacaattttttctctcgaaaattttaccgatttcatgtttaaattagttcatcagaaagagtgaacttcttcttcttaggtcaacattcaattttgcttatattcaaaatttgaatatgaaaaagtttttcatattaacaaaaagatttaaaaaggtacatttgaattttggatcatttattgtattaaaaaaacagtacaaaaacctctaatggccgatcattttttcactgatcgtttcgtcactgagaaataatttttaaattattagtctcagtgacgaaatgataggtaaccatttaaatgccaaatagaaaaacgaaatgcaaaaactttgtaaatatttaaacagaggacaacgatcgacggaggcgaaaaagggaaaaaattttaatgtaaaaaagctaaacaaataaattattttcctaaactttcatataaaactaaaatgcggcactctttcccatataaaaaccaatcaaaaaagtcaattttcataataataataataataataataaatttaaaaataaaacatttaataaatttttagacattattttctaattctcaaattttcgttttttcattcgcattcgggttatccatcttgaaaatggaaaactttatttttcaaaaaggctaggggtaccatcggcattattagctgaaacccaaaaaccgagaaatttgtcgactaaaaacaatagattctcggaccacccttgagccaatttcttttttaagaacttttgtttattatttttaataattttcatggatcaaaggccttaatgacaaaaaaaaaataaatctaaaaaccaagtcctacccataagttagttattcaaaaaaaaaccaaaagccgaaccgtaagccccctaatcttaataattaaaaacaaaaaattccaattttacccttaatttcaacatttttagttttcccataaacgaagaaattttcataatg

SEQ ID NO: 107041 - DNA, 469 bp, Heterodera glycines
gatgagagagagagaagaggaaagaaataaagcgatggagagaaaagagagaggaagagcaaaaagagcaaacaaaaagaagagagagacagagggaggagagagagagaagagagttacaggcctgtaaccagaaaaaaacggtagctgcacccgaaggcctttttaaattgggatccggcggttccattaggcacggcctgggaagtagaaaagttagggcctaatttgttagaaaattaagtgaatattaaaaaattactcatttttctgaaaaattttagttttcattttagatgtggttacgggcctgctgacgattttaatttgtccatttatatatttgaggggggggggggggggggggagaaacattaaaaataaaaaaattatacatatttgtcctttttagtctacatttattcaacaatttaaaaaatgggttcattcggagcctgtggtcgacatg

SEQ ID NO: 107042 - DNA, 156 bp, Heterodera glycines; identical to SEQ ID NO: 102245

SEQ ID NO: 107043 - DNA, 275 bp, Heterodera glycines
  unsure (1)..(275): unsure at all n locations
agtgatcccaaaaggagattatgcacccaatctttcatccaaaaatcaatacaattcanncgaaagttaaccaaatcaaagacacggagacattaatttcggcgctcaaatcaacacattccgatgtcttcagcccagaattaggtcactgcaccaaattcaaggccaatctcattctgaaaaacggtgctaagcctatctactgcaaggcaagaccagttccacatggcgctttgaacgacgtaaatgccgaaatcgatcgtctactgaaaatg

SEQ ID NO: 107044 - DNA, 575 bp, Heterodera glycines
ttccactttttaatgagtcttttttggcatttagtgcctaattgaaatagcacaaaatgcacagaattgatgggcaaagagggaggagcaaattaattaattttttgaaaatgtatattttgagtaaattaatttctatttgagggcgaaacgtgcatcacgcagctgagatctgtctgccggtcgattaccattaccgcgctgtcccatcccgtgaaagtcaattttgtggatcaattgtacgcggataagttgtaataaaatgtaaacatttaattttataatttcataatttcttttggcattgtcggaattgccaattcaatcgaaagatttggcggaccgttcccgagtttggatgtgtttggtctcgaccgtgacgatccaaattatgtaagtttaacacctgtcgtgcagctgtgcagctatctaaactgatttaaaaattttcggcaagtatgccgcaatttttgtgtgccataattcacctcccccaaccatcatccattttgcagggtttttgtattaacgaatttcgttgttaatggtacatattttaggcgaaccgcgtgatg

SEQ ID NO: 107045 - DNA, 288 bp, Heterodera glycines
cctcccccccttccccctccctcttccctccccgtccatttgccctctccccttttttctctcatttttcgtttttttttctttcccgccaaactaaaaacttttcacttggtgtggttaatctttccgctgaattttgggcgttgtgcagcagaacaaatctttggcctgctgcgctcgctccgctgataaatattctccgaccgtcggacacgcaacctttaaaattgttttttgtcctttttatcaaattttcttccttcggtgctttttcactgtgtgcaaatg

SEQ ID NO: 107046 - DNA, 509 bp, Heterodera glycines
tggcacaaccgcagcagcaacagcaaatgatgatggagcaaaatgtatgggggaggggggggggaaatagcggatcaacgggggggggggggggtaaaatctagcaggatttagacggacgaatcccacatgaactagtccttttgtatgttttccgacaaaaaatgttgtaaatttaatcaaattaaacatattttgtaatttaaaaaaattatcatttttgaaaggttacgaacacaaaaaaatttattgtgattttttgtcaaacttagaaaaacaataaaattttcttgaattttgtatggagatatggaattttaagggctatctaatgatacaaagaatgtttgatttggcgccgaaaaacagtacgagtcggggcaatacgcacgcgttggggtttttaccgatttcgaccctttgagtccggtccccaaattgtcaacaaagaaaaaggaggatttccgcaattctaggtacagtatcaaagaaattactcggcacagatg

SEQ ID NO: 107047 - DNA, 141 bp, Heterodera glycines
ggtatgccagaaaaatggctatctctttttgggacaaatttttagcgaacaaatgctcgcgagcaagagccgcggagcggtaagcaactgccagttaattttcagagaatttccaaagttctcggttatgccagaaaaatg

SEQ ID NO: 107048 - DNA, 59 bp, Heterodera glycines
atttccctcattcatcgcggtggtcatcaaaaaagcctaccacccggtaaacaaaaatg

SEQ ID NO: 107049 - DNA, 624 bp, Heterodera glycines
tcgcaatagttggtttcttaaccttagattagttttgagacaaaaaagaaaaggaaagaaatgagaaattgaaaaattgaaaaatgcagataagagaaaaagggaaaggtaaatcggcgaatcagcctttttaaatttcaaaacataaggccatacaattaattatttattcaaaatttctctgcatttcattttattcccaaataaatctacttatatatccgcccttccaatgtttgcagttacagaaattactaaatttttaattcatatttttttaattactgactttgaaaaacaactgcttaatttatctcttatcattgaaataaatcaaattaagattcaataaaaaattttaatgcatttgtcagtttgttcattattgctaaaaaggcttccttctacacgcttggccactacgcttgctaatgttagggcaaaaaatgtgaagcagccgtcgactgagcggataaatgcaatttctctggatgatttcccgtggggaagaaattaaaacgctttattctttagtaatttagaattgcttatcctgattttcttcgctccgaagtttttgatcgtagagacccgttgtttgaacaactcgtccaagcagacatg

SEQ ID NO: 107050 - DNA, 234 bp, Heterodera glycines
gcaggccaacgtacagcaacaaacgggtgaatgcagaccagatacgccagctctgtccgtttccacctcatcggtttcacgtcctctttaactctctcttcaaagtgctttgcaactttccctcacggtacttgttcgctatcggactcgtggccgtatttagtcttagatgaagtttaccacctgatttgggctgcgatcccaaacaacccgactccaagacacgtaaagatg

SEQ ID NO: 107051 - DNA, 726 bp, Heterodera glycines
ttcctgtataattattcacggaagcggagggtctattaaaaataaataaataatttacactaaataattgatttaaatttttttaaattaactaacaatcagtatttcgagcaaatttttgtttttgtgaaattaaaaattgctttaagaatttttttaggtcacatttttgctagaagagctgatcgagaataaccaatgttgttgtcagcaaatttccggcatcttcatttattgagaattttcaatcgaattgtccgattgtctcctcactgtgtctgtcagacgacggaattattctccgaacggtttatttcaacttcctttcttttgcgtatgttcattactcattttgtttaattctaattctgtttttacattcattctttcactgttccaaaacttttgttcagcggatgcttttgcaccaaaaaaagtcgtaagttcctttcccatggcttctacatgttggaactgtcccaagttagttaatgctgtcgctttcactacatttttcattctctcagctgttcctttcgaaattttgtcacccgtcgttcatgtcgtcgatgtgattattcgcggacggaagaagaaataaacaaaaacaaaacaatatggccatgttcagagtgaatccctaatatcattagtaaattcctaattgcctattattgacaggtgcaattccattaattacattgacagaaaaacgtgccacaaatg

SEQ ID NO: 107052 - DNA, 65 bp, Heterodera glycines
ggtatatttctcatttaccaaaaaaaaaaaaaaatttttttaagcgtgaatcattgttcgaaatg

SEQ ID NO: 107053 - DNA, 1003 bp, Heterodera glycines
tttcaaagaaaaaaattgttggaattttaaaaattgtaatttacaaactgaacaattataaattttattattttttgaaacaaatcaagtagcaaagataagccagatttaaggccatattcggattctactgctctaaacttttcagaagaataatttagaagtcggttttgttttatcaggtttcattaatcaataaaatacaatcctgtcgatacataagaatattaaataccacacattctccatcgcttttttctctttctttgttattctctctttctctcggtctcttttcttccctttcgcacgctcccttcctcaactataatcccggatgtctacagtaattcaagaaattgattttattaagaataatttaacaaaaaattggaaaatagccgggaatatacttaaacgatcaaataatcttgaaatctttgcaaataaactttttaaaggtgtgaaaactttctacataacaacatttagtgcacctggaatcgaaaacttatatttttcattcttagaaatgctcaaaaaaattcaaaaattacccggtcttattatgggtgaatataggaaacaggccttagctatgcggaaactagaaattggcatcaaagaaacagatatatttaaatgtcaagaagcagagaatatatcggacctttgtttttcaaagataaatgaattcgaaaaacaagtgcaaaattatcggtttaacatgagaatgttatacaataaaattagaataacagcagtaaagcatttgtttaaacccgaaaaagaaatattttttagtccttttagaatagaaagaaatagagaaatattttattctatatctaaatatatttaataaaaattcaatcttacaaaatcaaataattgcgactaattaaattatagctcgcatagttttgtgtaatatttgagcgctactcgtgcaaaaaaaaaggggttaagcgcgctgcgaagggcacaacactctcccacaatg

SEQ ID NO: 107054 - DNA, 1003 bp, Heterodera glycines
aacaaattggacagctttatattattgggagctttgaccatttgctggatttatgaaattttaaaattaatttatccgacaatttatttgatgatgctttctgtttggtaccgatgacaagtggcaaaagaattaaaattaatgagaacaataaccatattaaatgccggcatcccgatgacgtagctcgaagttttgttaagttttgagttgcgatgagaaaatgaaagagatgagattttgttttcggggagggcccagtcgggtaatgggacggccaactcttcaaaaaatgaggcgaaaatcttttcagcgctactgagcttagataagaatcaataaaatagtaaaaaattgatttaaaatataaaaattatatttgctgaatttttccatttaatgatatttattatacccaatttccaaagaaaaaatggtttttttggcattcaacaaaaaagataaattattaagaaagttgatactcgggctttttgatattcaattaacttattgttcttcaaaaataataaatcttaatatgttttgaatagatttttaactaattaaagaaagtcgtaaaatttatgaaaatttttcgaaatttgaaaaatttctagttctctaaacaaaagttattaaacattaagaatttaaaaatctttggtggagaaaatgattaagctgtgtccatttggaagtgaatctatttcattttacttttttcgtttaaaatgtttgtgaattttgatattcatgcattatgatttattatcgtaaaaaattgatttaataatatattaaataatttcttcatataatgtataaacattttttaaaaattattttattgctagaatatttcgctgtaaaaatgaatttatggcatttaatatttataataatttttcttacttataatattgaaaccggcaaaatcctaccaaattttgatgaaatatttggtgacgaatgggacacaaatgaaagagaagcagaaatg

SEQ ID NO: 107055 - DNA, 733 bp, Heterodera glycines
tcagagatttgttatttgtattcgaaattggcaaaacgtttcctttctttgtgctgcttgacgccaatgataaggtaagaaatatttataaaaattaaaaatttattcaattttaatttcaatccaaagattgccctgtgcagtaatattgcgatgccattgtattcactgttcaaaaatttctactcagtccaacaaaattgtgacatcgtttgtaatccttctggggtgcttaccataaatatctttgcaaatacatattacaatgaagatccagtgtaagtataaatggtatcggataggcggaagcattttgctttaataaagcaatcaatttaattttttgtattttctaaaaaatttggttcttaaaacattttttaaaccattcttcccggataaaattataaaatcgtttgactgaaatccctgttctttttggccaaaattagtttttatctccatccgttttattaagagtgaagaaaaaaccactaaaacttcattttataaaattgaaacaaaattaccaaatttatcaatttatgaacattttttaaattaatttattttcaatattttttcaacagcgcctatcggcaggtgggtgaggctaatcctcccatcttaggactttatttaaaatattttggtgcattataagtcaaactatttgaaaaacccaaatataaaattataaataaatgaaataacatttaattgcagtgccatg

SEQ ID NO: 107056 - DNA, 120 bp, Heterodera glycines
aaattaacgacaaaagaggaggacaaagtaacgccaaaagatgagggcaaagtgacgacaaaagaaattggtgatggtcaaaatttagaagacattcaatcagtaagaggtggaaaaatg

SEQ ID NO: 107057 - DNA, 592 bp, Heterodera glycines
agtaatgacctttgagcgcggaaaaacaaatttttaaatgtcatattcgtactcagcgactccaaaaaccctaaattagatccgttttccgggtttttatgtgctttttagacttttggacatttcgtgttttttactcatggacatttcgaggcttggacatttcgtggcttggacatttcgttggtcagcggtttttactaattatgttataaaattcgaattaaatttctttttttcccacatcattgggacccttgattctttataattttttaaaatccacatcaagacaccgttaataaaaagctgcaacacgaaaaccgtaaaaaggtcagatttttgcattttttttataacttttttacatgacggtatttctttttgattgtggaaagccaattgagcttacctacctatttattttccgagtgtccattatcccatccccctttcttcagctgtacccgagtatataaagccgactaaatccaccttccagtcatattcttcatcccatccgcatttatttgataatttttttctgtcacttcttttttctaattctgtttgatttacagctaaaaaaatg

SEQ ID NO: 107058 - DNA, 395 bp, Heterodera glycines
atgggcgccccagcgaattggcacgcgcgcaaccgggtgaccgcgtgttgctgcaacgactgaacgtcacgcaaaacaagggcgcggccgtcacttcgcacgacaacacctttttattttcctgctccttcggacaattttccgtgttgcagatattggcgcacaccggaaatggtaataaaatgcccgggggtgggggggggaaaggggttaatttgtttgacaaaatgcagtggcaactttaaagaaaatttagaatggacaccgacgagtgctcgagtgttggggggccgcgttttggccatcaccgccgcgcaacaggaaggtcggttgggcggcggccatacccactttttcgggcgttcatttcaaaaaaaaaaaaaaatccaggaatg

SEQ ID NO: 107059 - DNA, 258 bp, Heterodera glycines
taaaaattccattaaaaatgcaacaaaatcgtgaaaatatattcgtggatgagagaatcagaatcttacctagcatatgaattcctacgtattatcatcgtgccctgcatgtgagctacgcaggaattctgattctctgacccaagaaatagaaaagtcactgctctgaattgttaagggagcagatgcacattttatataaattttattacctaccataataaaaaatttattttagattacttagtttgcgaaatg

SEQ ID NO: 107060 - DNA, 838 bp, Heterodera glycines
gtttgtcccggattttgttattattataaagttatgaattttctacaaaattttatgaatgggaaacaaaaaatgataaattttggctttattagttcttaagtttttctatttgaatctgacgcttgtacaagaactcgtacgaaaatgttccccgtacgaaaacggcggtacgaaccaaatttacacttttcgtcggtcgacatatttgaaaattcaattttcgacaaaaaaactatttttgaaacgcacgaaaatcaagtttttttggttgttgttaaggtacttttcgagttattagtgcctattttctaggcttttatttttagcgcctaaaaagcctaaaaatttttgaaagagcctatttttgcctattttggcgttttgccaaattattaacaaaaatgcaataaaaacgaaaaaacacctctaagaagcgattttttgggaattttaaaaatacacccctaagaatcgaccaaaaaatttctgaaaataaacctcctaagaaatgaaaatttttcttaataaccgtctttaaatttttttttttggacaagtttttgaatttaaaaaatgatgtaactcaatactgagttgtagggctgcaaaaaatatgtacaaatcaacgcgattatcccatccaagctgttgcgacacattctcttgccggttgaaatcaatttaaatttaatgagttgtcaactttatatttatttaaatattgctttcaagcgaatttttcttcaaaattcgtttattttgcatgaaattaaaaaatgattttaattttcattaaaattattattttttttctattttgtagatgttagcaatg

SEQ ID NO: 107061 - DNA, 142 bp, Heterodera glycines
  unsure (1)..(142): unsure at all n locations
gtcattattttaaaaaaactaatgtaattaattcccgtatgcacanaatagaataaattgaaaaaacgaaccaaaaattagagaccaaacaaatcaaatcaaatttaaaaaagacatttttcaaaatatttggtcgcaaatg

SEQ ID NO: 107062 - DNA, 348 bp, Heterodera glycines
  unsure (1)..(348): unsure at all n locations
cttttcaaatttcaatgcaaaacttcaaccataatttttttttattttaaataattctttttccgtcattgaatattatgagaaaaaaatcatttattttttcatatttattcatatgcaaggcccattaaattcccgaaaaattcattttattattcatttaaaattagacttttatttatttttcctgttttgtattaccaaagattaccctaatttattttttccgattcttgtagacatataactgtccattaagtatctccttcacaaatataaatatgccgcggcaatcacgaagacatacaattcataattatcagtgaatcaattntaattaagaaaatg

SEQ ID NO: 107063 - DNA, 375 bp, Heterodera glycines
  unsure (1)..(375): unsure at all n locations
tgtgtcatttttggtcaattttactttcgcttaaatatnttggcaaaacgatgccaatgccaaccaaagaacaatttaatgcaaaaaaaaaacaatttattcatttttcaaaaaagaggagccaattcgctctgtgttctcccaattcggcaccatcaaagaaattcgtctgtttgcttcacaaaactttggtttcgttgtgttcgcggacaaatcgtcggccgcgcgggcgatttttgagatgaatgggagggaattggacttgggagtggtagcggggaaatgcacagttcgggtgaagtggggaagacaaccgcagcagcaaaacggaagcggaagcggaggggggacaggcggaagggcgggagacgcatg

SEQ ID NO: 107064 - DNA, 79 bp, Heterodera glycines
cggatcaatgggaagacgacggaaattgggacgacaatttgaccagtgtccaatttactttgtggggtggtagaaaatg

SEQ ID NO: 107065 - DNA, 233 bp, Heterodera glycines
cctaaaaattcgaaaattataaaaaaaaaattagattatttatgctttttttgaaaaatagaatttttaattcaaaattttcttaaaatgaaaattttcattataattttttttccatttgtgctcaatttttgagggcaaaataaattttttattttggaaaaataacaattttacagcaaaaaaatatatatataaaaattcaaaatttttccagtggcacttatcacatg

SEQ ID NO: 107066 - DNA, 57 bp, Heterodera glycines
tttttatgttcgtacgccgtcaatgccaatggtgccattcgaattggtgaacgaatg

SEQ ID NO: 107067 - DNA, 191 bp, Heterodera glycines
tgctgttaatgcttaatgttcattattctgtatcaaactatacaaaaaaattttagaccaaaaaaaagcgaaaaaatttcaaaagagtacgcttttagactagcgccaaattttctttaaaaaatttttctcgcatttaaaaaaatatatctatttgaatttttttttttcttattttaggagtgaaaatg

SEQ ID NO: 107068 - DNA, 1003 bp, Heterodera glycines
atatccacctctttttggctctaagttcagtttaggcatccaatcaatgagaccatctttagtttctttgcccataatttttatggtattcaattgattgtgcttctcatgcgactaccaatagaaaaaaataaacatgcaaaaatgtaaaaacataaaatctgtgcctaatttcttttttaaatttaaatattagtacgtaaattaatttgtgctctttttggcgcgaaatttaaatgaaataaaataaaacataattcgattgcgttgcctttcctttcatttttctttcattttcgttttcttaattattacgcttttctttttttattcgaatcaaaaacaattgtgtatgcttttgcctttgcttcattcatcgttctctccccccccccctttttttcggatcgatgcaccgaaattccatcgaattgctaaaacaaacattttgtttattttttttgatttgaacatcattcgctttctcttcctttcacagtcatttctctgttccctttcccatctttattttgccttaaattttacccttcgaaatgcaaataaaaaatgttgcccctttccattccccttcctttccaatctctttggctgtaatggctttgttatgtatttcatccattgaccttttccaccatttcattctttgccgtgtagccattagtcttttattacaagagcattcactccctccctaccttttgctgtttatttgcagattttataaaaaaacaagagctactgcattttacgcgtaatcaatgaccatcatcagttttttaggccataatctttccatacctggtcaaagcataagtaggacttcattcagctgaaaccactaggcatttaccaagtaagaaaacctaaggaaactcaggatgatcatttgttggacgcgtaaacagcagtagagccaaaataaaaatgtttcttacctaattcatagagatcatcatttattttcatatttacagtaaaaatg

SEQ ID NO: 107069 - DNA, 126 bp, Heterodera glycines
ggtgggatatactttaaaaaacaaattcttctttttttaattttttctattaatttcttacaactttcaaagaaaattttaaaaaaatttgagaaaattggaaataaaattttttagttgttaatg

SEQ ID NO: 107070 - DNA, 101 bp, Heterodera glycines
cgtcagccgcagagcaaattgaattgattgagacggagactattccgcaaaatttggagtcatttgaagtagcgtcagctacacagaaaggattgatcatg

SEQ ID NO: 107071 - DNA, 1003 bp, Heterodera glycines
tagttaaaatcataaagcaaaaaattattttttttaattttattccaaatttaaaaatcaataaaccgcttttttgaggcgtgctttttccaaaaaaactttttgggaagagggggcaggccgtcgcggcaggtgccgccgggaaaatttgattaaaatttgttgacagattttcactaaaaaatgatcaaattttgtgatttttatcatttttctaatgagaaatgagttttggggcgccgctgagaacagtttttcatcaaattaccaaattttgcgattttgggccattttctaagaaaaaataggagttttgggggcgcggcggtgccgataggcgccgccggggaaaaaattggaaattttgatcatttataaacaggttttcactgaaaattaatttccaataatgaacaattaaacaacggggatattttatttatacttgtagttaacaattaaattttttttaaacaaataaaaaatattaaaagtaatcatttgtaaataaatctcaataaaaattttgaaattttttcagctatgcctattcaaaaatattcttttggatgaatttcacatgaatttattttggtgacataaaaacatataaaaatatttatgatttctatttccgctttattttaagttttggagggtaatcatcacaagtaaaagcagtgtaaagcaaaaaataaaaaaataaattaccccatttaattacttcattcattcatttgcttggaggaagccacgccatatgtttttgtatataatataatttacatataatatatgcgcatatgtggatatattctagcaatcttttataaaaataaataaaaatatccatattattattattataacatgtaaaaacccacaaaaataatgcataaaaaaagccataaatttattattattatattcaacacattgcttctttttcattcatttttcttatttagtctctcaaatcaaaccaaacaaaaacaaaaaaatg

SEQ ID NO: 107072 - DNA, 158 bp, Heterodera glycines
gaaagagaggagaaaggaggataaaggggggggggggtgaaacggatgactttctctttgccatgactttggctgctgctgatggtgagaactgagaacagcagcacacatcatccgcagcagcagatgacaataaacacagcttaactaaacatatg

SEQ ID NO: 107073 - DNA, 1003 bp, Heterodera glycines
acatacctgagcaaagaatttcaatttttttttgcagaataagctatggtcaggtaaaaaattaagaaaagggaaaacgcatagaaattaaatgcgaaaaagcacaattgttttccatgctttggtgtaaggtaatagtccagagagatgaaaatttgattaaatagtcatagtagactcataagtattgggagaatcaccgccggttaccgctaacgaaggcatttccccccccccctcgtccgtccatcccaattccctccccccccccccaaaatccttttcattcctccgatgaattgccccccccccctcaatccttccacattttccatccctttttcctctttgacgctttcttctgaggcgaatcaaacggagaagagaaagccactttcgccgtttgtatatggtcaaatcaaagcaaaagcctccgatcaaattcctcgtaaaatattcgcttttccctttttctttcctttccctcgcttttcccttttattggcttttcccccatttttccttaagcatgcgcctctctttgtccagttggcctttcccccacagaagagaaaggcattgtcttcgccttggccttccttccgtccgatcgcttttccctctcttttttctctcatttgtcattgccatctccgccgatcagtccattcgtaagttttttttgatgtgccaatgtctttcctctttgaatagccctggggggtttgctttttgatttgtgttctccgccgccttttccatcgccagtgacggcggtttggcggaccgtcatcttaatcatcattatcttgacgaagaagaggagacactcttgcgggtgaccttcacctgaattgcttttcacaaagcaaattctatgggtcgaacggaaaacactgaaaacaaagcattataattggggggaggggtaattaacttaattaatggagcaaaaacaaaaggtaaaaatgaaatgccaaaataatccaattgattgattatg

SEQ ID NO: 107074 - DNA, 300 bp, Heterodera glycines
  unsure (1)..(300): unsure at all n locations
ttacatatttatnnataatttntaatatattttttgtttatttgcttttaaaatatttccattcttctattatttttaaatttatcacagtaaaacgatgactctcataatgcgtcaactgttcgcctccttgttcttccttttgcttctcattttgctcatcactttttccgatgctcaattatttggcggatggggtcataataaaatttagaattatacctaattaattacaatatttttaacaatttacaaataatataaataaaatttaaataacaaatatttattgtcaggatg

SEQ ID NO: 107075 - DNA, 1003 bp, Heterodera glycines
aattttgttttccaaattagctcgtcatccaaaaaccgtttttgttaaattctgtcttttatcggttcgttcgattttatttccctttttccgttagtccttccagttcatttttaaatgacctgctgtcccaacttgattggtaatttgggaaattctgggattaatccggcaaacccacccggcaataaattgggccccaatctcgaaatcggtgctagcgcgtttgttaaaaactgccaatgggtttgaaaacaaaaaacaggctatgttttttgcaatggtaatgcatatataataataaacatttaaaattttaaagtctttaaaatgaaatttaaccaaaattaatttatatttcgatagccctaataattctctatttatatttaaaattttagaaaatttcattgagtttcaaaaaagttctgaacaaaaaatgctgacttaagattttttgcaattttgtgaccataacttttttttatacttaagttaaaaatataagaaaattatattctgaaagagaacaattaaagctattgaatgataccacgaaatattaatttggttgaatttgagccaagctattaatttaattattttacccattttttgttttcaaacccattggcagtttttaacaaacgcgccagcacggttgtatccagaaaattccctgaattttcattttttaacgcattaatccgttgctgataaacagtgctgtcaaaaatatgcaaatgcatattttttttcctggattctgcgtagtctaattagtaggaaaaacactttctttttggtatttgcgtatgaaagtcgggacttttatttgcatattttgggttttttctgcatatttcatgcatattttgccactttttgtacatattttcagattttgcatattttgccatttttcgacaaatatttccgatttaaatatcctcttaggaaaaaaaaatttgattatgcctaaaattaaatccaaatcggaatg

SEQ ID NO: 107076 - DNA, 156 bp, Heterodera glycines
atcattgctgatgagcgtggcaaccgtcagagttttgggtagagtaaaaaattagagtccgttggttatttatctaagtcattaattttagtcattgtgagtctgtttcggaaccgatcacaattggaaactgttgcaacgaaatgcacagctatg

SEQ ID NO: 107077 - DNA, 109 bp, Heterodera glycines
catgggcgacattgacgcgaagaagttggctgatctgtacaccaagaagtcccaccacaacaacttttcggtgatattcctcacccaaaacctgtttgacaaggcgatg

SEQ ID NO: 107078 - DNA, 228 bp, Heterodera glycines
gtatatgcagcgagcaataaaatattttattgactattatgcgctaaatgatataactcagctgtacgctctcctaaaatccgaaatagactctaaaccgtccaactattatccaaatcctttgcaatcagttccttgtgtacaccttgtgaacgaagagtacgaaaatcagcctgttgttgtagaaggaacacttgatctgataggcgatctgttcttttcaacatg

SEQ ID NO: 107079 - DNA, 1003 bp, Heterodera glycines
ctatcaccattcctcccctctctgttctctttcaccattcattcatttatttgtcattttccttttgcttgaccttaatcaatattatttgtgtgccttgtccttttatttggaataaacatttgtttattctctacggactcatcggcataacagaaattaatggagaaagtgaaaaacaaaaaattaaattatttatttcatttaaattatttattcatgtgcatatttggcttagtggctaaaccttctgcctttcattatttgtcgcatgggttcgattcctcactgggatataaaattttcaaattttttgtgggctttcaaatgataccaatcattagtcgaaatgagaaaaaaatgctacaaaaaatgctattacacttctggtcatacttttcttggtaaataattattaaggaaagtgtttgttagcagcaagtcgccataaacatatgaccagggttcccagatgtgaggctttagcctcattttgtggttttttggaggtcaatgaggtgaaattttcaaaatgaggctttgaggctttttgtgggtttttgagaaattttgaggttttgtgttttttttgttaaattttccaaaaaccacaaaattaggaattttttattgaaaatctgctaaaaatatggtcaaaattctcaattttttcccctttttggacaaaatttgttaacaaatcacattaaaaattacaaaattttcccgacggcgcctatcggcaccgccggcccccctttgttccccaaaagttttttggaaaaagcatcgcaaaaaaatcaacttcggtttttcatgcttagaattttacaaaatgctcaaattgatcatggacaatcagaaatataacatttgaacattttaagcctgcccggcaatagcaaaataaaaagagaaaagattatgcgaaattggcaaaaaaccaaaaattaattaaaatattttaaagtttctaaaataaaaatgtttcattttagtaatg

SEQ ID NO: 107080 - DNA, 1003 bp, Heterodera glycines
ctaggatagacacaaagagagggagagagcggcgagacagtgagaaaaaagagatttggacacagaaacagaaagagagacaatgacaaaatgagagataaagggggagagacagggaaggagctagagaaagaggggagagaggcaatcagcaaattaggcaaattgtatttggccactgtttttgtgccaaaatgaactcccacgcattggaatggcgtgtgtgcattcatggaaacaaccaattaagagaatgaataacttgatttctgagaaaatattatcacaccgtaccatgggaaaaagcgtttgtatgaactaattaattttcgtttaatttatttgtgtctgatgaatgacgtttcgccaaattaaaaaaaaaagttgacattttgcgttagccactatttaataattggctcaatgaatgccgtagtgattgatcactgtcttagtgattaggtaaatttcttgtacgaattatcctttttagtaaaaatttttgttgtactaattgccctttttacatgttgccactgacccagatgaacatgaaacggaatcttgcaaaatcttggcaaatgttaaacaaaagatcggtactttacctagcaggtctggattgtaacttatttcagttacggaaatctaatccgtaattacggcgatttcatcaatcacggcaatacataatccgtcattatggggaacaaaaaacgcgttaatttccgtaatccgtaatcggctcgataaataatccaaaatctcagttacggatcaaaattacggaaaaatcactaaaatccgtaagtcgtagtccgtaattatgggatcaaacacgctgttgtttccgtaatccgtaactacgtcctaactgttgcataggcaatgtcccggcccaaacccaccacaccttgagcgtgttcatcatcatcatgttgttgttgctgttggcattgtactgctccacatcgtggatgatccgcctaggcggtgaacgatg

SEQ ID NO: 107081 - DNA, 117 bp, Heterodera glycines
agtgagttggcattttggggaatgtcccctcaaattgattgctttcatcagttgagcatgtccgatgagcaaattgaggagaacgtggcggtcattgttgacactctgtgcaaaatg

SEQ ID NO: 107082 - DNA, 794 bp, Heterodera glycines
tttttctcattaaattttgccaccttttatttaaggcttttaatttttcaaaatttggctctattttttggataatttcctttgttttattgaatatccgcatgcattctccgggattattttgatcatattcgaatttgttttcctcaatttttgttttgatcgtttctatttccctttttaatacgcgattaaggaggggtattttgctacgaagcgtaccggacatagtttgtattttaaaattttaaaataattaactaagtatccttttatggttatttagtggataatcagaaaaatgagaattttaattaggtatttatcacaagttaataaatattattataattttaatgatcacagaattaacaattgttacgaaatttaaaaaaaatatatataatcacagaatttttttgtttttgttaattatttgctccttttttttgtaaatttctttcagtatattctctgtatgtttcgggcgaagtttcgttaatttgtatttcggtttgtgtttttaaattttataagttcagtcagtgtagtgcttttcgccacttgtttctttttcgtgttggctttggtcgtcggagtaattgaattaggagtcgctctgtccacttaattatttaaattagtgatgggtttgctgtagggtttattatgacttttaattatgtttggctttttatggtgtcctttttcggttttttgattgggtttggtgatccgtgtgtgtgtgtgtgttttttttttaaattgggtttgtcaacccttgattttgtatg

SEQ ID NO: 107083 - DNA, 652 bp, Heterodera glycines
tcctcagggcccggatttctagttttttccttttcagataatattttagagatatatacggcaagaaaaattaattttctccgtccaaagttaaattagagcgcgttactataaacatcataaaacagctgattttgtaggtttgatcacaaaaaactgtttcggatttaagcaaatatgtatttccgcaatttggaaaaatgaaatattaatttaaattttaaaaaagcgaacaaaatgcatttctctaagtttgttttttcaagtagctccaatttgctttatcttcttaataagatttctaatttttaagcacagcatattcctttcttcttcttttttttatttgaatcaaaaatctaagtttaatttaattattttctttattattattattttatttgtaaatttatttttagagaaagcacactgattatgaaatttccagaattagaaaaatagtgagttggatgaacgtggtttttggcaattttgagagatttccaaatagcataaatgacgtgcgaaaaacgaatgttttaaaatcaatttcccatcaatccagcaatttattcatccatccgccacattataatattttatttcaaaaaaaaagtaatgaataataaaaaaatgtttaaagcagtcaatg

SEQ ID NO: 107084 - DNA, 166 bp, Heterodera glycines
tttcgcttctgtcctttggtctgttccgtcgttcattcgtccattttccttttccctccgtttggttttttcctccccccccctccacttgtaatttcgtcaattccgttaaacttagaattattcagtggtctcgctttccccatacttttgcccgtccaaaatg

SEQ ID NO: 107085 - DNA, 51 bp, Heterodera glycines
ggtggtttatttaaaagtttgcattcattttaatacctaatttaagaaatg

SEQ ID NO: 107086 - DNA, 559 bp, Heterodera glycines
aaaatttttcccgacggcgcctatcggcaccgccggacccccttctttcccaaaagttttttggaaaaaacgtatcgaaaaagtgatgtatttactacattaaaaaaaaattttaattcccggtttcaaaactggtacccaacccggtacccggcttttcaatacccggtaatacccgggcccggtttttgcccaaatacccgggcccatgtaactctagcaaatataatggatctttttttgaaaattatttaatcccaagcaatttgttgttcttgtaacacccggctaataaaaattggcgggctaattgaaaaatattttgccttatttcgataattagtgccagattgggttctgtttttaaacttcccttgaggggagggcgggggtaattatagggtggtgcactaattacagaaatattgttttattttactattttagaaatctgcgcggcacttgtgccactcttttggccatcggctcagccgttgactttctctttttgctctcattttcggtcccttttgccctttcgttggttggccagaacatg

SEQ ID NO: 107087 - DNA, 461 bp, Heterodera glycines
ccccccccccacctcggccaattgtatgtcgtacgggaatactgctggtagaccccttacacacttgtggtcataatcagggctcccaactaaaaattagcattttaccaacaataaacagcaattggggtcaaagagcagcttataccccttgaaaacggcaaaatgttgataaatcagcagagttgagagccctttgaccataatgaattacgttgcaaaaaaacaaatttcagaaataagcacatttgaaagttaaaattagaaatgagaagtaaactaatctctcttatttcagagaagtgattcctttcaaatctcacaatcaaggcaattataacttttatcaaatttatttttttatttttggctaacaattgttttatttattaaagaattttttgtagtatttaaagcaatgtgccaaactttggttaaaaatttttctcagtgacgaaatg

SEQ ID NO: 107088 - DNA, 337 bp, Heterodera glycines
tattcttattgcgtttttatttctttttgtaagtatttcaccaaaatttttaaaatttgccaaatttttagttgaataaaacattaataataaaatattatggaatcttttcttattacagattttatttttgtagtgacgtcacattttgtcttacaacaataaaaatgtcagacaatcaaatggaagcggaaaaaaagatgaaaagacaaatgtaaattaaaaatatccaaatttagccaaaatagactttgtttttaaattaagttcaatttgcaatgataattgtcttaaagtgttcgaatttctctcgccttttaaacttggcattgaaatg

SEQ ID NO: 107089 - DNA, 1003 bp, Heterodera glycines
ttgagagctgattaatcactgagaaataccttataaatatcttctaaacatctagggctttcgaatgataccatgattgtgaagtttggccaacaaagaaaaaagttatagctttttgaacattgctgagacggagttggccagacggagttgacccctaccgtcgaatgataccaaatttgtccgggttgggcacttataaaaaggagtaccctttttctctgtttctcaaatcttgaactggttcaaatatctgtttaaatttttttttcaaagtgttagaaaaagcccagaacacaacaatcatagttttattgaaaaagggtttaattagaatagagtttaaaaatttattactttgatcagtgcagtaatattctccttaattctataacaaatccttttttttaatttgatagataaatatttaaataaattcatttaaaaaaaataatatttttaaacatcgacggtgttttccacaaaacgaatgaatcatcatttttattttgttaatagctttacaatttttaatttgcttttcccaactgattgacaattagcacaaaatggatgaaacttttcaattttatgcaaaaggccgttgattttatttactgtgaaaaggcaaaacgaaaaatacctgttaatttatttaatgagtttttgggtcttttaattaattgacaagagattaaatgaaaaaaaacaaattaattttttatttaaaaaacaaaatattccaaccattcttaaacaataatgtctgcttcatcgacattttttctgcttttttccttttggtgccaactctaaacggttaattcattaataactagtgttgctctcggggtttttttttgggtcttggtctcgaatctcgggaaaattttcgttcttagcagcagcactgtttctgcaaaaataaatgaatttgagaaagaattgttgtatattatcaatttagtttttattttgtacatttcagcgcttagatgctatg

SEQ ID NO: 107090 - DNA, 75 bp, Heterodera glycines
ataaatttttaaaatgaaaaaaaaattgaattgccaaggttcaaaccaaccccgtgttggaggcttttggcaatg

SEQ ID NO: 107091 - DNA, 118 bp, Heterodera glycines
ttttccacttccgtttctttccttttcgcgtcaattttcatctttccctttagcgatcgtccagcgtctacagcagcagtgagcaggacccttcgtgtgatggacaagggggtaaatg

SEQ ID NO: 107092 - DNA, 858 bp, Heterodera glycines
taaggttagggtggtcatatccattgaagcaccatcaattacaacaacgcaagcagtaaaaattgagctcacttagaatccgcgtaaaattgagccaaaggttaaagtggaaactccaaagtccttctccaaaggcattcaatttaaaagagtaagaaatgaacaacaaatttacaaaattatgggaattaggaaaggcacaatcctgtctactacaattccatttataagtacaactcaagcaccaaaaattacaaagccaaccacagtaagttcagtaacggtaccaaccaaatcaagtcaaaaaattatgaccacagtggccacgacctcgacaatttcaccaataaaaactgtgactaacaaacaaacagatttattaaccaacctaattggcgcagaattgaacaaaacgcttatcagtaagccaacgtcgcttacaaacagcacggcaaaaaatgatcataatatttctgtcaattctataaatacttttccgaaaaaggaaaaggagggaaatttgacaaatacttttaaaaaggaattaattgaggtgcaaaaaacattgatgaatgtctcaagtgaaataaaaaacagtggcaatgaaaagccagctcctataaatgaggaaatggattttgaggacactgaaaattctggtgacaccgaggaaattcaaaatggggaatatttcttagaaaatgaaataaatgagataaacccaggacctagaaggggtctacgatattgagcaattcaatttttttgaaattgacagaaagaaaaggactacaatggttaccactgacgagcagatgggttaaaaatgtagagaaaagcaaaacacgcagtaaaatg

SEQ ID NO: 107093 - DNA, 87 bp, Heterodera glycines
  unsure (1)..(87): unsure at all n locations
ttttntgggcatttcaattaaatatttattttaatttaattaaaaattggaagaattaattaattcattaattaattactcaaaatg

SEQ ID NO: 107094 - DNA, 808 bp, Heterodera glycines
  unsure (1)..(808): unsure at all n locations
gaaggtttttataaacaaacaaattttaaatttactaataaaaattgtaaattttttttattagaaatgtgtaaaattttcaaaaatcaaaatttcgccaaaaacaacgggagatgnaatttttaaaatttttctgttttcgggataaattttaaaaaaattccattttaagcatatttattaattagatatgcataaataattaattaatcatttcgtaaataaaggctaatataatagaaaataaatttgtcaatatttattgtttcatacgtaaaaacttttaataaaataaaattataaacttttttcataggtcagccaatgggtgtcaatttatgctaaaaacaacacggatgaaaaagcaaaagcacaattaatcaacgttaaacaacacatatttaatggagaaaaagtaaggcgctcagcgaattggttttgtaattgatatgttttctttatgttataataaaaaaaaatacatttataaatatttattaagaataaaaaagaaataaaaatcaaaatttccagtaaaaatttgttaattttgggtttccatttttctataaatccaacgtattccatttcttttttttaaatgtgtgtaaactctggagatagttgttactatcaattaaaattaatggcacctaattgccagttggacttgtccgatccgccagcaaaaaactcatcaaaaaagttgacttctttaaataaacaaaagtcgacgacttcaagagaaaaaacggacgaaaagacgaagaaaattgaagaaggcttaaagaaagttggaaaaaaaatg

SEQ ID NO: 107095 - DNA, 232 bp, Heterodera glycines
  unsure (1)..(232): unsure at all n locations
acaaatttaatgaggagataaaagttancaggggcgggtggaggcgaggagtgcgtacctcgcacacttctggtgggtcctcccccgntcagaggcaagcaatcaattgttagttgacgattattgtacgtaactcgcgggtcatccactggtcactgcccaacaaatgccatcatccatttggttaaatatttgtacaattactattttatgcttcagaatccaaattatg

SEQ ID NO: 107096 - DNA, 854 bp, Heterodera glycines
aaattaatcgttaagttcgagctttgttaagagtgctaatttgtctggaatgggctcttcattccgtaattcaaatttcgcgccattcaaaatgagcatcatactgtactgctgctgtgcaagtgcagagaaaggcgcataaataccgacaaattccctcacaaaagcacttccccccattcattctgtttctgtttccaccacctgccttcgttcaagtagaaatgcgcgaaaatcttcgtcttatcgccccttttaaatcttcgaatccctattttcgcatttttatatatttcttaccaaaatgcaattaaaaatgcacccataaataccgacctcttgaaagcttttcgaaaatttggaaaaaagtatcaaaatttctttaaaatttttggagaaaaaacaaataaaaatttctttttaatattgacataaaatgtaaaaacaaatcgaaaatggaattttctataagaaaaactttttagtatttattcaaaaataaattaaatgcttttgtaattataaatgctgaatatgctatttacatcgcttataatttattttcattgaaaaaagtcaatttatatccctttttaccattttcgccccatttcaatttatgtaaaaattgtcattgcttttttaagcattttaaaagcccaattttttatttgaaaatgtttttccttcgggcttttatcatcattgccgccacatccacctttttttggtaaaaaccgaaaaagggggggggggctgtaaacaaatgttatggaaaaatttttactccagaaaattttttgcttttaagtttttgcgcggccaattcaaccgttgcaggcaccacaaccatg

SEQ ID NO: 107097 - DNA, 215 bp, Heterodera glycines
tttcgtcccgcgtcgtttcgtcccgcgtcgtttcgtcccgcgtcgtttcgtcctgcgtcgtttcgtcccgcgtcgtttcgccccccaagccaaaattagtcgtttcgtccccaaatttctttttatttataaaatatttagtttttaaagtgttaccactaaaattttttccgagtttagttaacacagcataaatttacgaatttagacgtatg

SEQ ID NO: 107098 - DNA, 859 bp, Heterodera glycines
atgtatgggttttacattaatcaaatgaattttctaattaataaatattattattatgaaaagtttgttaaaaaatattaaattgtgggcaaaaggccacaaaaatttgcacttcccggcagaaggggaagcagactctcccggcagaaggggggagtcttttaagcaaagcgaatttctgtccaaaagacagaaattcactgaatgtccaaagggacaaattaaaggaggaaattcctctcctttactgaagggacaatttgaaaggaggaaaatgcttctcctttccttttgtaagccttttctttgacccaacgggggtcaatggcttaatgatctgtatgaaagggctcctgagcgtcccttttacagatagagaaaagactaagactctttcttaatctttattcaaatattcacaattacaatttaatgcaaatgcttggacagaaaactgtccggctgacttaatcaaaaattgatcagagtcaagaaaatggagaatgggccgggcttttataccctcacaatcgatgggggcggggccaggcacgtgaagaaatgtgcacaagcaaagggaaaaaattccctcaaaaatgatgactcatagcgaaaatatggagaaaagaaaagatgagtcataattaaaggagcgagcgaagggagaaaattgatcgacgaaaaggatcaaaaataaaagaaatttcaaagaaatttgtgtcgctttggcgacataaatttattacttaattgattttaaaaagtaatcgctaaaagacatgaaaatgtcaaatgtctgatttgatggttttttgactaacgaacattgctcacttcgtcatcgcttttaatgaaaatg

SEQ ID NO: 107099 - DNA, 162 bp, Heterodera glycines
  unsure (1)..(162): unsure at all n locations
cctagtggggggagcgcttgctcgttttntatgatgtgtaacttttctctcattgtgcaggcaacgcttggcggcacaattgacgtgccaagcatatccaccaacaacgatggcaaaacacgggtgcacataccggccggcacgtcttcncatgcgcaaatg

SEQ ID NO: 107100 - DNA, 1003 bp, Heterodera glycines
  unsure (1)..(1003): unsure at all n locations
aatttaagcttttttctataataaattaatcanaatttaattattaataaaattatcaatgtcaaaacctctttatgcngaaaataattagaatctttatcgcccatatttaatatatttttttattttactntaattaataaaacaaattttgaaataaaacataacggttaagattatcagaagaaatatcttttaagaaaacagaaaaattacaagaaataaatttaaagcactcaatttatttaaccaggtaattgaatactataaaaaatgcatatttgaattaattaaacatagtctcattgcataattaatggctaatagtataaattataatatgtacgaaaaatgcaccaaatgacgaaatatagaataaacaaaaaatgcttaaatgtggcatgtaattagataatgaggactaaaaattctacgctctataattataactgccatcttatataataaagttgagtgtctgttgtgtgtgtccagtgtttgaatttgtgtggcgttttgtaattgttttgcgttaaaaatgtatttgaaaaatgaaatgtttggttttgctttttttcatttttgttttgtcagtttttgcaaaaagcacagttaaaataaatttctctttttttcgtttttaatgacaaaatagtttttgtatgtttattaatgataatgaaatcgcaattaatgctttctattgcatttcttaagagaaaaagtttttgtttttgttattatcaaaaagcgtttggaaatgaatgctcttaacacttttgtaaagaaaaagaaaatgtttttgtaaatgaattcctttttattgaattaaaattgatttgattagttatgaataaatttatgttagtattatttgtttttgattatggcaagctcaatggaaatgttattgtgtttgatattgcattgaaaaagttttgattcgagaatttgttttgaactttgaaatggaaattttgtttgtttgtaattaaagcggatg

SEQ ID NO: 107101 - DNA, 95 bp, Heterodera glycines
cagcagatgtgacctcgttcgtacgacactatggtgaagacctgcaagtgtacctgtcgaccattgcgacggctaaagcgcttgagcagccgatg

SEQ ID NO: 107102 - DNA, 231 bp, Heterodera glycines
gtatttttccgaaatttttggagtcgattcttagggatgtatttttcgtttttattgcatttttattaataaatttcaggcaaaacgccaaaatagtttaaaatagttttttttttgaatttttagggtttaggatcaaaaaataaaaaccttgaaaataggttctaaaaacttcgaaaagtagcttaacaaccacaaaaaaacatgtttttcgtgcttttcaggtcaatg

SEQ ID NO: 107103 - DNA, 251 bp, Heterodera glycines
tttttctggaatatctattaaatttaaaaattatttgaaaaataaaatggccacggcgcaccgcacttcgtttcatgttcgagagcgtttgttgcatagaaaatttctcaaaaaaatagatagccatttttctggaatgtttattgaccagccctagttgaaatttataaattcgacaaaaataatgggtatatgatgtattttcctttcttgtataataaatgacacaaaatttcagaaaaaaaaatatg

SEQ ID NO: 107104 - DNA, 178 bp, Heterodera glycines
ttcccgacgattggtcccccatcggtcgtcaattgctcgacattggggccggtgacggcgcagtgacggcgaaattcgcctcatttttcgcttccatttgtgttgttgaagcatccaaagttttcattcccagagggatcgggttgcttaagccccccccccttttgtacaggtgatg

SEQ ID NO: 107105 - DNA, 190 bp, Heterodera glycines
aagttgccgagaatcgtgttcattttggaactgtgaatgcaaacttccgactgcgagttgcatattctacagagtacacgctgtgcctgagtcgaaaattatatacgaattaatttcgtgtccaacgtgggagtatcgaatcaatgcgaaacttaaagccgaatccggaggaaactttaagggtgaaatg

SEQ ID NO: 107106 - DNA, 81 bp, Heterodera glycines
attcagttgcctagtggtattggagtcttgggctataaaataccgcctccttcacaatctgtggcggacgaatgcgaaatg

SEQ ID NO: 107107 - DNA, 1003 bp, Heterodera glycines
aaaaaatttttaaaatcaaaaattcttgtcaagaaaataaataaattatggagatgaattttgagacaaatttttcatttagtagcggtacattttcaaaaatcttatggtcgattcttaggggttgtatttttctgaaattttttgagtcgcttcttaggtgtatatttttcgttttatttcattttggttaataaattttgagcattttttattttttagatttttaggcactacaaaataaaaaacttagaaaatatgcaccaatagctcgaaaagtagcttaacaaccactagaaaaaaaaacttgtttttcttgcatttcaggttacaggtagctcaggaaaaaaaacaaagcaaaaacctaaaaaccgtatcccttactctttacatgcacttttttgtcgtgctgacgcgtttcttaaaatccgccatccatgcgcgcttctcaaatcagccaatgggttcgtgaaacaaaaaatgtgtaacccataaaaattaataactttgtttaaatttaaccaaatatatttcttggtagcattcattagctctatgtgttctctattataatattcaaacttataatttttcaaatagtataaaaaaagatcggatataaaaataattttggctcaattgcattttaaagattttaaaattttaaatgtttataaattataattataaatgcatgaccattgcaaaaaatatagcatgttcaatgctttataaatttttttatacttaagcaaaaaaatttttaaaattatattctgaaagaaaacaattaaagctattgaaaataccacgaattattaatttggttaaatttgagccaagctatgaatttatatacatatattacccatttttattttcaaacccattggcggatttaataaacgcaccagcaccctttttgctggtcttttctgccaaaaaacaactgttcagtcagccgtattgtttaccgtaatttttgcacagtcaacgcaacatg

SEQ ID NO: 107108 - DNA, 198 bp, Heterodera glycines
aatcattttgtccccccaaaaatgcttaatacacaatcatttaccaataaagatatttgtttcaaactaccgtttggcctaatcatttcgggcccctcctcatcggggaaaactgagtttttgttaaaatttattgcggactcggaccaattaatcacaccaaagcccgtctcaatgctctattgttttggtgaaatg

SEQ ID NO: 107109 - DNA, 385 bp, Heterodera glycines
  unsure (1)..(385): unsure at all n locations
ttgctctaataaggcnccggggggattattttcaacctcctcagaaagggggacataatgngagacagggcctntaatggagacggggggattattttcgacagatttttaatgactagggccgcgacttttagtaatgaaaaatctcggaataggtaggtaagttaataaaatactgaaaaaatagtgacattacgccaaaattttaattattttggcgaggagccttaaagtctgatttgtgtggcctcaaaatcgaaaattcaatgctgacatgcttttttgagctcctttatcaaaataaaagcaaaaaagttttttcactaaaatcacggctctattactgacgtaacattttagcacatttgttttcattttagcaatg

SEQ ID NO: 107110 - DNA, 370 bp, Heterodera glycines
gctttaaaagagggacgagagagtgcgtgagagggggagaaagataaattctttgcaaatttgggatttcctttttaaaaaactaattaaagaatttaaaacattatacagtgcctaaattcctttaaaaagcgtgggggaaaaagccggcaagaattctcaaaattttgaacccatcgcaaatttttctacgaaaaaataaaattcttgccattttttcagcgcccgactgtaaggctttagtgttcagccgtgaaaaaatagaagcattggacaacacatttgacgacgaattacaagtaaagaaaaaagggacatggatcatttggcgagattaaactcaatttcccaaacaattttagaactcatg

SEQ ID NO: 107111 - DNA, 349 bp, Heterodera glycines
gccggtcgggggaacgtagggggtcgggaccgatcggagagcgatgagtcgtgccggttttcgtccaggcaaatagaccaagttgggcacaattttaataagagtatgtttattgtgtcgacctcaaacttgggtaattaaaccgtcccaatcgggacggtgagggaaacgaaaaatgggggacaaacatgataatgtgaacgggaaaaagggggcacaaaaacggtgacagtaaataaatcacaaatggaaaaatgtggcaaaatcaaaaggggtcagaacggcgaaacggcgatgggaaaatgaagggcattcgggcaacggctggtccaaaaggggccacacaatg

SEQ ID NO: 107112 - DNA, 386 bp, Heterodera glycines
aatttcgcatttttttgaaatttatcacccagtgtttctataactaatctgccatcgactttccattctttttgttaacttacttacaaatttgccatacttttctttttttttaatttaacttagaatttcacaacatttgaattatcttgccttattttatcattttttctcctttattgctttaatctcttttcttttcatttttacatactttctatgcaattgtttaattaatattttaatgattgtgaataaaaatattttatattgaaggaatggtgggcaaagcaaacttttctctcttttaattaagtttaatagtcttttatttattaattttttgattattttaacctttaaatttggttttttggcgctttatg

SEQ ID NO: 107113 - DNA, 484 bp, Heterodera glycines
aatttgaagatgacccatcattatacgacaatcgcttgattatttgaatttcatatttatatttgataaattgccgttggtttaactcatttttttattgttttacgcctgctaattgaattaagaaactaattggcggggggggggggagaggaggggtgaagtttttcttggacaatttatttgatgttttagtggaagaagtgtctgtcggatgagtaaaaaagttgccgttaacaatattttgtttgacaaaaattcccccaaaatcggcagagtttgccaattttcaattcttttcactccaaacgaacgatcaaagccaatgtttgtgttccaaatgctttcctcggcttcttctgttgtgaagtgcttttcctccattctcattcatttgcttaagtgccgccattcattggcccaattctctttcgctaaacaattaaaaatctttccattaattatgccaatttccctcagaatg

SEQ ID NO: 107114 - DNA, 57 bp, Heterodera glycines
ttcaatggtggcgccgatacattggcattttctcaccttttggcggcaggcaaaatg

SEQ ID NO: 107115 - DNA, 110 bp, Heterodera glycines; identical to SEQ ID NO: 98226

SEQ ID NO: 107116 - DNA, 877 bp, Heterodera glycines
tagtgtccgtaataatttgcagagcagggtccttagattcaagtcgttttggggtactttcgggttttgtgtcaacaaaatttttctctttgttaaattgattttaaattaaaaagtcgtttccatgggttttcggggtcgtagaacccgaatatgatgtccgtttcgacccatttcgaactccgaacccggattcgaacaattatcaaaattcaattttttttttcattttttctcctaaaaattattatcatcgcaagaaatcatatttatattgccgttgtcgttctgcatgcccactttgtttgttctcgcattgataacgcaaaaaaatgacctgcaactcttgaccaaataaatgagggaaaagggtgtgggcgtaggtaggaagcaatttgctgataaggaaattagtcggcaatgaagtgggaaagcatttttgaaagaaaaaaaattgaattttgataattgttcgaatccgggttcggagttcgaaatgggtcgaaacggacatcatattcgggttcaattgcgagcgttcttcaaattttcaaaatttcttcaattcgttaaatttaagcattaaatatggtatgaaataaatttagaaaaaaaaattcaaaataaaactaatattaattttgaagaaatgagtagtagaaaaatgaaatttcccatttctggacttatttttctcataataaacggccttaaccaaaacaaacaaaaattgtaacacaaaaaattctatttttgagtttcttttacatatagcaaaaatgcagaaaaatgcaaataacgctcgagacatcaattggaaaacatcagttggaaatgccacctattttgttttgtcatttatagattaatttaaatg

SEQ ID NO: 107117 - DNA, 215 bp, Heterodera glycines
accgttgttcgctaaaaaccacattgatttttgggtggacggcggtgccgttaggcgacgtcgagaaaattttttggttttagcaatttgatcgggaccaggagaggatcccgggtccggaatttaatttattttacatttcttaaaatatggtcattatatattttttcttcttaaattgataattttttttatttttagcctcttggaaaatg

SEQ ID NO: 107118 - DNA, 289 bp, Heterodera glycines
ttatgctgggagattcgattcccactttgtcttgtctgaactaacgaagaaggaaatcgcgacggaactgatgatggcagatttgaaaatttatcagataaaggcgggacgagtgatttttcgtgacttttggatgctcagtcagaataaattggcggaccttccaaaaacgttgggattaaacattacggaaaaattgtattttccccacaaatacaataagaatgagaactttgggaggagattgcccaacctgccacctttggaagactattgcccggacaatatg

SEQ ID NO: 107119 - DNA, 500 bp, Heterodera glycines
aatgatgaacacgttggaaattaacaaaacattgacaagaaacaacgtgactcgccactactatcttggttgttttgcagcagatcaaatacccgccggtgtaattgtcaaatttcctcactgtatggtggttaatcttgaccccagcacatcacatggttctcattgggtgggcatatattgcgcttctcctttgcatttggagtattatgactcattggggttctggccaccgcccagtgtttacattgtggatcatttgtcacgctacaaacaaattcaatataattctcttccccttcagtctgtcaactcaagtgcgtgtggtcgacatgtcattttctttttgtattgtcgatgtgttggaatgacctttgaaaaaattgtcagctttttgcactttggaaagatgcaaccggataagctcgtaaacaactttgtaaaaagcataattttcaaagaatataaataatgtaaaaacgtcaaatttaaaaaaaatg

SEQ ID NO: 107120 - DNA, 456 bp, Heterodera glycines
atgccttttttggcgtttttttccgaaaaattccattaaaaaggcaataaattcgggaaaatgcacctctaagaaatgacccgaaattttttttagaaaccctaagaattgaaacattttctcaaaaattgatcgtcaaaatgaatttatttttttttcttgataaaaaattttaggtttaaaaattttccttattcgaaaaaaatttataaaatatttattaatcatttaaataaccaaaagtaagttttttaattaagttttatggttttggctccatgaaaatcataaataaaaaattttaattgccttttttcatgcctttttgggacttttgtacctttttcatgcctttttctttgcaatattttggtgcctattatatgcctttttcgcgatttttggtgcctttttttatcgttctctataaataaaatacaaatgattattcagatg

SEQ ID NO: 107121 - DNA, 108 bp, Heterodera glycines
ttagttgttttccctcttttcatccgctgccgcttacatccctctaattaggctaaatggggctaagtgactgactccgactgtctctttgtttttgtccctccaatg

SEQ ID NO: 107122 - DNA, 170 bp, Heterodera glycines
  unsure (1)..(170): unsure at all n locations
ctgaccaatttggccatatatcagttgctgtatgcattcttaccaatttntggggtattttaaattaattttaattttaaatttttcaaatttcttaaggcccccaattcgagcttggcaagttggttttatttctggcattctgttaaacgctgctgcgggatcaaatg

SEQ ID NO: 107123 - DNA, 51 bp, Heterodera glycines
ggttgttgttccctctgctgttttgggcttcacccccttcgtcaggtgatg

SEQ ID NO: 107124 - DNA, 73 bp, Heterodera glycines
tccccttttttctccatcatttttaccattttcccctttctaaagtaatttcgtcgcgtgttatctgcaaatg

SEQ ID NO: 107125 - DNA, 56 bp, Heterodera glycines
  unsure (1)..(56): unsure at all n locations
ctgcacgaccaaacaccgnaattttggccttcattctgcgcaccattggcccaatg

SEQ ID NO: 107126 - DNA, 114 bp, Heterodera glycines
cgttcatatatttcactattatatttttcctgtctctatttcttaacccatccaaaacttaatgtccccaaccaaacatcctgcaaggttaataaacaaaaattttcagacatg

SEQ ID NO: 107127 - DNA, 135 bp, Heterodera glycines
tcgtttattacatgttgatggcgcttaagttttgtttccatgttttaaaccgattttatgaatcaaaatgctaaatttctaactttcggctttttgttcgaattcgggtccggggtcggaattggcagaaaaatg

SEQ ID NO: 107128 - DNA, 305 bp, Heterodera glycines
caaatgatcaacaaaaaagagaaacaattaaaatttgaaacaattaaagaaaagttgaaggaaaaaggaaaattacaaaacaaagataggacaaaaattgtgtggaaaattggaaaattattaggcacatgactacatctaatacagaaatggaaaaatgaattaaatttaaataaaaacaaaatgaaaaagattattacgaggacaaaaagaaagaatttgttcaacgatttgacgaacttaagtgtttatatggccaaggcaaacagaaagaatttcagaaggaattgggcatttctgcaatg

SEQ ID NO: 107129 - DNA, 445 bp, Heterodera glycines
aaaaaattgttcgaattcgggttcgggatgcgaaataggtcaaaatggatgttcggcacacatccgaccaatttctgtcctaaacaggcactcacgcgaaaacgtctttataaaaatgttgaagacagacgtggcacttaaaagtgggaaaaagggagacaaatactgcgcaacattaaatcaatctcaccaataaaatatcaaaatgtccaacaaaacaggaaacatattattttttaaccaaatcacgtgcatttcatttgattttcgttgttagcaaatgaagaataagcttctcccagcacttccttccgcttgtttcgtttttaaatgctgcaataaaattaattattaatgtattctttttcaaataattcattcattttaattcattaaaaatatatatatatttgttatgcgttttattgaagaatttaaattaatg

SEQ ID NO: 107130 - DNA, 932 bp, Heterodera glycines
aaagagaaaaattaatcatagacatataaaataagtgagcgaaacacgtaaaaaaacatagaacatatattagtgcaacaaagcggacgtgtgtaaaacatgaagtaatattgttaaactaataaaaataaagtacattggaaagcagaaaaacacgtaaaaataggacaaccaaacacgtaaaagaagtcagaaaaacacaaataaacatagaaatataatataattgttatgcatactcatgaaaacaaggaaaaagagaaaaaatatatgtgagcgaataaaaacaaaacacgtgaacatagatataccgcgtgctggcgcgtttcttaaaaactgccacccatgcgcgtttcttaaaactgccagcgcgtttcttaaaactgccagcgcgtttcttaaaactgccacccatgcgcgtttcttaaaactgccagcgcgtttcttaaaactgccaaaaaagatactaacatattatttcctattttttaatttaaatataaataaataatttatgatttcgtgctaatcgataatataaattaaattttttgtttaagttaatacgtaacagacgtgactttcatatgttagctaaaattatggaaaattgtttgccagccttaaattatagccaactacaaaatatttgccaacattaattatatatttataaaattgaaaacgtatatacaaccattataaaaaatatattaacaattttttaagaaattctgaagaagagatattttcaagtgaaagcactgaaaacagcatttctagccaagaaactcaagggggtttaatttacttaaaaggaaatataaaatataactaataaataaatattaaattttaaaaccaaaataaattttaaaatcaaaatattaaaaattaatgaactcataatagttcaacatgttgctaccatg

SEQ ID NO: 107131 - DNA, 399 bp, Heterodera glycines
atttcagtgagtttggccaatggtggtgttgattggtgactgctatgtattttttttaaataattttatttaaaaaaatgttatggcatggcaccttccgcccacatatttccctttaaattttgccctttttctcccctttccgaacacgttgtccttggtgataagtcgaattctgaattcaacgacttcatccgttgtgatgctctaaatgtcatttcatttgcatatttttagatacgccacgtgccgtccttgcaccatcattttcgcgagtcgtaaagagtaattaatttgcatattagtcatttacagggttcattttctgaatagttataaatgcattcagaatctgttagaaatccttgtgactccaccaacactttttggcctcggatg

SEQ ID NO: 107132 - DNA, 138 bp, Heterodera glycines
cgggcggaagtcgggtaggaggggtccaacagtccgggtgttcgcaactcacagattatttccccactcccgggaaattgacccgttggaccttgaaaaaaatcgaaaatttaatgtattataaaaatgtttaggatg

SEQ ID NO: 107133 - DNA, 1003 bp, Heterodera glycines
acctataacaatataatttaaataatattacaattaataattaattacaaaaataaaagttcgtgctcatcctttaattttctacgtatccttacatcttttacctacttacccttttttgcttttgcttttcctctttgctcactatttaatccaatttcaccacttaattttaatataaatccctcaattttaaaaatataaaaaaaaactccaataaacttaattaaatcataaaatttttataaaaactttacttcataaaatttaaaaaaaactttcctttattcatatatccatattttacccaatcaatcaataaaaactataaatatgaagcgtgcctccaaagcccaatcttcatctccctcccccaaaaaatctcaaaccaataaatgcattcgtaaaattgaccaatttacttccaaaagtcttaaacatcattttatccgttccaaatctaaatttgttattgatcaaattgaaaaatgtgcagatccacaggctgaattccgttcatgcgtgcacaaggcggtcgaggaggctattcaagacgcacagaacacacttggcgctgcaaataaggtaggtgtcataatttcttcggaacttttagaccagggagacatcatcctaccaattacgccaattacgtcaaacgtcgtggacgccgttttcaaccagttttgtaaagtggagcaaagcaaaagcaaatacgtcaatttttacggggccccatttgttataaccgtcactgtcctgaacactgatggtctaccccgtcgacgaacgaccaaaggaagtgcccctccaatcttctcttcccaatcacacatcttcaaaattaacaacaatgacaactattgccttttttatgccctggaactgatgcgctactattctctctacaaaagagggattatcacggaaaaccgatggagatggatgaacaataaccaaactactgttcttcgtcaaaaagtactacttttactccgcgatg

SEQ ID NO: 107134 - DNA, 119 bp, Heterodera glycines
aaaataaataaaattattaatttacactgattaatttttttgagccttttccaagaataaaaaaaaattattttttatttttggtttttatagggaacattaattgttcactttagatg

SEQ ID NO: 107135 - DNA, 560 bp, Heterodera glycines
aacagtgggaaaaagagagagagagatatgaattcagcacaaatagatgtgctactaaggagaatgcgtgttacaagtgggaagttcatcggcgtttacgcatcaaacaaaataccaattgtacttgagagacagaaacgactgcggcgctacccccactgcatggtcgtaaacacagacagggagggaacacgcggagaacattgggtagcgtgctatgtgccctgtgcgaagcgaattgaatactttgacagcctaggtgcggcaccaaatccagatttgtctgcttatctcaaccattttcaacatgtgcaggtcaacacgcatcaaattcagttcccctcatctgatgcttgtggccacttttgtgtctatttcttggccagccgatgttccggcaccccgttttgcaatgtaattgaaacgctgcgcaaaacacgtgggatggcagactggttggtcaaatggtatgtacgtacactggcgcgccatgtataaaaggccgaccaaaagtggggagggtgccacattgtttctttcattgtgagaacagaaggatg

SEQ ID NO: 107136 - DNA, 86 bp, Heterodera glycines
agtgagtgagtgccctggcttttgaccaaccccaaaaagggtgtgcgttcggcacaaaaagaccggcattttgtcatgaaatcatg

SEQ ID NO: 107137 - DNA, 604 bp, Heterodera glycines
atattcaattcctaactttacaaaacatttagcacgaaaatggtttgtgcaaaatgtgccaaaaaagtggaacacatcgatgagctttgttactgcatggaagcggcaaataaatgccaccaccgtaattggtaaaaagacaatgaataaaaaaattgttttatttttggcttaattcacttaattgtttcggattgatttcggacttttcatgcaaaaatttaaatgagtaaaatgaaatattaagaaatatatccataaacagttttttttaaaatatgttatcgtttcaaagatttattgtgaatttgtctctattattttagctgttcgagccgcaacaatcgtgctctgacctactactgattttgattggatgagaagaaaaaagcgattttaggcccccttcaaattgaattttcatacaactaaatttgtaaaacaattttttggttttatttttgggttttttaaaatttaaaaattcaaaaaaaaacaattttgaatacaaggttaaaattgccttttattcataatttttataatttattatatttatattatgatttcacttctaaaataagaaaaaaaatcgacaaaaatg

SEQ ID NO: 107138 - DNA, 88 bp, Heterodera glycines
atgcagtcaacaccgattgggaaatagcagcagcagcagtagaagcaaaatcagttcatcgagaaaaagcattacaaatgccagcatg

SEQ ID NO: 107139 - DNA, 317 bp, Heterodera glycines
  unsure (1)..(317): unsure at all n locations
attgggacttcggatacactaaaggatgcnttcataaggtttttatcgttggggtacgaatgaaaatatcaanaatttagcttgactgctgtnggtgtangctcaaaatttcgcgcaaaaaatttactctagctatcaaaaaattcnatggggcccacacttcggaacgcatctctgaaatcctaaaagctcttctcgaaagttggaatgtaaaagaatgccattgtttgtgaccgatttcggcagcaaatttagttaaggttagtttattgaacattttatttcaaatacattttttggaggcattggatttaatg

SEQ ID NO: 107140 - DNA, 177 bp, Heterodera glycines
cgtccgtttccctttcagctcacttccctcgccaccacctccgactcgggccttttgacgcgttcgccgtcctccgcctccaccatttccggcattcagcagcagcaaaataatgccatcagtgcacaacgaacggaagaaacggaacgacgagcggcggcacatgaaagggaaatg

SEQ ID NO: 107141 - DNA, 358 bp, Heterodera glycines
ggtatgttttttgtttttttgctgattgtgagattattatttctcgttgatttttttaaaactaggggtggaatcttttttcggtatttttttgtcgccggatttccacgcaccctagcaatttttatgccaaagtttctagcaaaagatttgcaatttttattttgtttttcaaaaattaatttcccggctgcgcgtatgctaccggaagtcagcattccgacactttttctgacttgaggaaccacccttgtcatacaaccactctccctggtcatacacataaatgccaattttgaaacttaaaatttatttaaaaaaacaatttcattcaaaatttttaggctgatgacgaatg

SEQ ID NO: 107142 - DNA, 450 bp, Heterodera glycines
atcagtgatcagaaaagtcgagattgaatgagaaaagaaaatcaatcattgagaattatccgatcagattttagatgcgacaacacccttatttttgatcgatgcttttatccagttaaccatcaatcagtttgacaagtatttatgataaaaaccccgttccaatgacaaataattgtcaacaaaattttaacggcggtctgttaaaatcctccggccgctaatggtggtccgctttctatatcccactaacggcggtccgctaatggcaatcgctaatgtccctgtcccactaatggcgctgcgctaacttttccataccgacaaaatctttcgtcctcaaagtttgtctggccggcaccaattgaatgaacatgccacataactaacacaaaccaaacacacacatatagtagcaaagcggtgtaacaacaaaacactataacaatg

SEQ ID NO: 107143 - DNA, 159 bp, Heterodera glycines
atattttcttggagattcatgcgtttttagacgttggacggttcagtcctaattgtaagccattttgccaattcagtcccgggtctgtaactctagggaattgtttccgccaaaaaattctttcggattcgttagttacagaccaagaggaatcgaatg

SEQ ID NO: 107144 - DNA, 247 bp, Heterodera glycines
ttattattatgtcaaatccttaagaaaattatttaaataaagttcaactttaaaactttttagatgaccataggaacaatgagataaaaacaacaattaagaaaaccaaagttattggatttttccaccttcttaattagggcaaaaaatttaaagatttgaatttaaaaaagcccaaacagtatgacaattataaataaataaagaaaacattttttatttaaatcaaaaacaaaaatacaaaatg

SEQ ID NO: 107145 - DNA, 1003 bp, Heterodera glycines
ccaagaaaatcttggtaaaacttggcctacttagtacggaacgggccaactccgtctggccaactccgtctgagccaactttgagtcaatataactcttgaagtttttgaccgaatcaaacaatcttgatatcattcgaaagctcttcacaggctctattagcctactaaaaattacagaaaatttcgaactataaaaaaaatagaaataaaaaactttgaaaattctgccttttttgcggttttaaactgacaacttttttgagagctgattaatcactgagaaatagcttataaatatcttctaaacatctagggctttcgaatgataccatgattgtgaagtttggccaacaaagaaaaaagttatagctttttgaacattgctgagacggagttgacccctaccgtgaaaaaaagtcctttttgatgaatagttttcttcttttgttagttgtagcttgtgttttttttcttttttttaaaaaaaattaaggtaggggtcgccggcgaaggggaaaagagggaaatttctgaaaaattttgctattttttaacaaaattcattaaaaattctgaaaattttttccgacagcgcttaccggtaccgcatgccccaaaacttctaattcttaaatattggctaaaaccataaaatttagtcatttttattctgggaagggtttacaaatgtgcccgattaatcagcatgggattggaaaaagtgatgattatattacagagttcccaagtgtccttatttctaagatttgtccttatttggaggggccggatcttagaaaatgaaaatgtccttatttctaagatttatcttatttttgactcgacgtgcatatttcgttcttattttggatttgcaaataaaaatctacaaaattgaataactttacttatttttttattgaagcgaatatttttaattaattcgattttcaaataaattatattttacttcgttttcttgagtgtgaatgcccaagatg

SEQ ID NO: 107146 - DNA, 52 bp, Heterodera glycines
tctgaagaaaaagaaaatgaaattcaaacaaatattcttaattgcaggaatg

SEQ ID NO: 107147 - DNA, 165 bp, Heterodera glycines
ttttaacccctttaaaaattaacccattttgcatatcaaaaagaaattttttggaatatgaaaaaaaaagtatttgaattttccctggatcaggaaggaaattcgctctatatgagaaaaataggcgattaaaccataaagcattgaataactcttcagcaaatg

SEQ ID NO: 107148 - DNA, 1003 bp, Heterodera glycines
gacaataaaaaaggaaaaaaaattgaaaaatttgaaaaaaaaaaaaatggggatacaaagtaaattagtacctattgtttgaggatttttgacatcccttcccgtcgatttctcgaacccttgacccaattttgggtccacaacaaaagtttaacatggaaaaattgcccaaaatacaacagcaaactccaaattaatcattccttctgttttagaccaaacgggccaaagactttttggcctatgcccattatatggccgaccaaattggcaccatcggggaacggcggcgtcagctcaaatttttgcatcgctacgaccaaattgagcggccactgaagcgcaaatgtgcattcattcatcgaatctgttctcatcgctgcaaggtttttgattttttttaaatttagaaatttttcatagattttttcaaatttgaaaaaaaattttcaaaacactttttggccaatcccgaaaaaaccctttcggattggtttgaggaaacaaaaattgaattcctttaggttttgattcaagaatcggacaacattccaccaactcgtttttggccaattcattttttaccctactcgttttttgtctataaatttatgtagaagtgcagacagcgacaagttcgacagttcatatactcataacacgtaaaaaacgagttggtttcttttttaccaaaaaagcatgtttttccctttttattccattttttcgttgtgtcaaacaattcatttttcctttaagaaaatcgtttattaccgtgaagaaattgcttttctgcgccatgccaacatgttcaagcagtgcagccaggcgtacactcggctgttgaatgtatgaagattatttgcaccaaatcgttaaaaaaattttcttttattgaaatttcttataaaaatttcgatttttgaaatttgtctgagaaaaattttcaatgacattttaattttttgtattatatgatacctatttcgttaacaggtgcatg

SEQ ID NO: 107149 - DNA, 585 bp, Heterodera glycines
ataattctcagaatgacacaattatgtgtgattttaaatcatttattttctgcaaaaattgatgggaaagctcttaataaaaactcgtttctcgaataaattttaaaattagtattttcatggtcgctgatcactaatataatgacatttattttgacactgattttatttgatcataaatttgacataattacatatcattaaacgtaataaaatataaatcattaaacgtatcagttatggcaataaattgcataaaatctgttcaaattcatttccatttggttgaatctttgatcagattacataagatgagaaaaaattgttaatttgtgataagagacttaaaaccccgcttaattattgttagctcatattaattacttccaatattcgctgagaaaagaaaatataataataaattgaattattattaaaatgttgtatcgtattgatgatagatgactaaatgtggttaatattgattgaagaaaaattaagccatgctataaaattaataattacaaaattcattgcgaaaaatatttttataaaaataattcattatatttttacaaaaaaatg

SEQ ID NO: 107150 - DNA, 80 bp, Heterodera glycines
cctaacccgacaattcgaactataagcaattaatttaactttattaacagattgtaaaatcgctgcaagagaaagggatg

SEQ ID NO: 107151 - DNA, 65 bp, Heterodera glycines
cctgaccattgaatgttcaaattaattccaatttccataaaatttccagggcaggtgggagaatg

SEQ ID NO: 107152 - DNA, 976 bp, Heterodera glycines
ttttgcgactgaaaacgagcaaaacgaacaattgtttatggacgaaaacgaaaatatcatttcaaagcttgacttaacagaacctgatgcttcatttttgcgttattaccaattcaataagggtgatcaaaatgcaaagtgccgtatttgttgaagtcaaatatcacgcaaaggaggaaacaccacaggaattaagcatttgaagcaacataaaaagtctttaatttatttttcatttctaactacttgttaagttatcactagagaccggcggatcgggactcccgcgggattttacgggagtcccgctcccgactgtaaaaatgcactagtaagaattgaatttttttggaaaaatgaataatttttgatcgaaaacttaaatatctagcaaaaatctcaaaaaaaaattacggcggcgcctatcggcaccgccgggccttaaaaatccttaattttcttaaaaaattggctcaaatttggcaaaaatttgtcatttttgaataatttattaacacattgaactcaatgcggataaaatttcgttgaaattaattcaattttccatagtaaatcatgaaaatgaatatattttaaaatatttttgcaaaataccgaagaaaacaaaaattatacgaaaatcattaggtcattttttagacaaaatatgttaacaaaagaaaacgttttttaaaaacaaaaaaagtcgtcgagttgctaaaaaatctgtaaaatttgccacagggcttgaaccctagaataaattataaaaaatttatttgaagcaatttcaaaacatttgcttctgtattcgataaggaattttcgtccaagctgccgcaaaacaaatgaatattgagcatttccatccgaaagaaaaatggcacaattcacactcgaaatacaaaaaaattgactcactaattttgcttttcatttgcctttcgtgtgagccattccgggaaaaaacggaatg

SEQ ID NO: 107153 - DNA, 477 bp, Heterodera glycines
ggcactggtgtcatataaaacaaaattaggctttgcccgttactgtccaatgacaacaatcaatggacagatgcaaatggtcttggtcatccgtccgttcttcattcacctcgattccattcatcctttcctttctcccctctcagctttgcgacaatccctcctcccactcccccccccccctttttttttgtttatgagtagagtgaggatttttattattttaccactattttcgcatttttctgtcactatttagttaattattttgggattttttgccgctaaaaatcctcaccctatttatgagttagaatcttcgggaagaattttcagaattcagagacactaacgaataaattccctccccatttgcgggtttcaaccctatcaaaattttgggccaatggacagctttatttttgcgatttcagttaatccataaataattcaattgccatcgcaacttatcatatg

SEQ ID NO: 107154 - DNA, 126 bp, Heterodera glycines
ggtatggaaacggcagtatggaaatgggtcgagctaagaatttttccgaaaatcatgaaatacttaggcgcctaggtattattttctttgactcgccttgctttgcttattttatttcttcatatg

SEQ ID NO: 107155 - DNA, 67 bp, Heterodera glycines
atttttacaaatcgaacagggattgcgcaacagtttcattggcgggtcacttgggataaaagtcatg

SEQ ID NO: 107156 - DNA, 528 bp, Heterodera glycines
tgtttaatgactctctcctgatcactcgttgttctttcttcccctcgctctcttctcttcccgttctcttttcatttgtcctccgtcgatctgtgcgcaaaaataaatcagtgaaaattcttccgccaaaatcgatcagagcgaaggacggacggacggacgtggtcagttcagtcagtcagcaacaaccatttgcacatttattatgacgaactctgtcccttccttttgcctctttatgggcgccgaaaattttaaattttaggaattaaatcaaaaatttttgcctaattattaattgctttttaaatttgggttggattcgatgcgataaatgatgaacctcttcgttgcttccaaacggatgagagagtctttaaatgagtctctaaggcttttttaaaatattcttttatttttttcgattttttaccaacaaattttatcggggaaccgcgattttcctctccccgaaggtcggggagcaatattgtttttaattatttttagcttttttcgttaattatg

SEQ ID NO: 107157 - DNA, 197 bp, Heterodera glycines
acaaatcgccctcaatgaggtgagtgatcagagcaattcaattgcttttttactgtcaaaagtaattaattaacatgctttttttggctgcaattgcttagtgtcttcggcgcgaaaaattgaaaaatttaccgtatcctaagactcatgaataaataccatagtcccttgccaatctcaaggttttcgatgccatg

SEQ ID NO: 107158 - DNA, 70 bp, Heterodera glycines
tttattttttttttggtcatggaaagatatatggatttcggtaaatatcttcccacaaactcacaaaatg

SEQ ID NO: 107159 - DNA, 499 bp, Heterodera glycines
tttttcgctgaaacatcacctgattcccatggcaaacacgatagccaaggaatttttttgatggtacttttctctcaaaagcaaaatgtgctctttgtacatttactctgtccgttgtgagaaaaagaggaatccgaggtttaaacattctgtaaataaaatcataaacgaaaggaaataaggacaagttatgaaaatgatgtgataaaaagccttttaatcaaagcgagtcaatttgggctcccaattaggtaagtttattttttattcagttagtatctgaacgccaaatttgccacaatttaaaaaagatttgtgattcccttgtcaaatgcaagagccggtctcgagttgaaaaataacaaacaaaacttctctagaagagatcaaaatatgagcctatgcaaaatttcaagaaaatctgacctcaggaacggatggcgtttttagaattttatttttaaaatgcatttattttgtttttagcgcaattaaaatg

SEQ ID NO: 107160 - DNA, 52 bp, Heterodera glycines
  unsure (1)..(52): unsure at all n locations
cgtnaagcaaaggaaaagacagcagggggaggaaacaaacaaataaaaaatg

SEQ ID NO: 107161 - DNA, 90 bp, Heterodera glycines
ggtgggaacgtcactcactccccctttgggatcgaccatcttttgaacgcacatttgaacaattaaaattgcaggaatgccatacgtatg

SEQ ID NO: 107162 - DNA, 783 bp, Heterodera glycines
ctttttaaacaggccaaaaagtttaggcttaacttttttttcagaaactgatcagaagcgccccaaactttgcagggatactgaaaggaaaagaattaacctgttttatcacattagcttgtcatcagtttttataaaaaattttcaaaattctgagtctcctattattttatttttttttcaaaattttgaagggcgggggggggggcgggatcatcatttgatgcaattcttgtttatctgctttttgagtgtgtcgtgtgcccccgggtaatgatgatagatgtgaagaaaagtaggaccaaatttcatttcatttacaatttatattaaataatacttttaaaatatttttatgggtatggaatattagtgttttatttttataaagccagaaaatttttggaaatttgataacagagttccgaaattttttaagaaaatgtttgggttcaacgtctaaaatatttgttgcacgtaattccgacttccaaaattttttattgcctcgcaacttcttcccttataaatactacattaatatttaaaattatataaataaatgcctggtaaatttgtttaaaaaaatatatttttttttctatttttctgcttttattattatggccctatcacccctctaccacccccccccccgccaacactcgaaaacaagtccctagtaacctgggcctggaaatttttatgattttaaaagaaaaccataatataaccaccaaaaattttttttacctaactatccagtgggtttcaggttttatg

SEQ ID NO: 107163 - DNA, 90 bp, Heterodera glycines
  unsure (1)..(90): unsure at all n locations
actatttcgtttcaaattgaatcattttttttggctttttgaaataaatntgtgaaaaatatacgaaaattattttagcttttaattatg

SEQ ID NO: 107164 - DNA, 1003 bp, Heterodera glycines
atgatgttttaataggtgtaacattttctgcgacttggttttttaaatgcttccctttcattttgagtaaattttaattcttaactcaagcttagtgtgagagaagcaaagttttttggtgaaacaaagaaatatcgatttagaataacggttattgcgcacacatatatcatcattttgacaaaaattgcctaacattataaaaaaaattaagtttcgaagcgaaagttaaaaaaacaataagtgtgaagaaacggcagacactgtatgagttagacactattaatagttaatggtgaacaatacgccaatgaaaaaacagacagctgagttagacactatatctctatgggtcaagcccagtgttagacaaaattgctcatattcaaatggatggaacggcaatacaaatgcgttggagacgaaaggcggtcagttaatggccattccatccatttgaatcgattttggaagataaatgtgaattttgttaaaaaattaaattttgactttttgttcgaattcgggtccggggttcgaaattggtcgaaatgaatgtcatattcgtgatcagcgaccccgaaaaccacaggaaagacgttttgatgaatttcaaaaaaaaaaaattatttttgaaaaaggggggggacaaaccctactattacctgagttttttattattcggatgggccctaaggttaggcaaggggtaatataaaggttatattcgtattcagcgacccgaaaacactaaaaaattttgtttttataaattttgaaaaattttggacatttcgtgggtttttactctattggaggacatttcgtggcttggacatttcgtggcctggacattttgtgggtcagcgcaaaattcaaggcaaaataatttttaaaaatttccacaacgaaaacaccaaagaaaaataataaacaatttcaaaatcgcagaacagaaaaacaaacgctcataatcactattccataaattcgacccaaaatg

SEQ ID NO: 107165 - DNA, 141 bp, Heterodera glycines
gaatttaattttgaaaaaaattattttttaaattccgtatagattaaaaggccactcatttttgactgttttttttaccatgctaattgtacatattgctagcattgttttgcttccttcctttaggcaatcaaacggatg

SEQ ID NO: 107166 - DNA, 134 bp, Heterodera glycines
tctaaaataattgacgggtaaaaaatagactttcaggatgtatgtgcaggaattggccactgaactttaacctaatcccggattaacgcaaaattaatgacgaaccccaaagccgaataagccggttgggaatg

SEQ ID NO: 107167 - DNA, 879 bp, Heterodera glycines
ttataaatttaactcattccaaattgtttcttccatttcataattacgtaatggctaactccaattttcttgcaaatttcggcataattttgtcgccattctttggttgaatatttttttcctttttgtttatattcatttgccatttcaatgaatttttttacaatttcaattttttctttatcagttttggattttttgcttttattaatttgtttattaagtcctaattctttaatccatttataaattttcattcgatttgtccccaatttttttgctaatttttctttcaattttattccattcatttgttgaatattttcttcctttttgctttattttttcttttattttataaaattttgcaattttttcttccaatttttcttcttctttttcttcccaattttctccaaatatttcgtcaaatgacttttgctgtaactttttcttttctgattcaattttgacaattattaaaaatataattaaaaataataaagggaataatttcatttttgtcgtcttaaaatgattttattttttcttcaattaaatgccaattcattttttgaggcatttaaatgatttttttctgattaaaaaactgaataaatcattattttactcaataaaataaggaaatcctgtttaatttcaaagaaataatgataataattttatcttaatgacaaaataattgccaattggtaaattaatgcctccatttttgataaaaaataacaatgaaagaataatttcattaattctcaaaaatgtattttattttttattcatagggaaatataaaacttctagtgtttttatacatgaaataaagaaaaaattgaaattgtaaaaaaattcattgaaatg

SEQ ID NO: 107168 - DNA, 549 bp, Heterodera glycines
  unsure (1)..(549): unsure at all n locations
atgttaaagcaattttcgattcaattggccaaagtggcgatttggagtgccaaacaatcgacaatttgtttgnatgaataattcatggagggggagcttcgacagtgtttctctcctcgcaacccccgcatttttccaattccgtaaattttcagtggcaaaaagtggacaaaaaaaaaaaccaaagaatattttccttagataatttaattttatttaatattcgaatttctcttctcaattggtgcaccgatggaatttattgaaaaggacgacgaacagagccttcttcggtcagttcagaaaaagaatatcccctcaataaataattggcgaaagccccccaaggatttcatttgctttttaatggcaattaatggtaaaaaaggaaaaggctctttccgtactcttctaatgaccccacggggactctttaattggaggatttttgaactgctgaaagttcgtttgacaatttacaatgaaacaaaaaacaaagagagaattgagtctaaagattgtctctaaaccaaaacgctattggacatg

SEQ ID NO: 107169 - DNA, 141 bp, Heterodera glycines
tcttatcactggttttgttcattataaattttacaaattatcaatttttcatttcactcttttcccatattcccaggtcattgactcgtccgatgtcgtcatcgaagttttggatgcccgcgatccgatgggtacgcgatg

SEQ ID NO: 107170 - DNA, 190 bp, Heterodera glycines
ggtaattttaaaaaaaaatcgagggtgggggggggctcgaaaaattttggcactttttacggatgggccctcccctgacaaatattgaatttttatgaaaagcggaaaaaatttcgagcctaaaaggtccctatttggggttgggttttcgggggcctaagcatccgggagaacacacccgtaaaaaatg

SEQ ID NO: 107171 - DNA, 263 bp, Heterodera glycines
ataaaattaatggaatttttcggtgaaaatatttaccaaaagttttatttatggatattacgtgaaatcgaagaaagactattaaaaaaaaattaaaaccctcactgttttatcatatcattaagttagtattcgttttcgtttctcaatttttttttaatttaaaaaaattctctgtgtttttttattttttttgggctttctctcggttctctcaaccccttaaacgctgctctatttttaatattttcagcatttggatg

SEQ ID NO: 107172 - DNA, 94 bp, Heterodera glycines
aagtctgatcattaatcagaattcggtgcgttcaggggtagtccgtcgtcatatcaatgaacagttgcgcagcggccaactcagtcttgaaatg

SEQ ID NO: 107173 - DNA, 995 bp, Heterodera glycines
aatttgttaactcaaatatcaaacaaaaaagcatcgctttcgtcctcacacaaatcgatcttttaaatttccataatattcggctgttaaaagtccgggttaatttcaaaattttttgtcccgttaagcaatgaaaatcaaaactaattttattagccgtttctttggtttaccgtacttactaattagtaccccccggggcttctatttttcaacccccctcgagggggctattctaatttagggggggggggggggttactaattcagtaaatacggtatattgattatgaacatttcaccgcaacatgtagaaaccgtaattttgaaaaatactgactcggaccaggttctgaatatccgagttcgctggcaccggcctggcttagaacaaagcccggcgggcatatttcaacttcgagaaacaaattccgacaaagtcaattaaaaatggaatgagtttttcaaacttgttctgattttcacatttgtcctgagaaaaggaataaaatgacgattttttttgttattataattaatgtaaaatatttctgttttggatgaaaaatttgttaataaatgtcctgattttttatgtttgtactgacttttttataatcgatccaagcaataaattctcatttcttcatttaataaataattcataaagataaaatttcctttttttgaattgtaaattattagaatttattttatttttattgaaaatatgtttattattttcgaatgagctccagtagaaagtaataaaatttatttaatcattaatttaccaattggcaattattttgtcattaagataaaattattattattatttctttgaaattaaacaggatttccttattttattaagtaaaataatgatttattcagttttttaatcagaaaaaaaatcatttaaatgcctcaaaaaatgaattgcatttaattgaagaaaaataaaataaaatcatttccagacgacaaaaatg

SEQ ID NO: 107174 - DNA, 539 bp, Heterodera glycines
  unsure (1)..(539): unsure at all n locations
gctgctgctgcttcttttttctgcttggcttacactataatttttgttttcattcgaaattaaataaaattgtaacaattttatcattttcncaataagccaccgttttagtgccaatttctgctgatggcacttccttgtgctcggctttgtgcccttttctcagttttggtcgtcacttggaatggtttcgtttcctttttaatgactttttctttcctttttctctctctctttttaaataattttaatttgattttaatttaattaatgtttttgaattcacttcagtttcccgtgcgtttattgtcgcgcgcgttgcgaaaaaggaagtgccggccgagtgccgaattctgaaccacgagacggtgtccgatcaaacggtgcccgacacgataaccgtcaacgagatacggtattgggtgtacggtcaaattcagcacggagccaccagcaaggcaagtcgcggactctgcaacgcacctttggcattatgtattttcacacttttgaaggtgttccatggggtcgaaagaatg

SEQ ID NO: 107175 - DNA, 115 bp, Heterodera glycines
aataccccacactgctttgtttttatgtgcattcatcatcatcattcattcaataaaacatggctaataagtttttacttgtcccacaagaatttacaggggtttgacctcaatg

SEQ ID NO: 107176 - DNA, 1003 bp, Heterodera glycines
cagattgccgacctgtgtattgtcaaatgacggattgtccatctacaatttgccactgacggactgtccaatgatggattttgttgcactgacgaattaaaccgtcacaacgaattgaagcaatgaaataattttataaaatttattttataataattcaatatatatttttttttaatttttaataaatcgatgtatattttacatatgaatatattcatattattgatgtgccacctttttcaaaacatttccggtatctatctctgcccatcatccgcatttttcttcatattgaaagaattattctatatgcctctctctttttttaattatatttttaattggtggcaaattttggcggcgtatgccacgcaaatggcaaaatggcatttatgagtgtatatgtatttgtatgtatatatatatggggaaaatatgcacctatagggcaaatataatagtaaatagcaacatttcagtaatcgagaaaatgcattaaagtgagaatttttatttattaaattaagaattcatctcgagtcccaaattggtttatgccctatcccctaattcccaaaactcatttataaaactactcaactaactttgatagctttgacccgaattcaacagaaattttggctatcccaaccagaatttcgtcatgccaatccaactcccccctgaattctcgacttcgacattaggccccgaattttatagccttgaattttatgatctaatgctaacccgaccactatggcctgacggagtcaccaactctttcaataaatccaacctcaacgtgaaatcccaaaccaattttttttaaattttttgtcctctgacaatttggccccggatgggtcgcaattagagaccggaattttcaaattttcagctccagctctgggattggaactcaaaattttttaataatatattatttataataattattattgacaaattttattaatattgagttttagaaaaaatg

SEQ ID NO: 107177 - DNA, 134 bp, Heterodera glycines
aaaagaacagcactgattgtgagcagatgacccaccaccgcaggcatctcgtagcccccgagggggaaattggatggacttatataatggcacaattggggatggactttggatgggatggggggggggtaatg

SEQ ID NO: 107178 - DNA, 512 bp, Heterodera glycines
gggatttacattttgaaaattcccagaaaagtttggtatatttgcttataaaaattgaaactttacaactcagatgaagaaaacgctgtccagcaaaggctttgtgcgcattcgtggcttgccctacaactgtaacaaggaccaggtgcagcagtttttccgaggtctgttcacaaaccgtttatcaatgtggatgaatgaatggcacgcgcaacgggcgggcgggccaatggttttggtggacaaatggccgggagggagttgtttaatgcattaaatatttcttgttaatttaattagtgttgattttcacttaatggatggtagtaacgcgcatggcttttgttagtcttggaaaacttcgaaatatcgatacaaattcaacaaaaattgtatggcgttttattaccatttccaaaaaactcgacatgagaattaaatttatatatttattcataatgtgtttggtgtagtaatacaattgttaaaccttcccatgacaatgaaaaatg

SEQ ID NO: 107179 - DNA, 79 bp, Heterodera glycines
agtgactgatcattttttctggtttaaatcactaattttgtatggcattttcagttggagaagggcgcagatccgaatg

SEQ ID NO: 107180 - DNA, 757 bp, Heterodera glycines
aaagaaatggcgctcatttagcgggttagagtccaattcgccgccgaccatttcaccgccactaaatcgaactttcaattttacaaccaaattttcaatgtctaattcgaaaatgttttaaaagaatttcaaacaaaaaagttttgacaatgacgaatctttttcattttgtaaacaaatgctaaataaaacggtattgttttgaattaaatttataaattttaaattaaaataataaacaatcttattcaattaaatgctgatttgcttatggatgatcatttatgccattctgactcacccgaaacgtttacacattcattgagtactatgagccgggatattttaaaattttggtacttttccgttatatggccaatattagaattttttaaaaaatcaacagcgggcgcatagatttgctaaaactaggcgccaaaattatttcgggggcataaatgccacaatttcaaaacgtgcaccaatggttgaatttatttttaaataatttattatatcattacgagcctaagaaaaaaagtttataccggttgaactagtttaagccaagttattcatttttcaaatttcaaatgttcaaaccaaagggttcccccttttgggactttttcaataattgaattgaaagaataaatggtcagctattttattcaattgtttaaaaatgattctattctcgattcatgtgcgtaattaaattattgatatatttatatgtaaattcacaacaaaaatg

SEQ ID NO: 107181 - DNA, 115 bp, Heterodera glycines
aaaaaacgggggaaaggttcagacaatttggccggaattggaaggggaaatggcaaataaaaggggagggaatttggacctcgggccaattcatttttcggggccctcaaaaatg

SEQ ID NO: 107182 - DNA, 53 bp, Heterodera glycines
ggtattctttttggttttcgtcatttaactggctgacaattgatttagccatg

SEQ ID NO: 107183 - DNA, 265 bp, Heterodera glycines; identical to SEQ ID NO: 99798

SEQ ID NO: 107184 - DNA, 493 bp, Heterodera glycines
ttttttggataaagcgtgcagcaaaaaccttttattgagttttataaatttggaataaaatttaccaaaatgctgatttttgaccccaaatgctgattttttgccggccaaatgctgattttgaaaattttcagttgggagccctgatatttcctctcattttgtgttaaaatttgatcaatgaactgtttgttgttagcttaatgtcacacgaaaacaaacaaatagtgaagaaagagagaggtctaaaatagggagaaagtgaagagaaaatgaatgagcacagcacagaaaaggaagaaaaggagggagggaaagagagggaaaaggagggaaaggaaacgaaggaaaaaggacccccgccccccccccccacaacatccaatcgaataattcccagggcccatcccccacatttgctcattctttgcaattctctgtccttcgttaaattttatcatttccattaccattgtcctctttttctgctatg

SEQ ID NO: 107185 - DNA, 270 bp, Heterodera glycines
tgccattttgccaatcactttttccctaggccgtgcccggcagaagcacagcctgtccattctgttggcgctggacaccggcattgagcagcaggagttcagcaacatgcgcaaggaggccatggcaagtgaaagagcgggattatcagcaaggatggctgggaccaaaagcctcaaaatttaacgaaactccagtccaaaaaaacatgaatacggccccacatctgacttggatgttgattttaaaaaatttattttatccaacagatg

SEQ ID NO: 107186 - DNA, 1003 bp, Heterodera glycines
  unsure (1)..(1003): unsure at all n locations
attaattggcatatattattttttccattaaaaaaactgaaatgaattntacttgtattatgtagtggcgatagcgttcctcagcaagtgtcccatctttttgttcacgaataaatgggagagcacaaatttgttggaaacgatgctcattttgtgtccacaatattttcgaaaaattgttggcacttttttccataatttttaactgaattttttaaaagccaaaaaaatgaaaaattttaaattaaggtgttcttctcgttaaaattatttttaattaaaattaaatggagctaattaaatatcgtcgtcaatttgtgttagacgaagactaacacagcaatgtacactaataaatggttcttattaccctaattaacattaattggtttcaccaatttgaccgccacttcattttggtgttgcctaatgataaaaaaggatcgattggctgttttttataacttcgtattaaattaaataatttctttccatccccgtcataaaatatttaaatttaaattatcatttgcttcaaattgtagaataattttcaattaatttttctattatttagtgtttttttttaattttaaaataggcaaataaaatttttattaacgctttttaggtaaaaatcgcatcgcgtaaaagcttaatcaaaaaacataattttgcttatatttcaatttttttaacagttttttcgaataagacaatttttaaaccaaaatttttatcaaaaaaaaaaacaaattacttttggagattaatttttgtgaaaaatttttcaattcttaggggtgtaattttcatatttattacatttttgttaaggatttttccgaaaatcctgaaaaaggcgccaaaaatggcgaaataggcacaaaaattggcattataaaagccatcgtagacaccccaaaccaagcggaaaacgcgtttttcgtgctaatctgtgcgtattaagtgcgcaaaaattttaggcatttgcctaaaaatg

SEQ ID NO: 107187 - DNA, 1003 bp, Heterodera glycines
tttggaaaatttttatttttagagcaattttgaaatgtaggcccccgtttgggcacaaactgcttaaaaaatattcggcgctatattaaaagtgggcctttttgaaaattttttaaaaggggggacacacttttgttttgcaaaatttttttgtgatagtcataaaaatttattctctggggtttttggggtccccgatcacgaatccttcaattattttgatcaattccgatttcctaatctaaatttgaacaaaaaatcataatttgaaaaattcaaaataatagaaaattcctaaaaaaatttcactttttttaagtgcaaaccaaaaattgtagagcttagaaaatattttaatggtcaattaaaaaaaaaataaaacttacgacttaatccactttcgccatcgaaatgtttgtcgaccagcgcatagaaaggggcgaaatcagtgccaatttgagttcgagttgagaacgttccaaaagggggaaaatatccatcagaaatatcgttgcatacaaagctgaaaaaagtgaaaaaaattgcatgaaaaaagccaaaaaatgaatatggatattttaaaacaaaaaattttttgcaaaaaaaaagctaagtaaggcattatcagactgtgtttttattacttacacaaacaaagggtaaaaatcaatttttcaatagacgtaaaagttgagtaaatcaataacgcacaccatctcaaacatgagaatgaaataaacagatggcatataaaaaaatacaaattatggacaataaaattaattaatttgaaacaaaaaatttattcatcaaaaataatttaatttaaatttaaaattatttattaatttttaataaaacaaaaaggttaaaattaatttaaaacggtgaaaataacttaaaatgcattaattagaagaggtagaggtacaacagtgactaaaagaggtgtacaacggtaattagaagaggtacagcagtgattagaagaggtacaacgatg

SEQ ID NO: 107188 - DNA, 101 bp, Heterodera glycines
tgcagggaaatataaaatttaaaatttttattgcttttaaatatgcaaaaaatgtaggctacttttttagtgaaattcgatcactcatatttttgctaatg

SEQ ID NO: 107189 - DNA, 1003 bp, Heterodera glycines
cactgttatgaattttttaaatgaacatcaaatctcgattttgtttttttcggattttagaggtaaccatcacgaatagggaatccatttctgccaattccgaaccccgcacccgaattcgaacaaaaagccaaaagtccaaattttcgaaatttataatttttgtttcaaaaaaggcgtaaatgatctcttattaaagtattgtggatttcagttagtttccgtgtatttaattaaaccgattttgaaccaaaaatgctaatttcgaaatgaactttcgactttttgttctggtgcacggttaggaattcagaacatttgttcttatagaattttacttttagattacagtatcaatgctacagtactttatttaaaatatttgtatcactgacgcattctcaaatgacgcattttccgttcaccgttcatggttatttgaaattaaaaaatattcttcatgaaaatcttcaactaattaattttgtctcattaaacttatgacgcttttccattttttgtagcaaaaaaaaaaattttaaattaatttcttgagaaaagtctagtgcaaaaatgtgaatgtacctaatgttatactggtcttacaaaaatcttacgcacacgaaaaaaaaatcccaccattatacagactaatttttaattgcccaaataaagtgcctaattaaaaaataaattaattcgtggaataaaacatgcagcacttgtgttcacatttcacgctgtgtgtgtgtgtaaaaattactaataattatcattaatttcgatgtacatcatgccaaattctcactcaaaaatttttgccaatttcccacaaaaaatcagtacaggaacaaaacatttttggcattatgtagcgatggaaacgtaagtgccaaccaatatatatattagaatagaaccagaatttttaaaatttggcccaacaaaccaattattcaatttttacttgccaaaaaattaatttgcggccacaccaaaaatg

SEQ ID NO: 107190 - DNA, 378 bp, Heterodera glycines
ttaataaatcgatttttttgaaaatgtaagatgcaaaatgaatatgtgccgctaatggtcaaatgcgtacggcggagtggacagcacaaacagaggaggaggagcggggagaagagagatgaatcaatcacaggccagcggatggagagtattcggcgtttgactacccccccccccctccccccgccgataaattagcaacaaattggggagaagatgaatggaaaattatggcaatgtcagctgggtagggaagcaggtggaagagctgtttttgtgggggacgccggactgtggggggggggggtaattcaatggctttgattttctgctgtcgacgggggcgggggattcaaagcccctttttttacaggcatg

SEQ ID NO: 107191 - DNA, 350 bp, Heterodera glycines
  unsure (1)..(350): unsure at all n locations
ggcgttcgcgcccgtttttcaaattttgttgcccttggacgggcgtttcgcgcccgtttttaaaattgttggtccttgacggccgcttcgcggccgttttcaaaattttgttggctttggacgggcgcttcgcgnccgtttctaaattttgttgttcttttcggccgcttcgcggccgttttttaaattttagaacagatacaaaagtgattagaagaggtacaactgtgattgattagaagaggtacaactgtgattagaagaggtacaacagtgattagaagaggtacaactgtgattgattagaagaggtacaactgtgattgattaaaagaggtacaacagtgatg

SEQ ID NO: 107192 - DNA, 596 bp, Heterodera glycines
  unsure (1)..(596): unsure at all n locations
ttggttagatctgttaacagattttgtccaaaatatgctaaatgtgnnaaattcaattaattactaaaattcgatcagaattaaatgcaaattattgattgtttttgatcagggctggccgactaaatttgcaattaacaggcttaattaagtcttttcatttgttcttttggcgctgtgttgtaaaatgctattcgattaatgatcattgaccatattcaaaatgatcagagcaacaacaaattattgataagccgccaaaaaataacaattaattttataaaaaatcaaattaaatttttaattgttttctccaccatttcgatctttgtcccttttatttatttattttttatttatgtcttttatcattttgtcctctcttttttttaatcattcaatgattaaaaaggggaaaattttttgcagtttttctttgttttatatatatgaatagataatttcgaaagaaagtgttctcattgtgtcaatttattaatgcaaacttcagaaaattcacaatttttcgaaaataattttcaattaaattaaaaatttaaatttaaattaagggaatattttaattatttggcatg

SEQ ID NO: 107193 - DNA, 284 bp, Heterodera glycines; identical to SEQ ID NO: 103000

SEQ ID NO: 107194 - DNA, 1003 bp, Heterodera glycines
ttaatataattaaaacagattttaattttattttaaaatatattttggtgtgtcaagaacggaaaatgagagcccattcccttaaacacgcacacttcataaagtgccatcatttatttgtcatggttattaatattccttattaattttattgtggtgcctttctatgaaatggacgatgccaattttccatttttacaaaatgacttttaagacttttaataaagatttattaaattagtttatttttatggaataaatgtttttaccaagaaattgtgatttgttcgtttttaacgcactttaaatttcaccgtttaattcatttggacaaaaaaaaattgataataaaatattcagttttctgttgtttgttcaccataacgacgtggcctttgtgacgtccctttcctttacactttttttaaatgattttttttaatttgaaaacaaaacgccaataaaagcgcaaattaaattttgtatcttccaaattgtccataataggcgtgactaattaggctgccaaggcatgaaaattttcaattttgcaatactttccggacgagaattttccataagcattatggatttcatggattgattattttcaaataacaaaatatttcatttaaaatttaatgaaatatttctatatcaatcgtttaattaaaaaaaattaatttagagtttgcgcctccgaagtttataaacacccgatttctgcagctagaaaaaaatgcaaattttcattaacagtaaaaatttatgccaatttttcattgaaaataggaaaatttgtgccaaattttttaacagtaatatttttgccaaaaatttgtgccaaattctcattaaatataccaattttgtccatccattaattcatcggcaattttctcactttttttcattttcagtgagaaacaatcgacttttactaatccattatttgccctcttcaatcttccacagagaatggatgtaatgtgaagcaaatatg

SEQ ID NO: 107195 - DNA, 80 bp, Heterodera glycines
gagatgttttcacctcggaggatgatctaaagaatgatgatcaactcaatacatttttcggattgcatttgatcggcatg

SEQ ID NO: 107196 - DNA, 362 bp, Heterodera glycines
ttttacaccaattttctgatataatgaaatttcataaaatctctttaatttttctaaaatctctttacattgtgaatttattttttttttattgaaatatgtttattattttcgaatgagcgccagtagaaagtaataaaattttatttaatcattaatttaccaattggcaatttttttgtcattaagataaaattattattattatttctttgaaattaaacaggatttccttattttactaagtaaaataatgatttattcagttttttaatcagaaaaaatcatttaaatgcctcaaaaaatgaattgtcatttaattgaagaaaaataaaataaaatcatttcgagacgacaaaatg

SEQ ID NO: 107197 - DNA, 434 bp, Heterodera glycines
acttttgcggaacatgggggtccggtggtgccgataggcgccgccggggaaattttgaaaatttgagtgtaatttgttaacagattcttatcaaaaaatgccaattttgcgatttttttttaagaaaaatagtagtttttggtcagttggtgaggtcaatttttattggtgtttttgtttaaaaatcctattcctattcaattcaatatttgtgaccaaaaagcccatatgtactgcataccagggcttacatgtttattttttcgaaaaatgacaaatatttcagaagagaataggcgacccagggaaattgaacgaaatttggttaacccattttgtcaaaaaaaaaaaattttttttgaacttttttgtcaaaatatctgcaattataatgccaaacatatgaaatattaaaattcaaattccaaaaaatg

SEQ ID NO: 107198 - DNA, 81 bp, Heterodera glycines
tttttttattttgttgtttttttacttttaatattaaatgagagaaattatataaaaacctatttacatagcgatgcgatg

SEQ ID NO: 107199 - DNA, 585 bp, Heterodera glycines
  unsure (1)..(585): unsure at all n locations
tctttaaaattttttttataatttttccatttttttnttgtaaaaacctagatanattgaatatattaaattatttttttntagaatcttttctcaattttcttttcaaaatgataactcttcaatatttaattggatttttgttcgccgctcttctggcccattacgtcaattcatgttggtaggaggaggaattaattgggatttgataagtgctaatgaccattcaaattaaaataattcgccaactttaatgacaaataaggcccaagattagacaaaatgattctgacccaaaaaataaccaaaaaaatttgtttgttcgtgggtttatcttggctagccaaaaacccgaagatattacaaggctgaaagctcgggaaaacccgtaattcagttcttggcacatgattacagtcaactacgtattagtgactgataatgactaaaaattcatgagagatacggaaactacgagaattttctgtggtcgtgattaagaatttcgatataaataagatttaagcgataattaggcaattattatttttttaaatctttattaatttaataggttggttaatg

SEQ ID NO: 107200 - DNA, 218 bp, Heterodera glycines
attatttttgggatgcgaattgttttgtgcgaaactgttatgaaaaaagggtacgaaaaactgggaaaaccccactcagagactagctaacaaaatcagcataggcttggacttccgtaccaattattatttttataatgggtttgttaaatgcaaaacaattcacaaaagttgttataactccattcagagatgagatagaaaaaaaacaaaatatg

SEQ ID NO: 107201 - DNA, 205 bp, Heterodera glycines
agcatcatgcctctcatcagtgaacaacttcgtcatccgttgccgaatttgtaaactcgaagcgttggagacagaggtgagtgaaaacactcaatttgtcacataaacaatcagttttttgtggtttcagactgaatcggctaactgtccggaagaagacggcgctggctccggttgcaactcccgcagtgtcacctgccaaatg

SEQ ID NO: 107202 - DNA, 127 bp, Heterodera glycines
ctgtaaagctaatgtaatgaacggtagcgctgatctgagcccggattcgtggtcagcgaccccaaaaaccccttaaaacttttcttcattaatttatatgacatatttaggcatctgaaaacgtatg

SEQ ID NO: 107203 - DNA, 594 bp, Heterodera glycines
aacattaagcatgaatgctaattagattataataaaaaatttctactgattacggaaaaagtgagtataagcaatttatcgtagattttatctcttaatattttgaataacagcatatgtaatagatgatttttatgaataaataagtattacttattttaacaataattttttttttgttcttggatattctgatagtattaatttttgtggtgtttgattcaccaaataataatccattacagtcaaaaagccatgtcaattttttaaattgtttaataattggtggcacattattcggagttcattaatttgttgaatcaatgcgggatgacaaggcgtttcaaatgtgcaagcgcttcctaggcaaaatcctcacccaatgacatccaggcagacttgacatgttctgtcagattaactattgtttccagaaaggcggcctaatcttcacagcatgacagacaataattagttggtaatttatgcgttagtcggctgcatcttcattcaccatgcagtcaatgtggatccattacttatgcgaactatccgcataagtgtccagccctaattagtcaaacgggatggatg

SEQ ID NO: 107204 - DNA, 806 bp, Heterodera glycines
ttagtctaaaaattcaaaatgcgaaacctaataaccatcattgtcagaaaattttcacaaatgatggaaaaaattttaaaaacatccataatgaatgataaataaatgagatattggactaaatcattatattatttaatcctctataacatatatttaacattgaatgttaatattttgaggtgatcttttttaaaaattttaattattgcaatgttcgcaacttatttttgtgatcgaaaatagacctaatcattcctcaaatgattcttataaccaaattagggccataaaagcctaatatagaattatattaatatagtgttttcagatggcattgcaaattttttattcagagatgtttctgaaaaatgacgtttttggataccactttcaaactcggctacccaataattacaattattttattcatttcaattaattaagtgtcacttctttccatcgtttattaaaagataaaatttgttttctgaaaagtaactcatttagttaaaagattatctttttagagagaaatttgcacctgtttgttaaaaagattaatctcatgtcaagaacaaaatttcattttacacctgccaattaattaacaaaagattctgaacaatattaaaacaacgtttttgatttaattacttttgataaccaaagattttttctattcattagaattgtaaggcaaaaattacatatcgacagattaaaaatataaatttattgtttaataattaaaattatttttattttaaattaagataatcaacttacgctaacatgagaaaatg

SEQ ID NO: 107205 - DNA, 360 bp, Heterodera glycines
ttaattaaatgtttattttgcctagaaaaattggcccccccccccggatgttgaccgaaacgctcatactaataggcctcctaactacttgtattatttcttttattatttgcatagcaagttttatcataaagtttatcataaaaatatggcgcattattaaaatttgtttttatgggccatatttggcgttaaaatgggtcttgaacccaaaattagacaaaaaatttaacgatgagatacagaaaagtttattaaatgaatttgaaaaaagagaaaaaaaaaattcaaaaaagaaaaaacagaagactatatagacttggaagcattgtaatattactatttttatgtttgacaatg

SEQ ID NO: 107206 - DNA, 866 bp, Heterodera glycines
caattcctgttacatccgcgaggagcagcagcagcgagaagtgaattttgaaggggagagaaattccggaccaaacaaacgaatgccgaagaaggaggttcaccctcacccattccctccactaaaaactgacactgagtatgattgtaaacctgcaaaacaaaggaggttttgtactggatttgtcgaaggggtcccgtcaaatttaagaagttcaaatgacccttttttgatgttagaacatcatttggtgaagctcgaaggttattgtcaattttaaaaaccaaaatttaaccgaatcacaagaaacaaagcgaaacatgatgttagcctgtcattcttattacaatttgttaccccttacgtttctcccccatattttggtaccacataattaattactagagaagttaattttctaatcttagatcattcattatatggcataatcctgtgaaattaatctgctattttcctttagaaacattcgcttattttgccgccgtctccgtacctttgcgcgtttttgaacgaacttccgtctcttacagcgcccgaacaatcggcggagtccgaagcctatcggttgctttctgagccaatcgagggacttttagttgatttttcgaatgtccatcaactcaaacaaatcgtatcaagtatgtatcgaaaactcttaattacatttgaatgtttacgttggcgaatccaatgtttaagacaatttggtgaccgaagtgattctcacggccaattccactgggttggcctcgagtgtttgcgtttggtttaggtattcccattgaccttcaatagaaatatctaataatgagatcaaaattctttcagactcgaccttttcgatg

SEQ ID NO: 107207 - DNA, 639 bp, Heterodera glycines
tttccgggaacgggatcgggagttgaaaatttaccgggacgggagtcccgaacgggaatcccgtagaaatcccgctcccgttaaaaatcccgttcaccgaaaaaagcgggactcacgtaaaatcccgcgggagtcccgatcccgccggtctctacctattaagatctttcgaataaaattacctaaatttattgaatgatattttattttggcgccaattttaaatttaaattttcatggttcgatgaaaaagtcaaaaatgagacaaaagaatttgtccaagaatgtaagctttttccctaaattttgttttcattgttcttctactcgtttctttcgttggttaagttcacgcaggaaactaacaattaaaaatgccagaagttgaagacgatgaatttgccgaaatgcgccgttcgagaagatcgaatgtgtcaaaaaagcgacaacagaatgttttggaagaactaaagcaggcgcgcgcaacaggcaaagcctatcggaaaagagtatgtgaacaaaaaagcgtaaaaaatgagagaaaaataatgttaaaatgggaaacaattcaatttggcaaagatcaatgaataaataccctttggttaggtggatgatttggttgaggacctttacatg

SEQ ID NO: 107208 - DNA, 70 bp, Heterodera glycines
gctgaaaatgcctgaaaagtcgtgcccttctcattttttccttctaaaatttataatttattttaggatg

SEQ ID NO: 107209 - DNA, 391 bp, Heterodera glycines
tttggttgattggagaacaagcgcggtcgaagttgacgtgtgtggaagatgtgtgggttgaaggtgttgcgcaattatcgtcgttgagattattttattattgggaagtgagcgaaaatgcgaatgtccgttccttttatacaatctcagccacgacaattcttaaacccaacattttgccaaatttcatttgatatataaggggatgcgttttcatccttttcaccttcgctactaccatttgcccatttcgaagtgcacccgctgcaacatttttgtgagttttttctcttttttttcgtgtgtttttttgtcttctttttacatcccctccatttgtgttcagaaacggcctcgacaaacaagcaaattcttcaccaacacaccgatg

SEQ ID NO: 107210 - DNA, 435 bp, Heterodera glycines
tcgatcgccaagctttttctctattagcccgcagaataaaaataaaaatttggtcgactttagaaaaagttgtatgaaaataagtactatttctaccataactactgttaaatttggtaactttttttgcaattttgcaggctaatagagaaaaagcttggctatcgaatggtaccaagaatgtaaaatgtgtttgctttgcctttaaacaaagttatgccatgttttgtcgaaaaatttgctaaaattggtggattttataaaacgacccagcatggcatttcggagataaaagaaatattttaaaatgggataatacatttttaagagcgatggatcactgctggcggcggcggcggtcgctccatttcgacagagtcacgaaatgagggggatgaagctgcttccgagccggacattgtgcaggacagaatg

SEQ ID NO: 107211 - DNA, 67 bp, Heterodera glycines
atttttttgaaaatacggtaatatattttgaaaattctcacgttttccggttttggccgcttcgatg

SEQ ID NO: 107212 - DNA, 78 bp, Heterodera glycines
tttggtcaaccacaacaaaacgtgccaagtacaagccaagcggaaagcaacgaacccgcagcatcaacatcacaaatg

SEQ ID NO: 107213 - DNA, 421 bp, Heterodera glycines
tcataccatccgtactattacccagcagtcaactgctccctcccgggcttcgcaaatcctttcccagaccccccaacccctttattagaattggttttaacaaagttccacgaaaaaaattatgattttatgggcaattatcatgcgtaaagcctgcacaaatgtcatattgatcaacgaattcagtgttttctgccaatgcacaaaaatttaaaaaacaatattatggccttatggtttttctgaataaaatggttctattttgatttttttaatggcacataagttaaaaatgaaaaatctaaagcttttgaaaaaaccaaagtttctggaaaaggttgtattgcgtttttttctccaacaaaaaaaaattaatgcatctgagaatgccgaggaccttaaacgttcatgcgagcgaatg

SEQ ID NO: 107214 - DNA, 74 bp, Heterodera glycines
ggttagtttttctaatccgtcccatgccatattttttttgaaaaaaaaaagttttttctgttcagcttggcatg

SEQ ID NO: 107215 - DNA, 128 bp, Heterodera glycines
attaatttatcaatatattttaaaaagaaaatctaagaaaatctttttaattctttcaattcaaatattttaaatgtattaaattttaaatttgcggattttttttttagataatcactgacacaatg

SEQ ID NO: 107216 - DNA, 497 bp, Heterodera glycines
tttatcggtactaattcagtttgggtcccccttttgggtcgaaatttttcaaaaaattttttggttatcttatttttttattttttttcggtttttgtgcttactttgccattttcatccttatttcttgcttaggtaatttagcattgtttgatgctgaaaaatccggtctctactggtgaaagtgggattggttgatgaaaacgcacatttaaatactccttttggtgctcacaaaaaataagatttttttgtctgttgacagatttttctatttaagtgctgtctcgttgctgcccttttcctcattcctttggcaatttctttgcccattcattactactcccgttccgaattttatttagtcattcattttttcttacaaaatcacttatgctagggtaaaaaaaggcgctgatcacgaatccgagttcgggttttgcaaaatcactgattttgtcaatgatttttcatcataacatttttacagaataatg

SEQ ID NO: 107217 - DNA, 297 bp, Heterodera glycines
atcaattttctgatcaaatttttcagtgggagtatatgtttgtgtctcttctgtctctttttctctcttctcttttttcttgtgtgtcttttctgtttctttctctccttttttatctttgataaaaattttttgatgaaattacattgatttattgggaagtaattaattggttgaaagcaaaatattaaaaaatagccaaaaaacttctgtgacttttaactggcctttctagcaccgcgcgccataagtgtttaaatttaattcacattgagaaaaaagataaaaccaaaaatg

SEQ ID NO: 107218 - DNA, 791 bp, Heterodera glycines
atactatttaaatattttccaattttaattaaatttaaataggattattttttgaaaagataaaaatattatttcaaaaatgttgacttcttagcttgggaacctaacagagttatcctggcaaaaataaaatttttatttttttgtggtttacaagcaaattaattttttttttaaattttaatttattcattcttggttattgcccatcttagtgacttatttttttgaaatatattttcatgaggctcgtaattttgtagccaaaaaatacgaagttttcgaggttcgaagcacgaatcttaaagttcacacagccctggtcctgatcttgactttatcatttatttcgttagtcatggccaacttgccggctcttaaatttatgctcaaattgcaaaaatcaatcgtaaaagaaatgataaactcattaaaattaaacttttcggcagttaagtagtcgcaattatttcaaaaagtttttgacactttttccttgacatattttccctgacaaagaaacgtgtgattttttacttaagcatacgtgtgaatttgcacttaataatggggaaatttgtgttaattgtgaatgaattttctgttcttcccccataatttgtgccttttgaatggggctgctgcccttacggctcacacttttgtgccccatttcatttgcgcctcataagtatcaaaatttgtcttatttaatttttatacttcagttcattaaaaacaaatgttttaatattttgaaattaatcaacttatgcaaacataaaaacatg

SEQ ID NO: 107219 - DNA, 194 bp, Heterodera glycines
tgattatgagtgaaatgaaaacaatgcaatgatcgagtccgaatgagagtcgaatgaattgggcggcgtcgggaatggcttttggtgtgaatgcttatgaattggccagtccgcgggtcaaatatgatgatgaatgaacataaaatgattggcgtttaaaccgtcggctgtttgtgggaatgcgcgagtgaatg

SEQ ID NO: 107220 - DNA, 1003 bp, Heterodera glycines
ctgtcacgcccgcgcgccacgcgagcagggcagagccagcagcaacgtcattggccgcaaatgctgccacaatctgttgtaatatgtggtccatttaatttattggttaattttccgcgttgacattcaattggttccgggtgccctgctgagcatttggcagcgcgggcgacgtcgacgggtatggtgccggggaatgtctcggcgtgccaacgcgcttcctccctccctccgcccacccattcggcatggcatattcaaatgtggcacgccgaattacttccagataacaaatttttatatatgcacacacatgagtgagtgcaaaagatattataattttatgctgatgaattctgatgaaattattaaaaaaaaaaattacataaaattatattaaaaaaatttaatataaaaaaatatttattaccaataatttattgtgtttctgacgaatatagggattccctggttctggaatttgctttgcataaatagtggtagaaggtttagccgacatttgcggaccactattttggaattgaactatctaaaaacaaaatgaaataattttttttcaaaaattgtgtgacccaaaatagattttttttttaagcattaagacgaatgaaaatttagaaaaaatttttcaaaaatttcgtttttaagctcccttatggtgctaaatttttggtcacttaatttcatccttaaagaggatcaacttgatcaatccgtgctgagacgatgcgaaaaaaaactcagtgattgataaaataattaaatttaattatctattcattaaattcatgtaattattatacatataaattatattgaagtttttttttaaattataatattatttaaattttaaaaatgaataaaattttatttgctttgaggttatttttaatcaggaaaattataaaactgaataaattatggtttgtacgggtacggcttgcttaaggcctaacagcggattttacctgtataaatg

SEQ ID NO: 107221 - DNA, 364 bp, Heterodera glycines
tttttgttttcggggcagtccccccgaaccgatgcgcccagatttatggggagaccgaatccttccggaatagcttccctatagcctgtactttaattctgcgttggatttttgctccccataattgtttgagtaccccaaacggacacttgaaaaaatcgatttttttgttttcggggcagtccccccgaaccgatgcgcccagatttatggggagaccgaatccttcgggaatagcttccctatagcctgtactttaattctgcgttggatttttgctccccataaatgtttgagtaccccaaacggacacttgaaaaaatcgatttttttgtttcataaatatttttttcagaaagtcatg

SEQ ID NO: 107222 - DNA, 258 bp, Heterodera glycines
tattttttttgaaaatctgatcaaaatgaaactaaatttgtttgtccccatttatataccggaccgttcatccttttttagctttatataatttgcataattttttgagatggcccctttttcttatcagcgtaataaatattgtgagtaggtcgagacgcgaacggagaagagcaaacatatgccgtcatcgacgacgagaatgcccttctcattcatttctttttacattttttttttctgcaaattcttccaatg

SEQ ID NO: 107223 - DNA, 100 bp, Heterodera glycines
gaagagctaaaaccatggatggatgaggtgcaacatggttcgagaaggtaacaccttggatgtgaagagtcacaaatatgattagaagagtacaacaatg

SEQ ID NO: 107224 - DNA, 588 bp, Heterodera glycines
atgctgaaagtaaccaaattgatttattaatgcctcattagattcgaattagccttatggaacttttaattaacatattatcagaaaaaaaaccaagtttaccttcaaacaccttgaaaggtattaccaatttttttcgtacttttaaaaataatttatgcattagaattttttatgattatatttaaatatttttatttctaaaatattcaagtctgactattatcgatatataaattatattctgatgttttatactaactgctattaattttagaagttttatgtacaaataatgtttttctgtaggcaaattaattttaatgatttgcattatttttacattgtttaaataactgtgcatatctaattaatagaccttttttatttgtattaatactgaaattgaattatccttttcaccttaagtttttaatagtttctaacataatgcttttagtagaaattatatttttgatttcatttgaataaatttgttttatgatatttttcattaatttattactaaagctgtagttatctaaattatatttatcttatactatttattttttaagttaaaaaatg

SEQ ID NO: 107225 - DNA, 62 bp, Heterodera glycines
ggcattaaaaaaatatatatttatttttaatatttaaatttatttctgttttattaaagatg

SEQ ID NO: 107226 - DNA, 356 bp, Heterodera glycines
ggtaagaattaatagttagtccttttgttgaatttttagaaattctttccgtccaatcggcttttggaattttaatgagtaaatcagggaaccgtaaatgacattctatgcttctcttgtttgatacacgggaagaaataatagttagtccttttgttgaatttttagaaattttatccgtcaaatcggcttttggaattttaatgagtaaatcaggaaccgtaaatgaaattctctggttctcttgttggatacacgggaagaaataatagttagtccttttgttgaatttttagaaattctatccgtcaaatcggcttttggaattttaatgagtaaatcagtaaccgtaaatg

SEQ ID NO: 107227 - DNA, 1003 bp, Heterodera glycines
tgttaaaaatcgtcaccaattaatatgcagaaaaatataaatacaccttttttaaagagaaaaaaggaccgtttagctttttactaattatttaaataaaagttttgaaacaaataaaaaagtaaacatgcaaagtttcgcatgtagttcaaaggaaaaatttaaaaaaagaaagcaggcttctcgatcaagagtcaagaaaaagattttctgactaaaataaacataatataaattgcagatttctttttctttatgtcattcaactaaaaaatgaattaaatatctgaagagaaattagtgaataaaagtggtgaaaaattataaagaaatattttggtaaaaatcaaatatatttcaaagaaagataggttttttttaattttagatattgatggtaaaccattatgtaagaattttggtataaataaaaaattcctttcagctgtaaatgcgatgtctaattagccactctcataggctaattaaatatattatgatgaaaataacaaaattgaaacaatgaatattattaggttttctgcttataaacctagcaatttcaagataaacatttaaaccatatttttatttaaaaaattttgaaaaaattcatttattcgaaatgttatgtgcattcatatataatgtctggatttaatttattttcacggacttttttattggacttttttattatatatatatatatatatatatttacacaatttagtaatgtaaaattgtatatacatataaaattatataatattttcagttatagacgaaatacgcgacttaagaaaaaatttttgaaaaattacagtttaaaaaaacttacttataagttttgtgtgtgagaagaattaatttgtcaaataaataaatgttcaatcaactcccttcatttttaatagtcgtcgtcattttatttttaaatctgttttttttgttcaataaataatttatgtatgatttgtgaaataatcactttatttaaatg

SEQ ID NO: 107228 - DNA, 322 bp, Heterodera glycines
taaagctaaattaaattaatttgagcattttcctataaatttggcctcaaggagaggggggtttcaaaggttaaagacgaggaagtaaaatgtgttcaagttttatctttttttaaggccgatggaaattaattgctacgctaatgttttagtataaaaatgccttttttcttctcctccgcctcattcaattcattcattcgtcacatttccggtaattttgttgctgcaaaagtctttaagaatttctaaaaatgaatgacaaaatttgatatacatatgtaaaagatattaaacaaaaaaaagtttcagaattaaaatg

SEQ ID NO: 107229 - DNA, 254 bp, Heterodera glycines
  unsure (1)..(254): unsure at all n locations
attatgacttcaatttgcatagatgtatagcatttactatttctcaaatattattgtaanagataaaaatatctttttacaatgatttnaaagattaattcaaaaattataggatttatttttntactaatatttntagaaattatgttatttagctaaattttttcaattttccatcttaattgttatcagtaattaagttaaattaaatttaaaataaacgcaaattaaaaaggcaatttttgtaacaaatg

SEQ ID NO: 107230 - DNA, 394 bp, Heterodera glycines
aaccccgaaaatggtcaatttcgtagatttcaggaatttctttgggttttaataatttcttcgtatttaaaaacttggatttttggcttcgatagaataaattttaattataatctaaaaaaaaaatacaaagtctaggggagctctaatccataaaatattgcaacttttaataattcatatctatctaaatgttttttgcttctcggttaagtcatcggaacaatttctgcgcacgccttcgccgcgtgcagaaaataacggcggccgcgaaagcatcatattgaaccgaatgttaacggagcaggtgttcagaaaaatttaaaaaaaaaatttgaaaaatttccaatttcccaaggtcatgcctcggctgagcgccgtacgtcccgcaatg

SEQ ID NO: 107231 - DNA, 668 bp, Heterodera glycines
attgaaaaattggttggcttaagtaattaaataataaattttcgaatattactttattataattcctgattttttatgattttagttaatagaaaaatttttaacagaaatttaaaaaaaatttggtaaaaaataaattattatcacaattactaatatttaaaatcattcagcgacaaatttattttaatcatttttaaaagaattaaatttaataaaaaaagatatttttttttgttttacttttgctttgatcgatcattgggtcgaaatgtttcttttttggggcattggattatcttcaattcgttccatcattactcatccatcagcttcgttcttcaccagcagcagattaatgccataaaatcaacatcgtcactaaacattttaattaaaataataaatttattttgtttaaaaatttatttttatgtaagaattgttggcatttaatgcaaaaatgatttttcgcctgtcctaattattattttatttttttataattttttttcatttaattcttcaaattctatccttttttgccgaaatattttttagtttttttccccattaccaaaaagcagcaacaaattgctgctgatccaagtgaaggcggaaacagggccaagcttctcggctttgctgctgctgctgttactgtgatg

SEQ ID NO: 107232 - DNA, 1003 bp, Heterodera glycines
atttgtaagaaatgttctgattttggactattgttcttattggtcaatttttagacaaaatctgttaacaaatcgcattaaaaattacaaaaatttttggctctaatgcactttatgagtccaatcgacttttatgagtccaatcaattgacaatcccgggttttgattaattaattaattgctgattattttcgtttgttactttctttaaatgttagaattctctcgttttctcgtattataacattattcagactttgtgctttcgaatgataccaaaaagatagggtttgtttgaacatgaacaaagttactgtataaaaaacaaatgataccatgaattcatatacctaggtcttgatcaagtaagaaaaaagtatggctaacaataacaaaccaagtatggtcaatggattggacgggtaaaagtcatttgacgattaaaatgcagtagagccggctttttgtggaaaaaggcagggaccggaatttcgacagacccgaggctttcgaattccggtctaaaaacatttttttgaggattttctccaaattttcataaatgtttgttttgcacatatttttccatttttatacatccgaattatttccttatatgaggttttttgataaaaaatattttatcaatgaaaaaaagggttataaattatatggactaaaaaccaaaaaattttaacgtagaaatgctatttttgagcccctttcttcgtagcatatgcgcagaaaaaatatgttaatccatataatttataagtagggatgggatttttagtgataaaaaatcccaaaataattaactaaatagtgaccaaaaaatgccaaaatagtggcaaaaatagtggcgaaaaagttccaaatttaggggtgtaattttttaaatagctattttagtttgaaaataatttaaaactaaggaaaaacattttattatcactgatgaatagggctggtaaaaatatggatataaaatcgcgaaatatg

SEQ ID NO: 107233 - DNA, 415 bp, Heterodera glycines
aggaaataaaatcacttgaaatttgtttacttttaaagcaatttatttaaatttattaagaatatatttcgtctgaaatgagcaaaaaatttttcttgttattaatattttccgttttttgtcggcaaagaatcgacgggagaaaaaatggacaaacaaatcaaaatgttcaaactttgatccgtcaatttgaaagtaaaataggctttaattagctagtcttattaatattaaaaggatatttaagaaattaatttattaaataataattgtttagcaaatgaattcagtcaaaatggacaagagaatgctgaaaagtttcttattattttatttttaattattattttaaaataattttttaaggaaaattttggaaatattaatctcctttcttaaaattcaatgcgaaatg

SEQ ID NO: 107234 - DNA, 202 bp, Heterodera glycines
  unsure (1)..(202): unsure at all n locations
ttcttaggttttncaaattttgttaaatatcattgaaatttaatgattcataaataattataaattataattttgtttatttatttaaaataaattttgaaaaattaaataattaaaatggtatttaatttaaaaatttaattgcaattgtactccctcaaaaaaaggtttttgtgtgttcgccgccggcgcttcactgatg

SEQ ID NO: 107235 - DNA, 242 bp, Heterodera glycines
aaaacgtcaccactcaaaaaggtcaccgacccaaaacgtcaccaaaattaaaaatcacttaaaaattaatttttggtctctgatcagctatgcttcagtcacagatttaaggatagccaatgtatggtttttgatctacaaatttgagagaaaattaagaaaagagattatagaaaagtttataaagctagcaattcacttaaattctcattacaaaattattattttgctttattaatatg

SEQ ID NO: 107236 - DNA, 146 bp, Heterodera glycines
  unsure (1)..(146): unsure at all n locations
ttgcaccagtgactgtgnagatcggacagttgctggaggccttcaaatcatcattgtcggccgagatccgttcatcagtcgaacaacttcacaaggagttgacgggagaagtgcaccacgcactgaacgcactttggaccaaaatg

SEQ ID NO: 107237 - DNA, 84 bp, Heterodera glycines
aaggtagaagcgggagcaaagctgcaacgctccaaagcggacagagacgcgcgagtggagcaaatagaacatgcaaaagcaatg

SEQ ID NO: 107238 - DNA, 438 bp, Heterodera glycines
attagagaccggcgcgggacgggatcccgcgcggaattttgcgggatcccagtccgcactccgatttcgggattaatcccgcggaatcccgtcccgcaaagaattttgaggtccaatcccgcagcgggatccgcaaaatattgatttttgtgcgggattatgcgggattttattgatttttttgaaaatttttctaagacagaatgccaaatatttttaaataaattaaataataaatttaattaaagttaactcatttttcatcgcaaatttcattcaaaatttgtgaaattttcccggcggcgcctatcggcacccccggattggcttttacttaataaatcctgtagaaattgagttaaaaactgcgtcatttggtcaattttagacaaaatctgttaacaaatcgcattaaatttcaaaaatttctcgcagatg

SEQ ID NO: 107239 - DNA, 889 bp, Heterodera glycines
aattttttgtaatgataagggtttaatcccattacctaactttttttttgaaaattaacaaaatttaagaaattagatgcaaaacctaacattagacaaagattacgagcaaatgaaaagaaatgacaaaattttcggaatgcttctttttgttatttatggactttactttttgtgttttatttttgcattaataaggtgttgtcgacacggttaattcttcatttgaaaatcatttaaaatttgctataaccccttttttgaaaattcaccaacattatgccctgtccgctccccgccgaattgatcaaggaaataattgatgctcttccccctccaaaaacacatcgactgctgtgcataaattttgttttggcatcctttgttaaatgtcggttttattccatgatgagaagattgtttcgctcagatcatattttaatgccaatggcccgaagaactggaatttatttatttttcgatgtttttattccccacacaactcatccaggatataaaatttaaataaattataaattttttactttttaatttgataattttaattgatatctttgataattaaacaaaattgtattttccccaaaagaaattttctcacagtagcaactgcggttttttactcctttcaaaaaaatgtcgcccttttgctctcttgcccaaatcaaggaatcgggtcggattagcacaccaaagggaaaatttagtgagttcaaaatcgttattttccacaaatgaaatcttttacttgtgtttaggccttttttatgcccttgaatttgctcgcaattaccaactaattgatcatgtaatttctcggaaggctttccgttatttattggaaacggagaaaaaacaacgacaaatg

SEQ ID NO: 107240 - DNA, 1003 bp, Heterodera glycines
taaaaaagtaaaatttttgggattaacttgttttaggggttttcatggccggggaaacgaatttcgaaaatttttaaattctttataatttcaaaaatcacgaaaacatgttccgaggggcttttgggtctcagatcacgaatccggcatctacttcgaccaattacgaatcccggaccccaattcgaacaaaaagtgaaaattcaaaattttcaattttagtttaaacaggggtgcgatctgtcgtgatttatcagtttgtcctggtttggagggtccaaatctgataaagtgaaaatgtcctgaattgtcatttaaaatggttatataaatcataaaatttagagaattttaacaaccctgtgcttaaaaaattatattttcttgaaaattaaaaaatttatgtatagaaacctggtaatcttattatttggtcaattcttatagctgtttaaacgtagagttaaacgtgtattagttattgtttgaacttacacctgaatacccagatttgttgggtctagcaaagtaagcatgcttaattgagcaaatattcgttcaaaaactttcgattcctagcttgattaaaatttactctgcttttaaattatatatttgcaatttaaagaatcaattaaaacttttttatttttaaatccttaatttggtgcccaaacttcccggtgcccaaatttctggtgcccaaacttcccccccccccttattctaccgtagtgaaaccactcattccaagacaaatttaggattacgccatttaaacattatgccataacaattttagattaatttatttatttaacagtacggggtcaaagaattcaagaagttcacgtttttatcccgaattcggctcggtaaatttcttcgggattgccctcaattaccccctcaccttttctcttttttcgattttttgaaaattttagttaattcttcctaaattgttgttgcatctaagttctgttttataataatagtaatg

SEQ ID NO: 107241 - DNA, 930 bp, Heterodera glycines
tattattgtttataataataattgtcttgccggccgccttcaaattatcccccaacgaattttcgtcgtggccccaatttttttttgggttgccataattttttggcacagaaaatgccatatttaaaattaggctggaacactaaggttgggagtgctaaatcttctcggattttgtgggcaaaaaccaatccgataaattttgtttgtttgatttgcctttatagaatttaaaaaacataattttattggattctcgaacacagttaatattattttaattttttttgtttgaaatttcattttaaacaaatcaagttttctccaattttcaatttttcatcaaaatttatgtaattttgttttttagaaattgacgaattaaaactaattgatacacattaattgctctcactttttggaatttaaatgacattaacttttaataaagttagatttccaagtttttcatttgttattttggcatccaatttcccaccaaattaattttaaattttgtactcaattttataaatggaaatacgcagcaaatctcaattttccataaatccaacaaaattctttttgggaaaatacgaaacaaattcttggaattctgaatatttttgaaatgaatacaataagaatttggcatttatctgtttattttcccatgatattttttacgtaaatttcatgttcttatttgatttgcgcgcaaccattaaagaatttgacagaaaaggatttctccatttttggcattacagtaacccttagcttttcttcaataacacaatgccaaaaaagaattctcccattgaaacgaggccataaatttatcattaatttcacatttttgcaataattaatataggctaatttgcttaatttaaggtaatcaaaaacaaacaaaattttacaaaaatg

SEQ ID NO: 107242 - DNA, 264 bp, Heterodera glycines
  unsure (1)..(264): unsure at all n locations
atgaacgaaattacggatcgtgaacagaaaatcacngacctgcgaatncaattgtttgttataaaaaattggagaacccacaactgggatcccggtgctggaccggaatcaatcaaaaatgggaaaacccgggaaatccagctgcttaaaatccggaacctgggcgctcgtcccggtaaacaattggatctgtcccatgtcacgacatactcgagttacaaatttcaactaaaaaataattagatcaaagacaagtccgacatg

SEQ ID NO: 107243 - DNA, 495 bp, Heterodera glycines
tctgaacagttcaacaacaagaaatgaaataataattggagattttgaatttttttttcctgatttatggccaaaaaacgattgaatggccaaacgaaagaaaaaaaaaaaatttttaatgtaggaaaaataatacaaaattttttttttaatacgaatagtaaaaaattataattatttaataatcggtttttatttcggagtaatttaaaaagaaattcaaacagaaatgtagaaaattttttacaataaaaaaacttttgaaaaaatttttgtagcgattttttcagaatttttattatgaatgattaagtttttttttctaaaatttttaaaaaagctttgaaaaatatttgaaaattttttaaggttttttaaaggtttttgaaaattccgattccctaaaattttgcaatttttttttcatccatccatttcctttagtgtccatttttaaatttaaattaaattaattaattaaatttgcctaaaatg

SEQ ID NO: 107244 - DNA, 70 bp, Heterodera glycines
aaaaacgcatggtgaagtttggctgtacctgagaaggtatgcgctctctacattgcgaaacctgggcatg

SEQ ID NO: 107245 - DNA, 713 bp, Heterodera glycines
tttattcataatctaattgtaaaacatttttttaaatgggattttggacccccaaatttggcatttgaaagtcttccgttgcttctttttattgatggtttgccgatttctccttgattttggaggtcattattattattattatttttctgcccatttgcatatccgttttccatctattggctgagaacaaatgacctttacaagcaaataaatcgttcatttattcacattaaatgccggctcatcacagaagagcataactttttcaacttttcgatttcctgacgaattaattaacttttataaaaaaccgtcccataaaaaataattttatttgctatttaaatgctatttttattatatattcatttctatgaaatatattattaatttacttccatatcattttattaataatattcgaggcaggcgcagagtttgatccaacatttttttttggggggggggggaacagttttccaggcgcaacgaacctaaaccaaaaaaaaatttatcccgaagatggatgatccttccttttcttaaatattcttttgactttcatctcgaaaaacttctgaaaactccaggttaggtaggcttcgtgcttcttacgatttccactgattctggcgcttggcggcagcgaaaatcctaacaaataatcattaatttttaagatttgtgcaaatccaaaagcaaaagaaatg

SEQ ID NO: 107246 - DNA, 631 bp, Heterodera glycines
tattgggttgtaacataaattctgtcatagttgtgaatttatttatttgtatatttttaaaaaatgtcttcgtttttcatctcgttgcttttgcccaaagactggggagcgacgaattgttttttcttgttgtttgagcccaaagactgggaacaacactcgtcaattgcttttctcttcgctcaaagattgagataaagcgactacaactcctttggatacaattcaccgcaccagttttcgagaaccaagacggttgagaaaagtgtttgaattcggcagaaccaagacggttaaaccgaagattttgcgtgaaaaatttgagaaccaatacggttgaaaacaaatggttattacacgctcgccaaacttaactcgccagagaacccgacagcagggaataattttgaacaacgacgggaatcaaattcgggcaccggataacgagcaacaaatttagagatcatgattccggcttcagagcaaaatgaaatgagaaacctgaattagccgattaatcccgtaaatgatctttcaggagacggcagcattttgagtgaaacacagctgataaccgacttttggaagtggacccgcacgaattaaaccggcagcgaacgaagaaaggatg

SEQ ID NO: 107247 - DNA, 972 bp, Heterodera glycines
tatacaaacctaaaggaaattccggaagtggcatcggcagatgatttgagcggcatttgactcagctaaacgatggcccgactcaccaaaacacaaagaaattggtggcggatgaacggactgacggacggacacaacgtcttcccgtggaagaagaactcaacataacaaaactcattatcagttttcttaaaggatttttctttattttatttttccccaatttgtttatttaccatttaattactctatcccatttattattgttaaccaatttgacttctgttaagtcgcaattcactggttttctttgttatcattcatacatattaacctaaacacttatttaatcactgtagcaattaaaaattttttgtttggagaacaaattttcctttccagcaatttggattactaaacaccacactgagtatagtctgtttttcccaagataattcgtttgttggttttttccctcatttcttggtgcaaagtttcgttgttttgatgacgctttctgcccttgctttttttatgttttagctgctgcgcagcttaagtagtgattatatttatttatttgttctattttgagtttcttctatgcttttgcatgaccataactcaacaaaagggaaaaatggcggaggttcaaatccgcctcacgccaacatttttggatcaaaaaatttaaaaaatgacgcttattgaactttttgctagtagatgacatgaatttcggttttaataaaaaaaaataatacgccaaaatgagaggtgtatttttctctgcactctcttctttacgacatgcatttattaatcatgataaaatgttattacccataattctttaatcaatttaaatggttgagtcattattaggcatttgattaatttttctatcttttgcaaatctacattttttctaacttgttaaatcattttaaaaagaaaaacccgacagaaatg

SEQ ID NO: 107248 - DNA, 157 bp, Heterodera glycines
tattttattatttattggtataatttttaccaaaaatttttggactatttgtatttagcgcgctaattaggtaattaatgatgaaagagaaaaatgatttaagaggaggaggtcggtcggtcctgtttttgtttgtttgttggttcattttaaaatg

SEQ ID NO: 107249 - DNA, 82 bp, Heterodera glycines
agagcaaagttagggtgttagaaccctaaaatttaaatttttaattcaaaaattaattattggagaacgagaagtgaaaatg

SEQ ID NO: 107250 - DNA, 389 bp, Heterodera glycines
atttgaggaaacttaattaggacaatagtaattaataataatgacatatggtcaaaattaggacaattagaacccttataatttattttgggaattcgtcataattggaacacaaataattttttggttttgtaaattccgaaagaaaatatgggaatgaatgccatgccaatgtaaagtggtgacaataaatgtcatgccaatgccaatggaatgctgcgttttgtttagtgtccgcaaggccgggcagactgaacgcgcgttcgccgggcgcgcgagtgcgcgccaatcggcggaacccgcgaaggcacaaacgcggaagtgcgggtcatttcatctcgtgcacattcttctttctgctggccatgttcttcgccatcaacaccatg

SEQ ID NO: 107251 - DNA, 51 bp, Heterodera glycines
gaatgggaactgaatagcgaccaactgagtcagaatgatttcaataaaatg

SEQ ID NO: 107252 - DNA, 160 bp, Heterodera glycines
tttgaagcggatcacttgctgtgagatggttggcctcgccgatgggcagtccgcccttctgattggtattccatggatatttaaatatttgaaaaggaaaagtgttttgaattaaggcacaataatcggcaacatttatgcacttttggtgcgcaacatg

SEQ ID NO: 107253 - DNA, 362 bp, Heterodera glycines
aaaaaagaaattttattaattaaattataaatttattagacctaatagatttggttgctctaatgaaactactaatcaccattattatcctcatattatttgtccaaagttcagaatttgtcatcaaactgcaggcaaatgactttaaatcgaaggcatgttgaaaagaaaaactaaaatttaaaagtaattaataaatttattatagcaattttttccaaactgaattcggattatagttattgcttttacattgaaatttcgatttaagattgtaaattttatttgaataatgacacattttccgggttcttaatccataccaatccaaagactccgccgtggaaaatttaggagctatg

SEQ ID NO: 107254 - DNA, 455 bp, Heterodera glycines
tttttttgtttctaaaagaaatataaattaaaaagtcataaaaacgacgactttggtacttgtacagtttcggaccggctcagtttaagttgttttagtagggcgtcgttttagcccggcaaaccgttttcgcccataactcttacaaatattttttttgtcaatcacataaacacaccgactcaaaaaacgagacatgtgtcaataaaaagagagtgcagagaaaaatacatctcccattttggcgtactatttttttttgtctctgttaatagagaaacactgagttcagtcggattttctgtataaaagtgttgatttctcttctccacctccacaatttcttttcttaaaatttttcttcttttttttagttgtttttgttcatagtcttcaaatcaattctaatgatttcctttccccttcaatttttagcggcagcggatttcaaaatg

SEQ ID NO: 107255 - DNA, 162 bp, Heterodera glycines
ccttaaagataaaacaattaaataaaattaaatttttagtaataattcaacataaaattcattttgatcaattccattagtgttccatggatattaattaattaatttcttttccaatatgtaatttttgcaaaagaaaattccaaaaaaaaaaaaaaaatg

SEQ ID NO: 107256 - DNA, 251 bp, Heterodera glycines
tgtaaaatttagataaaattaattaatttgtacagcatgggacaaaatactcacttttcgagatcaaactttcgcccatttcactccaattaaaaatatattaataaaatatatagaaatttgcaatttcttacttacgggggggggggggctgtaaaaaatattttatagtttagaaaaaaacccaaaattttttttcttaaattttagtgaatttttcgccacctccgtcaaccaaccctccgccaatg

SEQ ID NO: 107257 - DNA, 121 bp, Heterodera glycines
gttcaacggaatgggtcatggtggatttggattcatatattcatacacaacaaactttttaataataaacataattatatcttagtagcggcacaaataaaactacccacaaaatcaaatg

SEQ ID NO: 107258 - DNA, 302 bp, Heterodera glycines
gtttttcaaaaaaaccaaaagaaattttttttggtattttcttataaaaaatttttaaaatttattgtaaattttcaaggtttgaatttttttttcaaaaattttccgggggtaacgatgatacttgaaatttgtccaaaaaccactaaaaattggcatcactgaaggtgaccggcgtcaaaccgcagcacacctacgagttccgcgtggctgcagtgaacgcggcgggccgaggcgagtggagcaagaactctgtgccaattgctgccacatggttcccctgtaagccgttgatcaccatg

SEQ ID NO: 107259 - DNA, 972 bp, Heterodera glycines
tttttgaaaaatggaggccaaaatggaaaaaataataattttttggcgaaaaattttgtaaaaatgaaccccccgaattcgagatttcaaaaaatgaaaaatacacccctaaaaatcgattttttgacttcaacccccccccccccccccaaagccaaggtctggctgcgcccttggcatatacgtccaattttttgccgcagtatttcaaaaaatcttgttgcaaatggtggggggggggagggaacgtccgattggtgccggaagaaatcgccgggagaattttgaaaatttgaatagaaacatttgcacatttgttaaacaaaattctcccattcaaaattttttcgagtgttatcaaaattgtttggttgagtttatgatgcagcgaattatgactcataacgaataatcgcctcaaagtccattcactttttcactttctttcccttctctccgttttaatatggtattttatgggcttaattagcacactaatcgctgtcacaaattcccgtcaaaaattggccggcattcttttcacacattaattgttaatttttggttgtcatggcacacatttcgccattttctgtcaaattcaactaattgtcgttaagcacaatacgaagagaaaaaatgttatttaattagccgcgccttttgaggcaattcattcatttccattctttcaattgttcactctttcctcccatttttgaaaaggaatcgccaaaatgttcttctgctcgcttcttaagaaagacgtaagtttcctttttacttttttggcactttccgatcattttggactaatgccatcgcacaaaaaaccaactctaatcaaatgctatgccaattccatttgataaatgcagtgattaagggacaaatgagaaaaaaactgactttgaaccgataagaactccgttgatagtggtgggatagcccatccatcggttaagtgccatg

SEQ ID NO: 107260 - DNA, 266 bp, Heterodera glycines
ttaagcttgtgtttgatctgacctaattttctgaacaaaatttccaagaaaataattaaattagagaattttaagcattttgaataaacaatttctaaaatcttctactttcgatatattttaccatttatccaaattttattttttgccattttgtccatttttcataatttgattgttttttgtcgtccattttgctacttttcccccaattttcagccattgataatccgtcgctttttttgctgtccgccggcgccgcaatg

SEQ ID NO: 107261 - DNA, 633 bp, Heterodera glycines
gatttattaatattatttttattgctctaataaaaataattgaattgccagaaaattaattaatttaaaaatcaaatgaataaaaatatttaaaaataaacagaaacggcaccgggcttttttccgctattttaattctgttggtgtcaggtccataagcagaaaaaaaaattcggttgggatgaatccaaaactgttttaataattagcgtccctttttgagtctcattttcgtttttttttgtttttgtccgtttgaaaattctcttttccctttctgttttcaaaattttgaatttttgtttcgttttctgtttttttttttaattttttctttcgttttcgtcagactaaatttggatatggatgaaaaaagtttcgttccgtttttgttaaacaaaaaatcaaatcttctaacatttaaagtcctctcatcccacttcgtcggcgaccccacccgccgcaatggtcatccataaaagtctaaaaatttcttgggttcctgatactataaacccaagaccgagaagcgaaaagcccgagaaatttctccagtcgagaattgagaaccgagactctcgcttatccctagtaaatagtgtcataataatttttcaaataaattaggaaatg

SEQ ID NO: 107262 - DNA, 152 bp, Heterodera glycines
actggtgaagttttgttttttatgcaccatttaaataataaagaatttatttattgctaaaatcaatattaaaacaatacaaaaaaggattaaaaattattttaaaatcgaaattattaagatgaaaatttgaatttacaggcacaaaaatg

SEQ ID NO: 107263 - DNA, 437 bp, Heterodera glycines
tgcgttggttggcattgtgttgaacggcacagttttggtggtcactgccaaatccaggcaaatgccatggcatttttaaattacaatttaattaatttctgtttaccaatttaattcaatttctcatttttcagttccctccgcggctccgccaattttttgatggcactgatttgtctttgtgaattggtccaccaaattgggcacactttttttctggttgttgtcatttcgggcacaaattttgtcagtttgctcactgctgacttaattatgacgttaaatttaattttaaatatttttttatttttaattaacgcccacaaaaccctaattaacaccaattaatcctttccatttaagcctaattaaaactttaattatttatttaatttgttttttagacactcctccattttcacccaatacaaaaaatg

SEQ ID NO: 107264 - DNA, 1003 bp, Heterodera glycines
atttgtgaccataatatttatattatgtaaaagcacattttttttataattaatttatttgaataaattaatggtaatatacagtaaaaataatcaaatggtcaataaaaatataatggaacaaatattacaaaaaaattattgaaggaaaaagtaaaaaaccaaacttaaaaccaataaaatataatgtgaaaaatagttttttaattaattttgaattttttttactttttccatcaattattattagtttttatcaatttttttgaattttcattatccatttaaaaaataattaattaactttggttttaatcaattaattaacatgtgcttaccgataattatttgtttcgaattttactaaaatgaggttttgtaatttgcgagaactaatatcagattcacaccaacacccgatgaaatttaaaaacaaaaaccaaatggtctgctgatgctggatggatgggcaacaaaaccggaacgtaataatttcattagaaaaatagacgctcaattaaccagaacgaattacgcgtcatttaattttgttcttgagcaacttttaattaattactaatgaatgtaattaaattgttattcgaaattgcaaaattttaattcttttattaaaataataaactttaatttccgtgatgcaacattttattttatgcttctcatttcttactttctgctgtttttttatgaaattctttgaataataaattataaaacaaaattaggaaatttagaaaaaattgaaaataatttttgtattcagcgaacaatttttttttgtgcacaaagaatataacgtaatttgctgaattttcattcaaaaaccaaatttttatccttcaattcgtcgaattgggttcttttaccactaattaattagtaattaaatgtgggcaaatattttccatttaaaagcaaatgattgtgtttaattggaaatcattcgaatatttttgtagcaccaaatttcacactgaaaatg

SEQ ID NO: 107265 - DNA, 527 bp, Heterodera glycines
tttttctgtttcacaactggccaacggcgactgtgctcattgacacgtagttgtccaattaaggtacttggactttccacagtaaaatgtggtgcaaattttggaactgtcccgcctcacggcggggcttaaaagcatttgtagcgcaataaaagttttttgttttgaatttttcacaatttatttaaaaaagccaaaaaatccggatccaattttaaaaacgaaaatagtgcacaaaaaggagccgcctcacggcggggcttaaaagcatttgtagcgcaataaaagttttttgttttgaatttttcacaatttatttgaaaaagccaaaaaatccggatccaattttaaaaacgaaaatagtgcacaaaaaggagccgcctcacggcggggcttaaaagcattcgaaacagaagcataattaaaatcagaaataattttattatattttttcacaatttatttcaaaagacaacaaaaaaatgttcccaatgttgaaacgaaatagtgcacaaaaaggggggatg

SEQ ID NO: 107266 - DNA, 106 bp, Heterodera glycines
  unsure (1)..(106): unsure at all n locations
ttttagctaaaatttggtatatatggggggttccnggatgcaaatcgcgaaccgaatctgaaatttacaccaattaggtactttattttacaattaaacaaaaatg

SEQ ID NO: 107267 - DNA, 145 bp, Heterodera glycines
tttttgttcaacaggtgttggggtcacttttgaaaaattgtaattttttccattttccaaaacaactcctgatcaattggaaatcttttatgaggaaattataatatattaatagtggaaaactttcaaatttaaaaatgcaatg

SEQ ID NO: 107268 - DNA, 306 bp, Heterodera glycines
cccccccccccccatctgctttgccctttgtccttaatgcctgtgcaaaaaaatagaaggagacaaaagacgacaaatggatgcttgttctacatttcctttatttttttaaaactaatattgttacattttgggtagtaagagtgaaaacagctaaataagtgtgatttaggagttcgacattttgaaaatgcatgaacatgtatgtcgaattctaagttaacaaaatttattcatagcattgaaatttcatctcaatatttgcactttaattagccggacaattggcaattaacatgcacaatg

SEQ ID NO: 107269 - DNA, 102 bp, Heterodera glycines
aaatagaaatggaggacataaagccaaaagtaatgcaaaagattaaaaaggaaaaaacattttgaggaacaaaataataaattaaaaataaaaataaaaatg

SEQ ID NO: 107270 - DNA, 681 bp, Heterodera glycines
aaaacccggaaaacccttactccgtataagtccgtatgcaggaaaaatacggacccgtatacggatcagggttttttgaaaagttttttaatcaataaaaaccatattttttttactaaaatactaatatagattcgttctaaattttattacgaacattaaacaagagtttttggagtccggcggtgccgataggcgccggcgggaaaattttttaaaatttgattgcaaattgttaaacagatttatcgaacaaatttgcgctttttaaccgattatatgaattttgctaacgatttttcacaaaaattaggtatctataattttgaaaaaatttgcaaatccatcgtaaaaaagttaagaaatttaaaacgaaattcatttcaaatgaaatttacgaattggaaattaaaatgtctaaaatttgtgtttatattaaacaattccaaaagaatgctccatgcaatcaaacatctttgaatgttttttcgaaaacctaagaaagataaacttcaaaaaatttttttaaatattttcgaaaattgctttatgaaaatttttagtttcattcttttagagaataataaatctatagtttcttttttactcacggtttactcagtgattacccatttcacttattaaaaaaataataattttatagaaatcttctagagcatg

SEQ ID NO: 107271 - DNA, 147 bp, Heterodera glycines
gcctccgtctagctttgctttggcaattgcgatcgccggtctcgtcattctgctgtgatggactgatcagaaacagagttgaagggatcaaggaattacgaacagcgattttttgggattaactaatcaattatataattaatcatg

SEQ ID NO: 107272 - DNA, 273 bp, Heterodera glycines
aaatgaggaaaaatccctggaatcgcgtctttttagggatagtcggtattcaacaaggcacccctcagcgaatacttcctatagagcaatcattcaaaggccattttgtagagaattttgtgctctttctgttcgtcataatcatcttctacggaaaattttttccaaccccctagaatttttttttcgaatttactcagattttcgtattttttcacccgcaaaaattttgtgtttaatgccttttttatggcataaaatgaatacaaaatg

SEQ ID NO: 107273 - DNA, 419 bp, Heterodera glycines
  unsure (1)..(419): unsure at all n locations
ttcctttacgccgttttccttccttccccatataaccattcccaatgtgtatttgtgggggcattttttcacattcccatttttcaaaaccgagagaggataagggaataaccagcatgtgatgcggctcggggctgcaggaggaataattgcaatacagagagagagggaataaataaaaggacggacgaactatgagcatccctcagagtttttgttgtcaatatttgggaaaaaagaaccccattttattcaaaagcgaatgtctgatatattttaatgatttgttaatggggatcgaattctagtccggctcaaaaaattgttgaaaaactaatacgtaattcgaatgtcaaccatccccaaatgccaccanccanccaacacaagacgaaaaggaccaacaagtgccataaatg

SEQ ID NO: 107274 - DNA, 205 bp, Heterodera glycines
attttctaagaatgttcgtttttacgagcagagatattcctttgattttaatctgactcacaacactttattttaaatgcatttttaaaaatttagctcgcggatgacttcaggtcaatcatcaaaaaacattacccgtccgatgccattgcgcgtcaaattggtaagaaattggcctaaatttcaatcctgaaaaaacaaaatg

SEQ ID NO: 107275 - DNA, 649 bp, Heterodera glycines
ttttgaatttttttcactttttttttggtcaatttttttttgtttatttttacacataataatgaatattaaacattaacagaacaattatggcgaatgaaattataaattatggcgaataaaagtacattcacgattttttatgtcaaaagaattttgcgaaacaaaagggttcccccctttggtttttgataaattcaaaatctttcactttttaactatcgccaaattttcttttcaaaattattttcaattattaaatagcgtgaaatacgtaccatcggcgcccccacaaaatgtccaagccacgaaatgtccaaaagagtaaaaacccacgaagtgtccaaaactcgaaaaagctattaaaaagccggaaaatgggtctaaattaaggtattcggggtcgctgaatacgaatacgacatttatataacccatttcctaaccttcgatccacccgaataagaaaaatctcaaattcggttaaaatatatgctgttttttgtcttcagattttgttattcattgatcgaacaaaatgggtgggccgagtattatccacctggcattctggctacacccggccaccagttagagaggaatcttttgttgcaagttcatgccatgattcagcttccgcttcaatatg

SEQ ID NO: 107276 - DNA, 590 bp, Heterodera glycines
ttttatggccaaaaaattatatttcaaaaaaatataataatctaaaggaatatgtgtatgtaaaaacggaattgttcaatctgtatattatgttatgtaaagttaaaagttaattaaccagaataattaactccactgcagtgggcaattacggggcatagcccggggctaattatccccttcttttgtggtgcttaatcaataatataacgaatgacaaaatggaacgcataaaatggcactttttcttaatcattttttagcaaatgataaaccaattttaaatattctttttgttaaaagaagataaaaattattggcgcttttagaaaagtaaaatgcatcaaaatttaaaaatcaactgatcaaaaaatatacacacaaatggaaagcaaaataaattactcatcgaagtcccactctttgcctaagaattggatatatttgaaaattaaatttttataacgaattcttcagtttattattattttggcatgctcatatttgttataacatttttattttatttttatttgctttttcttcaacttttactgaatactttgtaataatctttagcctttaaaatg

SEQ ID NO: 107277 - DNA, 284 bp, Heterodera glycines
atggctattacgctcttaaacattttaacaactgcaataggcaaacaacaaattttaactgtgaataagcctatgattgccaaacacaaaagcaagcaatgctttgggagctaccaattattcaggggtgtccagcaataaggctaagggtagacaattcacccattactcaaaatcgtcagctgtttatccctaacagcattgaattttcaacaaaagcttgggcttgtaggaaaattaagaaaattgttagaaaatatacaacactaacaggagtaccaatg

SEQ ID NO: 107278 - DNA, 1003 bp, Heterodera glycines
  unsure (1)..(1003): unsure at all n locations
atttgtggatttaaagaaaaaatttttttttacaatttactcttccgtaaacaaaattttgaaataagatacggtaatgttaattgatatggttacaaattgacaataatccagttacagtatgtttgtcgcctttgggttttgataattttcaaaatttatttattgaattacacttaaaacgaggttgtacaaaattttaaccttttgtacaacaatactttatgctacataagtttatttaaaataacttattacagacgcatttttatggcgcattttccactgacgcatttacatgagcgtaaaaaactccgtcccgtacttagaccatgaaatgggtcggtgctatgtcgttatttaaaaaacaccaaattgaaattttcaacaaagaactggctataaccttatgtcaaagtcaaccaaattagnnacattcttggtatcattcaatagcccaaatcaattctctgtttgtctgcaaaatttcaaaaaattacgtcgagtttcaacaaagttatgaccaaaagtacccaagcgaaaccgggttttcaaaaattttaggccataaatttttgaaactcaacaaaatttttttgaaattttgcaggctagtagagaattcttagggtttatattagaatgaaagctagaaaccaaaaactaaaaataattattaacgaaaatttttaattaaacaaaataattttgatcatccaaaattctgaccaaaacattcttagaaccaacaaaattaagaaatcttatcatcattcaatagccctaaatgttttctacaagcctgcaaaatttcaaaaaaaatttgttgagtttcaaaaaagttatggtcaaaattttttgaaaaccctgttgtttgtgtactttggccataccttggttcaaacttgactaaattttttgaaatttaggttagctaatagataactctagtgagggaggcgtgttgggtcccccagtcgacacaccgttcgaagaataaatg

SEQ ID NO: 107279 - DNA, 1003 bp, Heterodera glycines
gcctatgggaggggtgcagccctttgatgttgccgcacgaacccatgcctatgggaggggtgcagtcctttgatgttgccgcccgtggacccatgcctatgggagggtgctgccctttgatgttgccgcccgtggacccgtgcctatgggaggggcgcattcctttgatgttgccgcccaaaacccaaacctattggaccactttcaagttgccgcccagaaccaaaatctattggaccactttgaagttgccgcccacccaaatccgatttcccaaaaccgcacgggtgctttttttttgcccaacccatccctcccggccgatgcatcgccgcgcaaattaatcgataatgacaccgccctaccctccccatcgatgtcgccgccgcgcaaaaaaaaaatcgataaaattaatcgataatgacaccgccactctcatccgctccgtcgatgtgcagcgattccgagtcgtgaaaaaatcgataagcaccaaaattgttaatgaaattcaattaattctaagatataggaatattaattgtacaatagttgaataaataaaaattcattaaattaatgaaattgaatttttctgaaataattgatggtcttttatttttcttccattatttcgcaatctgcacgtgactttacgattcgcaatatggaccaaattaggtcacctgtcaatcaaattttttatttcgcaatttccccatcgatttcgcaatctacacgtgacttttttttgttgcatatttcgcaatagacacgtgactttctgccattgcgtcgaaaatataacatttgtcaacgaaatattcctccatgtcaatgaaaaacagtcacgtgccaggtgtcagctgacacgaggcattctgcggccactataaaagccccacaaactcacttctccattcagttcaaccaaaaagttggattttgctaaaataaaaattgtgcgctcttatttaaaaaaaaatattaaatttaattaaaaatg

SEQ ID NO: 107280 - DNA, 190 bp, Heterodera glycines
gagggcaacggctgcactgttgtggtggaggaagaatggaccaaaatgctaaattggaaggactaattaattatccaataattaatcaattaaataatttgatggcaagcctcacttcggaatgccggtctcccatggaacagttgcgctgtgacgcgtgtacgggttgggccgagttcgtggcgaaatg

SEQ ID NO: 107281 - DNA, 919 bp, Heterodera glycines
catctgctgataaagcaaataaaaattatgggaaaactcaaaatagaaacgtcattttgtatcgatgtttcaatgttacggaaaatattacccaccaatcaatcatcaatataaaaaaaaaagacaatttcatttaaatgttcctctccaattttttctgaatattaattaatttaattatccttaattgatttgaattttcttcggtttttctttcggtgaatatttgataaattttaaattttattagttttggcgtaatgccatttcaaaataaaaagaagacgccgcttccttttttgtctcgctccacaaacacggcatagcaatagcaattggaatgtggtggatttgcttttattttatgtgtgttttatgtgccttttttgtttgtcgagccttttccgtttgccctattggttttcttccgttgcatgagaatggcactggaggagagaaatggcagcataaatttttgagtgacagcatcatcaagttttgtggatgatgccagcatttttaagcagacgaaaagctaaaatttccgaatgaattattttttctaaaaatatttttatttttcacaaaaaaccgaataattctctatttaaaacgttaaatttagtgcgccaaaattgaaaatttatatccattcacatgttgagcccaatttcaccttcccccttccccttttcaaaatttgtcagttttccgtgtgatttatttgtcacactttctccccttttagggcgaatttatcgcttatctcattgattgattggatttggtgttggtgtatatgaactgtttagaggtcagaccaccctttttctgtttatgcatggcatccgccgaccaaaaaaacacttcctccgccaccgcttcgtccgccgcttttgccagcgaccccccaaaaatg

SEQ ID NO: 107282 - DNA, 245 bp, Heterodera glycines
cctagtttgaattttgatgtggagtgctatggatttatataggggaagatatttttcaggttcttttttgagtttcttccaaagagctgccttttctttaagctttttgtcgctaacattaacgcagcatttattttttgattattttttgtatttaattttaaatttgttttttaattttctctttttttgtgtgtttttattccttccattttttccttatgcttcagccaagacggctgatg

SEQ ID NO: 107283 - DNA, 123 bp, Heterodera glycines
tttcaggcctttttggatgcttcttcccctgcaaattacatcattaacatttggttccattcatctacttacacttcgattttgccctacgatttgacaaatgatttgactggagagcgaatg

SEQ ID NO: 107284 - DNA, 1003 bp, Heterodera glycines
aaccactcaatgtttgaaatgttctaatggagatggtagcttttttcaactggaaaatacaaaagttgcaggatattgtctacaatgtttttcgaaaatgattagacagaaatttgctttttgtcttggcaaaaatcgcgtgtttaaagaccaacaaagggtaagtcgaattttgggcattagcaaatcgtttttgaattttattagaaaccaaaggaggatggtcgggttagggattaggaattagtcaaaatgggtgtcagatgcgtaatcacgacccggaaaacccacgggagcaaagtttcacgacttattatgtatcacaaaaaaaatttgcaaactaaaaggattaccccgttggtttttaatactattcaataaattggtttttaatactattcaataaatcatcgattacaatattagtgccgtgtttttactccttattcaaattttagcgtgatgttttaattgtttgttattcaaatgatattaaatcgcttcaattgcttcggttggtacgtgaggcaacaactgaccaaaatgtacacaaaagactacggttgaaagcacaggtaaaagcccttttaaaattcaaaataggtagttaacttaagattttgtacctttcaaatgccatttcattgtttaatttgactcaagacgccgaaaattgtcgattgtatatcacaaactttaccaaataattggatttggcattttgcacatgaatcagatattctcaatgaagacttcagaaacaaagaccaggtttttattaaatctgtatgcttctaaaaatgttagaatgataaaacaactaaacaaattgttcacggaaatcctaagaaattcactgctgcgatacaatgagttatttgcgttgtgtctatcaaattctgatcggaatgagttcaaacgactgcttcgtacgaaactgatatattggtaataaaaatcggacacaaataattaaaacatttattgcagtctttccgaaatg

SEQ ID NO: 107285 - DNA, 138 bp, Heterodera glycines
ttcaaattaataatcaaaaattctcttaaaatttttttcactcaattcaaaaaaggaaaaaaatttgcagtcaaaaaattattcgaatttctccaattttgtttccataatttccgaaagttattcggtatcataatg

SEQ ID NO: 107286 - DNA, 196 bp, Heterodera glycines
tattgtcagcttttcccgttagtcccacgcttggtgttgtttccaagtcaaaaccccatttcattgacagttaacctttgctgatagtgagatggtcccaagacattaatactttgtgtgtttatcgcgtcccacttcgatttcaagtttccttttcacctgttcaaccgacaaaacagtgcgcgtgtgggacatg

SEQ ID NO: 107287 - DNA, 167 bp, Heterodera glycines
ttcattaatttttttttctccttaatgcataatgggattaccaatttttttagcaaaataataaaatcttattacgaactgaacgacttcgaatgtctacatcagggggctcgtcaaatgagttctccttcggtacatcccaagccttcgggcaggaaacaaaaatg

SEQ ID NO: 107288 - DNA, 358 bp, Heterodera glycines
atgcgccacataagagcactaatgtgcctgtggtttgctcaataaatatatttaaatttgaaatatatgtttccttttaaaaaaattgtggcaattttctcagcccttcaatcaatgacatatttggcaaaaatatagattttttatacaaattttatttttgattgtataataacataaattcattttcttcatttcattgaaaataataaattatacaaatattataaaaatatcattataatattttttaatccttgtgaatttttttaaaatattaagccttttcatatttcaattgtttaacaatttttatatttattaaaaaattatgatacaattttagtgtcaaccaatg

SEQ ID NO: 107289 - DNA, 115 bp, Heterodera glycines
cctcgggggacgacatgtcgggggtcggggaataggtccaaaaaacgtctcgggtcgggtcgggggtcggaaggctcggggtcggggcttaaccctattttcaaggctcgcaatg

SEQ ID NO: 107290 - DNA, 196 bp, Heterodera glycines
ccacagcaatttgagctcccacagctattttcgatcacctatcacaagcagtaaatcccgtttcttttcttttttacagtccctattttgtcttatttttggattacacacattatggcacgctatcgccaacggggccatcatcgtccgtccgaaaagcagcagcaaaatcacggcaacatttttgacaaagatg

SEQ ID NO: 107291 - DNA, 487 bp, Heterodera glycines
ttcagtaagcggaccaaccaaaaacagcagttggcataatctgctgccgccgaaagggccacagcaaattggcaccgttaaacattcgaaaaataaaaacggtggccgattaaaaatggacacccaaaaaatgcgaaaattgattgaaaaactagtcaacagacaaaaatttatgaaaaatgatcaattattgttatgattaaggagtcactgataaccagcgctggcttatgtcttggatcgtagaaaaattaaccgatacgaattcgagagtcataatttattaacgaataattggaaccgggaaaagccaaaggaagtttcggatttttcggaactcaaaataaaactggcagatgagtgagtcgagattctcgtgctcctaaattatgaaaacccagaatatatataagcatggaactcgaagagcttggttcttgacattttagaaaaaagttcggttttttcgggtattttagcaaaaatg

SEQ ID NO: 107292 - DNA, 374 bp, Heterodera glycines
ttgcgttgcgttgcgcactgaagcggttcgttggttggagtgtggtgaagaagaagaagaagaagaagaaatgtgaagcggagggaaagacgaccccttttatacggatccaattctgctggaaggaatttggaaaaaaattgatataaaaggacggaaaatgcccaaaattctcacttattccatttccttcaattcacgcctattattttcgacacgcctcgcgcctaattactgaggtgcgccttcttcaccatcgcccgttttcccctcaccccctccatttgcacatcattaatttttttccccttttacagtgatcaacaacgctctgccgcgcatttcaacctcaacgcacacagcaaacgcggatg

SEQ ID NO: 107293 - DNA, 539 bp, Heterodera glycines
ttttttgcggttattttctctttttttgtttatttttcatttttaaatttccccgggaataataagtcaatttggagctgtctcacttttgttgttattttctgcacatcgtagcaaattaatgcgtccgccgatgcttaaaactccgattcgaatgttccgtcaaaagcggattatcccccgccggcaatttgaacctttctccgccaatgccaaacattgccaatccctcccaaaaacacattttgccattaattaataaagttgactaaagctgacgttttaacaaaaagcacttaaatgaattaccacgaacactcaaatggcacttaattattatgattgattgcacttctttttccacctgcctttctctttctcttcctcttctttttctccaatctctcctccgctctctttggcactttttttgtttcacttttggcattttcctctcccattttgacattctctccctttttccttctctcatccctttcagttcctcccattcattctttggttcgcctcgtccaatg

SEQ ID NO: 107294 - DNA, 59 bp, Heterodera glycines
aattttccggtaatttgattccgaatgtattttttcaggtaattcgtgtccaaccgatg

SEQ ID NO: 107295 - DNA, 344 bp, Heterodera glycines
aataatttagtatttttgagtttattttccgctctatcctcgcttctctggcccaaatttatcgcacaagcaaacgttgatcagtagcatttttggtaatacactgatggtaccccctgcctttttagacaatataaaatattttttatgaataagttttttattgctttccagggttggagaatttttttagtttaggtgtaccaatttataacctattttaatattggcacaaactatttaatatcatttaatttaactaatcggcattactacaaaatcgacatgcgtaaatatgcgagatttttccattgtggtaataacatttagctttgccgataatg

SEQ ID NO: 107296 - DNA, 211 bp, Heterodera glycines
  unsure (1)..(211): unsure at all n locations
aagttaattgcctcagatctgatgtttgatcngggttcncaatagggattgctgtttccatttcaatgaaatttgggtgaaatgtggccagttattgtttggatntagtgtaatagccgttacataacttggtgtactttgaaaaatcaattgatcgaattccaaatttaaatgttttcgatccaataactcattctgttcacccaaaatg

SEQ ID NO: 107297 - DNA, 732 bp, Heterodera glycines
ataaccgtgttcagcgacctcgaaaacccctaaaaatatgttttccttttattttggaatttggatttttgttcgaattggtcaagtttttaagataattttttcgaattttttaccgtttttcttaaaatataatcattcatttaaatactccaaaatttcttcttgaaatagtttctttcattttgaatcggtttatgaattttcaggatttttgaaataaatgatttttgttgtagtgttttctttttgatccgctttgacccttttgttgataaaaaataaaaataataaaataaattatttcatttcaattggaaataaatatttgtaaactaaaacaatttgatgatggaattataaaatttttagctatattatttaataaatgaagaaatgagaatttattgctttagattacttataaaaagtcaggacgaatgaaaaaaactttcattttagtttcacccaaatcagaattatttttatttaaaatctttaaaatctaatatttaagggttgtaagggttagggtatttaggcaaaaaccgggttcgggtattaccgggtccagaaaagacgggtccgcttcgggtttcatgtttttaaaccgatccagtgtccgatacccggtaaaaccaggtattaaaaaaattttgaatttttattttttttcaaaattataatttaacagaaaattttttgctgtaggaacaggccttgcgccacatg

SEQ ID NO: 107298 - DNA, 830 bp, Heterodera glycines
tctggttttcataattttttttcttctaacttttccaatttttgtgcttttttaatatttgttggacaggtatgcttagcaaaaaaaaaatacgtaaatttttgttaccattaaaatctcttttttgttatcatcaataactacttgattaacatctttttgatttgattacataacttgaaaattttctctcaagaagcaatagaaaataaaaaaatgtgcgacttaattcagcaaacccagtgccattcggccatttaatttcccaggaatttttttttttgaaaaatatcgtactgcaaaagaaagtgccaaaaaatcaataaactattatagtttttatcaaattttaagatagaaaacttacaaaaaatccgctttttggatcatatcttctgaatttcaaggacgtttgtactaacattaataactgattttccgattttccctcttttaatggtcactttttgcactatcgttcattaaaaaagagaaaattggtgaaccaattcaaattctcatgtcatttactttgcccatattctctgttctcctctctcccactttttgggtcatcattttgccgtacatttatttatttatttgtgtcgaccctataaatattggcaatcaatcagcagtaagccattcaaaatgcacacccatcatattaatacgcttacataaaaaaaattattttacaaataaaatttttatcattttagaaattttttgaaaaaaaataaatgtcaacttttaccaatttgtcaagcagcagcattttcacaccagcagaacagggtaaaaaaaagattaattggcaaagaatg

SEQ ID NO: 107299 - DNA, 145 bp, Heterodera glycines
caattatttccgataagctgtcgctgatttgccgctttattttgtttgttactcactttcattcattcgcattcgaagtgaatggccaaaagataaaaaatattaattaaattaattttattttattaaagtggccaataaaatg

SEQ ID NO: 107300 - DNA, 930 bp, Heterodera glycines
tcgaattgaattcccttttaaatgtttaaaattgaatattgaattttataaattttttaaatattttatgggttttcattattgtgttcaaaagaaaattttaataaggtggcaatttcaatttgtttattgaagatttaattaaaaaattaattgcccttaattagtgattgaaattatttaaacattttactaacattggtttgtcaattaaatcatttcggtcagcacgataatcggaaacatgcgcaccaaacttgtcaaagtcaaactctgttcataaaaatataaatatttttttattttaatttaattgtcctactttgtccattaattaaaactgagagatgggaaggctcttaaaatgataaatgattattaacaacaattaaaactttcaaaaaattacttgttttgtgctgaacaatttctatcacattttctttggtacaaacaaaacaaaaaagaataaaagtaattattataataaaaatgtaattcattttaaataaataaaatttgaatatttatttttacggcttttttcttttttatataataaaacacatataaaaagcaggaaatgttgaaatgccaacgatggctgtcattaatgcacttccgcaatttttaattttacgaaaacaaattacagacaatatttgacatcagcagataagaaatcgatagcagtaggaaaggtccggaaacagagttaatttttaaaatattaattaattttttttgcaatggaattaactctggctaaagcagacgtaattttgtctaattttgtggcttagaattaaatttttaaatttttttttattttattgaaatccccaaatgtcgggtccctaaatgtcgggttgccaaatgtccgtggttttctaagtgtcttttgctcaaatgtcgtccggtccccaaatg

SEQ ID NO: 107301 - DNA, 399 bp, Heterodera glycines
cctgtaaaaaaagatttatataaaagttgtattttcaagagatatggacattttgtcatgcctgtctacactttgtccgttcaccacaaaaaggcctaaatgtttgtgttcgggagacaccatttgaatatgtgtgcattatgtttttgttatttccccctccgcacattcattgttgaccccttatatttttgcatggagattggactcaacatttggcttcaaatttgcgagtttgaaagccaatcggtttttcagctttcagggaccgagaatattatcttagaaacaccgaaattttctatttaacaataaatattgcttatatttatttaaataaatattgcttatatttatttaaataaatattgcttatatttatttaaacttttagtgatg

SEQ ID NO: 107302 - DNA, 991 bp, Heterodera glycines
attgattgatgtatttgataactctcgaacaccctttatcattttgtccatcctatcattatcctattatcacaatttttaaacgatcattgattgccacttggcatttgcaattctcactcattatttaaactcatccaaccaatccaataaaccttattaattgaaaaataaataaacatcaattcgttatgcatttataagagggggacgggaatgaatgaatgaatgaattttagaaaaatttagtgtccataagcacggggttgggcactagcaccgtatccaacccttcgccttaatgcgtaggtcggaggccacaagccgcgaccaggcactagcacgccaaccccaagcacgggttgggcactagcaccgtatccaaccattcgccttaatgcgtaggccggaggccacaagccgtgaccaggcactagcacaccaaccccaagcacggggttgggcactagcaccgtgtccaacctttcaccgcaaaagcgtaaggccggaggccacaagccgcgaccaggcactagcacaccaaccccaagcacggggttgggcactagcaccgtatccaaccattcaccgcaaaagcgtaaggccggaggccacaagccgtgaccaggcactagcgcaccaaccccaagcacagggttgagcactagcaccgtgtccaacctttcaccgcaaaagcgtaaggccggaggccacaagccgcgaccaggcactagcgcaccaagccaatatcaaaacaaaaaacataaaaatgaatgaatgaatgaatgatgaaaaatatttagacaaaattcaattcagtaaatattaatgcatgagaaaggtcagagaattgctggacgggcaaaagaaagaggggggaggagagaacgggaaagttaattatctcataattcagtgctgtacgatttttatttaaatatttttttttataaataattttaaaaaaactttttagattttttaaaaaatg

SEQ ID NO: 107303 - DNA, 448 bp, Heterodera glycines
aaaaaatgaaggatttgtttaaaaaaatatgcgtgtctaatcaaacccataataaatgaatccgacagctttttctgtctaaatttttaagtggactcaaaatagcccatttttaacagttttcgtcaaaaaattacccaatatctgtatttttgggtaaattaaggcaattcagtctctctttttggaggcgccgccttggcaaagttttgcaaatttatttggatgaaaatggttgtgggaaatcaggactgattataaagcacagaaaacaatgaaaagatgctgtaattcaacagtcgtttcaaaatcactatttctaactggaaattttcggtatttatagagcataatttgtttccttttccccaattttcgctttatttatcagtgacactttccctttgccctttaagaaaatcacccgaatcggaaagataaaacaatg

SEQ ID NO: 107304 - DNA, 215 bp, Heterodera glycines
gcccaaggccaatcaaatgctacaaatgcagacagctgcacccggccgtactctgccaagaaggcaccaatgccgcaacgcaaatacaacaaacagcagccgtaacggaacggcacccaaagcaggatgaacagaaatccacaagtcaaacggcacaattaatgagcaatgccgttaaaagcagtgacacccgagctctgctgatgacaacaatg

SEQ ID NO: 107305 - DNA, 310 bp, Heterodera glycines
  unsure (1)..(310): unsure at all n locations
acagatgnatgcatgataaaatttaggacanttattgnaatgaattttttatctatcctataatttttggtatacaaattgtgccaatttttatagggtttttttggcttttatttattgatgaattctttggtaaaattaaattcattatttaattgctgttcatttaattaatgctgttcattttgttgcagccagtggtgtgatcgacacttggggctgtcagccgtccaatgactattgctcaaaagttggcaaattgtgccatttttgcaaactaggcaaaaaggacgagaaacactcgaatatg

SEQ ID NO: 107306 - DNA, 495 bp, Heterodera glycines
  unsure (1)..(495): unsure at all n locations
cagatgaaaattttgaaaagcctcantttggcaagcactcccccctcatttntgggtcaaaaagcctcattttcacaaatttattcaaaacacgtataaaatgttcaaatgttatatttttgattgtccatgatcaatttgagcatttttttttgttagaaataagcattttttgggattctgaacatgaaaaacgaagttgattttttttgcggcgctttttccaaaaaacttttgggaaacaaggggggccggcggtgccgttaggcgccgccgggaaaaattttgtaattttcaatgcgatttgttaacagattttgtccgaaaaatgaccaaattttgcgattttgagcaaatttttcctcattttgaaaatttagcctcattgacctgtcaaaaaaccacaaaatgaggctaaagcctcagatctgccatccctgagtataatagagatttagatttatattttttacgcagaccatcgcggaaaaaatg

SEQ ID NO: 107307 - DNA, 72 bp, Heterodera glycines
aaataataataaaataattgatttgttttatagctttttgtgctcataaatttaatgttttgtcgtgcgatg

SEQ ID NO: 107308 - DNA, 1003 bp, Heterodera glycines
ttccttcctatttttggtgctccccactttgctccgtccctccgacaaatattttttgtattattttttccatttgtgttaaataaatattttggtgttcgacattcacaaataattgtttgagcaattaaccggctcaacaaataattcataaattagtaaaaaaattaaataaatgtgttatttattataaattgatgtatttaaaatcatttcttttttcaatcggctatttttgtcaaaatgatgcatgccttttggcattcgtaccgcagcctatcccccaataattagacgattagagtggaataataatagcctttattctatccgtacaaaaatattagatgaaccgcttcgagggatcgagaatagccaatttctcctcctgaaagaaaaaagaaaacttgttctggagggcagaaaaatagtttaagtgggcagagcaaacggaaaatgacgtcttaaggcatactgtacgaacgaagggtcgacggtacacattaaaataataaggatacgttacaaagttttttagtttctcattcaatggaaaaatttaaaaattttgctaagttttgctaatatttatttttaaacaaattaattttaatatcgaaaccaacttaatgtttatgtaaaaaaaattgcttaattaatttttattaataaatattaataaaagacaaaacgaatttgatgatctcagagttttaaaaagccatgaaaaaacaattaatgattaaattaaaatttctcaatttttattgtttttgccatgcttttttcagtgtggcaaagtgttcctccgtttttgatatatcagagcgttagaggtggtttattacatatttttacatagccacacaaaatgttcaaggtacttagaacccgtcttcgcactaatccagagtctgttcttattgatttcgagctcggttttttatttttgaacttttgaatttattgaaataataaggagccagaagcgcatttaaacatg

SEQ ID NO: 107309 - DNA, 1003 bp, Heterodera glycines
  unsure (1)..(1003): unsure at all n locations
aacaaatagacaacaacaacaaaataatgacgaaacaatgttggagaatacgggaccggggcgggaattcctggtcctccgaggtcccgattcccggtctcagattttgaaaagctcatgtcccggtgccggtctgttaaatgaattaaaagtgtattttgtttgaagcttatagcaagcagttttatttgacttttttttttaaatttcgcccaaaaatgctttgaaaatcaaagcaaaaaatgtccaacttttaattttttagaaaatctgaattcttagtcaaaatttacattaaccctgtttgtcctgaatttttaaatataaatactttccattcacaagaagataattcataataattaagttaagggtgaaaaatttaaacttttaaccattttatactcaaaaaagctggtcaagataaatgaaatatttccatttttagggggcctacttttaaaaaattaaatcgatccataagagatctatttttcgtgtacatatagaattttatggtggtgttttcgcagggttatttaccaaaaattgcaaaaaatatatatgccgaaatatttacactaacaccaaatattttaagcctgttgatcattcgattagtttatttggcccatttatatttaacttatgataatttaatcgctttcataaattcttatattatttgcgaatgttttttttctgtcatttcattatttattatttatttatttattattcatttatttatttatgcattcactttgctttgttgcatttatcacatcttctcatctcgttgtccaaagattcattccttgaattgatttggccttacaattatttatattccacattcatttattcaacaaacaaagcgactaaatatgtaacctaaaggcctatatttaattcgaaattaattttgattaattatttacatttaattatttaatactaaaaaataattagatgaataattatattacgctttanaaacatg

SEQ ID NO: 107310 - DNA, 108 bp, Heterodera glycines
aaaaaatagaaaatttatttatttattttttttctcccgtaaggaacggctgaatttgcgtcgcccgaggtggtgctcggcaagtacgtcagcttttactcggacatg

SEQ ID NO: 107311 - DNA, 183 bp, Heterodera glycines
tttgatgcaatggttccgttttgactccaaaaatgaaaaacttctaaatggtaaaaaagtgctaattagtgcttaattgtccttccatgctaatactttaatttaatttactaattagcatctgctaattgttctgctgttgtggaggtccccgatgttgatccatcagcattcaaagtgatg

SEQ ID NO: 107312 - DNA, 97 bp, Heterodera glycines
ctatttaaggaataccgtaatgccaatttgctactcttttcattttccctcccgttttattcctcaccataaaagtcgtatgttcaggtaggcaatg

SEQ ID NO: 107313 - DNA, 872 bp, Heterodera glycines
ccctaaaatttttaaaaaacaccctcctaagaatcgacttataaaatttcagaaaaatacaccccttaaaaatcgaccctaaaattttcaaaaatacactcctaagaaatgaaaaaaatttctcaaaaaattctgttaagagaattttataaaggaaatgaagctcattggataatttttggctaaaacctccccccccccctcccctcatatttaatgcatttttaaattctttttcacttttcatataggctacatgacatttcgccaactgacatctcaccaactttacatctcgccaacatgacgtttcgccaactaatttcgccaactagtcgaaaattgaattttaactatataatgatattaaatttattataaaagtgcttcaagcattgaaatcttcataaaatatataaaatatcaataaaaaaacaataataagaaaatgtttaaaatcaattttcatcggcctcagtttcttcaccactctctgaatttccacggacgtgaagtccctccacaaagctctgcatcacgagcccgagcaggtgcaaggcgtttgtcaatccttcttccgattcaaagtcggcctcgtcaaggatccgcaccacattttgttctttgatgacgtaccgttgtcgtcgttaattcttaagctttgattgatccaaaaatggttggaatgaacaaatatgaaaaaagttaggacataagaaatgatgatggtcactgattggacgtgtaaactggaatagggctgtatttgatattaaaacagctaattttttaatggcaaaatgtcagattttggcttagtaggcgaaatgaatgtttttggctgagttggcgaagtgtcagttggcgagatg

SEQ ID NO: 107314 - DNA, 674 bp, Heterodera glycines
ttttataatgcacaaaatttcgccccgttaagtcctcgtgctacgtttggctctttcgtttggagtggacagtttcagaaacttctttgcctgatttttaacagattttgtattaaaaaatgccaatttggttgatttttcgtcttaaatttaatttaaaattaaggatctgagaccggcggtgccgttaagcgtcgccaagaaaatttttgaaagtttaattgtgatttgttttatgtaattttcgagttgttgatcacgaatctgacatcaaaatttagattattcagaaccccggacccaaactcgaacgaagtcaaaactcaaatcttcgaattccgcatttttatctcaaaacgaaactgaatcttagtccaaaataaaaaagttaaattagggaccacaattgtttgccattaccataaaaaatcatttaaactcgaaaattcggaatcatgacatttttagtggatttttgtctttttcgtccttttatactcacaaatttgtccattgaaattgcgcaactaacagatttttcattggttgaaatggctatttaaaagcgattcttcgtcaattgttgtcattgtcccagaatcatttctttttttttgatgtttcattttttcattcgtgtcaataatttttcagcctccaatttcagccacatg

SEQ ID NO: 107315 - DNA, 297 bp, Heterodera glycines
taaaataataattaaattaaatattactaacattgatactttacgtgaaattacatctctgtaaatatatctatgcattattttctaaattacactcaaaatgcgacctcttatgtcctattcttttttcgaattttttatttttaaaattccaaataatatttttttacttcatttttcaatggtcaccttttcaaagcccttaccttcaaagttattttttcatatttatcataataatgtgttcttttgtcacaggagtggacattttggggcgaaacaagagaagaagacatg

SEQ ID NO: 107316 - DNA, 160 bp, Heterodera glycines
ggtaaattttgtaatttttaatgcgatttgttaacagttgaggaatttaggacccggcggcacctataggcaccgattccccaaaaaattcgaaaagaattcgttataccttgtctaaaattgttgaatttgaataaatattacattggctttaaaaatg

SEQ ID NO: 107317 - DNA, 363 bp, Heterodera glycines
acgcgagccggcgcccgccagcgcactctccaccaaactgatcgggcgatctctgatcaagcagaggggccaaacaagtgggggattttgcgagatttccacgttggatcagttttaggtaggatttacccaagaattcaaatcaggttcgaacctcgggagaaattatttttgtttacaatttaaaaaaaattcggagagaaacgatacgggtggaaacgtaggacatcccttgatccgaattcaaactcatttttgtcgcgggatccgagatcgtcaagacccggattaaggaccaaaacaacccgtttttacaagcaattcccgcatccctaatgtgccaaattgtccgacaaaaaaatg

SEQ ID NO: 107318 - DNA, 101 bp, Heterodera glycines
ggtttgttcaacatgttgtttccgtccaacagatacacacattattatttttagggggcgtgtttaagttggaattgtttctgccggaggagtatccaatg

SEQ ID NO: 107319 - DNA, 626 bp, Heterodera glycines
atagcctcccattgggcagctaatttattgaaatggcccacaaaatggccagcagaaagccgggggaatggcgaagtgtaaagacacaaagacaaaagtttaatttcaattattttggccaaatcataatttagcttaaacttagtcaaattaattaatcttggtattgaaaggtagagctctacctatcctctactatagtataattttttttttaatctagtaaacatttacaaaaagttgtaagcaaaaaattccgaaaaatttaggactcactaattccaataccaaatttaattaatttgactaactttaagctaaattatgacgtatttttagcaaataaaataaaataataattaaatttaaatatttttcaatcattgatacttttgtaacttcgtcctagcaccggggtcaggactggacgcaattacgagtgacggaaatttcaaaattcccccggcgaagcctatcggcaccgccgaattaaaagggtcgtttcggcgttggtcgacgtttcggttgccagcccaagtttttgggctataagttttttttgtctgcgttcacaaacggtaataaatgatgcgtttcgggcaaatattcatttaatagctcatatg

SEQ ID NO: 107320 - DNA, 574 bp, Heterodera glycines
ttgccgcgcacaatttggaccgggaaaagaacggacttttgctttagggaagaaacggtgagtgcaaattgacaaggaataattatcccataattggcggctcattagtgcaaatgcgtcaatgatattgtattttaaaaaataaattctgtaactgaagactgtaaaacttgtaaattttcagaatttgtgaatatatatatactgtaattggtatactgtaggtagttccttctcatacaaatcacacttaaaaattcagatcactttgcaacgtgtatcgcccttcactattagcaccgtacaattaatttgatcatttttacgctgtcttttccccgctggggccacacttcccacttccatgtacatttgagggttcaacattcggaatgaagaaattaaagaacctcattttattttggggaaaattgagagtatgggtaccaaatggcacccaatgaatactatggtatctcgtttaaaaatactgtaaaatcactgacgcattttcacactgacgtatcgtcaccattcacataattagcggaggaagaactttttcgaaaaaatg

SEQ ID NO: 107321 - DNA, 189 bp, Heterodera glycines
aagtttcaccctcattttttttagaacaaactatcaattagggaaaattcgcaaatttttccccattacaattcaaaaaatcgaaattttcgtattttttcgccaaacatggttttgcaggggatacggtttttcaaaaattaaaaaaaaattcgtttaaatttgggaaaaaaacaggtgggcaacatg

SEQ ID NO: 107322 - DNA, 370 bp, Heterodera glycines
cccccccccccccccgccgcccaaccgcacatttcgcctccgaatttgcgcataagcagtttaaaaacagtgtaaagttcaagtctcccaacagttctagggcgagcttaaaatgttttgttattaattctataatggacttcaaaaatgtgcaccaattcaattcgcatttaagcacaattttaaggcccattctgcggatttgctcaaacacatcgaacttaatgtgctgaaaaagtttgtcgctaatctgtgccatccatcgaatgttttgttagacgaattgtctcctccaaatgtccaattttcttgcgaaatccccgatgctccgtacggtcccatttttggtgtgttgcgcaatttctttatg

SEQ ID NO: 107323 - DNA, 379 bp, Heterodera glycines
tggtctcataataaagaagtaaaaaaggggttatgcaattcttttacgcattggctttttgaacctctaacccggattcgaacatttttcgaaaattaaaattcgcgtttcttgcaaaaattgttaaggcattgttcgaattttacaataaaacacaagggattcagatatgaaaacggaaaaacacattggctgcattcaacaagcaatgttagtaaaaaaaaatgagaattttaaattttcaaaagagttcgaatctcagttcagggtacgaaattaaccgaaagaaggccagattcgcgctaagcgcatcggattaatttttgggaccgataatctttaccattgccttaaatagatgctgtcactgctgacaatg

SEQ ID NO: 107324 - DNA, 290 bp, Heterodera glycines
atgaattattaaaatagtttcacattttatatcaaatatcaatttcgacttcaagtacgaaacttgaatgaaatttattctacatatttgcagttgctaaaatttaaaatattcttgttgcgttaaatttatcgagttttttaaatattaaaaataatttgctttaaatgattttgagaaagtaggcaaataaattttgaattattgtaaatatttattttactttttttctaaattttaatttaattaattttctaaatatgtgattattttagttttccttcattatg

SEQ ID NO: 107325 - DNA, 173 bp, Heterodera glycines
tgcccgcgagatgtttgatcccccgccgaaagtgataggtaagtccccaatgccatgagtaatgagcagtccccttgggtttagtttgggcttacggtgagtactcctcgcagatccccgagctcgagaggcagggcgtagtcccgcacgctggtcctccctccgaagaaatg

SEQ ID NO: 107326 - DNA, 1003 bp, Heterodera glycines
aaacctattgcgcgacttttttttgaaacccaaacctattgcgcgacttttttcttgcaaacccaaacctattgcaggggggtgcgcgacttttttttggtgcgcgactttatgcaaattattttaattaaatttatttaattttaaattattttaaacgtcttaaaggtcaaagacgttgaatttaaattcatttaaaattctccaaaaattccccgcaccaagcggatccgaaccccaggggggcggccagactgacgcactaaccactcggccacattggcaatggataataaacattaatttgctctcataaagggaaaaattacgtcaccagcggcgggagggggcgagagaagcaacaagcagatgagagtggctgtaattaagaacaagagagacacgctgtgaaactggcgagggctaatgtcatgcgaaaggccgttggcaagaggtcaaaaaaaaaaaaaaaattaaatgaccaaatttcgaatttaaaaaaaaaatgttccaaaatgaggggtttattataaattaatatttttaaataatcaaaaaaaaaaaaaaaagatttatataaatattataaattcttgacatttaaatttaatctaatcgagttttttcatttaagcatatatgctgttttttaaatgtattacatttttttaatacttttaaaaatatgttatttaaaaaaaaatcaaaaaaaaaatccaattcttttttattcttttttgtctcaacggtcaccagacaccaaagggccatctgtcacaacttttgaccaaaaagtgagaagggatggcctaaaataaacacttttgaccaaaaagtgagaagggttggcctaaaataaacacttttttaaggggaaagggtatccgaatgtgtattttgcttttttcgccatttacatccaatccaaacaattaaccctttaatattaaaaaaacattttttaaggaaaaacccaccaaaaaaaatttttgtttacagtatg

SEQ ID NO: 107327 - DNA, 243 bp, Heterodera glycines
  unsure (1)..(243): unsure at all n locations
cgtgatgaaacccccnggaggaagtgttcccgaaaatcccgtagattgacgtggacgcctccggctctccgaagcattccctgtttttcactgccaaacccaaattctattctttgctttcggtgaatttgccattcgcttttaattttatttatcccaaaaaaggaaataaacaaacgcacacaaaaacttgtgaatgcattcgacggacatcagacaaaagtgaacgaagttgaaaagatg

SEQ ID NO: 107328 - DNA, 930 bp, Heterodera glycines
tttggggaccggacgacatttgagcaaaagacacttagaaaaccacggacatttggcaacccgacatttagggacccgacatttggggatttcaataaaataaaaaaaaatttaaaaatttaattctaagccacaaaattagacaaaattacgtctgctttagccagagttaattccattgcaaaaaaaattaattaatattttaaaaattaactctgtttccggacctttcctactgctatcgatttcttatctgctgatgtcaaatattgtctgtaatttgttttcgtaaaattaaaaattgcggaagtgcattaatgacagccatcgttggcatttcaacatttcctgctttttatatgtgttttattatataaaaaagaaaaaagccgtaaaaataaatattcaaattttatttatttaaaatgaattacatttttattataataattacttttattcttttttgttttgtttgtaccaaagaaaatgtgatagaaattgttcagcacaaaacaagtaattttttgaaagttttaattgttgttaataatcatttatcattttaagagccttcccatctctcagttttaattaatggacaaagtaggacaattaaattaaaataaaaaaatatttatatttttatgaacagagtttgactttgacaagtttggtgcgcatgtttccgattatcgtgctgaccgaaatgatttaattgacaaaccaatgttagtaaaatgtttaaataatttcaatcactaattaagggcaattaattttttaattaaatcttcaataaacaaattgaaattgccaccttattaaaattttcttttgaacacaataatgaaaacccataaaatatttaaaaaatttataaaattcaatattcaattttaaacatttaaaagggaattcaattcgatg

SEQ ID NO: 107329 - DNA, 189 bp, Heterodera glycines
ttgtttgggtttccgggttgtgccacccgtggttttttttatttatcattatataaacccaaacataattttgtaaatttttccattttggaaaacccaaaatgaaaaaaatatataatgctaattatggtgtaatttgatcatttagaagaacagcgacgaacagaaacagcaaaactcaatgaaatg

SEQ ID NO: 107330 - DNA, 89 bp, Heterodera glycines
agtgatttttaaaagtaaaaaaatagaaaagctttaaggaattaatctcaaaattttatctggtttaatataattttcttcagggcatg

SEQ ID NO: 107331 - DNA, 293 bp, Heterodera glycines
ttcaaaaactaggaacaaaggggtccatctatgccgataggcgccgtctgaaatttttgaaaattttatcaattaattaactgattttgaccaaaaaatgaccaaatgtcacaccttttgacttaattctacaggattaatgtcgatccaatggtgtcgataggcgccgccgggaaatttttttgcaaattctaggtgaaatttgagctgaaaattgaatttattttgattgattttattataaatttattcaaaaattttggcattccgtcttataaaattttcaaagaatg

SEQ ID NO: 107332 - DNA, 62 bp, Heterodera glycines
atcccgaaatgctaaacagaaacaaagcaaagtcagtacaaacggaaacaaatcccgaaatg

SEQ ID NO: 107333 - DNA, 300 bp, Heterodera glycines
tgttactaaaatggagcgaaaaagacaaataagccgatttgatgggattttgattaatgagacccatttttgtaatttttggaaaaccacaaattatcaatgctacacgaaaattcgaaaaaaaacaaaaacatttttttttaatatataccgtattttctcgaaaggccccggggggattatttttcaacctcttcagaaaggggggttaattggagacagggccataattagaaaaaatacggtatatttctcaagtactaaatgcggaaattaataaattcaccgtttaacaaaatg

SEQ ID NO: 107334 - DNA, 271 bp, Heterodera glycines
acagaaaactgtgattattattatcacttatcatccactcccccgagattgggagacatatcaacgcaaaacattaattaactattgataatttattgattggtaaatgattttcgagcgtttcttaatgaatttgaacctgcggttttttcaaaacacaaaaaaattttgatgtaatttcgctcattaattattatattttttttcgacagtgcagaaaatgaaacatttaacgacctcggcggaatggaaaagtgacaacgaaaaaatg

SEQ ID NO: 107335 - DNA, 125 bp, Heterodera glycines
agatttatgattccatctagattcatgctgctcccttttccgataatgttgctaacaatcatgcagggatcaatcaacctgctgcgaacaaaccactttttaaagttcccgcgcccccaactatg

SEQ ID NO: 107336 - DNA, 302 bp, Heterodera glycines
ttttctttgaccgatcgttgtggtgaaaaattgggcgttggagtgaagagaaattcatatcagggaacgttgaaatgtggtggaaacgagacggatctgaagtgatggggaagggcagttcccccaattttgccattttaattttcccattttaagatgtgttttctcccttcaaatagcactgtttttgggcgttccattggttttattcaccaattcggtcgtcgctttctcttcccacccattgcccaatgtgaacacgtggccggactcaaaatggacaaaatgcttcagctccaatg

SEQ ID NO: 107337 - DNA, 542 bp, Heterodera glycines
  unsure (1)..(542): unsure at all n locations
tctagagtcaannattttttggaaaattctcaaatagacgagcatatactaaaaatatttcttaacacttttgtccatgatgacttgaggatttgtgtcataagtgcacaaaaaggtaataaattttgaaattcaaaaaagcaaacactttttatcaacgtaattttttgtgcttatttcattttgcatctgtccaaacaatccacttcattgctcatcatcactttcgcttaagtgagcaaacaaagtagtggaaaaatttggaaaatttaggcaattcactcaaaacgaagagaaatcatttatttgccaaaattttaaaatttcttcaaaagctgaaataacaaaaaaactatgtgatttagttgaatatgacagaatttatgggcaaaaaaaaatcatgaatagtttagcataaaatactaaacccatttcacactttgactcattaaagaaaaatttcgataaaaacacaattaactcataatttgtccataattgcatcataaataatcataatttataggctaacaattgaaatg

SEQ ID NO: 107338 - DNA, 113 bp, Heterodera glycines
aaaataggcggaaacgaaacaagaccagtttaatttgtccaaaaaatattgattggaatgataaagtttagacgacccatttttcaaaatttggtaaatttcttaatgaaatg

SEQ ID NO: 107339 - DNA, 255 bp, Heterodera glycines
caatcagacaaaataaaataacaaaagaattttgctatcccccccccggtatgcaaagacaaacatattattaaacgacgcccctcttattgtggtgaaaaatgtaaatgtccagagggattcaaattatgtagctttgcatcttacaataaaatcaaaaatgaatccgttgaaaaaattaattaccaaaacattatttcgttcttcaaaccaaatatctgcgcactaaataaaactgaaaactgcccaatcatg

SEQ ID NO: 107340 - DNA, 247 bp, Heterodera glycines
ttgttttttttttgtttgaaaaaattgtgtgtccacccattttgaccctttgtggatgggggcgtgcggtctaacccaccccccccccctatcaaagaaatttttttaacgaagcggggggtggggggggactgggtataaaaatgcatcagccattattgatttattttttttagaaaaatttctaaattttttgcctttcccaacagcaggtggttcggctggtgcatggagtcagcaaatcatg

SEQ ID NO: 107341 - DNA, 102 bp, Heterodera glycines
agtgcgttttgctaatatttgattttttaaattaattaaataattggttaatttttcaatttaaatgcctttattcctctttttttgagcttcccatcaatg

SEQ ID NO: 107342 - DNA, 182 bp, Heterodera glycines
tcaaatgacctccaattataatttaaaaaaaaacatttcttttggggaggaaatacgaaagacattaaaaatggaactttaaaaaagggagaaatacgtaaatagaaaattgtaaaaaaaatgaatcagaaatattttaggcgtctttccatgcttaaaatcataagggcaaacaaaaaatg

SEQ ID NO: 107343 - DNA, 686 bp, Heterodera glycines
tcgtcgtttaataaattactaaagcttgctattcctgtattttgtgtacgtagaaatattgtaaagacatgtcttctagtttttggggcagtcattggaaatggaaagttaaaaactgataagtgggttttctaaaatgttgactaagaatttgaggttctagtcggttttataaaaaacaatcaaaatttgttttgcttgttaagtttatacgggcgagtaaaaataagcgggcaaagtgttagaaaaagttggaatggtgaaatgctcagatttttttcttttatgtacgcaattttttttttatgaatttcgaaatcaatgaaatcgttttaaaaaataatcatttttgaagtatttctttttttacttatagcatttttaaaattgtaaaaatgatttattatcggaatttgaactaagaaagaaggtacagagtggagaaaaaatgagtaaaataaaaggatgagggggagagggggcggagggaatgagcggtggggaaaggagacgacaatttgtttaacggcgggggatgagaaaaaatttgctgctcaccggccaataaatgcaaaaatagcgattagattggaacggagagatatgtatttatgtgtgttgggggggaagaggcaaaatgtttccatctcccgttgttccttcggatggttttgcagtggaaaatg

SEQ ID NO: 107344 - DNA, 848 bp, Heterodera glycines
aaaaaattgcgtttttatttcgttttcttgagtgtaaaatgctctaaatttcagtgaaaattttgttaaaaattgtcaacatttctatttttcctccggcggcgtctatcggcaccgccgggccttccaaaacttattttttcataaaaattgaccaaaaattgtcatattttgaataaaatttttcaaaatgctgattttttgtcggccaaatgctgattttgaaaattttcagttggcagccctggtttttccgctaataaaatattgttttaagtcgatttttcatatttttattgcgtttccttcacgctactattagttttagaaaaatcttatttttggggtccgaattttagtttttgagccattttgtcttattttgaaaaaaacatggaaactctgttttatttacctgctgaattttccctctaaccctccccctgcggtctaaatttttttgttgtgtatcgattatttttaatgctttcgatgtgaactgtctgacttctcgctgtctgcactcctacacaaaaacaaaaagaaacaaatattgctgataatttcgcaacttttaaaaaaaatcattgttttgtttttcatttttttgaccggcaccaccggggaaaaaactcataaaaatagagggaaaaattggcatagatccataaatttggcaaatacctttttaaacaatatggaagtttcagcaaatttttggccaacgatttttcaaaatttgaaaagactttcaaaaaatatcaaaaattatggtaaaactaaaattcgtttttttttaatttttatttttatcccttttataaatgcgcctcatttcagagctaatg

SEQ ID NO: 107345 - DNA, 327 bp, Heterodera glycines
gaaacttaattgaccgaaacacggtgagatttgacgagaaacccaaaaaacgcacgcctccccaatttagtcattgtggagtggttggctgaccaaggggccccaacacaaatttttttcgccggtgacacgggcctttgtgccgacgaagaagcgatcggaaaaccgaagctgagtccatgcaatgttgaagcgaaataccacgacggaacaaaatgcacccttcttggaaaaggggaagctgagttcgaattcggagggataatccgaaaagggcaattttacgtctccaagagagggtcattgaatttgttcggcatcgaaatg

SEQ ID NO: 107346 - DNA, 513 bp, Heterodera glycines
aagcttccggcacaaactctaactcatttttcgggaaaattttcccaatggcccagtttttgggacgattttaaatcctcagtacataatgatccgaacatggaaaatatacaaaaacttaagtaccttcgtggactgttacatgatgagccttatcgaattgtatccccatacccccttattaataaaaattacccaataataataaaattgctgaaatcacgttacggtaaccccgaattaatcagagaaaatcttcacagtgaattacgtaacttgaaaaggcctattgaatccacgattgaattaagaaaatttattttactaattgatcgaataattttgcaattaaaatcccaaggcgaagacataaatcatccccaaattaagcagtctatagaaacaaaacttccatataatttaagacttaaattgagagaaaaatttaaaatttattcaacaaagcagttaatggactttttaaatgctcacacacaagcacgtgaagacatg

SEQ ID NO: 107347 - DNA, 160 bp, Heterodera glycines
actcataaatcagcaaaatgatgaatttggatgtaattgcagtttttacatggacttttaaacctaggggtatcgactttttatagtgcctgttttgctagccttgttttacgtggtaatgaaaatggaacgatttggataaaattggaatttatacatg

SEQ ID NO: 107348 - DNA, 955 bp, Heterodera glycines
  unsure (1)..(955): unsure at all n locations
ttggtcattggncagtttaatgttcaaattggcacnagtgtctgtccacaggnctgtaaagtaaattcggattttgaggcataagcctttttttgcgcactaatttcaatatattaagcataaataacacacttttcacttggtttgaagcttttaggttgagttttattatgtcttttttttgcccttttcgggatttcgtgccttagatgccttttttggcattttttcgtgccttttttggcgtttttccgaaaaaattccagtaaaaatgcgataaaatcgggaaaatacaccccctaagaaatgcctgaaaaaatttcagaaatacaccccctaagaattgaaaattcttctcaaaaattgattgccaaaatttcattttttttttttataaaaattttagatttacaaattttccctattcgaaaaaattataaaatatttaatatttaataatcatttaaatgaccaaaattaaatttttttttttttttgattcagtttacatgatttatttataaaaaatttttgggcctcggaattccgattccatgtatgagtcctggttttataaaacaaaaaaatatatatctttattataattactttactattttttattatttcgcttttaatgggccttaaaatctttcttttccataaattcaataaaaaaagaatcaattgctcaattccgggcctaaaatttccttttacataaaatgaaacaaagaaacttttttaatattttcagtaggcttacgtcataatagctttatctttacgtggtaagaaaaaagactttgcctctataaatagccgtgccatcaacgaatggcacacatttcgtcaaaaaataaaattcaattcccatcacaaaaagaaaaaaatccatcaattttacaattcattttgcccatctatctttttgaaacaaatttccaccattatg

SEQ ID NO: 107349 - DNA, 448 bp, Heterodera glycines
atttcgacagtgaccgatttcgacagtgaactattttcatttattttactgttttccgacatttccgacagtggctgattacgacagtgaccgatttcgacaatgaacaaaattatatttgtgtattagtcatttttatttaaaaaagtcactatttaatgggtgaaatttatatatgatgtagtaaaataaagcatttttcttttattttcaatgaggtaaaactcagttgtactgtactttggccgtaggccgttgatagtggaagggccggtcgttcactttatattgggaggtcaattttcttggaggtcaatttgataagagaattttgagaggaattgttttggtgttcccgaatgctgatggtcattctcgacttgtcattgctggtgttcatcatttgctgttccctctattcgtttttttccgaattcattgaccaatg

SEQ ID NO: 107350 - DNA, 666 bp, Heterodera glycines
taattcgagaatgaatgaagctaaaaagaaaatttggatgaaatttacgcgattattgaaatattaacgagataaaaatgaatgaattttctaacaaagtattttgatatgaatgctaatgcaagaagcaggacatccctaataaatctggcagcgtttcagccattttcagttttttccaatataatttttttatatttacatatcgaggattttcaattcctcaaaattcaggcaaatctgaaaagcgaaaatgcattttttttaccattatttgaaatctatacataatgccaatttaaatgacaaattgcgaatattttgatttaaatgaatcagagttggcttggtttgctgccgactcggcaatcggcaaatacctaggtgcactgtcacaactttcataaatacactttcctttttttaattgtttaagtttaaggatataataaatcttaaaagttaatgttttcctcaatgaattctgaacggaagagcattcttgagcggaagagtatgatgcctcctccgagtcgtactccgctcacaaaccgccagcctttccacccgactcccaaccctcgttccattcggtaaacttcgtttgtttccaaatgttcctttaatggcaaatcagggcttatattgtaaaaatgctttaagatg

SEQ ID NO: 107351 - DNA, 182 bp, Heterodera glycines
cccccactttcggacccatgtgccacacgcgcggtaaaaccgcgcgccgcctcccccctcactctcgcacgcacccctccctcccgcacgaacccgtgccacaggcacgccttcgtgcggtaaacccgcgcgcggcggcacgcctcaaaggccagctgtcacttcaaaagcaattaatcatg

SEQ ID NO: 107352 - DNA, 399 bp, Heterodera glycines
agcacacatttcagataagcttcctatcattatttcttagaaacaactaataatctgttgaacagttatttcaaaataaattcgaatatattagcttattatgcatcttcagtgtgcattctaaaataaaatcattttttgttctaattttatgatttatttgttttctgttgactaaattgtcagttcttatagcaaatattaatttatatttgcgtagcttcaaatgagcattctgccttgaatttcgaagggaagtgaattttttataataaattgatagagagcaaaatgcacaattgtataatattcaaaaatttatctatacatttgttgaacgtttctaaacccgatcaaattttttaaacctttatatgaaaacatttattgcaggaaatg

SEQ ID NO: 107353 - DNA, 66 bp, Heterodera glycines
tgtttctataaaagacatcattccatcggggattttcattatttctattaacgcagcaacacaatg

SEQ ID NO: 107354 - DNA, 382 bp, Heterodera glycines
  unsure (1)..(382): unsure at all n locations
aaaaatgaaaatattttttattagttttatttttcccctcccccagcttgattatttggaaggncataaatccggatttcttctaagggtaaaaaatnntnaagnaatatnanttgtnaaaagntatgaaaaaaaggaaataaagananttgatgtattanatgganaanttatgnataaaggnatanagatttntatatgnantttgaaangntanntgnataagataaaaattgtttttgngnnnanaaaagataatgttgattnatnanntaagnttgaagtggaaaaatggttntnnaaaaagntgantaanantatttatataattggaaatggatcaattggagaaaatacattcagactaatgaaaagaataatg

SEQ ID NO: 107355 - DNA, 118 bp, Heterodera glycines
atcgttcgcagggcttccaaatgacccattcgcttggcggtggcactggctcgggcatgggaacgctgctgatctccaaaattcgcgaggaatatccggaccgaatcatggccacatg

SEQ ID NO: 107356 - DNA, 637 bp, Heterodera glycines
actttgtgaggaagaacgccgactccactctgtcgtggtcttgaacctgccggaaagtgaagaaactgtgccctctgctcgtgtcaactccgattttgtggatgctcaatcaatgctcgacacctgtgagatcgaatgccggccatgtcaggtttaccgaatgggaaagaagtccgaccgcccccgtctcattaaaatcgaattccccaccaaaaaacacgcccaaaattttctgcggaacaagacaaaactcaaaaatcacaataaatttaacaatgtcttggtccgcccatctctatccaaacagcaactcgctgaacgttcccgacttattggcatttgcaaaaatgaccatatgagtaatcccaattcgaattctgtcatttatgccggccatgttatgtttgcctctgacattccccgttacaaatccaaccccgactcttttaaatgtatttgtcatgtgcataatgttgatgactcttaatgtgtaattggtggccactgtaacacgaaatctcttaaaacgcaagctcttttacaaactaaatataggaaatttgaacaccccatagaaaattcgaaaactttactaaataaaaaacaaaattttttatactcaacatttatcaatatg

SEQ ID NO: 107357 - DNA, 147 bp, Heterodera glycines
ttttttcaggagaaattggcaagaattattataaaataaaatattgaagggcaatttttttacatttcgctttaaaattaaaatttatttttttaaataaatcaatatctaacaaatattaatttgaaggtctaatgaccgtaaatg

SEQ ID NO: 107358 - DNA, 1003 bp, Heterodera glycines
  unsure (1)..(1003): unsure at all n locations
tacctatattcttggtgattaaagctaaaagtcccaggattttataatgcaagaaaagagctggtattaaaaagaaataacgaataaaaaacaagaaattcaactttttcgtgaataattttttgtctattccatttaggtaaaaaagttatacaaaaacttctataaaccttaagttctcgtttaatcctaagcatataggtattgaccatttaaaaaatgtaaatttgactcataaaaaatcggctggactcataacgtgaaagcaaatccaaaaatccccctgtgtcaaaattatttttccaattgtaacaaatttaaaaccttggacgtgaagcaattcgtgaatgaatccattcattgccttcaaaaaagtctgaaccatccaaaaaaagaacagccgacgagcaggttctctcaaaatttgacttgtggacaaaaaaacaccctgacaatgatttaaagaaaattagcgtaattataatttaattataatatattgcaaaccataaatcgtanagcaacgcacacgtccccgcccccgccgcttgngcaaaatacgcttttattgcgcttcgctttttttccaaaaaataattaatacttattaccctaaaaatttaaattcatttggcatttataaattatacaaaatgaatttgaaaagtaaaataaatcatttaaaaattataattcatcgatccaaaaaatatatgcataattaattattntttatggctactaatttttctccatttctctaacacaatctgtctttctcttttttccatttnattctccatactactctctctctctcgcttcactctattacttctcactctctctcctctttctctctcgcctctctctctttctatctctctcttctctctctctatctctttctctctctctcgctatctctctctctcacttttttctcccgaaatcatccaataggcttgggctttggggggggggggggttagagggaacaatg

SEQ ID NO: 107359 - DNA, 353 bp, Heterodera glycines
tggtttgttacaaaatgcgtcggtagaaaatatttttaagtgatcgtattttaaaattgggtttttgtaaaaagaaataaatatttttattaagcattatgcgaaaataaatattgttggtttctcaccgtataattttaatgtataattgaacctattaaaagttaaaaaaatttaaacatttttataattttccagcatttatggggattggtagtaattcgatgaatcgtaatttaagtactacactaacgatttttcttatttaacattttaaattgatagattttccactggcgcactttcagcctcgcatattaaaatttaattttaatttttttaagccaaaaatg

SEQ ID NO: 107360 - DNA, 406 bp, Heterodera glycines
ttttcaatacttaagatacttgcatcctaaaatctatttaattttttaagctgttcatatcaacatttccatttcatgatattttatttaaaggatatcatttctgacaaaatttagaatttaaatctggcaaataatatgaaatgtcgacaatcgtgaagaatagggtcccatgttttcttttgttatttttggataacaacttggagttttcaaaggacgctaatctcgaatctgacattagattggcgatccgttttaactttttttaaaacgacaccgacggtgactcatcgtgggatcgatgggtccgatccaattgtttacttactttgctcttgtttacattacaatcttctgtgtgcttctttaagcattttaagtttgcattttgattttaaaaatg

SEQ ID NO: 107361 - DNA, 578 bp, Heterodera glycines
  unsure (1)..(578): unsure at all n locations
ttttatannttaatgctctcaanttatccattccattcattggctaccactttttccaaccgattggtcgtcggncccaaaaaaaaaaaagaaaaattatngtacggaatattaaacgaaaattgtccaattggtccattcccatccatcggaaatggcattccatcagttgttttaacgatgattcggcttcctatttttcgctttttccctttttttcatcgcttttgttcaatttgccaacgcttttcccagcgattggacaaaaattgtgcttgggaagtgtaaatttgtggtgatttggcgcccccttcagctgctttcccattttttctactccttttttgtctgtccataaataggcaccgaaaagccacccaaatcacacattttccattcaaatcacagctaatccatcctttcattcaatcatcaatcagttgaaccttccttgcacccttcatccatcccatcactctgcccttcatccaatcaaaaacggtaaattaaagaattagtataaaatgtaatttttaaaaaattaatttaaaaaaagcaaaaaagaacttcacaaaatg

SEQ ID NO: 107362 - DNA, 273 bp, Heterodera glycines
attgtacgcgttcggagcacactgaagaaatggaagaagccaaaaattgacaccccgcgggtaagaacatcaatttaaaagatatataaataaattatcaaatgaaatttcccaatgcaatataaaaattatcatttttcaaaaaagtgtcaaaactttttttggcgacccgatcatttcggcgttcgtttttcgccgaccgttttttgtgactcattttttgtgttcgttttttcggcgcccgtttttggcgcacgagtaaaactatagatg

SEQ ID NO: 107363 - DNA, 161 bp, Heterodera glycines
aacgtaaaatattttaaaacttaatttaaaatcatatttatgaataaaatagatggatttgtttcaactagtgaccatgagtaaaagtgcgcccagcagcagaacgtatttttgtgttttgaattaaaattaaaaaaatacctttcttcagaatagccatg

SEQ ID NO: 107364 - DNA, 94 bp, Heterodera glycines
agaaaagtgcgcattgtgcaccaatactacttactaaggaagaaataaaattggggaatgtgcaacaattagtgagagagagtagttgaaaatg

SEQ ID NO: 107365 - DNA, 64 bp, Heterodera glycines
ataatttttcaaattttgtaggctaatataggacatttacagctttcgaatgataccaacaatg

SEQ ID NO: 107366 - DNA, 490 bp, Heterodera glycines
ttgaatgtgcttttaatttaattctattaaaaactatttaaatataaacaaatacatattttggcaacaaatattaattgcattggacatttagtgacttatttgtacaaagtcgtaaaaagacaaatttatgaattcatttcgaataaatcacgggtggaccctgataaattttggaaaattttttgtcaaaaatgcaaaatcaaaaaaataaaataaaaaataaaagaattttttgtcaggtgtaaaaatggaaaaaccttagaaaatgtggaaaacatttttagaaagtgcaaatgctacgaccccatgatcaatacatatttttatgtcagaaatcgttgtttattagatgaatttgtttacatgtgtaaaacaacaaagatgtgtaaacaaataaatatttgaataaaaagctaaggaaaattactaataattttatgaaaaataatttattttaatgaaaataaataaaatttggagtgccatg

SEQ ID NO: 107367 - DNA, 401 bp, Heterodera glycines
ggcaatggcacggcgaagggaagcgaacggagcggagagaatggggaaagggcgcgaaagcatcgcaaagcttaatggggcaattgacgactatttatttcaggtggagacgaacgaaaatagggaaaagcatatgggaaaagaaagaggagaaaatggaaaagcatagggaaaaagaaaaagaggaaaaagaaacaaacggggagagggaaaaaaggaggaaaagggaaaaaatattgaaaaaaggaaaaagaaaaccatatggagaaaaagaaaagggataaaagaaaggaaaaagcatagggaaaaagaaaaataaaaaggagggaaaaaacattgtagaaaagaatttcatttcaaagagtgacattttactgagtgccaatcaaacgagcgaaatg

SEQ ID NO: 107368 - DNA, 299 bp, Heterodera glycines
tcggcgagagggaaactccgtgttctatgcaatttgcgatgaaagcactgcacaaatggcatcaacttcgaggtgtaaccgaatggaaaatgggggagacaaagcaattggaaaaggaaatttaaaaccaatcgaactcggtctgttcagaaaaaggaattttatattgttgcaattgttgggcattacccgtaaaatttttatttggttgaattacgaacagttaaaaaatttgggccctgaaatgtttttgcttccacaattttggtctttgacaaaaaaaagtaactgtaccaatg

SEQ ID NO: 107369 - DNA, 72 bp, Heterodera glycines
ttctgctgatcagctaattttagtgatcattcaaattttatgtcgtttccgatcattctaaaataaaaaatg

SEQ ID NO: 107370 - DNA, 394 bp, Heterodera glycines
tttttgacgatttagaaaaaaaaaataagggcggtcaaaaaaaaaaaattttttttttctaaccgaccccacttcaaaaatttcggcggtgtgtattgcaattttttatgtctgtgaaattatgtgttcgttcagtctttccaaaatgggcgttggaaattgagcggagacggaacagagaaatgaccactggcgcaacacaaactgatcacctcgtcggctcaacggtgttgtgagatttgcttatgacatacacctgttgtggtgtttgaatttggcccactgcttctgctcattcaatttcaaccaatgccgaaccccggaatttattatttttcccttgaaaaatttttttaaaaattctcaaaatttgaaattttcagaaaaaaaaatg

SEQ ID NO: 107371 - DNA, 312 bp, Heterodera glycines
attataactagggctgggatttttatgttttaacattttttttttgcggcttagttatggcgagcgaagcccaaaaatagcattttctccgaacaatttttgatttagagcgagttataaaaacataaaaacacatattttggcgttttggcacataaaaacatatggcacatatttcggggttttggcacatattttggcatttttgagaaaaatcgtaaaaaaaatacaagaaaatctgaaaatgcaccctaaaaattgactactttacgtttcttaagcatttagaaaatttctttatatatttaaatg

SEQ ID NO: 107372 - DNA, 1003 bp, Heterodera glycines
tgcccgtttgtcctgccgtgcttgttcgtcctgttgtgcccgtttgacttgttcgtcctgttgtgcccgtttgacttgcttgtccttcactgtgctgcctgtttggtctgcacctgttcgttcaactgtgctgcctgttcggtctgcacctgtgccacgtcaaaatcgccgctccccaactgctcgtcatccggaagtataagggtcaccaagcccatacaaaatcaagggttgacaaacccaattaaaaaaaacaaacacacacacacacacggatcgccaaacccaatcaaaaaaaccgaaaaaggacaccataaaaagccaaacataattaaaagtcataataaaccctacaacaaacccatcactaatttaaataattaagtggacagagcgactcctaattcaattactccgacgaccaaagccaacacgaaaaagaaacaagtggcgaaaagcactacactgactgaacttataaaattaaaaacacaaacggaatacaaattaacaaaacttcgcccgaaacatacagagaatatactgaaagaattttacaaaaaaaaggagcaaataattaacaaaaacaaaaaaattctgtgattatatatattttttttaaatttcgtaacaattgttaattctgtgatcattaaaattataataatatttattaacttgtgataaatacctaattaaaattctcatttttctgattatccactaaataaccataaaaggatacttagttaattattttaaaatacaaactatgtccggtacgcttcgtagcaaaatacccctccttaatcgcgtattaaaaagggaaatagaaacgatcaaaacaaaaattgaggaaaacaaattcgaatatgatcaaaataatcccggagaatgcatgcggatattcaataaaacaaaggaaattatccaaaaaatagagccaaattttgaaaaattaaaagccttaaataaaaggtggcaaaatttaatgagaaaaatg

SEQ ID NO: 107373 - DNA, 1003 bp, Heterodera glycines
tgaatccgaagacttaaatcagacatatctttgctagttgagcttgtatttcttcaactccatgcatgaagttggagcagtaaaggccatattcggtttcagagtggcagatttacctaacttaattgttttcagaattttcatgatcatttaaaaaaaattttgttacttcgtggtcttacaaagcggtttttggagcccatttttagcctcgcctctccaatatccaatttgtaggaattaaaatttttccaattatttctatagtcctaactttgctctatttaatcactatttcaggatttttttttaattattggtatttaaattgggggacaacaataaattacccatttattttgtttcaatcaaaaaattcattttaacttgtaaatgtgagattatagccttaaactcgttgtcgcgagcccaatcacgtccagcatgcagattgccttgtctctctgtccttctttcaattttaaatttgtataattttcaaattctcatataaattaatatgttgtttgtcttttatgaatttaacaaatttaatagattaataattgcattatttataaacaattcatataaatatattaaaatttaacttttaatttctaatatattaattcttgacagataaaatttccatttgggttatttttaattttaaatgcttataaaaaattccatattaaaaataattaatttttaattcggccaaaaaaggctaatagagtttatttttaattgaattttattgcttctgacaaaacggtgataagtttgtcttatttactttgtacattgaatatggaagtgattttttcgaaaatcttttctttatttctccacccgcaattacaaatgtcaatggaaatatgttcacttgttatcggtaaattttgatctttttttaaattattgtaggaaagttccttcatttttataaaaaaatgtaaataaattcactcattttatagaaattgcttgggacatg

SEQ ID NO: 107374 - DNA, 732 bp, Heterodera glycines
ttttgcagcaaaaaaatggctaatttaatctttaaaaaaccaattaagaaaatttgagatattttcatttactaaatattaacaaaataaggacaaatgctagagaaataaggacacttgacttgacagcccttggaattaaataatcggtctcacagttacagttcaggacagggcaggagcgcagcaggacagcttatttgtttttttttaaatccattgtggcgttatgttttactgtctattatttttgttttgtttctttttgcttccaaatttgcgagccactaattgtgtaagctcctgttctcagcaaacgcgaaaatacattaaaatggaatttcagagctctatgcattggtacgaacgttgtgaattttcaaaatttggaattttctactttcgagttcttgtctggcattctaaattggtcaaaatgaatggcattttcgagatcaacgtccctaaaactccaataacatgttttcaaaacctttttttccaaaaaggggtggggaccatctgcagtattaccagatcagaaatcctctaacgtcgtctaaaatctgtgaaaattggataaaaaattcctatgctttttttaatgcgcgattcgcgtactgctaccgcggcacccttaaccttcactaaatgaacggatggatgaaatggataatatattcctttttttctaaaattcatatttaacagaaatttgttttttgtcaaatg

SEQ ID NO: 107375 - DNA, 147 bp, Heterodera glycines
tgcaggtcaacaatttcagttcgttggcagatcaaagacctgctttttgacaaaacgctcagctggcgccaaaaacatgaggccattttcgcgctgacccaatcagtcccgccccaaaagcggcgctttgcgcccatccaacaaatg

SEQ ID NO: 107376 - DNA, 391 bp, Heterodera glycines
ggtgaaattaattaatataatatttaaaaattaagctaattaatgtcttttaaaagagaaatcgaattttaaatgaatgaaacaaaaccaaaaacaattcgtcggattgaatttatatatttttaatgattattaattaataacatcatcaaataacaaaatttaactaatgatcgaaatacattaatgaattttagcaggaaatgaagaaaacaaattgcgtaatattctcgttgattggtgtctgaccacttttcccaatggaaatattaaaatgtagaaagaacagaaaaacaaaaaagagataaattatcacagtgtaaatgttatatatttattttattgtctgtataaaatttattttgaaatttttattgttttcagatgaatg

SEQ ID NO: 107377 - DNA, 236 bp, Heterodera glycines
agaaattttctatgcaacaaacgctctcgaacatgaaacgaagtgcggtgcgccatggccattttatttttcaaataatttttatatttaatagatattccagaaaaatggctatctctttttttgagaaattttctatgcaacaaacgctctcgaacatgaaacgaagtgcggtgcgccatggccattttatttttcaaataatttttatatttaatagatattccagaaaaatg

SEQ ID NO: 107378 - DNA, 363 bp, Heterodera glycines
taaatggattgcgaaactcttccggatcaacttctctttttaaaaatgtttattaatgatcagcagataatgaaattatgtgtgatcatactgtgtttttaaagcagtttcggactaaaaattaatttgctgttcaaagagtgaattacagtgaaaaacaaaaaccctgaccttttgtccattaaaaatcaattttctggcattttttccataaaataaatcttttaatggcaagtttacagtttttagtcaaaaacttttgtaaaacccgaatcaaaaaaaaaacataatttgtataacctaagtctgaatattgattacatctaaaaaaatttcaggcctctatatataataggaaggatg

SEQ ID NO: 107379 - DNA, 820 bp, Heterodera glycines
ttcttttaaaatattactaattttcaaataaaatgctcaatttgacagaatttgtttaatgttttgaatatattattaaaaataatccataaatttgatgacgttaattagaaaaattttcgcctgtttattggctttttcaaaatttggctgtttttgtacaaatttttgtacggtttcaaattctattttcaccagcagatttcaaaaaatttaaattcggaaaaaacccaaaaatccaaaaattttcttttcatttttggcagaagtgtcgggccatggaatacataaactgctcgtgcttttgctaggcgccgcggtccaatcaccacaacgtgaacatttcattgaacgcaatggattttttccaacatttttttttgttttcactgatcatttgagcatgaaaaatcgaagttgattttttttttgcggtgctttttccaaaaaacttggggaacaagagggggccggcgtgccgataggcgccgccgggaaaaatttttgtaatttaatgaggtttgttaatagattttgtccaaaaaatggccaaattttgcaattttgagttctgaggaggttgaacaataatcccccatggggataattagaaaatatacggtaaaaggcatatacataaatttccataaaaattttcttttcccaacttttcccactaaaaaaattgtgttaaaacaagcacatttttaaatgcaattataaagccgaaatttactgattttttaagttatgccacaattaaaaaatggaagaagcaatttggcattagccgaaaataataacggaaaaagaaaaaatg

SEQ ID NO: 107380 - DNA, 78 bp, Heterodera glycines
ggtaagggccggtcttttttcttcgttttttttttcgttcctaatttgcattaatggcactgttaagccctgatcatg

SEQ ID NO: 107381 - DNA, 1003 bp, Heterodera glycines
ccccatgcataaatgggccgattcaaccttaaaagcagagagacagacgctttttataatgtaacgcgaaaaatatggagtttttcactccatctgcgcgtattctgaaatcgcttctcttcttttttaggaaatcgatgagagggaagctcgagaattatgaagcgtaatgaccagcaattttgtataataattaattgaattcgatatttcagtactaattttatatatcattgcacatttcgttcctcgttttatataaccccatgcataaatgggccgattcaaccttaaaagcagagagacagacgctttttataatgtaacgcgaaaaatatggagtttttcactccatctgcgcgtattctgaaatcgcttctcttcttttttaggaaatcgatgagacggaagctcgagaattatgaagcgtaatgaccagcaattttgtataataattaattgaattcgatatttcagtactaattttatatatcattgcacatttcgttcctcgttttatataaccccatgcataaatgggccgattcaaccttaaaagcagagagacagacgctttttataatgtaacgcgaaaaatatggagtttttcactccatctgcgcgtattctgaaatcgcttctcttcttttttaggaaatcgatgagacggaagctcgagaattatgaagcgtaatgaccagcaattttgtataataattaattgaattcgatatttcagtactaattttatatatcattgcacatttcgttcctcgttttatataaccccatgcataaatgggccgattcaaccttaaaagcagagagacagacgctttttataatgtaacgcgaaaaatatggagtttttcactccatctacgcgtatatttttcgtgctttttgtgtctttttttgtgacttttttatttgcaggacaattattacctaattcagtacttattgaaaggaaaagtgtgctctaaaattgcagcaaaaaatg

SEQ ID NO: 107382 - DNA, 551 bp, Heterodera glycines
aaaatgttctaaggcaattttttggctaaaaccgatccctgacgagttatgggcccggggactcaaatgtcccgctgaggccaaaatttttttctatttccgggaaaaaatcgaaatttttccgaaaaaaataccagtcgatagagctcgaaaaactatgttttggaagtggtctccgtttctctgggaaaaatcgttaaaaaatcctaaaattcaaaaacccgaaaaccgttttttaggcctaactcgaaaaattttgaaaattttcgaaattttaaaatttcaaaaaatcgagctttgaaagctctacaataagttcgctgaccaccccccgctcagatcaaaccctggcgcggtattcacctggtactgaagtgtactttttgagcacgcttcagttgccattttttgcaggccaggggtttgctcaaaaaaaattttaaaaaatacctccttgtagaggacccttaggcggagtgccctttcagcgggcactttttgattcgagttttacaaaaaaagttaggggccgtcaaacgcacgaaaaaatg

SEQ ID NO: 107383 - DNA, 1003 bp, Heterodera glycines
attttccgctttatttgcgtgccttaaaatttcgtgcgaaaatgacggcactccctccgcgaaataatggcttatggccacagaaatgcctttgttttattcttattacaaaatagcaccgttccccgccccaccaaaaggccaacatttttttcccaccaccgacggacgaatgaactgaatgaattttttcctacgcagtgggaagagattgcgtgccaacccaaaatgaatggaggcgtcgccggggggcgggtgaaaaaaatttggagccggaaagtcggcactgctcaattaggcagaaaaatgagcccaatttgaatgcccttaaggtatggggtggtcgtgggatgggataggattgggatgggtggaatggccaatgtttgccgtacggattggccaaggggggggagaggaaatgccaatgccaatggaagaggggggggggggatgaacgaatgaatggcccccggggggagaacataaattaggaagaagaaaaagaagaaatataatgcaaaaaatgccagcaaaacaaagcaaaaaagtgcgaaagttatgaatgacttatgaaaacgcaacgggaagaatgtctggcgaaaaaaatcaaaaaattttttaaaataaagagaaattaattctcaaaaagagcaaaaatattttttcagtagggaaagtcgcagttgaaaaaattcacatcactttcatattttattaacgctttttgccctctctttcaaagaatcattcgcacatttaaaatttgaatttgagttgaaaaatatgtgtctttatcaatgaataacaaataaaaatattattgggaatattatttaaataaaaataataataaatctgaaaaaacagagatataattccatggaataagtgcatcaatgaaactggagagtccatttccgaaaaaaatcactcttctcctcccctcccccgcccacttctctaccgatgcgcttccttctcattcaaaacgtacaaaatg

SEQ ID NO: 107384 - DNA, 76 bp, Heterodera glycines
agtttgtttcctttttaaaaactttcattacccatttgttttaagcgttgcgactcattcgggcaaaaatcggatg

SEQ ID NO: 107385 - DNA, 1003 bp, Heterodera glycines
ccctatgggaggggcgcagccctttgaagttgccgccccggacattttcccgcacaatcccaaacctatggaagggtgcacccctttgatgttgccgcccgggacatttaccgcacaaacccgcgcctattgaaggggtgtttttcctttgaagttgccgcccgcgcaaaatcccgcgcctattgaaggcgtgttttcctttgaagttgccgcccgcgcaaaatcccgagcctattgaaggggtgttttcctttgaagatgccgccttaggattattacctcaaaatcccgcgcctattgaatcctgagcctatgggatgttctttgaactctgccgccttgtggattttaatttccccaaatcctcgcgggtgtttttttcatttcccctccccgcgccgcgcagtgccgcggaaggtcatcaatcatccgtctgtcacgaaagtgacaggtggaggaaattcaattcttgcaaattaattccaaggaaattcaattcttgcaaattaattccaaatctttttgctcgcgcgcaaaccttttgggcggttttattttatgaaatcctgagattttttatcatgattttttatcctgaaattaaactatttttgaaaatttgctaaaaccgtgcggttttttgcatatcttcccttcgccgcgcagcgccgtcatcaatcatgcacctgtcactaaagtgacaagtaattttcaaaaattcaatttttattttgcaaatttaattccaatttttatttatttattttggattttaatcaattatttgatcccccgttttccaattctcaattatttttgccagctcccccgagcccctaaacctcgcgggttcctcgcgggtgttttccgcacaatcccaagcctatgggaggggcacacaaacttttgaagatgccgccctaaaattccatttccccagaatccgagcgggcgtttaccgcacaaaccggtgcctatgggaggcgtcaaacttttgaagatg

SEQ ID NO: 107386 - DNA, 150 bp, Heterodera glycines
  unsure (1)..(150): unsure at all n locations
tagagatcggtattntgaaaaaagcctggacctggacctggattccatgttggaccttgagaatggacaacaaatttgccaaattgatgggctcatttcccaaattgcactcaaaaacccctttcgtccgctataaaaggcggcacaatg

SEQ ID NO: 107387 - DNA, 274 bp, Heterodera glycines
aaaatattgataaataatattaaaatagttttaaaaataccataaaatatttaaaaacatttttggattttaaaaaggaagtcccatttaattatttttaacaaaaaaggtcatttaaaaattagaaaaataaatttcaaaattcagtgaccactttggtgttggccgtaacttttcatgtgattttgccggcaattttctcggattattccggcagaaaaattgaggtaaaaaaaccaaaataattttttttgaatcgctttttgctcagatg

SEQ ID NO: 107388 - DNA, 1003 bp, Heterodera glycines
attaatattttttctttgataaattccaatctaactttgaaaaaaaattcatttttgcaaatttcttatcttttgtttttcaaaaattttctttaattttgcgaaattgcttcggtccccgcgcaaaatgagaattagcctttgaacatgtatatttttcgcgaaattttaataaatgagtaatttgcacattgacatttctctgtcgaaaaaacttttaaactctgtggaggtagtgcgctttttaataattattttggtcgaattcttcaaaaattatatatgtaaaagaaaatattttttttccattttttatccctttagcatttttatctcggcactcggactcattcccaaaactcccgaccgaccctggagaccttacttttataaaatttgacggtcagaaagagttgttcaattaatacaggtctaattcacaccaaaaatgatagaatcaaaataattctcttgtttacgcttcatacaaatgggatattttgaaaaaatgttttataaattgttttcttgtgcctatttagtaaatgatttacgattttcctacctaaaatttgcatcgttatttaataatgtttttaaaaagacaattagaagattttttattgccaccatacaactaattgttgtagtgggttgtagtgctatcgcccgatctccattggatatattttaattcggtagtcttttcgctaaattaaaatttcccatcaattatggtgaattttaaaatttccttaacattaattggtttttgccccgtcgtaaaagaatcattcaaatatcttcaatgttatttccttatttatttgcccttctgttcttctctccctttttgggtcatcattttgccgtacatttttttatttgcgttgacccaatgaattcttttgcaaataaatcagcattaatcaaaacattaatactaaatgcatcagaaataatttaattttcacaaggatctttttatttgaaaaaacaaatg

SEQ ID NO: 107389 - DNA, 96 bp, Heterodera glycines
ttttttcaatggcttttataagttaaagaagcagcaaccaatcgcttcaaggttggccattaattgtgccaattcactgacaacctcaagaagatg

SEQ ID NO: 107390 - DNA, 603 bp, Heterodera glycines
ggtacggtagacggagatggtattaggcagggcaacactgatcaagatactgtaaaaggagggatggaagaataagcaaaataaacaacaggaaagtggaaatgaagaaaagcaaggcaaaaaaaaaaattgggaattgaaagcagcagcaggtgggaggaggttgaaaaaattagggttataagttgtatgcactaaaaaatgccaaatatgcgcataaaatatgcactaaaaatccctcaaatatgcctaaaaacccgaaaaatgcccaaatatgcactaaaatatgccttaaaaattgccaaaaatggctcttaaccctcaacaatgccaaaaattgtgtataaattaagaattgacttttaaaacaatgggctaaggagcattttttagacaattacaaaaaatattgaatttcaaaattctaaatttttattatatgctaaaacaaaagtacatttttatatagaaaaattttatttcaaaagctcttacaaaaatttaaaaattttccgattttaagggggtattaaaaaattccaaaagtcgatccttaggggtgtatttttcgcatttttcttatgaaaatttgccaaaaaaatg

SEQ ID NO: 107391 - DNA, 687 bp, Heterodera glycines
  unsure (1)..(687): unsure at all n locations
cagatcactcctttcagtgtgctcgttatacgacaaatcagtaagtggacaatcgnacagtaaaatacacaaaaagataaaaaatgccgttgtcgaagaggaccgattgtgccaagaaaaataagcaaatgaattgatgagttttgggaacaaccctaaaaatcaaaagatgtgaagatgaatggcaagaaaaatcatttaagttaaacaaatgtgcaacagtcgcttacaatatgccaaattcaaactaatttggaacgaaataatgattttaaatgctttagaacatttcttgttcagcatcaacgttatagcaggaagcttttcagattcttttattcaaaaaatggtctttgagaaaaattgcttaaaattaaaaaaaattaaattaaatgaataactatttcctttttgggtttgccttctcgtccacatttttctctctccatttccattagctttttgtgcttttttccgttcgtccgtccaattttacgtcattcattcgctgcatattataattatcattttttcattcacttttatcatttgaataatctttttgggtaatatttattaacggattcccattcttttaagctttgaaaaccataaaaatataaattaaatataattcaataataaattttattcttttttgcattttcattattaattgtgagaatg

SEQ ID NO: 107392 - DNA, 67 bp, Heterodera glycines
ataaacaaaaatgttttttaataaattaaaatgtaaattttactcctctactaaagcaaagacaatg

SEQ ID NO: 107393 - DNA, 880 bp, Heterodera glycines
gggatttccttggcctgatcaccagggcttataattatttggaaaaattgcaaaaatcaatcacttacttgaaactcaggcctagcctaagcttatgtacgaaaattcaatattttatgggccaaaaagcactgaaaattgccctaagttatctttttatgtatattaaaaaaagtctggcactaacttcatctgcgtgatttggacaccccaatatacacttttttgcaattttagccggtcgaccaaccacgcaaatcccatattttttccctcgactgtgggagggctgaaacgcccgaatacatgtttttagcttggtttgaagtagggttcgagccccgccgccgcccccgcccccgtgattcagacccccgcatcccccgcccccgcgaccagggatggacgaaatttcgtttcgttttcgtttcgtcctacattttcggcactttttgagtttcgttttcgtgtttcgttttcgtctaccaaagttttttcgtttcgttttcggtttcggttttcaaaattttgtttttcgtttcgtgtttcgttttcgtcagagcaaaattggacgaaaaaagtacgaaaaagcactggtaagaataggccccgttggtagatttttcattggcattccgttttttcaaaaagggggggggacaaaccacagaattaccatttttcttagtccgttttttccgtgttataagttccgttttactacacatcaaagtcttttttaggcctattaatgtcttccaaaagcaaattccagtattttaattgttgcgacacaattccaagcggcaatttatggttttgccgttctgaaaattgcagctacaaatttgaatcaaagaaattgtctgggtatccaatg

SEQ ID NO: 107394 - DNA, 435 bp, Heterodera glycines
aggcaagcaaagctccatcgctcggaaatatttgaaggtgtatccaaattatttaattttacatttgtcgactctcagtggcgtgccgaagaagaattgcgggagaatggtcgggtgctgcgccatgtcgaaagccctggaggggagttcaagttcggcaactacagcttggatgggatgatggagcgtccagatgaggacaaaaatttggccattgaggtcaacgggtaaggaaaaaattccaaaaatgtgccaattttcccattgaaaagatgctattggcatggatgcccgagctgcttccccgacgatgcggcaattgtgggcggaggagaaactgccggagctctaagggcccgcgatgcaaaacggactcgtgacattgcgcgggaattcgaagtggaagtgatttgggagtgccacctgaacgcaatg

SEQ ID NO: 107395 - DNA, 128 bp, Heterodera glycines
ggtaattttgaatttgttttttggattttgcaaatatctatcttggcaggaaatcgtccacaggatgaaaattgtttggttttccacaaatatcttgtctgattttttccattttagggcggcagatg

SEQ ID NO: 107396 - DNA, 1003 bp, Heterodera glycines
tccgattacctataggcatagcagaaaaagtgcatttacaaaaatgttatgtgcctagactataaagtgtcaaatttaaaaaaaaatttattttcccctaattactctataagcctactaattttcaaaaaaaaaaaacattgggccttcttcggtctttttgtttctcttatgatgggtgttttcctctcggcttttagtcctgtaattttaggttttcgggtcattaacgattgttttttctttctgtaagccctcattatctcgtgcaagtcaatcatcagcagctattgagagctttgctcaacatcttcaaccaaaaaaaaagaatccgctgtaggaactctcaacaactttttatctcataaaaattttcaagtgctcagaaaactcagaaaaaataaacaaaacaatttttaaaatcattggaaaagagccacttaattagtaaaaggagtagggttggttaagtgcttcaaagaaataattttccgtaaatttcttttccgactaaaatgctattttcattttttataaataaatttgttgttatagtttatctcgcatttgagtattcaatgtgtgacatatgttcaattttaagagtggataaagctgagttggctgggtcagtgtaaagttaacattcgccggcttatccggttgaataaatcatccaaaatccactattttcctgctcttaatcgatcggagaagtgatcgatcgccgcccccgccctcccccgtcggcaagaaaacgatttgggatggccatttagcattattagtcagctcagccgttgctgtgcagggataagcaagaacggagactaaagtttttaaaatgtccaaaccaggaactgaccagaatttaaatgtaatttttgcgaatattttatttcctcatttttatgtatttattattgctatttattaatccgttttaataaatatttctgttggccaaatacgaacagttttatttctactcagttaataaatg

SEQ ID NO: 107397 - DNA, 772 bp, Heterodera glycines
aattttgtacaccgaaagattggacagcccaattttacctatttttataaatatattttgaaataagaattaaataaaaaaataaactgattggaaatagcgtggattaataatcaatttattttttaaaggatttatttatttttcatttccttttgcataatgaatcaaaatttcggggagtaatttttggatgccaggattttgaaatcaaagcttttgaatcaatttgttttttttcatttgccactactttgttggtgccacgaaattttaaaaatgtttgccagattttaacaagaatggaatttttctttggcaccgtcgtcgcactagcaaatttaaattttaataatatttttaatagaatgtaaatagacaaatggatttttgggaagtatttaaaattaattgtccgtcatggaatccgctcatttagaggacaatttggacacaattcaccacaaatccgttgaatgccggaaaattcattggaaaaatgtgcgcaaatttttggattacttttttgcgccaaatttaaaattgcaaatgcattttatgatggctataataatattttaattaccccttaattggccaattttgaataatagcaacaaactaaagtcattacgggaaaatgctgaacagatgaaaatgtggccaaaagaaaaagttaaggccaaaaatgaatttggcaaaaaatattgtttaaaacgcccaaaattctttccataataaagtaagtaaaggcatcttcaaatttaaaatg

SEQ ID NO: 107398 - DNA, 73 bp, Heterodera glycines
agtaagtgtctgtttctgtttttgtatccattttttctcatttccctttagccattgcgcaaaattggccatg

SEQ ID NO: 107399 - DNA, 1003 bp, Heterodera glycines
  unsure (1)..(1003): unsure at all n locations
cggcgctttcgctgcacaaaatgccaagtcaaattcggaagtgagcaatttgttgttaattgttaattgcaaacattaggacaatcatttgtatattaaacaaaaacccttaatatntgcattttaaaaatcacaaaatgcaaaatacacacacaaatattataaaactacgggagatgcagaattaataaataaataaaattgatttagaaaagttcatacgtttaaaatcaatccttagggagaggggggggggtgtatttctttgtagagcttacattttgaaaaaaaaaccttgacctggatccatgttggaatattcgtgcttattatacatatttcttcggttttggtataaaaataatttaaaaaaatattaattttacttaattttaaaattgccaattttattgaaaacctgttaacaaatcgcattaatttcaaaaatcttccctgcggcgtctttcgacaccgtcggtccaaaagtttaaattttaaatcaaaattaaattggtttaatcgaataatttacaaattatttataatcaccgcatttaatgctccaaaaatattatttttggtctctgatcagtgatatgcttattttggaaaatttttgatgcgatctctgctctaaagggtgtcctaattgttatcatcgattaacaaaaaaaaggtcaattaattaattggtcacccaaacaatgggacggaatacaattcaaagttatgcatttgctgcagcattttttaagctgttgagatggccttcgctgaggggagggatttgttgggattttggggtgtcctggcgcgaattggggcatttgtggtgcaatccctccatgacaccgatcgcccaatgctctcgaccgcgtcatttgtcctctcctcccatttttgtgcaacaaatctgtcgaaaacatacacaaatgatgggaagggatgatctgtcgcctcatcagagagaaactcattggtcagccaattgaacgaacgaatg

SEQ ID NO: 107400 - DNA, 126 bp, Heterodera glycines
ttcatttatttggcagtgatgaattttattttccaaatttacatttctttttaatatgaatgttaatttataaatttttaacatttttctagatagcacaatacattttctttaattaaaacaatg

SEQ ID NO: 107401 - DNA, 374 bp, Heterodera glycines
aaaaggaagaagttaagctgataattaaattttggaaaaaatttcgttttgtcggaaaaataattaaattcactgttatgaaaaaggtatttttgaaagaaatataggaaaaaaaatctgcaaatttttccactatgggggtgcctttatttttttatcgaatcgggatcaaattttttattttgcactaattataattctaataacctaattccatagacttaaaattaaaagcccgtatgtcatttttttaatattacaatgccgcaggtcaaggccaaacttaattgatgactcattttatgaatgaattaattgtctaattaattatccatttcaatcaaatttcagttccaactggtgtgttaacaatg

SEQ ID NO: 107402 - DNA, 648 bp, Heterodera glycines
  unsure (1)..(648): unsure at all n locations
acttactctaaggacaattcagaacaaaaatgtgtagactctcctagtgacataatatatggatgatcagtgatcacaagacataagagncgaagacttgtaaaaattgcgaattttcaaatttttcgagaaaaattcgtctttgtttatatcattcgaaaataccataataattttttttataagcctgaaaacaaaaaagttagcaagaaagttattttttgatttttagaatcattttaaaatgattattcaaatgacccagagttcctgaattattaaaaatattggatattatcagtgctaagattataatatcttctaaagccaaatatgctttactacatacagtcatggtcataagtgttgtcccatcatgctttgaaaaaaataattgcgtataaaattgtcattttccaatttcaacagataagtagcataccattggatagcattttttatgggctttccaatgataccatatttgcatttgtgacataaacatttatttgatttattttaccatattcacaatttgatcaaaatataggtggtcaaaagtgttgtcccatttcatttttaaaatattgcttctctggatcagcattaaaaaatctaaaaaaattcaggtaagcataactttggatg

SEQ ID NO: 107403 - DNA, 408 bp, Heterodera glycines
gtaatcttttattaccttttgtcgtaaatcacaaatgggaccacaattcccatgcaaaccaattgctggagttcggcaaaagtgcaaggattgcaataaaatgttcttcaataatgattgctagcagtatcatctttcttccaacttttgtcaaatgagcaaagagtgcaaatactgtggcgtcgtatgggacatgcgtaaaaattgcgataatgggagagaggtttcttttaaaaatttaataatagtttaatattgtaatagggtcacaaatgcaatgaacgctggtgtgaaaattgtcaaatcttccacgaatttgagcggggatgttttattcgcccattggagccgaacaagaagaaagaaacaaatgggtggcgccttgtcaccttcgacgttgaaacaatg

SEQ ID NO: 107404 - DNA, 979 bp, Heterodera glycines
ctatggataaaattgattcacccaaatgaatataaaaattgatcaatgcagaaattatagaaaaaagtaaatatcgaataaaattatataaaaaagtaatgtaataactgcaaaaatttatattatatagcatacattggataccagaaaaatggaaaccgcccaaaaattggatactataggggataaaaacaatttaataataataaccaaagatcgccagtagttagtatccagatatcgtcgtcatgattaattgctttttggtgacagctgccctttgaggcgtgccgccgcgcgcgggtttaccgcacgaacgcgtgcctgtggcacgggttcgcgcgggagggggaggggtgcgagagtgaggcggcgcgcggttttaccgcgcgtgtggcacacgggcggggggaaggcggcgtcgcttttgaagtgctggtggagtggaaactttttttgacaaggagggtggcaaaaaaaaaaaaaaaaaacttttgatgtatggggagggggctcaaactttttgtggaaaaaaattttaccaatggaatgtgttgcggggaaggggtgggtgattaatgatttgttgtatggaagggggggggtgctgatggtcagcggcgcagcagcgatgaacggcgcggggaattagagaaagagaagagagtgcatgcaaaagtgagagagtgaaacggtgagaggtagggagagatagagagagaagaaacaaacagtgggtgagagagtagagagacagacagtcagagaaaaattttgtgcacaaagtgagtgcatagaataaaaatggcgacatggcttactaatgaagaaggggggggggcgctgaccaatgcattgacatattgattcgatactccaaataaattgggctcattttagcataattataccattaaatttataatggaattgttttatttatttatttattgttagataatacagtattactttcatg

SEQ ID NO: 107405 - DNA, 546 bp, Heterodera glycines
tttttgcacttttcgcgaaacgcccatttttgcacttttcgcgaaacgccccattttgcacttttcgcgaaacgcccatttttgcacttttcgcgaaacgccccatttttgacgtcgtcatttttgcacttttcgtgaagtgacctagcaccaggcgatggacctttttttagaactgcttttttgcggcactctttttcaaaaaaattttggtgacgtgtggggggggggagggttcggcggtgccaatagaggccgccggagaaattttttttttttttttgtataaaaattatcaaattttgaaggacccgcggtgccgaaagacaccgccggggaaaattttgtaatttttaatgcgttttgttaacagataatttgtccaaaaattaatgcgaactttagtcaaagtttggaaattgttaatgatttcttctttaacttcattaatacataagttttttttttaattaccaagaccaaacgccgagacaaaaaccagttttgtggccaaacaaaattcgacgaaattttggccagaaaatg

SEQ ID NO: 107406 - DNA, 239 bp, Heterodera glycines
cctaaaaaacttaaaaacatgcgtttataatttgattggaaacggagtttctgggcgaaattccctttcgaatgcgccgtcgtctgtcccgcttattatttttttattgagtttaattttttcatttacattcattccaaaccttcctccggcgccgagacaaaggcgccgaaaactgaggcaaatgcgacggcatttggtgccgttgttggcttaggggaacggggggagacaacatg

SEQ ID NO: 107407 - DNA, 224 bp, Heterodera glycines
aaaaaagtaattactcggtaattaatgcaaaaaccccatacaattagagctatcggcagtgtttgaacgatacatttcgacactgtttgacccaattggacttccattcggccgccacctctgccacgagacaatggcacaaattcgaatgccatcgtttgctgacgttgagcaaaagcactgagcaaactgagcatcgaatttctgttgctgatggacaaatg

SEQ ID NO: 107408 - DNA, 148 bp, Heterodera glycines
gaatattcgactcccttttgtatcatataaataccgtcccgtactattcactatgataataaattttccggtccacccacttttcatatagcgccaatatttggcagttattcatttttagattaaaagaattgatttgtgaaaaatg

SEQ ID NO: 107409 - DNA, 207 bp, Heterodera glycines
aacacaacccgacacacttttgttgatctgcgacgaatcatgatcattttgctttttgtttgaattttaattaaaaaataaatgagtgaaggaagacagagaaagaaaagaatatattgaatttgaatcgattaattttgtgaaatttttaataattcaaatatttgttcccaattgttctcatttgtccattttgccattccgatg

SEQ ID NO: 107410 - DNA, 508 bp, Heterodera glycines
ttgccttaggcaacattgggcaccaaccatcccacaatttccggtgaacgaccgacgggggtgggcagctacgggttttgcaaaaattgaaatcccggatagagaggattttgcgtgaataatccgccaaatccggtccgaacaaatgtgcaattcttatttccattgcaaaatgtaccgtaagcgtgccttgggcgcagccttctttcattttcttactgtacaatccccgctcattttttcaaaaggatctttaacaaaaacagaagcgatttaggatttaccaaaacaaaaatggtattgattaaatatttgaaataccgcgcatttggcgttatgtttttttttgtttttgtgattttcgcaacgccggtggccgccgtttccaagaaatgtcagaggtcgcttttttaaacgtaaaatttgttaaaggtttcaaaaaattcacatttttacatttctttcgtgcgccccttcaccaccaaatcgacaacaattttcaaaaatg

SEQ ID NO: 107411 - DNA, 417 bp, Heterodera glycines
tatttaagtaaaataatatttaggtattacaaaattaaatataatttaaattgtgtttttgatcaatatttacttttttattccaatcaaattttgtcattttttcctttattcttattaacgatttatacacacattaaaatcaaaattttataaaccaattcgcaaatttcgtgtttaaaaaataatggttcatctgttcaaatgcaaataattaaaattgggattttggggggggggggggaggattttttggaaaatttcattgttaatgaatgatgaattaacagatgagcaaatttggtgactgtggccgacctaaataaaattgaattttttatattttcattatttcgtaattttgtgaataatttctcttttatttaacaaaaaataataattattattttagcaatg

SEQ ID NO: 107412 - DNA, 223 bp, Heterodera glycines
ttaattcattaacatttggctctgcttcatcaggatcataatagtcggaagtcgcacacgcacagaaaaaggcatttgcaaaaaagaaaacaattaaaaacatcaaagacaataaggaggctaatgagtatgaactaattaagtgtctgccattaatagaaataatttaaaaaaataatttgtagtttaaatttgctttatgtaagaaattcaatgaaaaatg

SEQ ID NO: 107413 - DNA, 274 bp, Heterodera glycines
tctaaaattcaatgaattcttccactcactaattataatctaatgaaatatgcctaaaatacgaaaatttcttacggtttaaaggggagggggggggggggaacggaaaatctcagcgatttttaatttaaaaccgatgaatttcagcaatttttaatttaaaaacgagaatttcaggggtttttatttttttcaattgttttttacgcagtccacgaagctgtggtgcaggaagaacagcgggtcatttgccgaggtcgaagtgtccgacatg

SEQ ID NO: 107414 - DNA, 103 bp, Heterodera glycines
  unsure (1)..(103): unsure at all n locations
tagactaaaaaccaagcttcaaactttcgtttttgaaattttgcnggtggtttatatcacggcgatttcagtttttgtgataaataatgttttttatttcatg

SEQ ID NO: 107415 - DNA, 164 bp, Heterodera glycines
cctgtaaaattacaaaaagtataagttaaattttcgataatttttgaaccatgcaaattgggccacagtgatcagccattgatgcgactcgttgtactgtaggtaaacgtaaattgagctggccaatgtgttcagtgccgagacaaaaaacacttgcaaaaatg

SEQ ID NO: 107416 - DNA, 1003 bp, Heterodera glycines
ttttaaaatttaataattttcctgcaccgaaggtactcactcggcctcttcgcggcctcgtggtgggccttcgcccccccccccccagtattatcttacaaaaatatttatgaattaattatgcaaaaataaataaaaatttctaaaaatttgatcgtccataaataatttgtaattgatcaggggctcaccaaattttgcaggaatacgtatcgtgaacactacaaatgcttactaattttcctagattttttaaacccggtgaaaattttttgcagacaccaccacttttgcacttaaaaaaatttcaaaaaactttaaaaattcataaaaaatattaaattcataggtactactgctaaatcaacgcagagacgcctttccttgacctttttaggcccctgcaaaatctggtgcgcttctgatcactactcgaaaaatgagtgattgaattttcactaaaaagttaagcctaaactttttggcctgtttaaaaaggaattaaaaattttaaaaattttattcatctccctttttgatagaaaaagcatcagagtgcctaaactaacatgtaaataaaatttggtgcgtttcagagcattttctgaaaaaatatttatgaaataaaaaaaatcgatttattcaagtgtccgttggggtactcaaacaattatggggagcaaaaatccaacgcagaattaaagtacagactatagggaagctaatcccgaaggattcggtctccccataaatctgggcgcatcggttcggggggactgccccgaaaacaaaaaaatcgattttttcaagtgtccgtttggggtactcaaacaattatggggagcaaaaatccaacgcagaattaaagtacagactatagggaagctaatcccgaaggattcggtctccccataaatctgggcgcattggttcggggggactgccccgaaaacaaaaaaatcgattttttcaagtgtccgtttggggtactcaaacaattatg

SEQ ID NO: 107417 - DNA, 369 bp, Heterodera glycines
tccaccccattttctgggtcccgcttttcctaataaaaagtggataatgatggggttcatacaaattccggtttgaccattgccctgtccgaactcgggataaacacaaaattttgcaagcaaatgcgtgtcagcataggcttctgttattttttattagatccggtcctctgtgtttcgaaccccactaattttttcgtaaaaattgccgaattccgggaacttttttatgggttttactggtggtcccttttccggcttttttttctaataaacaatggaccaaaatcaaaaaatgcctcccctccaggagaataccacgccacattctctccttttcaactgtcactacagtttttgcatgccatg

SEQ ID NO: 107418 - DNA, 722 bp, Heterodera glycines
ggccattcgactccattttacaacaatctcagagaattagttatacccattttcaatttggaagaatttttggaccgtatggactatgtattgatgagcgagaaataaaatagttaaagataagatatctcaactttcgttgtctgttttataaaatcgaatttggaaacgttaaaattacattttctacatttgactttttcattgttatgcaaatccatatatttacctacttacacacgtatagtatcatattaaatattggtataatattaaaatagtagcaatggcaatcattagggaatagaaaattcgaacaaaaagttgaattttttcaaaatatgcattttcctggggtaaaagcttcgaattcatttaacattatttattttggtgtaaaacaattgcttcacaaatttgcgccaaaatttgatttattttaatgcaaattggggaaaaacgaatttttgtgcaagtccagagttcggatttgagcaaatccgagattcagattcgtgatcactgatcagtaccctcgtaaattgattttgatcccaaaataaaagagtttaattattgaccgcaattctttaccattgccaaattaacgacattttaaacactatgttgtatattttcattttgatctaaaaactttattgccaatcacaaattaaggaaagtgcttaattcgcaaagggataccaactgcttaggagatg

SEQ ID NO: 107419 - DNA, 205 bp, Heterodera glycines
aaacacttgatcagttatacaatgacccttcttcacctgcagcatttgctggtgtcagtagattactagaagaggcaaagaaaagaataagtgatatacaccggtcagatgttgtgaattatttggaagggcaccgcacatatacactgctgcgcccaagacgagttcatttcccgaggtcaaaaccgtggccgcaggttttatg

SEQ ID NO: 107420 - DNA, 896 bp, Heterodera glycines
gtttcgccaactaaccataattatgacatttcgccaactagtcatctcgccaactgacactttgccaactgacatctcgccaactagggcaaattcttacgtttcgccaactaagctagattcggacgtttcgtcaactgaaatttcgccaactagagtacattacattttttactcatatcttgatcggtgactcgaaattattactccaagtgcaaggctcacataaaaaaacttatctgcgaaatatacattgctccagaagaaagatagaaaacttgggtacttttagttcctaaatcttggccttatcgtattactaccacttataacgacataataaggtttgccccaattaaaataggtctcaacaattttgatatttaaccgatttgggctagattttcgggattcgaccctaaaaaagagttgggcgaaaacgaattgaatgccgtccgtacgtttcatgacggaaccgaaccgaattatatgtttttttgccggtgcaatgataccgagggattctgaatctctaatcaaagaaatacagacactgcggtgaattgataagtgatatggataaggagaataatctgtgagagccctggctttcatagagatacattggcattacattgtattactattctagtgcaaaatcttttttagagtaactggcaatattatgaggtgatacgtgcattgttgggagggagaaaatcactgagagccctggttttcatagatatacatttgtattaaattatattactattctagtgcaaaattttttttagagtagttggcaaaattagttggcgaaacgttcaattttgggtgagttggcgaaacgtccgaattcggcttagttggcgagatatccagttggcgaaatg

SEQ ID NO: 107421 - DNA, 654 bp, Heterodera glycines
ttttctggccaaaatttcatcgaatttcgtttggccacaaaactgatttttgtctcagcgtttggacttggcaaataatttcaaaaatcaaaaaattatatatattattttgataaaattaaggtggaatttacccgacaatgtttttcactggcattgatcgattgatcggaataatttttgatgaaatgtaagaaaaaaagggtattttccgttatgccgcacccccccccccctctaaaaatttcatgattcatagctaaaatcatagagtttttgcagttttggcgcccgattcttaattagtgcctaaaattatgctagaaacgtgcttttctttgtttgaatcatgccatttatagggggctgcggcatagcggaaaaatagcgaaaattaaaaagcaaattaattttaattaattaattaaatcagaatacaggcagaacacacggaaaatccgactctatttgtctatggtaacaattttttgttgtatggtcggcttaaatttgtgctatattttttaccaaaatatgtcattgtacggtgatcagatgatcactgggacaattgctgaacgcgctaattcaaatattttgtctaattagggctattcttatgaaaaaatcatacggttttgtaccgttttaatg

SEQ ID NO: 107422 - DNA, 771 bp, Heterodera glycines
  unsure (1)..(771): unsure at all n locations
tgacactttttttgtgaatattattatttgttcttatgtgtgtgtgtgtgtgttggacagctttctgctgctgctgctgctcttgngactaaaatatgaagccgttttaatggaattactatttgtttttgctaaatccacttaatctaatcatcgacgccggcggcggcagcggcgacgtcggccggcgatcaaacgaagaggtaaaggaggattttggcgattataaaagcactttgttgtacataaatgtttcaatatatacatacaacacatggcttcatcagtccattctaatcagatttagttaagcaaaaattgtttgatcggaatttccaatcattcattcattcggtttggggcggggggggggagtaattgtcgggagaagcatttccgggatagttaaactatttgattgatctaggaatttttggggccttattttatctttcaaaattggggtttatcaaaaaatgaatgtttcaaaaacatctcgactagaaaaatctctggccaaattgtttcttttcaacaaaaacgatcaaatcccatttgaccaaatcctggattcagccaaaatcagaaatctgatcattggttgattatccgggcattttttcgtgaaatctcattatatttttatcattttaattatgaaattaattgaatagcttaatgatgactcattagtgacaataatcagaatttgccaatatttaaattcaattttaaagggtttattcaatttttgtggacgcttattcaatg

SEQ ID NO: 107423 - DNA, 202 bp, Heterodera glycines
tatattattttagcaaattttcattttccattacccttctttaaattttacaaggataatggcgcatactgtactaatttacctctgagatttgcatccaatagttttgcttaaatttttacgaattttcgacttttaaacctattgttttttatgctttcctgtaactctaaataatttgatcatttttttcagttttatg

SEQ ID NO: 107424 - DNA, 328 bp, Heterodera glycines
  unsure (1)..(328): unsure at all n locations
tgtctccgccgtccgttcgtcggccgtcgaagggccgcctacctaggtgagcgcctgctcaacttgntggatgatgcgaccttgctaagcaaagaatgaactgtcaaacggaaaaaagagaagtgatcggagtgaaattggggaaaatttcagctgccgaaattttttttgggcatttttgccgtgccaccacaccttgtccagcttctccacctcggccaccgtttggtccacgtccgacgtgagcacctgcgtctccaccacaatttgagtgccagccggcaaatcgaccggcacacaaacggactccaccacgggcaccgtaatg

SEQ ID NO: 107425 - DNA, 1003 bp, Heterodera glycines
ttataaaatgcatttttgaatcaaaaaatattttaataattctattaaagattattgtggtgcatcaataccacctaatttgtcgctctttctattctctctgattctttatgagctttttattccattttttatagccctagtactgtgatcatccatataccggtatataatatattctgtcattttactctatggtaatcaattttattttggacagtcgtcaaagtgtgagtttcgcccttctgctgacagcttattttctttgcgaataaataaatattttttgactttaaatgcatattttgggctccctatcgttataaatcatttttaaataaattttctcttggtgataaacaattttttgggccttgtctgctccaccattcgttgtcataaatgttgaaaatattttttttaaagtgatttaaaagtcccaatttttaattggtaggatggggcaaattcgttttgtaaaatcaaatgatttgacgaatcccattctgattgatttgattttattgatttttttgctttcatttgagaatcggcattttattttttgagtgcatttaatcaaaaaaaattggctgaaaatgtgcgagtgattcatttaacaaattgatttgttttcgacaagattaacgcaaaattatatgaataatttattttattttgaccaaatggaatgtaaaatataataatgtaaatgcattttaccgctgttaaaataattttactaaattatttttattccccaataaaattattttttgcaaaaatatttagtggggatggttgagatattcggactcattatttcggattagcatgagaaattcgattttttggtcaatattccgaaattgaacatcgaaattccgatttccgagtgattttcaggcacctaaattaaaattccgagaaatcagacatagaggtcccaatttataaattcgaaactgatccagcttgtttaagcaaaacgaaatcctccatg

SEQ ID NO: 107426 - DNA, 348 bp, Heterodera glycines
aaaatttccccctgggcgcctccggcatcgcctgaacatttatttattaggatattctatattttttttttaagtgaaattgattttaattcgttttaattaagctcaagtttcgggattgaagtcttaaggagccaaaagtcgagaaaattacacgaaaaattgggcattttttaagtattcaaaaaaataatttttgataatttttttcgagggtcttaaggtgccaaatttcgagaaaatatcacgaaaattcggattttttgtcataggcatgactatgtgccaggcaatcgttgtgagaaggagcagaccatcacggaagacattctgactgtgttggcaatg

SEQ ID NO: 107427 - DNA, 1003 bp, Heterodera glycines
ggatcccgacccgggatccctcccgatcgtttttccaaaatgttcgggattgatcgggattcggtcgggatcccgactcgggatccctccgaccccagttgtccggtctctagtgaaaagtgatttggttgtcaattcaaaataaaaattcttataaattaatttagtaaattatgaatttattcaaatatttgattgactccttaatatttttgttaaaatataaattttttaatataatttttatttcttacaatgcgttgaattattttttataaatccaaaaatgttgtctgtttttgctttttgaaagaacactaaaattagccatatttttatcattctttttgttctatttatttttcttgggtattatatgtgaactagttgaaacttcctattattattgataataggtcgatccttgcatcgcgtttgcagggatcttcaaatcattatttgattgctcttattataacaaattagttattattcttattattctggggttgtatacgttaatttttcaaattattttcgaatatattcaaatttatactttatttatctatgaactactaataatcattattcggctgtacaggattaattttttatgttaattttcatctggttattctcctgtagttctgtagcattcgttatcacttatatgagagagatactaggcggcattaaacgggttatccgcaagagaccgtcctccccgtttccaccctttgcaatctctctgttctcgagctgctagaggagcatctcgctatcgcgcccgccccttgtcatgagcagcatcggttggcgcttgctcggcgtactcgctcgtcgctccgcttcgctccgctcctcgctcacacgcctcgaggggcagggcgcttcgcgcccgccccttgtcgataatgagcagggaaatgaaatggaaaaggaaaagggaaaagaaaagtaaaaagaaaatggaatggaaaagtaaaagaaaaaggaaatg

SEQ ID NO: 107428 - DNA, 545 bp, Heterodera glycines
catagaaatgtaaattccgtttttctctattaacagagataaagaaaaagtccgccaaaataagagatgtttttttctctgcactctctatttattgacacatgtctctttttttgactcgctgtgtgtacagaatgaccattctttgatattccaatggtttgtgaccaaatttagcatgttttaatcaatttaggaactaaagtgagaattttggagttttagactttttgttcgaattcgggtccgggattcgaaatttgtccaatgaaggtcatattcgtgatcagcgaccctgaaaaccccccataaacatgtttccaagacttttcagaacaaaaaaactcttcgtcacaaggggggggggggggggggtaccatctatagtattacccgcttttcttcttaagaattgattagaaagtatgtgattacgccataaaaaaagttttccttttatttgtagaggctttatttccttttatcaaaacgaaatgcgccacacgcaaagcggcgggccaacgcaaccgccgaacggcacaatg

SEQ ID NO: 107429 - DNA, 1003 bp, Heterodera glycines
gcgtaaatattgattggacgcgtaaactggaacagagccgaaaattgaatatattcaaataccattgggtaatgtgaaactataaaaagtttgcgccaaaaatagacacttttatcaattttttgactaaaaactgccattttttgttatttattatcaaaatcagacaaattaaaaaaaagatgaagatgaagatgaaaggcggaattaaggacaaatgctactccagtcagtttgtatcccattttttagtcaacatttttttcaactcatttttggattaaaagtttatgaaaacaaatattcgggggtttttgaggtcgctgaccacgaatatgacaattattttggcctattgaacacaccatcccaaaaaacgagatgtgtaccaataaatagagagtgcagagaaaaaaacatctctctttttggcgtactatttctttgtctctgataatagagaaaaatcgaatttacttcgctacgtttaatttttttctatacgttagatccactccaaattttgcatatcgatagagaaaaaaattacaaacaaaatgtaagggtttttaaacgcaaaaaaagggttaactaaaaagttattcgagaaccaaaatttcgaaccctaatatctttttcctattcaatccaattgcttagcagttgcttagaaaaagcttctcctcataaagagctttcgaatgatatcaagtttttccaatttggttgggaaaaaccttcaaaaataattcccaaaattcgtcattttttaatattttggacataaataaatgaaaatattcatgttgcacaacggactcgaaccaccaccctttgtccctttactatcttacaaaaaccactgagccacacacgcaaatcttttttggtacagcagctcatttctgggatggtgtgtgaagaattgaaaaaaaatttgatcaaaaaatggggtaaaaaaactggactagtaccggacaaatcttagaaacaatgcaaaatg

SEQ ID NO: 107430 - DNA, 96 bp, Heterodera glycines
tcatttgaatgctttaatcaaagtcaaagaatgagtttgctgagaaaatcagtaaaaaaaaaaagattttctagcctgtaaaatattaagaaaatg

SEQ ID NO: 107431 - DNA, 950 bp, Heterodera glycines
ttgaaggggaatggatgaaaaggattccaataaaacaataaaatatggattcacttttatatgttttcttatacactgataaaactattaagccatcaaaaattgtaaagcgcttcaactttaaaacagtttttgaattggttcaaaatgcggaaattagagatcggaattttgagaaaatacggatcaggatcgggattacggactaggcacacatacggatttacggaccaaaaatccggaaaatccgtactccgtaaaaatccgtatccaggaaaaatacagatacggattttttataaatttaaaaaatccgtaatccgtgtcttaatttatacggatcgggatcaggattacggattaaagatccgtagtccgtaaaaaatccgtatcggccgaaaaaaatacggattcttctaaacactgcaagagaaaaaaaatcgatcatgctgaaaaatctaatttcagcctaaaaaaagtatttcgcctattgcataagttgcaatatacctaataagtagggagtccaattacctatatggaaatctatatctttttcctggactgtgggaggcctgaaacgcacgaaaaacatctaaatttggattttgacccttaaagaccagaaaattttccaaaaagtcatttttagcgaaattttgtcgagaatattgattaaattaaatttttttttttaaattggttagtttatgtcaaaaataagcaaaaaagccaaaatttcgctttttgggttgatttttcgctaaaaatgagtaaattttagttgtatcatgtttttttcttctaaaatagttttaatgccatatttatagccatttttataagttttacaatattttttacactttgaacaattaatatttttttattgtttccggttaagtgatagtacccttattttataaactcaaatttgctgaagtatcatg

SEQ ID NO: 107432 - DNA, 838 bp, Heterodera glycines
tgtaaaagtgcaaatgttaattaaccgaaaataatactcctcataataaagcgaataaaaaacggagttttattatgtgctttggatagttgttgaatgaattcgacataattatacaataaaatgttaaaagggaacattccgagctgtaactcggaaaatccatatgtgttatatgccattcgatagagcagggccgacttctattgtgaatttttaattttagcggtgtctggcgtctagttcaaacgttacagggcctaaaaaatcgaattttaggccaaagagcccttttccatcttttttcactttctattaatttccaatctttacatttatcatttattaattaaaatttatttattttcatgttggatttgaacccgagctccaaaaatgcgaatttaaccaactgagccaccaattttaagtgaaaacacagccaaaattttgatttttgaggccctatacatttttattttttttttcacaaattgtgttctctatttgccttgaaaatttcaaagaaattcgtcaagtttaaaaaaagttatgacctgctgagaaatcaaaaaaaccaagtttttttttgaagagttaataatttttttgaaactttactaaactttttgaaattttgcaggctaattgatggcacctagagctatcgaatgatataaaaatttaaaaatttggttccttttaaacaaagttatatgaaaaggcccgtgttccgggaaatttttttcgaataatttcctgaaaaatcagtgaatcttttttttttaaatttaattaaattaaatttttaatttagttggaaaaaattgaccaaatg

SEQ ID NO: 107433 - DNA, 121 bp, Heterodera glycines
  unsure (1)..(121): unsure at all n locations
atattgtcanaatgggcgagtgaatgaatggtcattagccattagccagggcaaacaaacggacacttttcggagtcaaccgaaaagtgaagtgtttgtggccatgacaacagcaaaaatg

SEQ ID NO: 107434 - DNA, 1003 bp, Heterodera glycines
tcaccaaatattaacttttccaaatgcccacaaaagggggaatgcgattggtttatttgtgtttaagaattaagcaaaggaaaaaggatgaaaagtaaagtaaattggtttagtgtgagatgagtaagggtcaggatgagaatgggaaaagaatggttaaaagcgagaggcaattggggagcttaaatactgacataatgggaggggccaagcgagtgacattacaaaatggttggccaaagagaaatgggaaaatgggtcaaattgagtgatggatttgtggatgaatggcaaaggaaatgttttgggcaaaaatgagaaaagggaaaatgtccgaaaaatccaaaatgaaaactgaactgaatcgaaacccaacagtttttttttgaaattccgattaaattgaaaagcaaataagtgtaaataatgatagaaatacaatatattgctcattatgtatattttgctgttgttggcacatttttttaggaggatcccgctttgcgtgtccatcttgttggtgatgacccgcgacgtccaaggcgaggacaaccgaagcaattggtttcgtacgaagtgggggtcagttaaaaaatacgttttacaatattgaaatgcaccgtttaaaatgacaagaaaaaaaatatgaaatttttcatttttttaaataaaaaacctattgaattggaacaatgctcacattcagaatactagcaaatctgaaatttgaaaataaatttacggaagtaaaaagcactttttttaaattaattatagtaaaattgaaattaaacataaataccatcaaagaatctttgagcgatggcaaaaaattggcaaaaattagaattttttttaaattaaattaattgcgttgagaatgttggaaacaaaattggcactcaaactgcaattttcatttttataaataattcaaaaaaaaaaaaaaaacttttttaaaatttttttctatttcaactgtgtatgtcattattgacagatg

SEQ ID NO: 107435 - DNA, 308 bp, Heterodera glycines
gctgaaattttgagaatttcaaagtgataatgaaatgtaaatagagaatctcacaatttcagctacttaatctctaaataaatactgcagcaatattgtagaaggatcgggttaataatattctctgatttattattttcactaccatccttgtgaaattctcaaaatttcagctaattatcatctaaatataaactctaacagggttgcggaaatattgagttgatagcgccaatattctccgacttattattttcacgaccatctttgtgaaattttcacattttcagctcattttcctcaaaatg

SEQ ID NO: 107436 - DNA, 428 bp, Heterodera glycines
acatacataagttatatgtagaatttattttaaaatatttgtatcactgacacatttttactgatgcatttcaggtgccaatcatttttgtgaccccctgaaattttttttataatattttttctaggttaattttatggaatttatagaaatgggtgtcagattttcgataattcccaggttttacacacatttttaaaaatgttcaattatttttcgaaaaatgggggggggaggggacaaagaaacctattgccgacgacaatacagtagtttactggtcaaaaaatttcacaaaaaggataagtacccattttccgggagccgtttttcctcttttagtttctcggacaatttcgcttgaattcgacggcaatttgcgactttttttactgaagatccgccccttatgtcgccggcacagaatg

SEQ ID NO: 107437 - DNA, 246 bp, Heterodera glycines
ttaaaaaaaaaatgttcataggtcaatttctgcttcgcccacgtgacttgcaccaggtgcattgaatagggcatatgggaccaggaattggagaaggcctgcgcgctttgtggccgattccgaacttatgcctggtccccgttcgaattctggcacacggatgtggaatgccgcaaggtcgtcgaagacccactggctgccttcaccaagtggttattgaacttcgaaacggtagtcctcggcatg

SEQ ID NO: 107438 - DNA, 59 bp, Heterodera glycines
catttacgtgtagcaaatgtgcgggagtaacaaaaaattgcgaagtatgtaaaacaatg

SEQ ID NO: 107439 - DNA, 185 bp, Heterodera glycines
cgtgatgattcccgatctcgtgggaatccttctaagatttgcagatcttccgttgggctcggattcccttcggagtaatttcttcgccatttattttggctgcagttgtccagaagcatctgaaggagaaagcttcccccttggcgttggaattcgctgggaatgcctttgtggacaatctaatg

SEQ ID NO: 107440 - DNA, 129 bp, Heterodera glycines
aatgtaagatttgttaaaatattttaaaacagtctaaattgttttttttaactttaattagagctcgacctggatctggatcacaaggcctgggttgttgtcaggaaatccaggtccaggtcaaatatg

SEQ ID NO: 107441 - DNA, 74 bp, Heterodera glycines
taaatattatatataatattataaaaatgacttttcattttcttgttttaatgaatcccttttaaatttagatg

SEQ ID NO: 107442 - DNA, 190 bp, Heterodera glycines
aaaacataaaaaaattttaaaatatggcattcaaaacaggcatagataagcctgttttttgttacacctattttggcatttttagttaatattgaacgcacattgttggagtttttagccccataaatccggacataatttttatttatttaattatatttaaatatttcaataaatattattagtaatg

SEQ ID NO: 107443 - DNA, 459 bp, Heterodera glycines
  unsure (1)..(459): unsure at all n locations
tgaagcgcggaaattttgtgacnnatcgcaatggaatggtaaaatacttatttgctttctgtatacttcttactatacttcattttntcctaaagaggatactgtagcgttttccatttctaccaatatttagaccatttttctgattccacctctctctctgtctttctctttctctctttttctctccctatttctatcgctttttctcctctctctcgcttgctctttatctctaccgttctctctcactcatctctttgtctctaccattctctcgctttttctcctctctctctcgcttatctctaccgttctctctcactcatctctttgtctctaccattctctcgctttttctcctctctctctcgcttatctctaccgttctctctccctcatcaatttatatctaccattctctctttctcctctttttttctctctaaccccaaaatg

SEQ ID NO: 107444 - DNA, 173 bp, Heterodera glycines
ggtcaattttctttcggcacgtattacgtgcaccgattgctgtgaatcgtcagagtcaaaaaatgactgtgaaatttgctgtcaaaacaatagagtgctggagcgagaaaaagaatggtgggatgtgattgagaaaataaacttaaattcagataataggagtgaagcctatg

SEQ ID NO: 107445 - DNA, 100 bp, Heterodera glycines
tatttattgattttttgattgccaaccttcaaatgaaatgcttttcctcaattaaatatttttcgtcattcattttatttaatttgccaaaatttcaatg

SEQ ID NO: 107446 - DNA, 147 bp, Heterodera glycines
ttccgcaattcctttccgtaaataaacgtcattttgcattcattccttttctccccccccccccccattttcagtttgttttgttggccttggtttaagcattgatcagcccgtcttctcccatagtccgaataatttcatccaatg

SEQ ID NO: 107447 - DNA, 858 bp, Heterodera glycines
tctttcgcaatttaaacgtttatatagttttctctccgtcaggacgccgataatgttggcagtttattgggtacttaggcactttagaccataaaaaaaatttctttttaaatcatataaaaaatttctagggggttttcggggtcgctaatcacgaatctgacatctatttctaccaaattctaactccgaatctgtattcgagttattttcgcaccataaaatgattttttgaaaatttgaattttcaagtttttgttcgaatacgggtcggggttcgaattttgtcgaaatggatgtcagattcgtgatcactgatcagcgaccccaaaaatcctttagaaaatttttatatgatttaaaaaataattttattttttatggtctgtaaagtgcataagtaccgtttattgcgctgtgaaaacgagtctaggtattctcggttgccgagcttaaaggttcttcattcgagctgggattttatgtaaataaataatttttcctggatttctacacgctctaattcccggattaaaattagagatttttcatcggacgaattctagtgtttttggcaaattttatttttacaccttccgtttttcggattgatatgcgaaaatcggatttgaatgattcgattaaattccaattttgactacataggtattttaactaggtataatgctggcaatcatggagtttactggtcccgttttttttgcttttgaaaatcttggaaaatttttctaattgttctctttgtatagcgccgctaagcctatgtgcaaattgtctgtgttgtatgagttgctattgtacgttttaccgtgacaccaatttcacaagagagcaatg

SEQ ID NO: 107448 - DNA, 88 bp, Heterodera glycines
ggtcctcctctttggatgttttgattttgttttcatctccgtttaggctatggtttgcatggtgaataaaacggcaattacattaatg

SEQ ID NO: 107449 - DNA, 1003 bp, Heterodera glycines
aatttacactggaaaatgtcttttttgtattttttattttgatctgccataactcgcttcattcccaactaaactgaacaaatttggtatttaaaaaaagtttttgaaaaggtgaatctttttctaagcgaatgctaagcaatttgacatctcagaaaaaagttgtgatactttcaaatttttatcacgttataactcaagtcctaaactgctgatttcaaccaaaatgcgaaaactaatcatttttctattggttctaaatgtccaaagtgaatttgtacccgtataaccaaaattataggaatttgcgaatttgatgttttttcatgtgttagagacttgaaaatagtacgccaaaatgagaggaaaaagaaatacgtttttattattatttacaacttttgagtttgaccatagacaaaattaaattcactatagaaagatgcagaattcttttctctatcgatatgcaaaatttggtgtaggtttaacgtatagaaaaaaagttaaacgtagcgaagtaaatgttactttttacataattaaaatgaagagatagtacgccaaagtgagagaaattacaaagaaaaagagaaacgacgagatagtactaggcttttctctgcacagtggagttgacccatagtgcaggggcagcagttgaagtgaaagggacgcggtgaagaggacgtcgacgagcatcgcagggaattaaataatttgtaattgaggaatgatgaggatgaaaaaaggtgggaaaatcgcaatatttatactcaattttcatttttgagttacaatttctaaacaaaactttttgttgctaccattttcatttaaatatagaaaataacaaaaggaattcctcagtcaatctcaattccttcttcgccgactgttccattctcaaaagcgtcgtaccataacgtcaccctcttcataaccctgtagatttttgtcatttgttttacttatttgttctaatttcaattttttcagcatg

SEQ ID NO: 107450 - DNA, 1003 bp, Heterodera glycines
cccctggcccattccagcatttttgggtccatatgataaaaagctgaaagtccctgctcaatttggggagggggttggtgggcttttagtccgcgagatttttgaaacgaaatatttcctaatttgtaagatttaagcaaagacgcgggcggatgggcgagcctttgtctgccgtcgcgccaaaaggcgttttgtccggacaatgcgtgggacgcactcaatgtttggcatccgtttaaaagctcacaatcagaaatcaaatcgctttttcgtttttctttacagtcccttggagagaacgatcgctttccgttctgttgatgggcgaattgaaaaggaattgaatttgttggaaaatgctaattttaatcattttttattgtatgttttttaatcaattctcgacaaattatcccaaaagcaaatacattttagccgtttcagtctctgagggggcggggggggggggggcaattgcgaattgcctaagcatggtttaggggtcctaattgtggattgctgttacgaattttttcgattttgcgcaattaatccgcaattttgaacattgtaagaatgaggaactgagaattttgaataaatttataagtatgcaattttcaatgcattaaaaattaaaaacaactaattcaaagtcgtttttagataacttttgttaaaaacccgacatgtccctgctcgccactatttcccttaaatctttcaaaaattaattaaattaacataattttctttaaaaatttttattaatttcctttacattaaaaaaatttttatccgatttttgttgcatatatttttacagcattacaattattgaatatgtggcttaattgattaaatttatatcattaagcttctcatgaaaatattcaaattaagaaaaaaaaattaacatacaaatttaggaaatggcattattatttgaaaatcatcaaaattttataatttaattattttatatttaaaaaatagataaatg

SEQ ID NO: 107451 - DNA, 344 bp, Heterodera glycines
cagcagtagcagataacgatatttcaccatttatttgggcttcttctttcccttttggtaataggtaaataaaattggctttttctaattccaaacaaaaaaagacccaaaggtcatttaaattaatttttatttaaaaaaaggaaaataaattaattgcaaattttctactttaattcgcattaattttaaagcacagggaatgaatgaatgggtgccaatttggcaattggtcgttctcagcctggcccaggtattctgtccaccgcgtgtttcagtttcatgtacatttgactcaccgggttctgccgaattgcttaaattggaagtgtaactcattaatg

SEQ ID NO: 107452 - DNA, 497 bp, Heterodera glycines
acggatttctgttcccgttggcccttgggaaaggcactttaaataaaaattggaaaaaggtctactgtagttaaaaaatgtattgtggtttgtctattgtgttgtggttagtatgggctcaaaattctgcgcctcctcgcggtgagtccggaaacagttttatttttaaaatattaattaatttttttgcaatggaattaactctggctaaagcagacgtaattttgtctaattttgtggcttagaattaaatttttaaattttttttttgttttattgaaatccccaaatgtcgggtccctaaatgtcgggttgccaaatgtccgtggttttcttaagtgtcttttgctcaaatgtccttcggtccccaaatgtcgggtccccaaatgtcttgatccccaaatgtcggatccccaaaagtcgggtccccaaatgtcgggatccccaaatgtcgggatccctaagtgtcggatccccaaaagtcgggtccccaaatg

SEQ ID NO: 107453 - DNA, 363 bp, Heterodera glycines
agtacatttatttgcataattttagattgtatttatattaaattgtcccagatttacaatttccacaaattttaaaaaattcggattggatttaaagcccgctttcccgaatttaaatcctgattttgtcggggttccgattccgtttcttttttcaaacaaaactgggatcggtaacccgggaaaattcccgtccacgttctagtgcacgaaaaatacattcgatgcaaaatccattacaattttcaaaaaaaaaaccccgtttttggaaactccttcctgtttatcctgacaatttttatcagcgattcaaatattatgttataaaataaaaatttttatagggattattcaacgttgatg

SEQ ID NO: 107454 - DNA, 967 bp, Heterodera glycines
agctaatcaccaacaatcgtccgcaatgacgttaaactagcctaagccatcaacaactgtccgaaacgctaatcacccggctgctacgagtccggaatgacgttaaactagcaaagcatcggccaacccacacaacaatcgtccgcaatgacattaaactaaagaaccaaccaaacaacaaatgtccgcaaagacattaaactagaaaagcaaacaacacatgtccgcaatgacgttaaactagagaaacaaaccacccaaagtccgcaatgacgttaaactagcaaagcatcaattgtccgcaatgacgttaaactagcaaagcaccggccaccaagcaaccattgtccgaaaagacgctaaactagcaatccatccgacggtcagggtccgaaatgacgtccaacaagcaacgacaattggtccataaggacgttaaactacgtcaccaattcaagcaaaagcactcgagcatgcagctgacagcacgtttccggaagcaaattcacatgtcctcaacgattgaggaggttcagcagcgaatgaaccacaacaggccgcaaccgcggaggtcacaacagaggagactaaggccaactcaagcgcctaaaatatgccaatccgggatcgcacagtacaagcagggtcgagggatccgccttcaccctgcgtcttctgcaatggcactcactggaccacgacgatgactcagcgaacaacccttgcaacgagagcaaggacacgaatccagtacgtcaccagggcgagaacgcagaccacgaaagagccaacgacacgccccagatcgctcccccgccatcactcactgctcaatggctcaacctggcaattgagctcttcgcaaaaaatcatcaagcccgagcagatcacctttgcatggcattgctccttcgtcaccatcgagaaggaatttccaccggtcaacaagcggatctgcaaacaaatg

SEQ ID NO: 107455 - DNA, 828 bp, Heterodera glycines
ttgaaaagtgtcgccgcagaaaatgcgggcaaaatttgctgatcaaattgttccaattgatccttcgcgatgccattctgttgtatttgttgttgttgctgctggaggttcaacaacagaagcaacgggttcagctgcagaaggggcggcgacgacggcgaaaggccgtcgttggcaattgccgaaaaatccattggaattgtgaaaaatataaaaataataattataaaattaagaaatattttaaaaggcattaggtaaatggagaattttttatgcaattattcgaagacaaaaaagtggcaaatggccttaaaaaagaaatgggcaaagtgtccatttgaatggtcaatgatcagtgacaaaagttgccactccactccaatcacttctcccattttggtgggatttgtcagagggcaaaatgaagaagaaaaaaagatcaaagcaaatttaccgccaaagagttaattactccgtttgatgggaatggcggattattagcaaaaggaacaatttttccatttgcttttacacccaaaacaaagtgaattttcatgttaagaataaatttttatgcaaaaagaagtgacattttacagcaaaaaatataaaatgataaccattttattatatatttaattttgctgattttatttttattttcttaatttttcaaattaaaatacatttttataaaatggagtcaaatccctgctctcatctcaccaatatattaagaagataaattaagaatttgaacacatcggtcgaatataaaagaacgaatgattggattatacaaaataaaacaaaacataccgtatg

SEQ ID NO: 107456 - DNA, 124 bp, Heterodera glycines
ggaagggggcgagtgattgcgctcatccgttgccccctcccccatcccgtcacacattttgcacaatcattctttttttccacttgctactgttggtgaaagccgtcctttcgcgttaaggatg

SEQ ID NO: 107457 - DNA, 85 bp, Heterodera glycines
ccccccccgcctccattatttcactgcatttctattggaatttggttttaattttttaaaatttcagcacgaaattcacaaaatg

SEQ ID NO: 107458 - DNA, 209 bp, Heterodera glycines
actccatgattattggcactattaaatatttattaaaatgaattttctacatcgtatttttttttgttttgaaataaattttttaatttatttatttaagtttaaaataatatttggattaatattagcaaatttttttatccagataattaattacataattaaatcaactaattacctaattaaaataacattaatcaccaggaatg

SEQ ID NO: 107459 - DNA, 382 bp, Heterodera glycines
tgaatttccgatcttttgctcgagttcgggtctggggttcgaaattggtcgaaatggatgccggattcgtgatcagcgactccaaaaacctaaatattggtgtgtgttttgcttagaaagtgagaaaaaaattggaatttttttttatttcgaaaaaactaactaatttatcataaaatttcaaaaaaaaaatcctgaaactttttcaaaaaaaatttattgataaaattctaattgtaactttaaaagcttttaaagatttatgcggcgagatttttgtctcggcgagatttcgggcggcgaaattttgtgccgtcccctttctaaacgcatcgccaatttccctccccccatttagcaattcccccgtattttctgcatg

SEQ ID NO: 107460 - DNA, 1003 bp, Heterodera glycines
gtgaaccttctctggtatagccgccagaggaacccgaaattttacaagcttaaatgaacaatattaaattatttgcctattgattgaaaagcccaacaaatttgctctttatgcttcaactgacagaaaaggcaaaagggtggcggttaaataacagtcaatttggcctccgtcctcgctttatgattagtcatttctttctttcttttttcgtgcttcgtcatcgctctgcgaagcgatgacaaaatatgtaaataaaatatgtataaaaaaatgctaaaatgtgtataaaatatgcacaaaaaccaacaaagaggtattaaaatatgttaataaaattaaaaaaaatttttttttttggaaaaattatttgtaaagggttaaataagcacaaagcttagaatcattttagtataatttttgtttataaattttaaaaaattcaaaggtcgtaaagaattgaaagggctaaaaataaacggatttttgtggcgcgaaaatattttaggactacgcaaagcggggaaagtcgcaaaaagcgggagaggggtgaaaaagccaatccaattgaaacgaatctgagaaatcggtgaaccgattggagaaatttgtggcgatgaaaagcgcggaaaaagtggaatttgcgatgaatgaattgagacaattgaacaattgaaaaggaaggaatgaatgaatgatttgttgtggtaaagcgggggaaaagcggggcaatcaatccctatgaatcgagggaaaatttttgggtgtcggatgccattatctttttctgaaattttgaaaaaagattggaagttttcggaagtttatttttgattttttcaaaaaattagaattttacggttatcatagaaaaattaaaattgacgcaaaaaactaaagtgctcttttgactgaacttttgtcattcttatggaaaagtgacaaagcgagttaagtaaaattacaacaaatttttcttcagctaacactcgcccggcaaatg

SEQ ID NO: 107461 - DNA, 147 bp, Heterodera glycines
gcaaagcacacatcgatcagtgaacattcactcatcaaaggaacagcagcaagagcgcaggtgacagactcagcggaagcaccgcttaaccatccgttcagccgcttcacctccccccccccccattcggttcagacttcaacaatg

SEQ ID NO: 107462 - DNA, 301 bp, Heterodera glycines
ttcttcttgtccataacttttttgaaccttaacgagattttccgaaattttgcatgctaatattggcaaagaaaaaagttatagccaaaaacttgtgctcgtacgaaaacggcccgtgccaaaacgaccccgacccgtttttgttaccttttatttgtttccgattatttaatggtcatttaaattttacgacagtttttgtttgaatttgggttaaatgatcaaaaaataatcctaataagaatctgttttatataatagtttaaatcaatttttaatgtttttgttttagaaagcgatg

SEQ ID NO: 107463 - DNA, 299 bp, Heterodera glycines
tttatgtgcatatttttcattttttatgtgcatatttttcattttttatgtgcatattttgcaatttttggtgcatatttcatgcgcatattttaagatttcatatcatcatttatttactgtatgtactaaaattttgaaaatgtattttttattggttcggcgactgttaaggcgatcctcaagagtgtttcttgctttatcggtaaaattttgtgcattctgactggttttttgtgcaaaaataaaatttgtgttcattttagctcatctttttcgttttttgccttttgtacatg

SEQ ID NO: 107464 - DNA, 554 bp, Heterodera glycines
gaatgccgagattttgaaaatgcaattgtttttatgtgaagccatttttcactatcatgcttaaaagttttagaccaaatattggaagaagaaaaagaatgtttgttgcataattctttagaagacaataaaaatcaaaacaaaagcaaagaaaatttggaaaaaatgaaacaaattttgccagaaaataaatcgtatgaagctgttgatcatgttggggcatcttcacaaatatccaataatggtgatcaacacaagcaatcattcaataatagtgaaccaacttttttgataggtaaatttttcattgttaaataaaataaagtcagaaaatttaaattgtatttattaaaatttatttgaaaatttatgtttatttatttttaatattttattcaattgctgagccaaattctatctaaaattaagtgaaatatatttaccatctgtttatcaatacactgaaatgtctggtgccagaaaattttttatttgcaaccgccgccgaaaattttttggaaatcattgatggcaaatcaaagtatttggaaatg

SEQ ID NO: 107465 - DNA, 1003 bp, Heterodera glycines
tttgtctattttttaagcatttataaactttaaaagttactaaaaatatataaatttgctttttaggtgccttttttaaaccaacgaatttttcttgtaaattaccatgcccaaagcaggaattgcttggttaaagttgatacttagcacgggagagtatttcagttcattcgggatcaaaaaatctgctgattttttaaaaatttttgcggcgcatttttccaaaaaacttttggtgaatgggcgaggggagtgggtacggcggtgccgaatgtcaccgccgcaaaaaatttcataattttcgttcagatttgttaacagattttcacaaaaaatgccaattttgcaattaaaagccaagtgacgactttttttcgcttttaaaaaagctttttttgcggcgcgcttcttccaacaattttgggagacaaggggggtccggcggcgccgataggtgccgccgggaagaattttgtgatctaatgcgatttattaacagttttttgtccataaactttcaaaccaatcatttgatcgattgatggatagaaaatctgaagtaaaaaaacagaacatgttttaacaaagttttgagcttttttcttattcgggtgggtccagggttatgaattaggttgtataaatgtcatattcgtattcagcgaccccgaaaaccctaaaatagacccgttttccgggtttttacgagctttttcgagtattggacacttacgtggttttttactcttttggactcgtggcttagacaatttgtgggtcagcgctcatttcagcataagcatgttgtggtttatcagaaagcattaatatttccctatttttccactatcccagcccctgttgctcttcacgtgaatccgagtatataaagccggccaaatccccttccagtcatatccaatcagcccattcacatttgtttgaaaaattcttttttcagttcatttctttggaaattttgtctaattactcgcaaaaaatg

SEQ ID NO: 107466 - DNA, 542 bp, Heterodera glycines
attcgggatggaaaaaaaaatttaagtttgcacccgattttggacataggcgcaaatgtggtaagcggcggaacaggacaaaacacacccgtcgacgaaacacagccgtcgacgaaacacagccggtaacaaattttttaaaaattttcgttgcaaattctatgacaaaaaaaaattttcaaaaatttttagcgattttttttgaaaatttaaattttttgaaattcttagaattcgtcattaaatttttgaaaaaatcacctgagaattttttgaaaattttttttttcatagaatttcctaagaaaaaatttctaagatttttttcttgaaaaattgctgtttgaaaattttttaaaaaatttattcccggctgtgttatgtctcgactgtgtttcggcggctctgttttggggtgtaccgggtaaccggaccactcatgtccccaaaaaaaaaaaaaacgtgcaggcagcaaaggtcggcccaccaatgccgctgctgctgctggtggtggtgcgtccccttcctacatcatcccaatg

SEQ ID NO: 107467 - DNA, 577 bp, Heterodera glycines
tatttcaatgataatgcttgacaaaattataaattcacaaaaaaaaattactaatttaataatttaacgaaataaattttatagaattaatattttttcgattaataggaaatgttttccaacgctaataattacgtattaaaaaattaaaagccttggatttattaccaaatctgcaggacaaaaatatgtaaaataggacaatttatgattaaatattacaaagattttcatttccttaggacaaacataaaaaacacaacacacatttaaaaaaaattagttatctttttaatatgttaatttttttacaaaatttaatcgaataaaaatatttcgtcatcagtgccgtctgatcattgctgatccggcagctgaaatcaatgccaatttgacgtgccaaatttcgcggcacttttaaatattttttgcgtaaaaaacaaactcgatgtttatctggcatatggcaacagcaaatttgtcgtagtgatctgtgtcaattaaaaaggtgtgtaatttaacttcattatgtaatttgggaacaattaattaattgcatgctaattgttacaaaatg

SEQ ID NO: 107468 - DNA, 762 bp, Heterodera glycines
gaaatcaaagattttcaaaatctgagctcagattcccttctagcgcattttttaagcctagaaaaatatccgacaaacttttaacattttttttcgtcgggacaccaattattaatgattgccccctttttgatggcttttttataacgactagagctcggcctggacctggatccaggcctggatttttcctgaacctgtattttcctggatttttgtacaggaaatccaggtccaggtccaggcttttttcaaaataccgagctctaataacgacatagcaccgggctgggttacctatgttcggacttgagtaaagtaagtgatttttgctgtattattttttcatgtttattaaacatttaaatgaatttcaatttagaattaattaaaattaatttttattaaaaataagattttaaaaaaataataattccatttatcccccggggggataaatagagacgggaggattatttttcaacatcctcagaaagggggacataattggagacagcgggattaatggagacagggccttaattagagaatatacggtaatttaaaagttttggcttggcatatccccttttggagataacaaaaaatcagcacaaatgcacttaaatgggccaacattttttgtgggaatgatacatatagcacagggatggcattccgaggccccaaaaattttttggaagtcggaattccgtgtcacccctggtcgtaaaataatgccaatttcagtgtgatcccatg

SEQ ID NO: 107469 - DNA, 1003 bp, Heterodera glycines
tttagtaagagttaaagaatttatacaaaaaatatttttgacaaaatttaaaaaaaaagttttaaaacagattttcgaactaaaaatatatgtacaaaataaattgtaaattgtgtacaaaaaaatgggaaatagtttagcattttcctaattaattgattacttaaattactaatgaagtaaatttatttgttgatttttttaagcaaaataaattgaaaaattaattaatttttcaaaaaaaaattcaattaaacttacaaatttattttattttttctttaaaagaatttaatttgaatgtttttagatttctcgatctgcaattaccctagagccacacagctcgatgggagggatatatacggatttgtattccttttgaatacgaggggtctctcgctttctctattttctttctcttttccatttcattcattccttctctttcttcttctatctcatcattatgttaatccattttatattctctttctctagttttatttttctctggcactctctctttattttctggcatttccctctctctctctctctatatatatctatttttctcggtttctctctttcttctcaccccccccttctctctccccctgtctctcactctctctctctctctttactttctctggttctatctttattcttcccctctactctttctctctctctctctgttctctctctctctttctctctctctctatctctccctccctttctctctctctctctctcccctttctctctattactttttttctctcttccattcacttccttttcacgaccaattggctatgcaaatttcattgtttaatagttttgttaactatcaatcatccactaatttattaaggtcatttgattatttaccctgcttttgtcattgaacataactaaatatttaaattgttcatttttcaactaatttgatttttctaaagttttccgagctcataaaacatacattatg

SEQ ID NO: 107470 - DNA, 680 bp, Heterodera glycines
tagcctgtaaaaaagatatagagaaaaaactccaaaaatttcgactttttcgaaatttcatgtataactttttggtaattgtctaattgagaaagcttattgttaaaaacagcttctaaacatgttaagctttcgaatgataccaagaattttagatttgatcgacaaagaaaaaaaaaaccaaaatacaaatttttcgagttaaatctttctgtttattttcttcatttccgcttttaattgcctgttttttttcttcggcacttgtacagaataagttgctctaacaaaaaatattaactgtttggctccctttgatttccatctctgaaataaaatatacttttgaaaattaaaaaaagacgaaataaaatacaatccgagctcctgataaagtaataaaaaaaattttttaaattcgatacctaaatggaaatataaacagtgacttttcgcttttatacccaaatttatatatgccgacaaattttccggtcattcattttcccttttctgtgaaaaccacactcaaaaacatataaatatggtcactttttgattcaaaaatcattttctccatttcttcaacacaatttcaatttgtcttctaatcccccccccaatttcatttagcttccacacattttgccatctgtcaaccaatcatcatcatcaacatg

SEQ ID NO: 107471 - DNA, 201 bp, Heterodera glycines
tctagagtcatattatataatatcttctgccgttatcgtaaaaaaaactgtctattttcattacaagttaaccaaataattgagagttaaagctcaaaagcccaaaaatttatggcattattttttatttggcagttatgtacgaactaattagtataatttttttaaatttttgaccgaattcagcttgatgacgtcatg

SEQ ID NO: 107472 - DNA, 813 bp, Heterodera glycines
  unsure (1)..(813): unsure at all n locations
atttttaaaaaattatttctcangtgacgaactaaacagtgacgaaacgatcggccactctntaattaagctttcttgcgagcgaagaaataaataaattntaaaaaatcattttcaaaatttgcctacttttgaaatttagtgaagcaaaaactcaaattaaatttattagtcattgagcagtcgacaaaaagcatcgtcgccaaaagtgtgtgatctgctgacgccgatttggccattccatttttctttggttagtcgtgttgcttttgcttcttatgacaatgaaagtggtcgcccatttgcaccatatgatcagcgaaaatatgatgcggacacttcagacaaagcaaaaatccttttaaaaggccagaaatttgattcatttgcgccatttcaaaaaatttaaaaatttttttaaatgagagtcatttctcgattttaattcattttttaccaaattaacattagcataaattttataggtttgcccatttttgtgacaaaaaaattaaatttatgattgtattaagaaaatctcttattatgttatattaactgtgttagcattcgtccagacaaatattaggcattaacatgaccatgaatattaaataaatgacccttgtctgctaatgaatgatcatgacccgcggcgcccaacattcattagtcagcgccactcgccgtggtcattcccattctaatgaatattttaaaaaatcacaattctatgaataaaaattcatttcaaataataaaaatgcattaatgacacatgaatattatcagatagcatttgtcataaaaatg

SEQ ID NO: 107473 - DNA, 79 bp, Heterodera glycines
ttgttcccaatcgtggctcgactcttcgtctctcgtcatttcaacgtacgcaaattccactcaattggcggcaccgatg

SEQ ID NO: 107474 - DNA, 590 bp, Heterodera glycines
gagcgagaataataaacacagcgccaacgatgagaagcaaaagttgaaaagggcacaaaacggaagggagaggaaaaagcattttatgggaggaggaagaaggacgaaatattatttattttgtgtattgcgacgaatgaaaaaaagcgcaaaaatgcccatttaagtaccctgtagatttaaaaaaagttataggtagttggcctagtacgatttggggttttcccatgcttttccactataacttttctatataaagcagcagtttttttatgcattttcatttctactgatttttaattttatttcactcccctttccccgcgctttttgcttcctcaaaaattcttgtttataataatatttagctccaattcattgtccttattattaatggcacatattcgagcgaccgcacaaaaaaacccacctgaaaaggtgaatcactcatttctatgtacatatgtaatctcgaattttctttccaaaacaggccaaatgtttatccgaactgggacctgatctccgtgacgacaaattggacgtcgacggacaaattggacgtcgtcattcgcaaccagcacgaaatg

SEQ ID NO: 107475 - DNA, 1003 bp, Heterodera glycines
tttgcattcatttaattacccttcaccgatggcatttgtcgccagaacaacaaaaaagagcgaaaagcaaattaaattcattttgattttgggaaaggaataaatttgctgaaaatgggtaaaatgattggtaaattagtgggtttagctggctttgcaaacgcttaaaaagccaaaaaagccaatagaaacggtgactcatcgtttattggctttatctttctgctgatcggaattttgtccattccatattcacaaatcagtgcagtgtttgggagagaagcgattcaaatgcctttttttcattttatgtggacaaaacggacaattttatccactttcacattgaaccatcgctaccacaaaaatatttaggaagaatttatgcataattattatataaagtaaaataaaatgatttaaaaaaaatcgtttatttattaaaatatactatcagatttgtgatataaagtataaaatatttctaaataaatggtcgatttattagtagggatgcgatttttagtcaaatgcttaaaattctgcgcacttattgcagagataagcacgaaaaacacattttaattaaattaattttttttcagaaattatggaaaaataacaaaatttgacccaaataaaattatattaaaagatggataaaaaattttaaattatacaattaagctttttgaaaaaatcgagttgataaaatatttaatttgtttattttagtcggcgttcgatcaaaattttttcagatcagagcagaatttttttagataaacttttgtggtcaaaatcagaaaaaaacactacaaaaaaggagcgtaaggtgatttcaaaggacataaggagacaatttttgaatttaaaggacttttcaaaagggagccggaaaatgcgacaccgagagaaagtttttcatttcaagaaaatgcgacactaagaaaatgcgacaccaaacttagatttttaaaaatattttaaagtcttgaaaatg

SEQ ID NO: 107476 - DNA, 88 bp, Heterodera glycines
agcaattaaccatttaccttgttaattaaccaactggggctttatttaggttgaacatcggacacgcggtgatgggcgtgcaccaatg

SEQ ID NO: 107477 - DNA, 52 bp, Heterodera glycines
ttcgttacctcagcgtgtcgctaattcctccgtttctttgctcggaggaatg

SEQ ID NO: 107478 - DNA, 472 bp, Heterodera glycines
attatgtggaattggggccccgtggttatttttttttttgatgaaataatattagaaataagcaaacactttgaaatttcctaaaattggacccttcacgtaagcacaaatcaagcagaattaagaacatttggcagccctttttatctcattagtgtttttcatatattggttatttttctttaattgccgggtgtcccttcagtgtgccaacgtatttttggcttttcggcattcttcgcattcgcgacccgaacaaatgtgaaatgacggtgctggaaaagcatgaaatgatataatttccaaatttgtctaatcattttaggtgaatttcgaattcgctcccggcatggaatacttttacaccattttcatcactttgttttgcatttgtccaattttttcgtctgcggtggtcagctgctatttgctccgattgatgcggacaaaacgccaattcctgaacaaaatg

SEQ ID NO: 107479 - DNA, 211 bp, Heterodera glycines
ttccgctgggtgccagccgggctgccgccactggtgatactagcgtacgaagaaacgttaccgttaatagagattcagaaaaatggttatcgtgttttttgagaaatgttctatgcgtcaaacgctctcgaacatgaaactaagtgcggtgcgccatggccattttatgttgcaaataatttttatatttaatagatattccagaaaaatg

SEQ ID NO: 107480 - DNA, 785 bp, Heterodera glycines
tttttcgtgcgaaatttaaattcctttatttttagcgccgggggctccagccagtcgtaatttttcaattggatgaaaaagggatcagaaaaaaaatcattttgacggcttggattttcttaacgactttgcattgttttcttttgtttctcctttttatttgcttcttaatttaacaaaataaaagttcaaatgcctttggaaatttttgttggactctgacgggcgcttcggctaattaattatactgcaaaattttgtgtttaataaataaaagggaataataatttacttttaaattaattgttaatgcatcatccatttttaatcttattttgcttaaaaaaatacatagaataatttgcacacagtccgggttcgaacctgacccatcccccctcagaaagatgcctcagaatccccatttacgaatggattttgaggccttaatgaatgcatataagctatataccaaaaagttacagggcctccaaaatcgaaaatttggctgtgttttcacatgaagttggtggctcagttggttaaattcctaatttttggggtccgggttcgaatccaacgtaaaaataaataaatgtaattaaatttttaacaaattaaagattttaaaaatacatttttaaatagggttgcaaccccgaccccgaaccccgacatttttggccattttcggggaaaaccccgaccccgaaccccgacgcttcataccccgacaaccccgaaccccgatcggggtcggggttaaatatacacccctaagaatg

SEQ ID NO: 107481 - DNA, 245 bp, Heterodera glycines
actgaatttttgtaaatagaaaatatctcagaaaaaagatattcgaaaacttcgataaagatttttaaaggtgtatgatgaatcgctggtttttctacaaaaaattttaaaaaaattgcatgaaaatttctttctacaaatttactttaatttttccgggaggcgaaggcattgcaccctaattttgtacactggcttaaaggccgctatttgccaatctctcctcccttccctcttctctcatg

SEQ ID NO: 107482 - DNA, 181 bp, Heterodera glycines
ttaaatggcggccaaattcatagaattcgttttggatattggaaaagttggaatttgttacaggtcttcagaaaatttcattcattttttgtttttagtcagtgccgattgttacgactcgttggcgatgacttttgatgatgccaaactgtcaattgttggcgtgaacccggccacaatg

SEQ ID NO: 107483 - DNA, 298 bp, Heterodera glycines
gctcaaattaacggtgcccttcagcaaagaaatcggccttctttccggcgattggtctcgtcgacttcgtcggctatttccttaactctaatcccaaccaaattgaaactgactgcctgcaaaaggcgcgaattattaacaaacaaatcaaaggtaacccttccgccattttgcatgtttgcttaactgaattttcaggtcttgctgttcaaacgatgcatttgcctgaaaatcaggtcgtctctttctttggatgggcgtttgtgcgtcctttcactcattgtctgccgttaagatg

SEQ ID NO: 107484 - DNA, 183 bp, Heterodera glycines
ttgaatgattattcaaaaattcggaagctaaaaactttatatatgtcaatatgcgaaatgtgcgggaggggggagggggaaggataagttgctttttaatatatatatatatatatatatatatataatgagtaaaatgtctttttagtttatattttgggacaagagctaaacggcataatg

SEQ ID NO: 107485 - DNA, 1003 bp, Heterodera glycines
aactgtgatggccccccaattttgatcattctttgaaccccccgattgttgatctttgatctatggcccggtgccctccatttctgtttctcccggtcccattcattgatttctgtgatttcccatttgccccagtaccgaatgcttcctttctgaaaattttcctgtcccatcccggtccccaattcatttgtgattaatcccccggtgatggcattttatctgtgatcaattttgtgatattttgttcaccatttttaaatttttgtttaattacccaagtttgaggtcatttcccggaataaattttttattaattccgtgtctcgtccctgcctgcccctgaaccccgcaccgtggaattcatttggcccgaccccagagcaagtcgggacaaattggcgctcctgggtggatttgctgtgaaccacggactgaaatcgacggatcccggtgacaaagggggaagggaaaagcaaattagagagcctagacaagaccctctgaggcttgtctagtgttcatagtttcgtgtagttattgtcctccgaggcataacttcacgagggacgtagcggacttagtgtttaccctctgaggaagcacttcgtccgaacagagggttggaaggtgttgtgtagtggacgaagtacttgccctccgaggaagtacttcgtacaaaagggtgttcaagcgcgcacaaggccattgacaaataaggaaaaaaggcaaactaacagtcctccgaggctttagtttagccataaggcaaaaggcaaactaacagtcctccgaggctttagtttagccataaggcaaaaggcaaactaacagtcctccgaggctttagtttagccataaggcaaaaggcaaacaccttgtcctccgaggcaggtgtttagtcacaaaaggtccaggaccaaggccagactgatctcggaaaaagacacaaaacaacaagtgcaccacaacacacacacgcacaaccaaactgcacgcaatg

SEQ ID NO: 107486 - DNA, 159 bp, Heterodera glycines
ttcgataaaaaattatatgggaaaatggagggggggggagggggaagataacaaaatccaaattcaaatgccaatgggtagttgagttcatttttcgacccatatcaatagctaaatgttgcttttaaaaaaaacgatgggaaaactggcagaaaaatg

SEQ ID NO: 107487 - DNA, 159 bp, Heterodera glycines
tattgtattttattgactttctttttgttgggattataagtttataattttacaaattttctcgtctgttgtttatttgcattcattacattacctatttcacattttctctctaattcccactccagtatatttttaagcgttttttaagccaaaatg

SEQ ID NO: 107488 - DNA, 912 bp, Heterodera glycines
tgaaagttttccatgagagaacatcgtcagcttaaagtggaggcgttgaactcgccacttgacaacacgcagcagtgacaaagatggatggtaaacattcacccaaattccaaaattttatttttaatccgaataaaagtagaagattaaaaaatttaaaatgggtgctaatttcactaaattaagtgcctaataaatgcaagaaaaagattgtcaataaaagaaaaatgcacaaaaaagagccaaaggaatattaaaaaaaagcaatgctaatcaaactaaaaaccacaaacaaaaaacgaaaattttaacccaaaacaatgattaaaaaaacctatgatcgacggacgcacaaacaaaaaaacggcagaaccaccccaaatcgactggtggcacattttatccgccggatggtcaaaacaaaacaaaacaaaattcttctttcaccacactttgtgctgaaccgacaaatcagatcgacctgcggctgctgctgatcacatcaaatcatcccctccccccacctcccccaatgatcgcaaaaatgtgattggagagaatgagaggaaggcaggcaccacggacggacggacacggcggtggcggcgacgaccgacggacaaacgcaataaatattcgttcgcgcaggcagcagaaagacaaaaaatgaatgaattattattggcattcattgtgaaatgagaaaaaagaggggcattatgagattgatcaaatttcaacaaagtatgtgtggtattgaaagaaagaaaatattttacgctttttgaaaattttttgacaaaaaatgggaggaaagggggacaatggttgaaaattcgttattttcagattatttaatgttatttttagtcattaagtggaaaaatttcgaacaaatccagccaaaaaatg

SEQ ID NO: 107489 - DNA, 80 bp, Heterodera glycines
ttatccaactgcccaattcctttgctttgacacttttccccgccttttctgaattcaattttccgttataagtgcatatg

SEQ ID NO: 107490 - DNA, 1003 bp, Heterodera glycines
ctggcaattaaggcaccaaaaagcgcaaaatggcactgaaaaaaagcacaaaaatcccgaaaaaggcacgaaaaaaggcatttaaatttttttttttattaatgatttttagggagcaaaacacgtaaaactaattcaaaaaactaaattttgggcgctggcgtttaggcgcggccgtttgggcgccagcatgtttttcaactataacttttttctatgtcatccaaatccaacatttttggtaacattcgaaatcttaatatgtttataggccagcgcccaaacgcgtgggtccagaaaaaaaagaattttggcgaacaatttttgtgaaaatttttcaattcataaaggtatattctctgaatttttttagatcatttcttaggggtgtatttttcagatttttttgaatttttaatggaatttttcgggaaaaaacgccaaaaaagacaccaaatcgctaaaactaatctttgtggtttttttagaatcaaggagcaaacacatgttttttggctgccttttctatcattttccaaacctcttagtacaccattcaatagagtttcaatagctctacaattttactcagaggtgatctttcgctttttctattaatagatagtttattgcttttttgaaaaaaataaacaaattcaaaaaaaccgaaaccgaaaaatcgaaataaaccgaaaaattttcttcggttttttcgatttcggtttttttcggtttttaaccgaaaccgttcgattcagatgaaaattcaaaatgaatttttttttttcacaaataaagggttcgccaattttttgagatttaaaacaagttcttttggaggatatcaatggccaaaattcggccaccatttgccagtctcgagactgtttctgctttttctcgacccaaatttgagtgaaatgggcaatggcactttttgcttctcctttgctcccccccccttcccctgtcaggcgattcgtgctgcaacccgtacagcatg

SEQ ID NO: 107491 - DNA, 384 bp, Heterodera glycines
tttttggaaatctcggtctctactattaacaactcagaataaaattacaaaacaggcgccggaccctctctcctcgcccatttcccaaaagttttttggaaaaatgcgccgcaaaaaattgttaaaaatctgattttttgagccaggtgttctgattttggtaaattttcgttcgcacccctgttctcttcccatcaacatattaattaataaacttaataacattggcattaagggaaaactgctaacttggttatctgaatttttaaaggatatattttatagagttaaaattaacaatcaattttctaattaacatccgattcagtcaggtgttccacagggttctgttcttggtttatgtctcttacaaaacacgtgatg

SEQ ID NO: 107492 - DNA, 813 bp, Heterodera glycines
cggagaaagtctatagaatttattatcttttaagcattttgccgaaagcgaacgtcttttttcagcggcgggattgatcataaatgtcttgagaaaacgcttgacgcccaaaaatgctgaaatgttattgtttttgctagagcccgacgggatcgggactcacgcggggtttttacggggttcccggtcccgcttttttcggtgaacggggaatttttacgggagcggttatttttggacaaaacaaaatctgacaatgtattgtattcaaattttttccaggcggcgcctatcggcaccgcatgcctccctcctcctcctttgtcccaaaaaagttttttcgaaaaatacgccgcaaaagctgttaaaattaataaagggattcgaaaatactaatttaataaactttttgttcgaataaattttaaaaaataatttatttgaagcaatttgaaaaaattttccgattttcgaccccaaaatctaaaatttcgccttttcgctttcgccttctcacttccgctttttatttttatttttacacatccctgccaccagtcactagttgacaaaaatattctttgacgcaaaagccagttttttcgctttggtgatgaaattttaaaaggtattcggattcctccttccaaatttttttctggctacgggtctaaattagggaatagaaggtttagatgacaaaacaaaaatgacggaataaaaaaaaaaaccaaaactttttataatttttattacaataaaatagaatggctgtataattatgttacaataatttaactacagaaagacatg

SEQ ID NO: 107493 - DNA, 145 bp, Heterodera glycines
aatcgcttcttcttcccattttgtccatctgctttcatttcgctcaattggacaacgaatcagaagaaaacggcctatatcgaccatcattcttttcaaggtcaattgttcatgagtgaattcgttggttagatcaaagggcatg

SEQ ID NO: 107494 - DNA, 216 bp, Heterodera glycines
tgtttgggttggcacgagcctatccaactcacacgaatgattcatcgaaaaatttcaattcaaagtctgatcacgtgatttacgtgatggatgattgtataaaagggtgggagccttcccacccaaccacttttttttcaaacataagggaaatgcctattccctttcgagaaggtcctttcttctcggctcgtcgggtgaacatacccgagaatg

SEQ ID NO: 107495 - DNA, 257 bp, Heterodera glycines
atgtgctttttatgcaccagataattattttgatccctttaatcattcctgagcatgagtcgttcgatcactcattactcaaaaaagggggcacgactacatttcgccaacttggcattcgccaactcagccaaaaacattcatttcgccactcagccaaaattaaattttttttgatgaaaaaagatgtttttatttaatgttttatacgcttgtattttaaaaattatttcgctaattatttttagttttaaatg

SEQ ID NO: 107496 - DNA, 928 bp, Heterodera glycines
aattaatttaaacttccacccgtgggttgtacctctttcacaacccaatagcttaccgagatagcgaagctcaaaaagcgcgcagcgccgtatcccagtccagagacgacggttcagtccgattctttcgacaaaaaggttactttgttgaagtcttgcccaattccatgtcccattttacaatgcgttttaatatgacaaatttggaaaattgtaatcgaatttaatcgtttttgtaaaatgctattctataattgtttcaataatggtattcttttttacattttcctaatttttcacgacttttttacatttttttcgagatttttgatgttttttatgactttttcgtgattggcgattttttatgacttaaattcccagccctactaataaataaaaatttacaaatttaaaaagtttttcggaaaaataaatttattatttttattatttttttttgattgcttaacattacctttacattattgccatgtaaaatgccctttttggccaaaaaataaaatcgaaaatttgctatatttatcatttttaaaaaataattttattcccacctgctattaacatttgctttacatcattgccatgaaaatgcccttttattaaaaaaatcgaaattcactatattttattttttctgcatttatttctagcaatagaaatagtaataattcacagaaatagtaataattcatctttattttatggaaataatgcttaaataatattttccaatcaatgatcagctcagcattacgtcaatgagtaggatttcttcatatcattaagtagaaaattctgcataaaaggctatcactgctcaattaattcactcagaaattttcattttgcatttaaatttgatcataatttaaaataataattttgtttttacctttagaaaatg

SEQ ID NO: 107497 - DNA, 690 bp, Heterodera glycines
aaaaaagtgccggattagcgggtttgaaattccagtctctagtttgacattatatgtatgtatcatattctattttttttcttttttagccataaattgactcttcttcaacaaaaatgtcctatcaaaatgtaagcttttcgtctttctccacgtcctacatatattcgaaaatcactttttagtatcctggactggccgaatcgccaccaccgtccgcaataaacaattcttgtactaaaaacgaaccattagattctgattttaatcggggcggtggcggatggaaaagacaatctcagaacgcgtcttccgactcgtgggcaccgaaggcgggcgcatacagtgaaaatggcagatttttgggtgagattgaaaaacaacgacaaaaactattggaaaaggcaaccttttttgaagaaatgagtcggcacaattcgaccgcctcttccgctgctttttaccgccaatcgaccgcaacttcgaccaacaattttcaggagcattactcacatggcagcagttcatcggcggtttattttcaagaggaatttcgtggtgcttcttccttttctttttcgtttttcaaaaaccctttaggcccttttcccaccgattcttccctctgcgcttttcctgccgatttccatccgcgcacaaaaagtcgttttgacgaaattgtggacgatg

SEQ ID NO: 107498 - DNA, 51 bp, Heterodera glycines
tttgggcatttctttgtttccaaagtcggatccaagaacttactcggaatg

SEQ ID NO: 107499 - DNA, 534 bp, Heterodera glycines
  unsure (1)..(534): unsure at all n locations
caacattttgttgttgttggttgaacgattgccatgccaaaggaaaagcaaagagaagncattagtagcagcaaattgaagcacattgcagcgacaaatgccacaaagtcagagattcaaatttggttttagcaaaatgtattcacatatgcaaaaattaaaaaaattggatttgaattgacatttgtaattgaggtaattctgatcagcaattaatgattgggagagaatggtacggatcaattccctgattaaaatcatggacaacaattttggcttcattaaagtaaaaactctgtgatttataaatttttaaaaaataagttcaaatttaaaaaaaaaatttctcttgctatactggttttacaatacaaaaatgctaaaaatagtacaggaaaaaaagtttggctctgataaggaaaaaaattcttcgccacgaagtgataaccaacagcacctgaggacctgatcaatacaataaaaataaacctatgaaagcagtggatttgggcaaatgatcaattatgaaaaatg

SEQ ID NO: 107500 - DNA, 384 bp, Heterodera glycines
gcaagtggatcaccgatcgatcactcatgcctaatcaacttgatcatcctcaacacatgtcattttgtgctatgctcctcccttcgcatccattcgaatctcctcttttcaatgttcctcttcaccccacccaatgaacttgcagatttatctacctgatcaattttctattttctcgtgcgaattttggcccttcgtttttgtcttgttttctcttagggaatgtgcccacctcatcaacttagtgccagtccattcattttccccatttattcaaggtgcagttcatcgttctcgtttttgccaaattgtttaaaccgaaatacattttcaaatcaattcaagataaatattgactattttgacttaaactggcaagcgatg

SEQ ID NO: 107501 - DNA, 82 bp, Heterodera glycines
ataaagtcaatgtgactttcgacgacgtgcgcggggttcgatttgaattgaatgtatttaattctgttttaattgatagatg

SEQ ID NO: 107502 - DNA, 599 bp, Heterodera glycines
gaggggggggggtggcaccatcggcactgtaaccttttagatttttcacgtaaaacatacacgttatggctaaaaataaaggtcagattcttgatcagcatcaaaaattagcctagaaaaaattattagagaaaaaatttcaagggggtgacaaaacccggaagtacccaattttattcactttcccgaatgtatacattgaaatattttgaaatataatttcttcaggtttgtccgttggacaatcgcgactggtaagttcgtattctttgttcctaaaatttttgtaaattattagggagttccaaagatatggacattgagttgccttgcggttattgcacacggctgaatatttgggatcacgatcattatttaaatatgtgttttgttaggtacttgacaaaatcatgactttgttttttctatgaaagtattaaaaaggattcaccatatgaattcgcatttattacacattttttgaaaacaacttcgtttgttttgacaaaatactgaatatcattgataatatattttcaatgtaattaaccgataattttagtgaatagctttgctttatctaattttgcgtaaagatg

SEQ ID NO: 107503 - DNA, 254 bp, Heterodera glycines
ttccgcgcagtaattgacagccctccctcaccatctcccttcgttcgcccgcttcgctcttcttgtcccccttggtcgtactcctaccaatccaattgcgcacaaatcgatccgcaaattcctttacaacttcaataaattgcggagataattctccgtttacattttacgttttatgattatgttttatataattttatttttagcaataccttctaaaattctttttaaaattcccaactgtcttcaacatg

SEQ ID NO: 107504 - DNA, 240 bp, Heterodera glycines
atttttttctgaaaaagatatttcggtcttttgattacaattaaaacaatttaactgaaaaaatgtttatctctctctatccattatttatatcgcatttaaaccatttaattatcctctctttcttcagaaaacttaaaaatacttccgatttttttctgaaactttttaaaattacatttaatatttcaattgacccataaaacacctttaactctcaaatttaagaatgccgaaatg

SEQ ID NO: 107505 - DNA, 838 bp, Heterodera glycines
  unsure (1)..(838): unsure at all n locations
aatgccaaatatttttggataaattacttaataaattaatttaaaatgaactcattttcatcgcaaagttcattaaaaatttgtgaaattttcccggcggcgcctatcggcactgccggtttgaaaaaattgcgcagcaaaaaaagcggttttgaaatcaaaaatagtcaaatttatggaccattaagagatttttgtctgaaaattatgtttcactatttgtcactatttcgcacttttttcactatttggtcactattttggcacttttccgtcactattttagttaactattttgagatttttcgacaataaaagtcggggccctaataattagagaccggattttagttttttgattaataaaaatggttattttttctcaaatatttgttatatctattaattactttttttcctatttattattttttaaactatctcgaatagttccacatcttttaaaaaggtgtatagcctcagtgagtttgcgaccgaattattagcattttcctattntaataaaaatttcaaaaaattttcgctggctgcgcctatgtccgccggagccccaaataaagtaaaaatttaataaaaagtatttattcttagtttcttttttgtcatcaactttcttttcaatgctttgccatttcttttaattttgcatgttttttgctatggataaaaaattttatatacaagaaaatgtaaaagaaaatgttatcttcattctcaataatatattatttattgccccagtatgtttattttttgtctatttaaaaattcattttaattaattaaatctgatgcaaacatggtttaaattgtgatg

SEQ ID NO: 107506 - DNA, 675 bp, Heterodera glycines
aaaaaagtcacaaaaatacatgttagaagcttcaaacaaagtgtagaacactttttaagtcattttaaggctttgactttaattcccagccatattcttcagattcaagcaaaaaaagggaaaaggagtgtaaaacccccaaaataggcactaaaaatggaaaataggctctaaaaaactcattttttaggggtgtaaaatgacaaactttattaaaaaaggtaaaaaaattaggccaaatcagtattgagctaaataatttttaaaatcaaaaattctagccaaaaaaaaaaaaataaatattggagatgaatttttgagtaaatttttacatttaagggatgcatttttgaaatttttgggtcgattcttagggtgtatttttaaaattcccaaaaaactattcttcggggtgtatttttagtttttattgcatttttgttaacaaattttgggaaaaacgccaaaataggcaaaaaatttttgtgcgtttcaggccacgggaagctcaagaaaaaaataggcttttgcctaaaaatattagcactaattataagcaattcaaattttcaaactttgcaaaagtttgaaaaaattttggatttatgccaagtaaaattggaaaaaaatgtaaaaataaaatgcaattaatttaaaaggctagaattcaaaatg

SEQ ID NO: 107507 - DNA, 91 bp, Heterodera glycines; identical to SEQ ID NO: 100405

SEQ ID NO: 107508 - DNA, 1003 bp, Heterodera glycines
aagtacttcgcattttgatgcttttctttttcttccccccccccatagatatcgctattaccatttatttgttgccgatgaattggacgatttgttgttaaaaatttggacaatcgatagaaatctggccgatttccaccgattatcagcgaatacgaaatgggcaattggtgcgcggtcatcgggaaaatcggcgacatcaaagagacgggaaggggggagggataaagcgaatcccacggaatgagtgattggcggaaagccaaaaaaggcggaaaagagcaattgtgaacaataatttgattttcctattaaataattggccattaatgagtttttttggtgttttgctttttttgtccttccgtttgcttccttttccttctcctcctcattcttttcccattttccctccgtttgtcataacattcatttaattttcgatggcaaaagaacagtttttcttcctttaataaataagcgcttttttcatcgcatttcactcgcttactctgctctcattagcgattgttaattgctttttctgcttctgattgggaaaggattaattaattatctgcttaagggggggggggtccaaaagttattttagggaggggagagaaaacagcggtgttttgccaaagagtgttggccgggggggcggggaatgaaaagcgatcggtcggtgttttctccgatttctttccgtccgtccgttgtattcttttcctttttattaaattgttttgttccaataaaaagtttattcattttcatgcggaaactaaaatttgcgggcgatgagtaattttaatgagcgaattgaaattgacgaaatcggatgccatcggcaaagaatgcaaaagtaagcgaagggagggaggaaaagcagaaaaaggaacaaaacagacaaagaaaaagcatttaaaggagcaaagggacaggcaaaaaataattaagtaattaggtaattaattggaaataattattcagcaaaatg

SEQ ID NO: 107509 - DNA, 75 bp, Heterodera glycines
cctgaatttaaatgtatttaaaatgtttatttaataatttgctccgtgcaaataccaagtccaatcacaggaatg

SEQ ID NO: 107510 - DNA, 59 bp, Heterodera glycines
ctcttctgtagtccttaagatcgcaaaaaacaattatttcttgctaattattcgacatg

SEQ ID NO: 107511 - DNA, 875 bp, Heterodera glycines
aatggagcgaaacgccgccgagggaaagtgcccaaaaaaacggacagtgccattttattatttgccaattttaaatgaccctttttaatttatttgccatttgaataaatcccatggaaatgatgcgtaatttcccaaccgaaaacaatgcaaagcaatcggtgatcacatatttgaaactcgacagttgactaataaatgaatggacggcgaggaaagggacgacgggtttcgggagggggggggggcaaagcaaaaggatgaacgaataacggtaatccatgtaataataatacagagggggaagcacttgtaaatacgaataagcggagtttcgagggggggggagaacaagtccatccgatccattggagaaatgcgccgaccatttgggaaatgaacgaatcgaaagaaagagggggggggggaattgggagggagccgagggtttggtttgggaagtttatggatttacacattggaggatggacgtaccaaacactcagcaaagagaccaaatttgaacataaagcaaaacgaattgttctcttcaattgatcagcaccctttcgatcactttcctctcatctttcgatcatttttctccctgatcattttctctcatccctctgaatccattcgatcatttcttccgatcacttccgttcataagcactttttatttaaccttttaatcattcactctccgatcccttccctctcatcacttccgtttcgatcactttgcctggcccctttgatcagtccactctttcccttttttgatcattttccccattgatcactttatctcatttgaatttccgtccgctgatcactttgtgccttcccttccctgtggtcactttcccatg

SEQ ID NO: 107512 - DNA, 969 bp, Heterodera glycines
attattaactaattaaccattaattaatggaaattgcaggccccactaattagtagtgataaattaattacaaaaaattaacacttcaagattttttgattgtttaaaaattttcataaattcactttcagggagggttagtaaaaatgttaattaccggaacataactagaaagaatagaatttaaaagttgaaaatatttacctactagtttttttcagaaaatttcaaaaattttgaattttttggcaacaaacatttacatgttgagaatttttgaaaaatttgatcgaaaaaaatcgagtaaatgaaaaattgctttgcttgtacagcagggccccaaaaataagggaaactttggccaaattttatcttaaatttcagttcattccgccgaagcttggccagtatcattggcattttaaatgtcgcttcggcattttattttgcccagaaaatcgagcgggtggtagaaagtgtgatgccctggctacacacgctgaaaatactaaatgaaaatgtattgaattatggaggagcaaatttgggtaatataaaaacaaaacaaaaattagggggacatttggacattccgagcctaaattttagtttatttttatttttttgaaaattacttaaaggatttggaaaagtaaaagatttaatgcgatttataaaaataattcattttccaaaatgagttttccaaagctaatacctctttcagaaagtataaaactcaataaatttatcgatttttctttagatgaaaagatttttaaaaaatccaaaaaataatatttattttcactaaatttttaaataaagattaaaaaaacttaaaaaataataatttatatttttttaccaatttttaaaataaacatttaaaaaagaatcaaaaaatttaattaataatttttcactattttttttcattattttacgaatttagaactttcgagaatg

SEQ ID NO: 107513 - DNA, 291 bp, Heterodera glycines
aatataattgtatcaatttaagatttgatcttgttaaactatatttagctgtttgtacaattttatttttgaaagttatttttaaatatttttattatttgtcaatacaatttttttaatttaaaataaagatttcgacactgccgtatttattgaatcagagcccactttcgaggggttgaaaaatagagcaccagcagactccctctaaaaggtaaatatgaatttttaaaaaatattttaaaaacgaggaaaattcaagccgaggaaaaatccaggttgctgaaaatg

SEQ ID NO: 107514 - DNA, 369 bp, Heterodera glycines
taatttctggatttaattttcaaaaaaaaaattttttcttaaattggatgatcatctgaatattgaattttatatgtgattttgcggagttaagcaagttaatgcgaatgaaaatatgaaaaacgacatttgcggaccgacttttgcggaccgacatttgcggaccgacattttgcgaccgacatttgcggaccgacttttgcggaccgacatttgcggaccgacttttgcggaccgacttttgcggaccgacatttgaatattgaattttatatgtgatttttcggagttaagcaagttaatgcgaatgaaaatatgaaaaatttataaagtttttccaaaaagttcttttttcaggggtgaataatg

SEQ ID NO: 107515 - DNA, 562 bp, Heterodera glycines
  unsure (1)..(562): unsure at all n locations
aaantcgaattaatntnntacgacactttattatgcgttttctcaaaaagttggcgaaaaactgccgccaaatttttaaacaatttttatgtagaaaatataagtaatttcaagcagcatgttttcaacattttcaaatatttaatttggttcaaaactataattcgtgcattattatattaaaaattaactttgatttgggctctttaaatttttttctcatccgactatttttacagaattttttaatttgaaaaaattaaattaaaattttgttttatctattttgatcggaatgtaaaatctaaagtggtttgaacatgcaacaaaaaaaaaggttaaaagtgataaaaatttattttcaaaaacaattttttttctcaaaaaattttactttatttcgaagttaaagctaattaatcttccatatttcattcttttatggtggtaaaaagtttctttttataataaaaactgttacaaataaaattaaatttaaaaaaatttctggaataaaatcttcatcaagagaaactttggtgtcaagtgcagtttcgtaatg

SEQ ID NO: 107516 - DNA, 51 bp, Heterodera glycines
gcaggggcagatggtcgacgtcgccctgtacgagcctttgttcacatgatg

SEQ ID NO: 107517 - DNA, 563 bp, Heterodera glycines
gagtaccccaaacggacacttgaaaaaatcgatttcccccgccttcggggcagtccccccgagccgatgcgcccagatttatggggagaccgaatccttccggaatagcttccctatagcctgtactttaattctgcgttggatttttgctccccataattgtttgagtaccccaaacggacacttgaaaaaatcgatttttttgttttcggggcagtccccccgaaccgatgcgcccagatttatggggagaccgaatccttccggaatagcttccctatagcctgtactttaattctgcgttggatttttgctccccataattgtttgagtaccccaaacggacacttgaaaaaatcgatttttttgttttcggggcagtccccccgaaccgatgcgcccagatttatggggagaccgaatccttcgggaatagcttccctatagcctgtactttaattctgcgttggatttttgctccccataaatgtttgagtaccccaaacggacacttgaaaaaatcgatttttttgtttcataaatatttttttcagaaagtcatg

SEQ ID NO: 107518 - DNA, 67 bp, Heterodera glycines
taaaaagtcccatgcagaaaaacaagcatatgctatttttcaggattttatctattatatacatatg

SEQ ID NO: 107519 - DNA, 69 bp, Heterodera glycines
tttcttcccctcattcgaatttaggatttttgttgaaatgcgagttttaatagtcattcgcattaaatg

SEQ ID NO: 107520 - DNA, 414 bp, Heterodera glycines
agtagccttacgagacagtcatcacctccaacaccaccgccagcaccaccgaagcagccaattttgaagcaacaaacaagtggggtggaaaattttttgaaaaactttgtaatttgtcaaaaaattgtggattagctagaaaaaaaaaccttaaaattttctcatgattttttttactgttagttttaaaacaggcctgtaaacagaaaaaaaaatccgaaaggatgaaggggaggaacccaaccttttttaggcccctaatttttccagtgtaattttttcaaaaaatataggcgctaatttctgaccaaaaatgtctttactttcgccgttaggccgtgatgacagccgcagttgaatttttttactttaaaaaaaagcaaatttttctttaataatagattttttaagatg

SEQ ID NO: 107521 - DNA, 321 bp, Heterodera glycines
cggcattcgtcgtttgttaaatttccattgaaaatcccgttatttgaatcaggtgaaaacatgtctggcgtgataagtgttaatttaagattgaatatttctcaattctcaatatacataatgatgctttaaaataagtaagaaattcaatgatagaaataaacattcatgaaaaactatgaattcgttcgaattaaatcattttttatcgtttacgtaataaaaataaataaatatcgtagaacaattaaagaaatcatactaaaactaagaggatatcaaggataagtggttttacattcatattaaaattcctcaatg

SEQ ID NO: 107522 - DNA, 491 bp, Heterodera glycines
cgctgtgatcggtgtgtgatgattttccatatatatatcttttttgtgtaaccactgattttattaacttggatatgtggtggataaagttaattgaagacttgactagtaatgaaaaaatcgattaacattgcccagaatttttacttaggtaattaaaagataaaacaaaaatttctgtaaattcacaaaaaaacatgggctgcggaattggttcttttgcactttatgagtccaatcgcattttatgaatccaatcatatttatgaattgagtccaattaattagccattctccattttttgcatcataacattattcattttgagcgaatccgttaaaatgtaacatttattcggaaacggaaaaggttacgaccaaaaattggttgttaaatattgaacagtttgtatagaatttttcctcactttctggttcgtctgacctttgaacacacaaaaattcgtttttctagcggtcgccgtataatg

SEQ ID NO: 107523 - DNA, 432 bp, Heterodera glycines
ttcggaaagtggataagttcgtgctcttcgtggccgaacttaaacacataggaagggaaggagggaagcaaaatttgggctttgttgggcactgttcggtctccgtgccaacagtgactcgactaattacagttcggtctccgtgccaactgtaatttgactttgggggttgtaagcgtaggtctaggaataactgtctggtcttcgtgccggtagttgttcagttactgggcgacctccgtgtccccagtgacaaagtactgcttgctctccgtggcggcaatacttcgacggcgcagacaagtcaaacggccgacaacgacaaactgctcgaacaaaaagcagtaaccaacaagcgcagcaaaacgcaaactgaacagcagcagcagaacaactgaagagcgcaaagcccacggcaaacaacccacaatg

SEQ ID NO: 107524 - DNA, 256 bp, Heterodera glycines
ggaaagtttcgcaatcccgctgcgtcaaattttctcatcaaatgtagaagtaaaaatgcactgggttgaatcgaatttttatgttaattatttttaagtgaaaatctgacaaaattttcgattccttccacaaaaatattttagaaataccactaaatttcggcttatatttttatattttttcttccattaaattattgaccatcgagctgtgatttgtgcttatttttgatttggtacaaaattacaagaaatg

SEQ ID NO: 107525 - DNA, 778 bp, Heterodera glycines
  unsure (1)..(778): unsure at all n locations
cacaaaattntcggttaaatatcaaatttaatcaattgacagaattgctagagaccaaccaacccctttcgataaataaatataatgaactttttgagcaatatattttataaattttataattcttagagtattaacggtttttgacaattaaaaaatgaaatggaacttttgagtgccagcggtgccggtaggcgccgccgggaaaatttttttaaatttgagtgtaatttgttaacagatttacaccaaaaaatgaccaaattttgcaactttgagctacttttttaaataaaataaatttttagggtccggtggtgtcgatgggcgccgccggtgaaaaactttaaatttttagtcattttgttaacagatttaatccaaaaataaaaacatttttcgatttgaattgttaaatttatattgaatttccgtcgaaaataggaataactttgaaaaattgaagaaaaacaactactttgatgagaactgatccaaaggaaacataatgaaaaatgccaagagcactcactaccaatcgaccatgcatgcgaataaacaaaagaaagcaaaaagttaatatatatatatatataattactcccgcggaatctcgtcccgcataaaaattgagttccaatcccgcagcgagacccgcaaattttcaattttttgtgcgccgcgcattgcatttttttgtcaaacgtaatcccaaaatattttctattactaaatttaaataaattgatattaaattgagcaaacgacaacaacaatg

SEQ ID NO: 107526 - DNA, 139 bp, Heterodera glycines
tttgtgttccctctctcttttcctcttttatttttgacattttatcgcgaattttgcatcagaatttttcatttaatacaaagaataaaaatttaaaaaaatcaaaatactttataatttattgcaatttttcaaaatg

SEQ ID NO: 107527 - DNA, 129 bp, Heterodera glycines
aaaggtggaataaaaataaacccaactcatgctaccacggaattagaaattttggttgataaatattttatcctaaaacgaaatccacagagtgaagaatttatttctctacctacaaaaattactatg

SEQ ID NO: 107528 - DNA, 205 bp, Heterodera glycines
atgcactaaatcgtgctattttggattaaatagaccatttttacaaataaaatgcttttttaaacgtaaaaagatcgaacctgtagagttagttgttttgaatatgtgaagttagtatcatttaagtagccaaaataaagtttgggcggacgaacagtgccttcaaaatggcatcgaatgttccgcagaaaatcgacgcgaaatg

SEQ ID NO: 107529 - DNA, 197 bp, Heterodera glycines
ccgttttgtttacatttttatccttgtcacttaaatcaatttgttttaattttttgaatgtttcctttttgatttatttgctaaaaaaaattagtttgtacgtcacatatgcacaattcgaaactctattgttatcttgctttgtttttcatgttgaagttttcttttagttttgccaattaaatttaaacaaaatg

SEQ ID NO: 107530 - DNA, 507 bp, Heterodera glycines
aattgtcgtgctcgcggatcagtgtttgatgccggcaaaagcacctcaaacaaacaaattaattaattaaataaattaaatataattttaaaaataatatttaaaattaaataattcaatataaaaaataaattattatttttttgataagagtatagaagtttctttgcaattaacacattttagatgattattaagaaaaagaaaagaaacattctaaaaaatcattactaataaataaatatttactttttaaatttaaaataattaaattttactgtttattttctgaaaatatttaattttgttttggacataaaaaataaaattaggaattcttttttttaataataataatgtttcgaattttataaatttttattaaatttactggataaaaaaacgaaatttctttttaattaaatttaaaaataagaaaataaataaaatttgtttattaaatcgctttaataaaagtaaatttttatatagaaatgatagaaaatg

SEQ ID NO: 107531 - DNA, 474 bp, Heterodera glycines
aacactcaaataatcgtcattttttctgcaaatctacaaaaaatttaagtatttgaatctaatttaaaagttcccggacgtgcctttagccataacaaaccctttgttcttaaaatttgtttaaaaaagcttgaattggatgttgccagtcctatcttttctgcaaatcaaattaatttcttttttaagaagaacataaacaagaaattaaagaattggaagtaaaacaagacacattaaaaagaaaaattcgccttaaaaatattcattcgccttaaaatattcattcgccttaaaatattcattcgccttaaatattcattcgccttaaatattcattcgccttaaatattcattcgccttaaatattcaattcgccttaaatattcaatgacaaaaagaccctgccccgaaaccgaatattctccaatttcacaaaaaaatggtatccaccagttaattgactctcaaatg

SEQ ID NO: 107532 - DNA, 640 bp, Heterodera glycines
aacacttatgccatttattttacgaaccacatccctttgtaaaaaagggttcgcaatccgtgccaatggcaccgggattcccagcacacaccgcgaggaggtttgtggtggaaaatggacgaaaaccatgtgcaccaaaaaaaaatcgggcatgacccctctcctagccgatggtttgggccatttttggagggccaaaaacacgctagggcgccccctttacgcattttctacccgccgacccaaggccaacggatgggagggcatgcccgccacctgtgaccatcatagcaagcgattatggaaccgctcatggaactcaaagtgtgtggcactaccatcccaaagtgcaaggtttggtgtaggcctccctatgttgggtaattactcccttcataaggcacttgtgccaacgcccacagcacatatgagttccgtcaacgcggattttaatccggggtgttaagtttgagcagctgcgcgttcgacactgctcagtgactcacggtcctccgggccagccagtcccggttattctctcgctgtacgaatgcagcccgaaggcaggacacattacggctaggaaccgccacccccgctgctaggtgcaagctcaccttcaccccaaagcgcagggatg

SEQ ID NO: 107533 - DNA, 393 bp, Heterodera glycines
agccagccccaaacattgactatatatttattaatgctaattatgtagtaaattatgctaatgcaatttaattatcgtcggacaatcaaatgattttagtcatttaggaaaaatactgtgaaaatcaaaatttattttattttattataaaattttgcacttttcttcggcagtttcattatccccaaaaattgaaggtcaacattttccttcctaatcattgaacaaaaaaattgggtcgaccttgacaaattatcgcaaaaactgggttacacaattgttaggtttattcgcccgtttgcggacatatcaactgatttattcaataaattctttttaattttttttataatttaaatttataaatttaattgaatttaaagaatgaaaatg

SEQ ID NO: 107534 - DNA, 518 bp, Heterodera glycines
ttttcggttttattattcatagctcaataatacatcgtacactaccggggggggggaatggcgcccgaaaggcgcttttccccgcatagtttttaaaaaattatttcccagtgaagaaatgatagggagccattctccttcccagtctctttctcttcccatgattatctttatttctctcttctctctcactgttatgtgttttccttcatttttctctatttactctattttcccgttgtcttaaaatgtctagccaattctatttctgctttgaatcttttcttccctcccataagaattcaaaaaataattgtttacagtaagaatgtttgatttttgctcctcccgctttttgggtcatcattttgccgaaaattgcataaaaattaaaacaaaattgacggaatgaatggtcatttattttttattaatctttttattctcggtcatttattataattctttaaaggaaatttaaaatataagcttattttagagatatcaaattcaaaatg

SEQ ID NO: 107535 - DNA, 208 bp, Heterodera glycines
tcgaacacaacgtgagcagggagcagtgcatcaaaattcacagttatgactcaccgagactctggaattgggcacaagctggtcagtagctctctcatcaattatttacccctactcattcaccgcactcggtataaacggtcaagagtttattaaagtatgggaaaacgacagcagtgtcccgactcaagtttatttaccggacatg

SEQ ID NO: 107536 - DNA, 402 bp, Heterodera glycines
aaaatcttttcgctttttgtaaggctaatagagcatgttaagagctttcgaatgataccaacagtgttggatttggatgccaaagaaaaaagcttaagtggaaaaacgagctggcgccgaaacgcgtgggtcccttttgagttgggcattaaaaaaatatgaaaaaactcatttatgctaattttcgaaaaataaataaaaatttaaaaaaaaatcgtgtaaaacgcctttcctggggtttttaggtcgctgatcacgaatctggcatccatttgaaatatctatctaattccggactccgaacccgaattcgaacaaaaagtcgaaaatttaaattttacaaacgcagactccgacttttcccaccccgaattgctacgcaaatattttagtataaaaatg

SEQ ID NO: 107537 - DNA, 751 bp, Heterodera glycines
ggtaaaagtctatagagacgagaggttcgaataaagaacgaattgtatctagcattggttgagcaaaaagctgttcttatggttaatgcatttttttacagggcttttggaaaatgaaaaggattcgttattttgtaaatttattttacctaaaattaaaatttttctttattgtatttttatagtcctaactttgctctatacactcaagttttctctgcctctgtatctattttcattttctttaaatcagccttcaaaaatacctaccccgaaaatgagcatttttacttaatcaactctagctcctaattaacttttccatttctattgatcttttgcctgaaaaatggcaactcattattgataataaggggattatttcgaatcatgattgtgttttgttcaattaaaaaaataataaaatctcgaaaataatttcgagggtcaaaacttagttgacaccctaagtaaaaatgacgaaaagtagcaaaaaaaaagagctaaagtgataaactgtttaaatagtgtcaaaaatagttgcaaaacaacaccatttgcgtcattattttggtggtcgataaatccaaaattataatatacaatgacaattaatggacttaaaataaattccggctaaaaatgtttttttttttggttttttgtacattaatttgataaaatccgtcttttctaatagctctaaaatttcaaaataaatgaattttttttttgcaggtttccgaaaatg

SEQ ID NO: 107538 - DNA, 474 bp, Heterodera glycines
tcccttttttcatgtatgtttttgatttaaaaaaatacatttcaattaatttcattaagatttctttattctcgattttcgactccctattatgctcgagtgccaatcttcaaatgtcgcatcactaaaaaattctccttgtaaaaaatttaaaaaattttcggagggtggataacccggatgtactacatagttttgcgttgtttgaagaaagaacataaaggtaatcacaattttaatctccgcaagatttaaatttggataattttccaaacaaaaaaatggagtgtaatataagacataatgtgttttaaattaattgctcattttatttaattaaatacttaaaattagcaaaattctgaaaaaattttggaaataatattttaaaatagaaaatccaccaaaatcattttaatactaaaggataattaaaatttagttcgtttaaatccaaccaactgtctccaaatg

SEQ ID NO: 107539 - DNA, 81 bp, Heterodera glycines
ttattatttttaaagtttacaataactctaatcccaaaattatcaatcaaaaaatttaagtgtgctgttctcgcggccatg

SEQ ID NO: 107540 - DNA, 330 bp, Heterodera glycines
ctcaatggacactccccgaaccctggtatggacaacccatcgttctagtattggcagtattcttcaattttaccgataattgaattttttttaaattaattttatcaaaattataagtcctttacatttagctatcatagcaatatgataagtaactatttgaagtcccaacttgaacttgtggaagaacattcgactcgtttaaatgagcgcactcaaaattggcggcagaggaaacagacactgagcgcacgcgaagtcaattcctcaagaaacagtacaataaagcataattcgttagtttagaaggaaattgtcagtgccgatatg

SEQ ID NO: 107541 - DNA, 242 bp, Heterodera glycines
tttttaggaaaatggaagaataataatacaaagaactaaaaattttgcattttatacctttcaatgtttatttaacctataaaataaattggaccattaaaaattattataaatagcatattatcccttaattttttcattttgttgtcttcatctcattaatattgcatttttcctctataaattgcactcttccattcgttaatttttttcaaaattgtagcttccaaattctcaaaatg

SEQ ID NO: 107542 - DNA, 131 bp, Heterodera glycines
cagaaaaaagtgtcaaaaacggaaaggcaagtgaaaatggaaagggggcattatgtagatgaaaaaatataaatgctaacccaattttgaaaaacataaaaaaatattttggctttttagtgccaccaatg

SEQ ID NO: 107543 - DNA, 294 bp, Heterodera glycines
tatgtgatagccaaaattttagaatacaaaaattttcacctcctcgactaatgatgaaaaataatagacaaaatcaatgactttgcaaaatctgagcctgggttcattaataagaaaatttattttttccgtctggacaccaattccgaaggactaccaaatttaggtttttgaaaattaaaaaaaaaatttttgttggaaattactagtaattcctttttataactggtcttttaataatcccaactttttccacaggaagcgcccactctttacgccttctcctacatcatg

SEQ ID NO: 107544 - DNA, 607 bp, Heterodera glycines
aatttttgtgctgtgacaagtcattatgttcttgttgtgaaacggttggcatggataatggctttaatttgattaattaatgagaatttatttttcatttacttaaattggtcataaatttttctttaaactggaatgaaaaaaatttaaccgaagatttgggacaacattttttaagtaaatgtttagtgtccaccaatgcagaacaacactgataggaaaaaataaaagaccagaagctaaaaacttatattttttgaaattttcttcaaaaaatctaaaaatattgaaaattcaaatttggattttttttggaatttttgctttaacagcaagcacgtgaaaaccttttaaaaagctttattaaacattagaatttatatagagaaatttctttaatattatatagattttcagtcactaattgcgccaaaatttgatgtcatttaggacataaaactagccaaattggaccaataacgaaaaaattctgtagaaatttaggttgagaattggccttatgaatttctgcatcagttgttgagaacgagtttttaagaaaataaaaaatttattaataaaattttgaagccaaactcagagaatg

SEQ ID NO: 107545 - DNA, 192 bp, Heterodera glycines
ggtggttttgggggacgaacgaaaggggggggggcagcagcactcattaagacgaaatacggggattgatgtgcactgatttgagtgttcatttagcagatccaacggacaatcagtgcccagtgggccccgcgtctgcgcgaaaggcaccaaaatggacagaacacaacggaggaccaattggcggacatg

SEQ ID NO: 107546 - DNA, 81 bp, Heterodera glycines
tgagcattttggtttcggtttgccgtttgtggggctatttaagacggtagaaagttattgtgatcgtcattcgagcaaatg

SEQ ID NO: 107547 - DNA, 249 bp, Heterodera glycines
tctttatacaacagggacaggttgtcccccctccctccgaaatttgattactaaatttttataagaaaatttcaaaaaataatttttcttgaattttcataaaagtttttctaaatttttcttaaatttctaagtttaaattttgtttttttttctttagcggtccaaacgcagacggaggacactaacaacaacgaaatgttattaaacagcagtttttgcgccaagccgggtgcgaacaacgacatg

SEQ ID NO: 107548 - DNA, 220 bp, Heterodera glycines
aaagaactaaaaattttaaaggcaaaacttcgactgaaaaaatgtgtataaaaggagcgaaaatgtcggttggtcactcattcccttcacagcgacaacaacaacaacaaacaatcagcaacgacgacaattgcgcaacgcttcaacacagcacatccatcgcccgtgcacacgtcgaatccgatcacttctgctgctgctgctctccaacaacacaatg

SEQ ID NO: 107549 - DNA, 166 bp, Heterodera glycines
ttttataaaaataagtgaataatttattctaatgttaggctaaagcgctgctctttttgtgtatagtgaaagcaaaaacaataaaaatgttatttttatttattgcatttttaattttttcctattttatattatttccaactttaatcattttaaaatcaaaatg

SEQ ID NO: 107550 - DNA, 1003 bp, Heterodera glycines
ccgtatccaaacaaaaaattagttttttttgaaaaaacgaccccaaatgttttgtatcctgggtttgggtacggtatcaaaatcttttgagtttggatacagtatcaacaattgaatgttaagaatttgctgttttttagatttccaaattccgaggaattaaatgtccagtccgagcgattcaaagttcgcctgctcaaccaataaaagttcgtttgggattcctcccgccgccgttcgttcctttctgtttgcttctgtactccgccccttcgcttccatccttatatactgttaccatttgccctccccattctattaccgtgtccccacacatatccaccgtatcccttttttgtgcctttctcccatttctttcatccattttctcaaaagttatttagtattactattatttttattgtcctttatccagtaaatttcaacaaaatttcattcttagttccttccaatttattgtgccttttgtatcggaacatttcaataaattgtcggtttcttaaaagggaaattaaaattccatttttatttccaaaccgacaaaagaaaagtgacgccattgcaccaatttaaacaattaattaattaattctctccaatactttcggggtgacaattacgtcactgatgcacatttcgaattgtttttaaagaatggactaatgagaatgaccgtagaaggaaaataaataccgtaacccgtcacaatttgcttgaaaattaatagccacacgtatttgaggaatgataaattcttaattggggttgcacggatatcccaaaattgcgaatgggtgggccgatttgggacgaagggacagtccgacactcattcatcaaaagttaattcgtcatttattcggcggaaatttacgtataaaacagtattgggggtaattagctacagattattgggttggtcagagagagagagaggcataacgcgcaaattcggacatccgatggacgaatggccaaaatg

SEQ ID NO: 107551 - DNA, 205 bp, Heterodera glycines
ccaattaataccatttttattttcaaattttaaatttctctaattaaaaaatatattttttctagcgctttttcttcgaagtgcttccacatttgatagtacaaatcaccaacaaaaatcttcttcggaaatgacccaacggcgggagagcgacgaggagcagcaactttacgaggcacacattgccgaaatttaaaaaaaaatg

SEQ ID NO: 107552 - DNA, 123 bp, Heterodera glycines
agattattttaatgttttgtagtttgtttaaacagaaaatttttgcataaataaatacccatcaataataaaaatcattctttttaaaaaaatatccaatttgagaatatttttaaagaaatg

SEQ ID NO: 107553 - DNA, 634 bp, Heterodera glycines
gtatgttaaataaaaatcgtattatgttggaattgagggttattttttaaatttcattattttacggttaaaataaaatttttgttcagttaaaataacttacgattcaataaaaatttagtgtctgcttctacgcgggtgtcactttgcgtcgctaagtcgaaacaagcgttgaccgcggccgagaaaaagttagacggatttttgatggtttgacatgctttacaattttatttacggtttttcagtgaattttgaataaaatttcaataggagtgtttacgcttgtttagtcgaaccaaaaccaaaaaaccggtacgcccggttagcactcgaccgtaaacaaccctaattttcattataaaaaattctgctgaaaggccggatccctttgaatgaattcgcttatacttactgatgatgatgatcttccataccattctgacacatcccatttttatacgtagacttccatctgatctaaaaaatcctattttccttcgttgcaatgttttgtttaaactcataaatttcaaaaatgctattgcattttaaaacgatacatgattgagaatttcgctgtttacattatacatttgctttttctttttagtaataaatgtttaaggaaatg

SEQ ID NO: 107554 - DNA, 100 bp, Heterodera glycines
tcttaaattttaaattttttgccccaaattccccattaattaattaattaatttagcgattaattaatttctccttttaattttcccattcttcaaaatg

SEQ ID NO: 107555 - DNA, 391 bp, Heterodera glycines
cataccataccatatcataccatatcataccataccatatcataccgtatcataccatagcataccatacccccccctgttttgttatgtcactgtgttaacctttaaaaaactaataaaaattattccaatagaaattaatttgttttacttcgtcccatttattttattttatgattttttttacatgtaattttaatgttattagcatcactgaaaccttaatactagtttctttttattaatccagagttattaaagtattattccaataaaaaagaattttgattttttacttcgttccattttattttatgaattcattaataataataatttatttttatttttataagaattagtgaacttaccatttaaatttttctccatg

SEQ ID NO: 107556 - DNA, 114 bp, Heterodera glycines
agtaaagttttaaattaaaacaagaattttatttctggtgtgatcaccaaattatacattcacaataatttataacaaaaacatgtttccaaaactcagtgcgttgtcggaatg

SEQ ID NO: 107557 - DNA, 548 bp, Heterodera glycines
ttaaccgtccattaaaattgctatatccgttagaaattaacaaaactgactgtgaggagaatgagactctcacaaatttaatcactgaacacgaacaaattggtacagttcaaaagagaaaacaagcaagtgtcttatcattaccaaaattaagcaaagtatttttaaacacactcacgtttcttctattatttatgcaaatcttaccatgcttatcccatttatatgaatgtccaaaaaccaatgaaaaatggagaacgaagtatacaacattttgtgttgaaaatggatttactataagacaaaataaattaacaatggaattttgttatcgtaaaatattttgtcacaaacaacacgtcataaaaaatcacccaccctattgtggaccacaatgcaaatgtcctgattggactaattcttgtagttttgcctcatatcacagaataaaaagagaaataactgatcaggaaaatattaaaaaaattatttcattcttcaaaccaaacatttgttcattcaataaaacggaaaaatgctccctaatg

SEQ ID NO: 107558 - DNA, 95 bp, Heterodera glycines
  unsure (1)..(95): unsure at all n locations
attcgccaccatcaattggagattctcncatctttctcatccacttttcttctagcacatccccaaatgatttgtcttcncatcnttcaggaatg

SEQ ID NO: 107559 - DNA, 296 bp, Heterodera glycines
gactaataatatttccggctgacacttacttgcacaacaaataaaaattaatagatattattgaatatttaatttaacggatatacatacataatcatatgagttggcggttttaagaaacgccctggcggttttaagaaacgcccaaagtggcggttttaagaaacgcccacctggcggttttaagaaacgccctggcggttttaagaaacgccctggcggttttaagaaacgcccaatgtggcggtttttaagaaacgacctagcaccctttgattgatcatttgaaagaaatg

SEQ ID NO: 107560 - DNA, 260 bp, Heterodera glycines
tttggttgcaatatctttctatttgagtgattgcgaaccaataaaattttgaaaaattactatttgagagcagaaggaaatttaataataatatataataagtaaagataaagtaaaatattcaaaattgtttctgccttttattgcaattgtttttataaatgtaatttattcaaatgattttcttactgctttatttacgtcatagttaccccattgttacgctttacgctttggaatcatagggaaatttaaatatg

SEQ ID NO: 107561 - DNA, 1003 bp, Heterodera glycines
agaatcatgtgttttagttaacaaacaaatgtttttttaatcaagacaaaacggaggttccggaaaatcgaatttggttatattttatgaaacaacaagggcaattggtaatctttgaggacttttgaatcaatttctgtagacgtacatagaaattggaagtgaggttagctttttataaaggaacaaagcgccaaaaaaagaaaagattaattatttttaaattttcagttcaaaaaagccgtaaaaaaattctaaaaactaaacttcaatgattcggaattatgataattatttataatttagagatattctcatttaaaatgatcaaaaattttctccaaaggatgctaagcccaatattaaggtcagaaactgtcatcaaattaaatcaaaaaagtgcactcaaacgaattgacgcaatagaaaaagggaaaataaaggcattggctcccaaacacacaacgacagcgaagcttcagcgagacattgacaaggacaacaaaatcaaagaagtttaacagaatgttttttatctactgatctaaattcatgctttaggtgctaaactcaaaagaaaattcgtttattgacagaattaacaaaatcactattaattcttccgatcctccgataacagcaaataggtaagcataaaattgggtgcatattaatgacaactaagagttaagccagttttcaaccttttttcgaattgtacttaatttgattcaatccaatctttaattggaatttttgttaaaattaataatttacataaactttttcttgctacgccaccggacacatattcccttattgttagaatatacaaaattcaaaaatgttaaatattatgaactggtaaaatccaacaaatgtataaacctttcctaattgtaagcattaaatttttagacaaggtatcagaaaggagcaatatggtcagcagaatttcagtgaacacgaatacggattttttgaacttcctttggaaaagatg

SEQ ID NO: 107562 - DNA, 399 bp, Heterodera glycines
aaccgataagaaacaatgaaatttagtgacttaactaataaattcctgtacatttacgcatttttcttttgaaaaaaagttgtattacattcactatttgattactttttccgttttagacgacttaaaatctgattaaaaaaaataaaacaaattattgtgtaaagacactgtacaagcatcatcaattcgttcattaaactccgaacaattaagaaaaatgagagctcaaaaaaatatggaaaataatgataggtacttgtatttggcgttttcagcatttttctatttcaaataatttgggttatttttttctgaaaagttcgaaatttagtcatctaaacggcaaaaaaaaaatccaatatttttcgtttttttatttttaaaatattttaaatg

SEQ ID NO: 107563 - DNA, 433 bp, Heterodera glycines
ggtgcgaagctggtcccgcactttgtcaagaccagtggactggtgagaagtaacgtaggaaatctgagttcatcaaaataaatgtggactgccttttgaggattgtggttcaatggccagtcccttaaaggattgtagttcgcactatgctgatctttcccctacttgggaaagattcggcaaaaaatgcataatttttatctgcattcttaatgggatgtgtgagcgatcaatttctgcactcaatgacctttgtgcgaaattggacatgtttgattcgcagcggcatcactgtggaaaacaaggaagatgcaccttaatttttcacatttcaatgtttttgataaatatttgattaatgtggtttattggttgttttccccaaatattttgccgcatgtacacatcattgcttcatttttgttttcagatg

SEQ ID NO: 107564 - DNA, 129 bp, Heterodera glycines
cgaccgaagccgcaatcgcatgggcttaagtgatttcttttggaataattttataaatatatcgcaaataaattttaaaaaatcaactgtttgaatgtcctttcgtcttttagtttgtggagtattatg

SEQ ID NO: 107565 - DNA, 386 bp, Heterodera glycines
tcccccgtccctttttgactctaccgccctgttacgtttcctttccatttattcttccgctcatcgctcactccattcgatttctccctttatctgtgtccccgctctcattttcctttccttcccctctcttttccagttttgcttcacaaattgtgaattcttagggactttgaattacccatttgagcataaataaaacgttttttcttgtttgattttgaaaggtggagccaattcccgctcctcctcccccccccccattcgcattcattcatttaatttcgccacctcccccccccccccacttttcccattttgtttctctcctcctcgaccttgtcgtctccgtcaaaggtcacttctccattccccttcagcagatg

SEQ ID NO: 107566 - DNA, 85 bp, Heterodera glycines
ggtatgtttattttgtcacgaatggtttttttggacagcccttttgtttttagacaccgactccatctactacgtcagcaagatg

SEQ ID NO: 107567 - DNA, 148 bp, Heterodera glycines
tacaaaatttaaatttgccttttgtttatgtttttaacacacacaaatatttatttaaattttaatttcatttgatttattatttcacagccgacgaacgcttttccaaattcgcccatcacaagcacaatcaatttcggcacaaatg

SEQ ID NO: 107568 - DNA, 186 bp, Heterodera glycines
tcttggctttttgagttttaacatatgttttagtgtttttataatatatatatatatatattgtgtttcctaaaatagagcccggggcctttatttttcaaattgtcaaaaaatcagctgaaaatatattaaaataaatttgatacaatcggctcccttttttatttagcttagagattatttatg

SEQ ID NO: 107569 - DNA, 172 bp, Heterodera glycines
tgcctatcagcagaagtgccaatttcgtttgaccaaataaatcccggcggcaccgccagcagtcggctgcttcaaatcgtaaaaaaatacaagaaaatctgaaaatgcaccctaaaaattgactactttacgtttcttaagcatttagaaaatttctttatatatttaaatg

SEQ ID NO: 107570 - DNA, 103 bp, Heterodera glycines
ttcctaataaatacgagtaaaaaagcgaaaaatgctagtaaatttaacattgttatttgaatttattaaaatattagcatgcgtggtatttctatctaaaatg

SEQ ID NO: 107571 - DNA, 155 bp, Heterodera glycines
aattctatgtcagtatgctcctctaccataaaacccacagcgtcaacattctcttactgctctattaattctaattctctaatttactaaattaaatttaaaagtttttatataatttattttggaaatatatatatggtaatttgactaaaatg

SEQ ID NO: 107572 - DNA, 54 bp, Heterodera glycines
gttttgacgagttaatcgcagtgggcaaaaagttgcgtcgaaagtggcccaatg

SEQ ID NO: 107573 - DNA, 190 bp, Heterodera glycines
aaatcccaataattgccttactttaatccctttccatcgcattcggcatttccccagaatcagatattaacctcgatgtaaaggctttggaggaatgcatttaatgctttgaggtcgtctatgtaaataaaagtcacgttttataattacgttgatcaagcgaaaaccgtatgattctaattcagcaatg

SEQ ID NO: 107574 - DNA, 87 bp, Heterodera glycines
ttgacaccctcctaatattttcatctggctcaattaattaattaatttgcccgcttctcgtcagcgcttcaacggcacccaaagatg

SEQ ID NO: 107575 - DNA, 1003 bp, Heterodera glycines
aacactggtaagaatggggtctgggtgagaaaagagaagggaattggtggagaaagagaaacttttgagtaaaaaaaattaacttatttattacatttacatcagttgttcaaattctaatgtggactagtggctgaccttctgactttcagcatttgtcacttcggatcaattccacaatgtaatatatactttttcctattttctttactaagtacattatttcaattgaaatttaattaataaatgatatttctacttaaaaattattagtttttctttttttaaacagcctagaaccacaaattaaccaaatatttagtcatttttaggcaaatatttttttgaatataagcaatttttcataacaaagtgcactcaaattttcaaatttttttcaaaaaaattttctcttgcgaaaagtcccggttattcccggtcccggtttttctcgcggtcccggacgaaaatcgaggtcccggtcccgacttttctggtcccggcaagtcccggtttttgtcaaaattcccggtcccgtgcaactctagtcagcggtattcgaggaacaaaaatgaaataaatcactgtggacggaaatgattaattttaattgccaccaacagacaaaagaattattgactcattaatcaggtaattaggagttgagcatttcgtaaagcgacactgtgaatgagtatttacttttgagtgtaatgttttcgctccaacggaactgaaaagggatgcgtagttattattgtttgacgcgcctctttcaattagtgggccattagtgttaattaattaattactcaccactctaccaattattattaatcgtcatttattagaagaaaaaaagcgcagtttttatttttctgaactaacttcctattaaatacgtaccattttttaaacaattaaaaaccgtatcaaattttatacagtacatttcttggttaattaaagcggtcattagagctcattaatttgactgacaatg

SEQ ID NO: 107576 - DNA, 69 bp, Heterodera glycines
aaattcatcgatttaactatgattgaataaaataaaaaaattttcagatgcacatatacaaaaatcatg

SEQ ID NO: 107577 - DNA, 118 bp, Heterodera glycines
tattaagatttgtaataaaaaattattttgtgatttaatggcaaaattaaagcgaaatataaaaagagaggcggtgaaacagcggtggaaaaagcaagaggagcgaaggaccaaaatg

SEQ ID NO: 107578 - DNA, 351 bp, Heterodera glycines
aattatcttttcatttccctcactgcgacccctgtcctccccgtccactttgttttctcgttcgaactctgtttttgaattaaccccccccccctctccctctggcaattacccatacgccccattaatcgcattaattaggtgccgttttgcactgttcctgttggaccactcgtcgaattgtctcgcaaaaggagggcaaaaaagaccacgtgcgcgagaatccacagctcactttcaacgccaacacaaacattttggagcttggagacccaatgccaattgaggtgaagccctcattagattattaattacaaactttttaaccaaattaattctcagaaattgatg

SEQ ID NO: 107579 - DNA, 1003 bp, Heterodera glycines
gtttacaaattatttttctaatttttcaataattttggcaaaaaactagggatatacgggatcgggaccggggcgggaattcccagtcctccgaggtcccggtcccggatttacaaaatctatttcccggccccggtagggcaaacgggaaccgggaaaaataagcactggtaagaatggtgggtctgagtgaaaaattagttacgaaaattggagttaaaggaaataaagttaaaaaaataattaatatattgtaacgctgcaaattgtgcgaatggcctagtggctaatcgtcttgactttcccttcttctttcccctggttcaatccctctacagaaattaaattattttgaattttctttttatatactcatggggttcctatcgacaaaatatgattgctcatttgtcagcgttgttttttataaaataaaatttgaattttttaaatttttttgaatttttaaaaattcccggttggtcccggtcccgaacaaaaaccgaggtcccagtccgggttctcaggtcgcggcaggtcccggtccctgttttggcaaaatttcccggtcccgtacaaccctacaaaaacctttaaaaaattttaaatttctggcagagaattcaatttgattaataaaaagaaattgaaattgttttatagaatataaaagcaagtgccttgctgagctaaaaacgtaagttatcatttattaaatgacttacaacaaaaaaggggattaatcaaattttaattaattttttctatttagctgctactctgtgtgtcgcggcattgacataaaggattgttacgaactgaagagaaactgctcggcaaattttaaatttatattaaaaagataacaaagctaaaacaaagaaggccaaaatttcggtgatttcgctcatttctttcaaacttttgagtggttatataatttataaaataaattaatttataagtgcgaaacaaatctttgcagaaacatttgtggaaaatg

SEQ ID NO: 107580 - DNA, 966 bp, Heterodera glycines
tctgtcgcactggagttgggatgtcgccgcctttcaacagagggctgctgatcatacagccgaggtgtgtaggttcgatgttgcgctcacggctgtcagcaatagcctcgtcgatgcagtgttggaaaattccggccaacagtgcctcaggcgtgcttggcaaatccgtaatggtgaactttgacttgacttttacgtagtggaatttggccacgtgttcaatgctgttgtccaattttttaacgtagtccttggcctgttttgatgttccttcgccttgttgaacagatccaaggaagtggactacgcccaagagttcattgatcaggaagccttgtcggggccttttaggtgcggagagaatatggtcaatggaaaagttagaggatcgttttcagggatgattgtccatttttttaatctgagaaagggtgaggagtgagcaaaaatctcggtatttatatgcgagcgccggcatggaaaatggcgtaaaatggtgaatgaataataaatatttgggcatggaaaatagtcaaaaaatataaaccaactatggcctgaagagcagcacaccgccacccatgaagcacaagacgacagggcacctaaacgactcgggaaattagtcaagtcacgcgaacgacctcaagccctaaaaggcaaaatgctgccaggataaacggtgctttttgtaattatagctaccgccctggttaacagcaaaatattaattttaattatacggtcccgaaaattcccaattaaataatatggtccccataaagcaaaagataagtgagggaggagaggaaaacagcagatgtgcaaaaaaagatgaaaatttttaaaatgaatcgggaaaatgaccgggtgtacgatgtgtgcactttggccacgcccacttgcgcaccaaaattattcccaccaagaaatcgaaatcattctttattcaaattttggaaaatg

SEQ ID NO: 107581 - DNA, 752 bp, Heterodera glycines
tttttctaaattttgcaggctaatagaggacagatagggctatcgaatgataccaagattgttggatttggttggcaaagaaaaaaattatagccaaaaccccgctggggcccaaacgtgccggggcccaactgaggtaaaccggaatgctatcccgacaaaggaaagtacttttctggagtcattttaggcgctgttgaagaatctggtgtcaaaaatctgtgattttgtctatgattttcattatgtacctttgttaatgatttttcaaaaagaaacaaaatgaacaaattatatatcaatcattttctttcgtcgaagaggaatcgattggtactaatttcagattatagcccaacaaatttggtgcaggaatggggcggaacactttattaagccggtaattagctttttggcaaaacaccgcacattcgactaacaataaagcggcccttattctttttgttgaaaaatcatgatgaaaaacataaaatgaatgatatatttttgctcttttgacgacaaattcttaaacagcgcataaagctactctagaatagaaaagtgcttccttgcccttgtcgggatcataacatttttatggggggggggggggcgacataatggataagagaacaattttgcgatttttaatatggatttttattggcgacgcaaggggaaatttgaaaaattattctgatttgtaacagattttcatctatttgactccccttctttgcgcagatatg

SEQ ID NO: 107582 - DNA, 237 bp, Heterodera glycines
  unsure (1)..(237): unsure at all n locations
acgtatccaaaacaagattaaatgccaaacttgtttttaacntcatttaattttgataaaattaatataaaaatgcaagaattaaaagaataaaaaaaattaaaaaccatcacttcaagcattgaaatcctgattttccggttccgatttttaaattttggtcccatcnccgtgccatccatcaatgggtacttctaagttttgtcacccccctgaaattttttttctaataatatg

SEQ ID NO: 107583 - DNA, 158 bp, Heterodera glycines
ctcgtgcagtgtcttcttcacttcgctttgactcatcaccaaaagttgttgaaaaagggggaaaaggaaaataaaaaataatctaaatttgtgggaaatttaatgagaagcataattcaagagtgacattgaaaaaatgataaatattttaaggaatg

SEQ ID NO: 107584 - DNA, 254 bp, Heterodera glycines
ttttctcgcaatttttgtggccacaatttttcaagcttttagaggttgtcatttgcattttatggtcgttttaactgtaatagggtcgggtcgtacgaaggcattccatttcaacaaaagtccgtacataggtccaaaaaatttgttttttttaatttcaaaattttcaggttcaacagtttgtgtccttcacgcaggccaacgaacagacggcaattacatgtttgacggcctccaactggaacttggagatg

SEQ ID NO: 107585 - DNA, 120 bp, Heterodera glycines
ttcttttttcagaatgtgctcaaattaccccaagcgcgtcgctttgttttctgcgagtttttctattcgggcgtcgatcagcagctgtttttggccgaaaatgaattttcgcagctgatg

SEQ ID NO: 107586 - DNA, 656 bp, Heterodera glycines
ttccaaacattggggactcaacccaccaactttcaatgacattccaatctctggaactcaactcaccagcatttcaatctctgggactcaaccctccagcattctaaacaattgactcaaatctccggcattctaaacattgggactcaacccaccaacatttcaatgacattccaatctctggaactcaactcaccagcatttcaatctctgggactcaaccctccagcattctaaacaattgactcaaatctccggctttctaaacattgggactcaacccaccaactttcaatgacattccaatctctggaactcaactcaccagcatttcaatctctgggactcaaccctccagcattctaaacaattgactcaaatctccggcattctaaacattgggactcaacccaccaactttcaatgacattccaatctctggaactcaactcaccagcatttcaatctctgggactcaaccctccagcattctaaacaattgactcaaatctccggcattctaaacattgggactcaacccaccaacatttcaatgacattccaatcactgaaaatcatcccatcagcatttcaatctctgagactcaattctcaggctttccaaacattgggactcaacccaccaactttcaatg

SEQ ID NO: 107587 - DNA, 152 bp, Heterodera glycines
cctatttctcgagtgagccccgatcaactccaataaccgtcaacagtgcaacgccgaactgaattagaacccccggagtgctctatttttcagccccactcgaaaggtctaattcagagggtgctaagtcatttcgcgaaaagcgcaaaatg

SEQ ID NO: 107588 - DNA, 217 bp, Heterodera glycines
taaataaacacccagcttgtctacattttagtctaatcacaaaaaaactttattttttaaaaaatcaaaaaaataatttttaagaaataacattaatcaatgagtctataaaaagaatcaataaaatcattggttaatcacatatatatcatctatctatctatcaagtaaaagagaaaaaaaattgaagaatttttatatcgaaatattttaaatg

SEQ ID NO: 107589 - DNA, 144 bp, Heterodera glycines
ttatatcaatttttttccaattccttccagcagaattggatccgtataaaaggggtcgtctttccctccgcttcacatttcttcttcttcttcttcaccacactccaaccaacgaaccgcttcagtgcgcaacgcaacgcaatg

SEQ ID NO: 107590 - DNA, 91 bp, Heterodera glycines; identical to SEQ ID NO: 100405

SEQ ID NO: 107591 - DNA, 133 bp, Heterodera glycines
taaattgtttcttttagtttttttatgaggtaatttaatacgatacgtccttcagagttcgagagtgctgtccagctccatttttggttgaagagagatgagatcactgcacaaataaagcgttgggctgatg

SEQ ID NO: 107592 - DNA, 57 bp, Heterodera glycines
tttatgcttccaaataagtctattaatattgaacgctctttgttgcattaaaaaatg

SEQ ID NO: 107593 - DNA, 1003 bp, Heterodera glycines
ttatctgcatatttcgggatttttcttacatatttaggtacatattttgaccactttttgcatatatttttggcagccctatttattatatattgatagatccaaaagctgtgatcagaaagctcaaatacgcgtcattattctttttttgtggactattagttgggccaccattgtaaaaatgggatttttctcatttttattctgattttcgccaaattttcgtatatgaaggcattaattattatgtggcttaattgattgataagaatcggttgatttgtgccaaaaaaccgactttaatgccgatgccatcctcctcatccttgtgattcagcggttgcttttcctccccgaacatttccacggcatttggcacaaatgcacaatccacgacgccctccaatttggccaagtccgcttccaatgtgcgcggatagcgctcatagtcctcgtttgcgccaaattggagcggattcacaaaaatggagacgatcaccaggggcggagaggcgcactgatcagtggtgccattttgttccttgtatttgccatgacttttttggcatttatacaatgggatataaaaattagaggtcagatttcaggaatacacagtgtcagcctcaggatatacacggattttatcttggcaaactattgttaatcagacaaaattttcagtatttttcaaaatgaaaatttgaattaaaaaagtttcaatcggcattttgggtgggtttaaaaaattgaagttctgatttaattaaagtcagaaaactgggttctaatgcttcttaaaattttggatgaaattaaaaagttagtgaaaaaatagcagaaataaacattgacttttttgtcattattccattggcgtgcctggtgtgccagtcggagatggccttggtgaagggcacccattgtcggcaccaatgccacgcttaatgaaagggtacttttttcggttttgtacatacaccccaaaattttcaaaaatatg

SEQ ID NO: 107594 - DNA, 1003 bp, Heterodera glycines
aataaatcggatgtgtaaaaacggcggtaatagtaaagtttatccctccctccttttttcgaaaaaatcttttttttttgttttcaaaagttggctaaatatggtgttaaaaatcgggttttaagggcatattttagggatttttattgcatattataactctagtcttaagtagggctgggaattatatggatataaaatcgcaaaatatggccataaaatatggatcaaaattcgctaaatatggacctaaaattgcaaaaatatggacataaattttccgaattgaagtgtaaatttccaaattttcttcaaattaaataaatttactaaaatacatataaaactggctaatatggttttaaaaatcattttagaataaaaaaatatgataaagctaaaatttactaatttttagcgaaaaccaaacccgaaaagcgaaatttttgcttatttttgacataaatttaccaattttaagaaaatttgaagtttattcaatattctcgtgaaaattttgcaaaaaaatgatttttttggaaaattttctggtctttggggaatccaaaaggccaattagctgattggggccgtctaatagaggtaaatcacaaaatatggacataaaatttggacaaaaatgcgaaaatatggaaataaatcgcgaaatatggaaaatatggatatagaaatccatcctagaagcttcaaaccatgctaaaaacatgtttttcgtgtgtttcaggcgataaaaacccaactcgtactgttttttggcaaaaaatcgtcataacttttgttaaagtcaaccaaattaaacattcttggtatcattcaatagcccttcaaattctctatctacccactaagtttcaaaaagttttgtcatgtttgaaaaaagttatggatgaattttttttacgatttttggtcataactttcttttttgaaatgcaataaaattttcttgcattttaaaggctattgaatgataccaagaatg

SEQ ID NO: 107595 - DNA, 60 bp, Heterodera glycines
gcactgtgctggcgactgtgcctgcagcagaacaaaaactgtggcacatcgtgccaaatg

SEQ ID NO: 107596 - DNA, 107 bp, Heterodera glycines
gattagaagaggtacaccagttgattaaaacagttttttatgtgaattaaaaaaggtacaacagtgattagaagtggtacaaaaggattagaagaggtacaaaaatg

SEQ ID NO: 107597 - DNA, 893 bp, Heterodera glycines
taatgatgggcaaaggattgagattcgactaaagtggtattattttgatacaatatacataaatatttgaaattaaaaaaaggaaaaaagcattgttaaaatcaagaatgaaatgcaaatgcaccaattcccgaccaaacattacgccaagaaaaaaaaaaaagaactaacttgagaagacccactaattcttcgtcgagtgtatgacatgatctgctgacgaacttgtacagatattttcagacttcttaagaaaattaaatggttaaattcacaaaaagaattattttcttcgattaaaaaagaatggcacttcaaatgtgataataattagaacggtccggacccaaatccggtttttccgggagccttagcaagtaacccgtattttttcgaccgatgtctttttacgtactacaggtgctaacaatccttcgctcgctcgggcgcccctctatttgtgtcgtcatcgcatgcttgttattcgcccgaacaaaagttgaaagtaaattttcaactaagttcactttatgcaccaaaaaaggctatttttcgtgcaattttttaaacttacaatttcgaagctatctaacgcagccataaaattaaaaaaacaaagtgattgaagacacaattttatttattttgggtactaaattgaattttttttaaatgaatttttgaattttgtcaaagtccgggctcggagtttgaaatgagtgaaattggatgtctgaaaacgaatttttgcaaccccgaaaaccacattaaagttttttctctaaaatatggaaatttttgaaaaatctaaattttggcataatgttgtaaattttcgaaaaattttaaattttctctgaaatttattgcgttttatttttttgcgtaggatg

SEQ ID NO: 107598 - DNA, 457 bp, Heterodera glycines
ttaatttccgcaaaaaccttaatatacacgggccattccagaaaaggaatgagggcgttagggtatggccagttcaacagacagtaacggaatttttttgggaagtatgaaaagggttgaacaattttgggtttaatatgactaataccaggaggacaacgagggtattgatcttattacagaagggacgactaccgtgtgcattcaatttagatcacctgtcccatcgggtgggatcaccctaatagccatgagtgaaatggactctattttgatattggataaaaatcgaacagtaatgaccgatacaaccatttaatgtatttaaagtgatttattatttatattttataatttttttaaaatgtttattttgtttgttttatttttaataaatttttcttcgagttataatagccctattctctaccctgaacgatccagggacatcgaaatg

SEQ ID NO: 107599 - DNA, 606 bp, Heterodera glycines
tgctaattaatgggggctaaataattttttttaaatatttatttatgtacacgttcatcgaaactcttcattcagtcatggcaaactttgttatattgtcataacagtaaagaaaatttataatttggcaccatttgttagagcttttcatgtgtctaatgttttcagtaaataaacatttctttcatttaaaagggaagcaattagtaatcaaaaatatgccaataaatttcattcggctcattaagcataaattgtccctctcttatggcacgcaaaaaaataacaataatattttaaaagaaaatcaggcttattataggttaaataataaaaaataataattttagacaaaattttatttattagaaatacatatttaacgcgaaagtttaaatggacaaaaaataaaaaaataaatttcaaacaaaaatttgacttaattaattaaaaatttaagacttttatatttttcattaatactcaaatgttggctgtgattttcaacctttcccaatgattgaaagaaaaaaatccaatcctttaaataatatgtttaaaattgaaaatattgtttcgtttttcaaagagtcccccacagtgatg

SEQ ID NO: 107600 - DNA, 110 bp, Heterodera glycines
ggtaaggccgactttgttattttattcattgcccaaaccaatttagcgaagatttgcaaaattacatcccaacgggtgtgctgctgaagtctgaattgcgcgacaaaatg

SEQ ID NO: 107601 - DNA, 1003 bp, Heterodera glycines
caaaaacacggtttttgagaagaattaaatttattttgttaaaaatgggattaaaatattttattgttgtttaattaaaaaatgattatcatatattaattaaattagccttgtaaaccaattaattaatatatgaattacatcgattgtgatttatttaaaaaccgttttggtaaattcttacttagtccatgagataaaaaaaatgaattaaaatttataattttaattcaattaatagttaggacaatatatattagtaaattattaggtaaaataaaataattaaaataaatgaataaaattttttattcagttacttcgagctatgaatattaattaaaatatcaaaaataaaaaattgccataataaatttaagaattttacaaatattatttgaataattaaggtttttattgaaataaaataaatatacgaaaatttatttgtcgttttttaagatgacagaaaatgagtcagaaatacataagaaaacaatgtgaaaaaaaagatgacgcattttttgctgcttcaaaaagtgatggcgaaacaggccaaaaagcaaacaaaacataaaaaatgaaggaacaaacggaaaaaaataagttgggccaaattgaaaaaattaactcacaaaaagcacaaaattaatcttattggcaaaaaaatttattaaaaaaatatagcaaatatttattaaattttttgaagtatttgtttttggggaaatgaaataaaaattttgcgaggaaaataattccaattttacatatttttgtggtaatccgacgatttagcgggggaagtaaaagctaatgaatgacattggccgattgattgattgattaggttggaattggaatatgattaacagaaattgcccgtttcgtgtgttaaagccccgagcataaaaatgggcgaatgctttgtgtttgtggccatatgattgctgatgggttgggtggactcataagcacgtgattttgttgaaagccaaaaatg

SEQ ID NO: 107602 - DNA, 272 bp, Heterodera glycines
cctggaatgaattgaaaaaatcataaaagaattaattaaaaaataatttatgattaaaaattaatacattattttgcttaatacaatttttaaattgacggacaatctttaaaaagagtaatgaaaactgatgctatctatatttacaaatgatattggcaaatgcattaccgtatcagtgacccgggggcattcgacgatcgaaataatgcgaaggttttggttaaaactgaaaagagcgatttaactgaaaagttcgtgattaagaaatg

SEQ ID NO: 107603 - DNA, 97 bp, Heterodera glycines
ccgtggatttggaaatttcattacttttgcggtgagtaattttttaacatatttacttaattggcatatctaattatggttaatcaaggaattgatg

SEQ ID NO: 107604 - DNA, 355 bp, Heterodera glycines
tgaaagaccaaaaagccaacaaagcacaaagacggagcaacaaaaatgctggaggtgcggtcaaacgaaccatcaccacgcagcttgcccgcagaaaggctacaaatgccgaaagtgctcacaaaacggacacatcgagtcgcgttgtgaagcagtgcaggaatggcgcaaaaagaacgccaaaagttggctcaagaaaattgttggcaatgtccacatagtaacagtcaacattggcaccacagcaaaaccgacaacaaagtcaacattgctaagggtcaaggtctcctttcaaggcaaagtcatcgaatttgtcctcgacagcggtgcagaagttaatgtcataaacgaaatg

SEQ ID NO: 107605 - DNA, 533 bp, Heterodera glycines
ctactgatcagcatcaattgattgattggcacaagaaaattgaccagcagttggtccaatcagtattgatcaaaagcagtagagtgtctgtttccatttagtgttctgtttgttttttttgataattgttgttggtattgtccaaatattgatcaatgctgatgacagctaaactgatctgtctgaaggtgatcagcaagtttgatcacaatcactcaactgataagggggggggggatcatcagtcaaaacggtcaaatcattgatctggtgatcatcagtgaatgaatgacaagggataaacttaatctcgtcggaaactcattcattagcactaaatgctcggagcgggacgggatcccgcgcgggatttttcgggattcccagcttgcaatcccctaattttttggaaattgcgggattaatcccatgagttccaatcccaaagcgggatctgcaaattaaaaacggtctctacgcccatttttaagtcgttcgcatcggccgaaaaacgccgttccttccccaccatg

SEQ ID NO: 107606 - DNA, 1003 bp, Heterodera glycines
cgcgtgcgtggtgtgtgggagggagggagtggggaaaaagagagattaaatggaaaagtaaaagaaataagagaaaagaaatgaaagggagagaacaattgaaaatttgtctcacatctcttccttatttacatcccattttttattttaataaaagaaagggaaatgagagtttttttatttctgttttcgcttcagtgagaattttcctatcttcttatataataaagttgagtgtgtgtatgtgtgtgtccattgtttgaatttgtgtggcgttttgtttgagttttgcgttaaaaataattttgaaaaaaaagaaatgttggttttgtttttttcattttcgttttgtcagttttgcaaaaagcagtctttaaaaatgttttctcttcttttttaataaaaaataattttatatgtttattaataataattaaatcgcattgaatgctttcaattgcatttgttaagagaaaaaaataattagtttttgttattaataaaaagcatttggaaatgaatgctcttagtacttttgtaaacaaaaagaaaatgtttttgtaaatgaattcctttgttattggattaaaattgatttgattagttatgaattaatttatgttgtgagtattgtttttgattatggcaaactcgatggaaatgttattgtttttgatattgcattgaaaaagttttgattcaagaatttgttttgaactttgaaatgaaaataatttgaattctttttatttttgttttgtaaaaaatatttgtgtattcgttcattctcattttctttaaatgtttttacttttttggtattttgttgttaaaagaatacgtttatgtttttgatgcgatgtttggttatgattttttcattttgatttttctttttacgctgaaaaagaatttcgtgatattttcgtctttgtctttgctgtggttttttgtggtttttgttgggttacgtttagataagtcgactgcttttcacacaatg

SEQ ID NO: 107607 - DNA, 1003 bp, Heterodera glycines
tgccttaaaattgctaaaaatagcttttaactctcaaaaaattgtgtaaaaattaataattgacattaaaaacactaaaacaagggctaaagagcactttatagacaattgcaaaaattttgaatttccaaattttaaaatttttattatatgctaaaacaaaattatattttttatataaataaatttttttcacaaagttcttacaaaaaagctaaaaaattttcgatttttaagggtgtatattttaaaaattccaaaaaagtcaatccttatgggttatttttcgctcatttttttgtgaaaattccaaaaaatcactaaaatatggcctaaaagatgcaaaatatgcatttattcttgaaaacccccaaaagcttttatatgcactaaaaaccttcagcaaatcaaaaaattttaacatagaaatgctatttttgagcccctttcttcatagcatatgcgcagaaaaaaatatgcaaaattatacaactttgaaccctagtcattaatatgttagttaagtattattttgtgaatatttaaatttgaattaccatttaatttcatttgattattatcacttattttagttgaatttggattaaaatgattattttattttctcttgtcgttttaattcattctgagttcatgctctttgttgcgggcaaacaaatcttttcctttataaacttatgataaatttttatatgtatattttcataatatttatcttttatagaaatgttacaatattcaatagttcaaaaatttaaaattttattataaatatcctcataaattagtcaaataatcctttttcgagcctcttgcgcctttgtgtcaatattccaaagactgtgagtttgacttttaatatatttttgttagccttcattatttaattacaccgaataaatctgaatatatttttttcaattataataataataatatttgttaatacgaaagcttttagcattcacattcgcttattatg

SEQ ID NO: 107608 - DNA, 396 bp, Heterodera glycines
ttctgttgcttcattcagtccttgccttttcacatttgattcggagcacaaataaaagcttttggtgaatctccagtcagtttagcaaaaggtttttgggcgtccagcgccattttatacacattatacaaaccgtagaatagaaggtataataattacacattatacaaaccatagaatgtgacgccagaataggaagggcaaaatgaaaagaattctcactatttgattttcccattaagcctctcaaaactaattgaaattttgttaaattttaaatttgcaatttttgccacaaaaactatggccaaatgcccgcaaaaaatgctccatttcgtccccaatttattatttttattcattttcttctcggcacttttcttttggaaaaaaatg

SEQ ID NO: 107609 - DNA, 101 bp, Heterodera glycines
ttcgcgttttcaagtgagcgacgaactcttccgccgaaccatgcaagaagcctgtgcagaaatgccctccctcaagcggctacagctctatctctgccatg

SEQ ID NO: 107610 - DNA, 71 bp, Heterodera glycines
tttttcaattgatcgtcaacatttttgtttttgtccgctttcagttggctgtccgtgcctttcttatgatg

SEQ ID NO: 107611 - DNA, 873 bp, Heterodera glycines
tccatctaattttttttcgtgctgcagggcgtttcttttcttaaattgccccagggacaataaaatatttaaaaactcgaaaaaacaaatttcaggtgactatgaattttttaaaatataaaaaaaaatttcaaattttattgcaaaaaattattaccatttgcttttctgaacatattaaccataagttttttaatcttgtgcatttttttcaacctttgtagacgaatagagaactcttagagctaccgaaatagcaagaatatttcatttggatgcttttagaaaagtcatggggcattaaatttgtcaaatattttatggtcgtgtctttttttttgtgtttgtgtaaactgcaatagagccgagatttgaatagctaaagaatattttaattatttaaaatttaatgatgaattcaatggtgctatgacgttagtcaaaaaccatcaaatgaaaatattttttcatataacttagttcaaaagcaaccaaatttttaatgcttaatatcattcgatagccataagtgatttcgatcatatcattaattccaagaaagttatgaccaaaaatgttcagaaaaacttggttttttgagtttctcaggtcataactttttaagaacttaaggaatttttttgaaattttgcagaataatagaaaacacttggtgctatcgaataatatcaagaatttaaaatttggttgatttatggcgatgttatgaataattttctgtcaaaaattttccatttgatggttttttgactaacgtcccagcaccaattcaatgaatattattttctaataacgattattttaaaaaatgaaagctcacctctatttttcacttgtttaggcttagcaatg

SEQ ID NO: 107612 - DNA, 298 bp, Heterodera glycines
ttctgcaacatcaatcattgggcatgaggaatgccaaaacgtcgacacactcaaccaacggatcagcatcgtcagagaaaagaagctgtgcttcaaatgcatgaagccaaaccaccgcgcatcaaattgcgctcgaacatctaagtgatatcactgcaaacgtcggcatcccacggcactctgccgagatcagtacaaagccgagaatggcatcaacacgcctagcacctcttgcagtgaagagaagccaaatgccaacgatggcaagcgatcaacagtgatcgaacaacaacaaatg

SEQ ID NO: 107613 - DNA, 223 bp, Heterodera glycines
tttgaccaattttttttcaatttaaacctgtattttccttggagtttttctcccgaaaattcaggcccaggtccaaaatggaacccaggtccaacttttttcaaaatgtcgatgtctaatgaaactaattttaaaaattattaaatttgcattttattattaacaccaaataattcattcttgctgaaaagacacaaaatttattgttattcatttttaaatg

SEQ ID NO: 107614 - DNA, 324 bp, Heterodera glycines
tttatcgagttggttccaatttttgttacccgccccgcaataggtataaattttttgcctaatttatatttcgagttaagtctataaaagggaatgttaaagaaggtttaagtatttcaaagggattcagatctgttcggccataaattattttatgagccatgaacagatcagacagctttcgcctgctttcaagtgttggcagttgaaggtattctaatctttgttggtatggaatgggtggaaggctgcatttgaaaagaactcttttggtgaaatatttttgacatttttcaattttttaaatattttttagaagagatg

SEQ ID NO: 107615 - DNA, 66 bp, Heterodera glycines
gtggtcgttgttgacccaatggtatggagcaatggcctggacagagtcatgccttacaaaaatatg

SEQ ID NO: 107616 - DNA, 165 bp, Heterodera glycines
atcactgatcaccctttttaaaagccaataaaatttatgattagaatttcaaaaatgccaaggaatggaagtcggttgctttattccgaattttataaattgcattttatggattcaattcattggtgatgttcccttttttaaagcaatatttagccagaaatg

SEQ ID NO: 107617 - DNA, 787 bp, Heterodera glycines
tttcgaaacgtttggtctctattaattataaaacaacatattacattttttgaaaattactgttttatttttttaattataaattaaaaaaattattatataaaatatttggtggcaaaaaagaggcaattttgagaaattacatttcaaaaaataaattatatgcaataaaaaagtgaatttattcaaaaaatgatcataaatttatgattacttttttttcaaaacatctttttttcacggcgcgctttttctaaagacttttagggagaaagaggttagacactttatccgcttcttcttcttctcccgctggtggcgaaaatagcctaaaattaatgaactttattttccgacaaaatcaaatgctattgctgtgttcacccaatggatttatcgaaattccacagattaaatacgttaattaataaaaaatatttcaacttataaattattatttttttcttttttaaacagcataaaattgcaaatttaaccaaacatttggttattttttgacaaaatctgtaaacaaatcgaattatataaattacaaattttttcccccggcggcgcctatcggcaccgccagacctcttgttcgagaaatttacattgaaaaaacgcgacgcggaaaatttcaacgtatttttccctgattctttcttttttaatgtctttccaaagtaattttcgatagtcaattggaacagcgaaagtgggcggagcaaaacaatttagaaataataaaatttataattttattttagcgattttcttggcaatg

SEQ ID NO: 107618 - DNA, 58 bp, Heterodera glycines
gcgccgccaccgccggatggattagtgatcaccggttatccctctgctaatccggatg

SEQ ID NO: 107619 - DNA, 489 bp, Heterodera glycines
agaataaaactcaaaaaaaggcccttccgttgatttccttcgtccctagggacggccccagggttttggcttgtagagggcattggagatacaaatcctttccgactacaaaatttgcttattgtgtactgtagaattggtcaaattcccatttttctaaaattgaaaggtcttttaagggtggacgagtcgaacacgcgtcagcgggtggagcacgtgccgaggccggtgattgaccgccagcgcagttcgcgcagtgacttaaactcacttagcccgttggtttttaaagggaaaattttcgatctgtcggtttcaaaaaacggaaatcaacacatttgggacttttaaactaacaaattttaatttgcaatgagtcactttgggaacctgtttaaaagggaaatgaaactgtgacaaatccatgtgttcagtgccaacgatttgggaaggcacagtttggccaatttatccatctccggcccaatg

SEQ ID NO: 107620 - DNA, 195 bp, Heterodera glycines
ttttccctgaaaattttttcaaaaattttccctttaatggtcactgctgccacaaaaaatgcttaactcttgtcatttaatgcaaaaaaaaaatttttcaaggacgaacagcaacaacatttggtggtcgctgaactgctcgacaaacggcccgacctggtcgatgttcacgcgaccaactttgacgcccaaatg

SEQ ID NO: 107621 - DNA, 246 bp, Heterodera glycines
ttggaaaatgagaatggcattcccaattgatcatttttatgcagtgcgttgctatgtttgaccataaacacttcacgcccattatctggttcgtgccgaccaacacttttgtgcccgctgggcgtcaactttttgtgtgttacggtgcgcatgacaacgcccgacttggggtggaatatggctttacaataaaggtggggggacagtaattatggccaactaattaagctaattaattgcagaatg

SEQ ID NO: 107622 - DNA, 581 bp, Heterodera glycines
ttttgaatgaattagaattttataatacacaaaattgggggggggggggtggaagcatttcggaacccttagaattttagacaatccaaaaaaatcccccccaggcattacttcgacgtcccatcagacggacactcggctgacttccctgcgacatcgcctccgcgccgtcacaaatccattcttcacacgtgacgagggctatttggccatcggacggaagttggacgagctcactgagcaccacaaaaaggcaatgtaaggcgacggaggggggagggagggaaatccaattaaaatttaattgacattaattaattaattcccccccccgcagagaaaacaacgcggaactccagcgggccattgccgcgcactcggagaatttgaagctgctcagccaaccgttgcccgaactgacccgacagatatgcggagactgtgcccaaaatccaggcaaattcattggcatttccgcactaattaataggccaatgttttttatcgtttgttgttttttcacaggaaattcgcccgagggcgctcagctgaagcggatcatcgacaaggtggacgagatg

SEQ ID NO: 107623 - DNA, 333 bp, Heterodera glycines
ttttgtgcgatgctctacatcagcaaacgctatgcaattcctcattggtctcaagggaacgcctccacagaaaggacctttcgtacttttcacaacatattgtcaaagtacatctcaaaagaccaaccggactttgatgaacacttagaagcggcaaccttctgttataacactgctgttcatcaatcaacgggagaaacacctttctttctgatgtatggtagggacccaatattttgcgttgatcaaattttagacccaaggacagcagacccagttgcttttactgatttaacagaattcaaatatcgtctaatcaattctttaagaatg

SEQ ID NO: 107624 - DNA, 774 bp, Heterodera glycines
ttgttgtgattacgccctcatcccccttataaagttgagccctccccccttccgcccccattgttttcaatgagtctgataatttggcaattacacatcctgcacatttgcggatgaatttttgtgatagatttttgacagaacaggccttacttaatgtacagtatccatacataaattattatctaaatttcatgtgccgaaaaattgttttttgcagacttaaatttaacaagcacaaattgttttcaaaattttttgtatggaaccatgaaaaaccggtgatgcttaatgttgctgttgttctttctgtttttcacctgtttgtcaccaattttcatcgtcaaatcgtcgtcgggtaagctgctggaaggcgccgggaactgacttaaaaaatggggaaaaataagaaaaaacggaaaatgaaatcaattagtgatcgggaggacccatcccaaaaatgcttcagtagaaaacgcgtcagtcgcatttagtttttcaaaaatatatggaaattctaattgactcaaattaaaaaaatcagttatttcgatcttattattaatcaatcacatttacttttttgtctcccgctttttgagaattcggataacaattgatgaatcattagcaatgttgtcgtaattaacttcactgcccttgttaagtgtatgggtctaaatgatttaattgattaatttatgcattttttaagtttgatcatttctttaaacctacactaatgatttgttgtgccccattttggtcccaatg

SEQ ID NO: 107625 - DNA, 741 bp, Heterodera glycines
aattttactattgttttttgaaaataaatggtgttgataaaaattccatttatccccccgggggataaatggagacggggggattatttttcaaagccctcagaaagggggggggggtaattggagccagctggtcaaagccctcagaaagggggggggggataattggagccagctggattaatggaaacggagggataaaaagagaaaacacggtaagtacctttttttctccgtactagtttcgatatattaagcataaataacacatttttcacttggtttgaggcttttacgtttacttttattatgcctttaatgccttttttgggattttcgtgcctttaatgccttttttggcttttttccgactaatagtgaattcttatggctatgcagcagaaaatgtgcaaatggttgaaaaattctttccttttatatgcattttctattgccactttttcagttggagatttgagtgtaaatataaaggcataaatttgagagaaacttcattcatcaaattcttcacaccacttcatggtatctgcactattacatctacctaatgtgtattttcaatcttttctaatcctaaaatttcatcgttttgaagcatatacattgtgcattcctgtacatacctgtacataatacctcctacattcctgtacataatacctccataatctctccctcctccaactcttcgatatttcattactccatcggacggacatg

SEQ ID NO: 107626 - DNA, 377 bp, Heterodera glycines
ttttttcgagtgaggcaaccatatatgatcagcactatttattaaacaatgagatgatcatagaacaatcgaaaacataaacaatcaacatttattaccctgccatgttggtcaaaatttctaaaatctatgatttcaaaataaatgataaagtcaattattttgcaaattttgatatcatattcgtgatcagaagcactgaaaaccccgggttcatttttcacaagaaaatttttttttgggtggagcccagattctccagtattaccgcatacatatattatacttacctatttatgtatgtagtaatacaaggaattaaaataaaattttctatttcaagaggataatacaaacagtcgacgttaatcaagatg

SEQ ID NO: 107627 - DNA, 581 bp, Heterodera glycines
agaagggcggaggaaaacttcaagaaaccagacccagttcgacaatacgggcttcatgcacggtgaattgttggcattgaaaaagccattgaacatcataaatttgcaagcattggaagagaagctaaaaattaatttattaaattctgttttcaattggtgaaatttttaattttccaaaaatgcttaggacatttttgaattttataggcgtttttgtaacaaagtgcactcaaattgtctaaaattttcccggcggcgcctatcggcaccgccggacccaccaatttactttagttttttggaattttagccccaaaattgccaaaatttgacagtttttgacgcaaaaacggctacaagtccctattttttttttttgctctcgggttctgaatttttaatggaaaaattttttgcccgaagagcaaaaaaggtcttcaggttcccccccccaaaaaaaaatttttctggcttgggcttggtaacaattttaaagactgactttggcacccaaattcaatcgaataaattttaactaaattttcaatttaattttaaacatttccctctcagacatg

SEQ ID NO: 107628 - DNA, 495 bp, Heterodera glycines
  unsure (1)..(495): unsure at all n locations
cagaagggtctggcgaggaaagacgacncagcagccgcaagctcgccacttctcgccccccccagtgctgagcgaacacgtgaggcgccacattgatttcttccaacaactgaaggcagcacgcggatcgcctcccccgttgccaagcgctggtcgccggagccagcagcgagcagcttctctgccttgtggagagtgcactgaacattttacgcgcgcgtgtgcccatccaacggcgtcatctggcccgcctcagacagcgtgcgagcgagcgacgtccgcacactgagcagggtgcgtagcacacgctccgcccgtcgccttctgctcaacgcccacgtaccgtcaacagcgcaaactggtcgtggcataccgcctctggtcgggttgctcgccagcgtgctggtgcccgtgctcgtccaacgcgtattcgagacaaccagcaatagtagctgaaaggcacccacacgcacgcttgcccacgaagaaacaatg

SEQ ID NO: 107629 - DNA, 63 bp, Heterodera glycines
ttttgcattgcatataataaaaattttaaatgtccttgaatttcatgaattttccccactatg

SEQ ID NO: 107630 - DNA, 705 bp, Heterodera glycines
tttttatttaggagtatgaagaatggctcaaagaattttcatgcttgtttttttgtgtgtcacttacatcaaatttgtttttggtttggctatgcttttctgcttatcacgacataaacacgtaaaacgaacttattcgattaggatggaaaatttaaaaaaccaacaaattttaaaaatctttaaatttgaaattgtgaaaaaaccgcaacaaattttacagtcttaacttttatgaaaccaattctgtcgtttgttagaattagagaacaatttaagctgtctaatagtgatgctcgagagtctcggtttcgagtctagacacgagaaaagtcccgtgttttttttgatctcggtttcgagttttaagtctaggtcttcaagactttcgagaccgagacttttttacaccccctaatggttggcttttggtaaacttaaatttttttttaatggttttaaagcgaataagaaacttttttgaaaaaagtcccggggttttcggtctcgggctcgagtctcggtctcgagtctcgtgaaatttttggtctcgagcatcactactgcctaatgacactaaatttgttgaatttttgtttccaagaaatgtcgacaatttttttccatttaaacacatttaaaaaagttataaatttgaacgaataattaaattaaattaatattattttttaaatgaaaagcatg

SEQ ID NO: 107631 - DNA, 379 bp, Heterodera glycines
gcatagggaatgattgattatttattataccacggctcacgttgcgcgcgctgtggtgctgcgcatatatacagcgagctcacgcgggaaaggctcactttttcgcaaaaataaattaaatatattaataaataatgtcgtggaagaccacaattattgcggcgagttgggcggcaacgaaacgcccacaaagagaagaaggagaaatgacgatgatgatggggagcagaaatttcaaaaaaattgcatccgcactctaagcgccgacaaacagtacaaccaaaagttcaaagtgcagagtgtaaaatcgtcctttattattgaaaatttgcccgccaaccccgagtcaatgctgcgcgcattgttcgctcactgcatg

SEQ ID NO: 107632 - DNA, 444 bp, Heterodera glycines
tgtttaactttgtagaatttatggattgttgcattttattagcagtttatcaattttagagtctaaaaatgagaaatgtgaaaattttgtattttcgacctttgttcgaattcgggttaggggtttgaaattggtcgaaatggatgtcagattcgtgatcagcgaccccaaaaacccccggaaaattgttttttatgccttttaacaaaaaaaaatttatggggcctaaactgtatatcctgtaaaaactagtataaaagcggttgctcttccaccgactgggcacacttgcaattaaacaaaaattttttttttttcttgagaatgttttacttaatgtcgcctctttttattttgttaaaatttaataaatttttgaggaaaaaaggcaattgaactgaaaagtgtcaaaaactttctttaacaatttgcgccaacaaaatg

SEQ ID NO: 107633 - DNA, 225 bp, Heterodera glycines
agcggtctgccgccttgcgaagagggctggactatgtcaaaggcggaaaaatgataggtcgcttgcaaaaagattgttatgaataaaattttcctttgaataatggtcacattgaaccgatttagttatcgaaacgaaaaatctattttgaattatattttgcaccaatccttgctctattttgggcgaagttattaagaaaatatacctgcaaaacacacgatg

SEQ ID NO: 107634 - DNA, 746 bp, Heterodera glycines
gcaaagcgtaaaactgataaactcgctctgccctatatataaaagttgttgattgctgcacgatttgtcataatttttgaaaatgttaaattctcaatcgttcagtaataaagatatttgtttcaaattgccttgcggtataattatttccgggccatcctcgtcgggcaaaacggaattcctactaaaatttattgctgagtgcaatgaactgatcgcacccagtcccatctcaattctgtactgttttggtgagatgaattcggcggtgccgctactacaaaaggcgggagttgaggtgtattcgggcgtaccttcggaggagctgattaggcgccttcccaaaccgatgctgctcattctcgacgatctgatgctgtcaatagaggagcgctatctgtccgatttgttcaccaaaaaatcccatcaccatcagtttacggtagtgttcatcactcagaatctgtttgagcggaagatcaaggtggctcgcctttcggcgcagtatttggtgctaatgcgcgcgcccaactcgctgctgtccattcgaaatattggagttcagctttttccgcgtcaactcgattttttccttgacgcctaccgcaaggcgaccgcccgcccctatggctatttgctaatcgatatgcacgcatcatctgatccggcgcttcgcctccgcaccaacatatttaaagaggagcaggaggaggacgagggaacagttgtgttcattcccaaaaatg

SEQ ID NO: 107635 - DNA, 1003 bp, Heterodera glycines
atactatttatgtgtttttataaaattttaattattttttccgtttgacgcacatccgaccaaactgacaaattattgtagaagatactagccgcaagaaataaaaaagttaagaaatttgtccgaattcgggttcgggattcgaaacatggatgttttgcacaaatccgaccaatttcagtcataaacaggtactcccgcgaaaacgtaccccacgcgaaaacggccacgcgaaaacgtaccccagccacgcgaaaacgtccccacgcgaaaacggccacgcgaaaatggccacgcgaaaagagtcggggtcgttttggcgcccacgttttggcgccgacgttttggcgccaaggtcgttttggcgccgacgttttggcgcccacgttttggcgccagggtcaggtttttaaattttgtctatgtttgaataaatgaaaatatgtattcgtcagttttctgagtcgctaatcacgaatattgtattcattttgacaattgcgaagcccggactcgatttaaatgaaatacaatttttgaacatattagatcaggccttctatctgttttgttttatcaaatgttttaatatggtgggtccaaatctgagaaaatgatttaccagattctgatttagggatagtgactattatttattaaatataccgttaaggttacctatgtttataatcactaactcttttgaaatttcaaccgaaaaaatttaagagtttaaaaatattcaaaatgttttgacattttttgaagcatagcgaagagaaaaatttgaaaaagttcttgctaagtcaatttttcatgttgaccaacaaaatgttcacagcaagttgatcatatcactccttcatgttgatctacactagagatcaacattttgaaaaaaccgtagttctacctgtttcaaaaaatggcctgtacctatttttttctgtacataagtacaggaaaataaatgtacaggaaaaatccaggttgccgaaaaatg

SEQ ID NO: 107636 - DNA, 128 bp, Heterodera glycines
agttattgatatgaatggcattgtaaaagtttgtgaaactttttcagccgcgtcgtttagaaagaggtttgatcagaaatgatgaagagtggaaaagagctttagaagaagctgagagttttgagatg

SEQ ID NO: 107637 - DNA, 850 bp, Heterodera glycines
agtgtccgtttgggggtactcaaacaattctgtgggagcaaaaatccaaagcagaattaaagtacaggctatagggaagctattcccgaaggattcggcctccccataaatctgggcgcatcggttcggggggactgccccgaaaacaaaaaaatcgattttttcaagtgtccgtttggggtactcaaacaattatggggagcaaaaatccaacgcagaattaaagtacaggctatagggaagctattcccgaaggattcggtctccccataaatctgggcgcatcggttcggggggactgccccgaaaacaaaaaaatcgattttttcaagtgtccgtttggggtactcaaacaattatggggagcaaaaatccaaagcagaattaaagtacaggctatagggaagctattcccgaaggattcggcctccccataaatctgggcgcatcggttcggggggactgccccgaaaacaaaaaaatcgattttttcaagtgtccgtttggggtactcaaacaattatggggagcaaaaatccaacgcagaattaaagtacaggctatagggaagctattcccgaaggattcggtctccccataaatctgggcgcatcggttcggggggactgccccgaaaacaaaaaaatcgattttttcaagtgtccgtttggggtactcaaacaattatggggagcaaaaatccaacgcagaattaaagtacaggctatagggaagctatttccgaaggattcggtctccccataaatctgggcgcatcgcttcggggggacggcccgagaagccaaaaaaaaaaaaaattattttgaaaaaaaattattataaggaaatg

SEQ ID NO: 107638 - DNA, 190 bp, Heterodera glycines
tttgttcccgctgaacaacaaccgtggcctcttggacttggaggatgtgtacgccgccactgttttcgccgattcgtcggtggacggcagcgacaaagaggcaaaagtggtcagcaaattgcttatgatcctaatggctcggacaattaattcataggtttcgcccggctctgacggtacacagacaatg

SEQ ID NO: 107639 - DNA, 913 bp, Heterodera glycines
ttgtcctcatttatttctttattttaattttgtataaatttccttgtgcttaaataacctgagatttttcaaaggttcgaaaaaatatagaaatccatattttttctggactgtaggaggcctgaaacgcacgaaaaacatgtttttaacttggcttgacgcttctgccaaaaattagtattaaaatttgcttatttgctttgtgtttagcctaaaaacactatatgttatttgatcaattcacagcagggattgaaattccgcttaactgattttgtttttaatagtttttcagataatcttttctgctatttttaatttggtgtcattctaagacttcatgttttgaagctggcaaataacacaatttaagcgatttgacaacgtgatagaattgtcggtgccgtcgccgctgcgcgtctgtggagccgagcaaaaacataatggaaaaataaaattaatgtttaaagaaattgattgaatgtgatatttgccacccttttatacccccctcccatacaatcggtcaaatccgtgatggaagaaaaattctctgtgtcagtcattggatataaaagcagatgctttttcctttccctttcacattcgctactcccaagtgcccttttctcaaagcgtatcatccgctgtaatattttgtaagttttcttttttcagattttatttttttcccatttcacattttccttttttttttttgcagaatcggccttcgacaagcaacaaattcttcacaccaccaacgatgaaaagcgtcaacacaacgcctttccgtcgccgacctcttccgcttcgccttgtgtcgtcagcgctggtgctgctgctctgtacgcttgatgtgtcgctggcagcggagaagaacggcgaaagtgcaactgctgcatataatatg

SEQ ID NO: 107640 - DNA, 735 bp, Heterodera glycines
agttcccccttccatttgaaagcccccctttcattagaaggcctccctccatttgatggctcccctgctcatttttgagcggagttcgctccattagaaggcatagaggaaatacgataatgtctaacaaattaaataatttaatttaatctgtattttgttagtcggtcatcgatgacagctgtaaagttaaagatggtaaacaaatatgtgacacccaactggagatcaatgctgatcagatggggcaactacgaagaatgcttgttagcacaaaaatgattgatcagagcattggaaatgacaatcgtcgaaaaacattggagggacagacaagtacataaaaagccattaagaaataatataattgggttatatttcacgaatttttatacgtccaatcgacgtttaccggtccaatcaaattaatttagtaatttcataatctattgcggaaatccccccttttgaattgcaagggataatccccgtctcatttcctccaaaaagtcaaagcgcagcttgttacaaatataaacgatctagtaaacgcataaaagtcgatcgattgtgtgcataaaagtcgatcaattggacgcataaaattgatcgattgggcgcataaaagtcgatcgattggacgcataaaagaggatcggacgaataaagtgaaatagaaccgaataaatttatattcattaaaatgtataggtattcgaaaaaaaattcacaatg

SEQ ID NO: 107641 - DNA, 1003 bp, Heterodera glycines
attagggatgatatttatagttgctaaaaacttccgaatttaggggtgtaaaataacaaaattttattcaaaaataaacaatattaatccaaatcattattgagattcacgttgcaaataagtaacatgtcgagttgttcgggagatagacgtgagcgattatcagttaaaatagatttgtaaattgaaaagatcgttcgacatcacatttttatagttttttagttgctaaaaataaaaaactagaaaatagtttctaataactcaaaaagtagcttaacaacagccgaaaaaaacatgtttttcgtgcgtttcaggctatagggagctcaggaaaaaaatagtgaaataactatacatatcatccctgatgatgaagaaaaaataaattgtcatttttctggttggctttttaaaaagcagaaaatttttgtaatattcggaacatttttgtaatttaggacattttagaattctcagataattaacgaacaaccaaagaaataattttcaatttgataataaaaaaccggatcccaaaacagaaaagtcgctgaattggtagttccaaaatttacatttttatagaaattgggaaaacgccaaaaaagcgatttatctcactcacaaatcagtacggataaatgcaaaattcacaaaaaattacacacaaaaccattgaatgacctcgcagtttaaatttttaaataaatttttcattttgcaaataaattatcaatgaaattaaaatatttgttcgccggtcgggagtacgagcgtcattaattactttacgattttgaaaattttttctttgagatggcaattaagaaaaacaataatcaatcatgtttacgacacatttacttatcaacaaatgtgcaatatataaaaagaagctgaaaaatcattgcgtgatcagtttatttattggtatttatcattaattaattttgccgttaatttcctcattcttcactaattaactttaattggcaaaatg

SEQ ID NO: 107642 - DNA, 286 bp, Heterodera glycines
ttttcattaatggccctcccaccatattattaggcgcgcaaaagtgcaacaaaacttttcacaaccataaacgaaaaaacatccaataacatggcatcaatttgcaatttcttactgtctgagaaaaatatcagtgaattcttttaaaaatatataatatttattgccatcccactgaggacaatctcgaattttctgataatttttgacaattttaattggaaaacatttcacgaaaaagaaaataattattttgtctattggagcaaaaaaaaaggttaaaatg

SEQ ID NO: 107643 - DNA, 55 bp, Heterodera glycines
tgctaaaataaaacagaaaaatccaaaaatatataattttgattcttcaaagatg

SEQ ID NO: 107644 - DNA, 704 bp, Heterodera glycines
  unsure (1)..(704): unsure at all n locations
gggaaaattgttaatttttaatgcgatttttaacagatttttgtccaaaaatgaccaaattttgccacaaattttatattttgtaaaacagtgacattatgcccaaaaatttcaaaattatgcgtagatttaggaaatcagaacaaaatttggtcactagcttcaaatcaaacatttctgataaatcagaacagatccgagccctggattaaaccccaaagtctcgaacaatttacaaaaaaaaagttcgatttgatcaaccttaaataccaacagttctgctgatcagtcctctttgggctgatcaacgcgatcttcaccggtgtgaaaagttttcacaaaggtttatttatttataaaaaatattaaatgttgctattttttgcaccttccctagaaaaggcgcagttccaaaaatttgtaacacaaggttctttgaaagaacgaataagcaggcgaaatggntaaatatatttcaattaaaaaactnttttatnatnnntcnaaaatnanaaaanncanananaaacattcctttntatttctccttttntatttcttcttttctctcatccttctcttncatanctcacttttagtgggtgggagggaaaggcacacaaaaaacaattcaaaactaaatttaaatttaattaatattttgcctttaagcacctgccatttttacgccagaaacaataatg

SEQ ID NO: 107645 - DNA, 528 bp, Heterodera glycines
ttttttctgcaaaaaaaaactttttattcattcattgcacattttaggccatttaacattaaaagaggcattttacttttttttcgtcccttttccatggccaatttactagagtgccacgggaccgggaatttttgccaaaaccgggaccgggacttgccgggacctgagaagccgggaccgggacctcgattttttttcgggaccgggaccgggaccgcaagaaaaaccgggaaccgggacctcgtatgaccgggaattcccggcccggtcccggtcccggtcccgctctactctagttttttcatttcttaacgaattgccaaaatcttaaggagtgaatttaatcggttttctcatataataatgccaaattaagtgcggttttaaaattgaattttctttttataaaattaatcactaaattaaccatgattctcgagcggcacgaaattggatcaaataaaaattaaaattatattaaaatacaaactaataaatattcgttctgaaaaggcagtatatatg

SEQ ID NO: 107646 - DNA, 496 bp, Heterodera glycines
ttttcgattttattttgttttagtaaattaatttttgaagtgattttccttcagaatttcctccttttatattgtcttggctcagcaaaaatcagctgagcttggggaattcatgtgaacattttcattttcgcaacttccctcccaaaatttattaaatttccaccgatttccgctgggttttcgttgttgaccaatttttgcacttttaattttgttgcacttttattttatagaaaaaaacaattatgaatgatttttatgcttaccctctttttctctttttttctcactctctctctctttttaactcgctgtctctcgcttctctctcacacacactatttctttctcctctctatctccctcctcattttactgctatttcgctgtacattttttatttatttggtttcttcccaaatattttcgtttgcttccgtcagagcataattgcgcatactgctgggccaaatcacatgaaaatttgccaatg

SEQ ID NO: 107647 - DNA, 487 bp, Heterodera glycines
atgaagaaaaggagttgagtttgtgttggtttttttattaaggcacgattttacggcacacacctatataaaaaaaatgaagaatcacgttttggaacatcctcgaaaaaccggtgacacaaacacacactgacacagagaagttcacaaaatttgatggtgttgtgcctgtttatgaatggaggaggacgacaacatttttcgaaattttctggtaccctgagaagtctaaatttgatgtttgttggagaggagatgaggcttactaccatggtgccaaaagaggaagatgagagtggcgggcggtcccatggcggcacaataatttagtgccgacgaacacaaaaaaaatgtgttgtgtgccaccacatcccccacttgttgtgtttgctttaagcttgacgattactaccggttgcgcgacgcgctcaacgcgtttgacaagcgcaacccgcacttggcataccggggcagcggtgccgttatg

SEQ ID NO: 107648 - DNA, 228 bp, Heterodera glycines
  unsure (1)..(228): unsure at all n locations
tttttgccttttcacaagagattttattaaaaaaggcaaaattcgccttaaattaataaggtgaaagttgnaaaatgtttattaaaaaatntnaaggatganatataattaaaataatcaaaaagaaaaaaaaatcatttattttttttaaataaataaaaaacattttcagaggcagtgcctcccgaaaaaaagacaaaaaattttcgaaaaaaagctaaaaaaatg

SEQ ID NO: 107649 - DNA, 179 bp, Heterodera glycines
tcaatgaattttattaataaattagtcaaatttttcagaaatttcactcttttctgcttcctgcaacccccctcccctgtatttcatgtataataactaatttttatttgacagatcgattcactccctaaattctcaaaattctcaattttttaagcttggacaacaatgcatgaatg

SEQ ID NO: 107650 - DNA, 105 bp, Heterodera glycines
ctaatatattaatataaaaagtgctttttttcttcctctctaccacattccattcattcattcattcttcctggattttccggtcattttgttgctacaaaaatg

SEQ ID NO: 107651 - DNA, 835 bp, Heterodera glycines
  unsure (1)..(835): unsure at all n locations
gatgccatttcatcaacaaacgcaacacacagcaaaatgcaaatggaaatgccacaactgcctgcgtgttgggtctgcctttcgaggaaactgcgtccaaggcaatgacaacttttttgagacctgcttggggtgcaataaagtaaagttatttgagtttcgtttcaaagaattttnttgtttagacatttaaaagtcgtgaatgctatgaacaccatgccaaatgtacaaactacagggtcaagcgtgacaacgaacatgaaattgtgggaaaatcaatttgtaaaagctcgaagaaatgcgtcgactgtggcgtgatttaccaaattcgggttattataaaataaaatttttttattttattaattttctcttaagcatcaccaacaaaaagagcatgtttgcggtcaaaaattctgcaaaatttgtctcggcttccatgccccgcgagactgctacataccataccggcctaaagtcaagaaggagaagcgcttcgtcttctttgactttgagtgcactacggatttcaagcccgacccgcaactcatgcggttcaagcaccaggtaattattttttgaattcaaacacaatttaaaaaaaacaaaggtcaacttctgcttcgcccatgtgacatgcacccgttgtattgagaagggcatatgggtccaagagcttgaaagggcttgtgcgctctgcggccgtttccgaacttatgcctggtcaccctttgaattttggcacacggacgtggaatgccacaaggtcgtcgaggacccgcttgctgccttcaccaagtggttgttgaacttcgaaacggaagtcctcggcatg

SEQ ID NO: 107652 - DNA, 683 bp, Heterodera glycines
tcttaaatttgatccgagttggacaaattaagaagagtgcaacaatggcagcagttgtaaaggctggcaacggaccaggtccttacacatctgaaacatcatggacaatttgggaagaaacattcgaattcttcatcaaacttcgaggcatcaccgatttcgagaccaaaaaattgctcttcttttcggagattgggccaatctatgagagcttcgccaaatcgcgttgccagacgacgtccgcgacatgccaattgtgtagatcaaagcgctgatggaagaacgatttggtgagacgaagacgattgcggcaaaaaggtttgagctgttttcggccaaacagacatcaggactgtccattcgggactattcaatccaacttcggaccttaattgccaaggcagaatggcataaggattcagtggacatgtgcctgagcgctcttttcatcaacggccttaaaaaagattcaattcgggccgagttgataaagaagggagtgaacgaaatgaagttcaaagatgccgttgaaacggcagtgattctcgagcagtccgaattggatgcagagcaaatcggtgggcataagaaagccgaagtggctaaagtcttcgctccaaagggagaaagaaagagtagcacaccaacgcagcaaatgcaatgccatcgatgcgggaggaatg

SEQ ID NO: 107653 - DNA, 1003 bp, Heterodera glycines
ttattgcaaattttttgttggtgttattgtttcatttgttaaatgacatgttgttttcggagatgcgtaccacctatatttattgtatcttattgtaatattttaaatacattaatttatttggacaaataaattttaaagcaaatgaaaatgggactaaatcttcagaacccgaacgggcatacactttttgaaaaaccgaaaattcaatttttccgaaacaatgcttcacgggtagacatcagtttacaaaataattttgcaaatcaagaggtccccttttttgaatttgaattttgaatgggcgccatttttaaattagcgccaatatttgaatagaaaatgtttggtgatttcgcgtctaacgggaaaagagtcttttcagagacgctgcaatgaagccgctctctcttagggcagagacgcacatggtcatactcactggtcactcgctgcatcaggtcccagtgcagtgaatgttcactggtcacatacgtctctgccctatgagagagccgtaaatcattcactcgttttggtcaatttggtatcgatttgttttgtacatgctattccattccgatgctaagaaaatttcgaccatttctgttcccggaccctccaaaaaattgagacttcaaatttcattggtgactttcaatttgtttccatgtatttacataagccgtttgaaccaaaaatgtgttatttgaaaaattaaagtttctattttttttgttcaaattcggacctgggattgaattggcggatgaaattggtactgtattcgtgatcagcgatccctaaaacccttaaaaaaaatttccacatctttttaaaatttctaaaaatttaagggtggtttaccatcggcgtcattcttgcctttgtttttctaaaaaataatttaacaaggcttaatccaattttacatattgcacattttttttctcttctgttgtattacatattaacaattcttctacacataacccttgaaatg

SEQ ID NO: 107654 - DNA, 78 bp, Heterodera glycines
atttgatgtttctgtttagtccattcttaatttgcaacaacaaagaaaagctttcattattctcatcagcaaaaaatg

SEQ ID NO: 107655 - DNA, 692 bp, Heterodera glycines
aagacgaggggaccgtctttcttagaggccggggatgtggtattagtgactttttgaccctttatttgattgtttgaatttgtttggcatagtgtttatttgaattgacctcaaatattttgtttttcttctagagtagttggtggattttagtggtcgtttgtgttaattttagccgttttattggtcgttgattgatttgtgtttaatttattttgtgttgactgaatttgttttaatttgaattgtctttttaatcatttgttggataaatttattttgttttggtgtttgtttttaaaagcaggttttgcctaatttcactgacatttatcccctcgtttacaaaatttggaagtgtaaaaagaagaaaccccgacaaattctccttcttttccaacaagacaagaaaaaagtcaatccgaaactcataacccaaattccttatattataaaaaaatatttatttgcctaggctcgtcgaaaaaaagaggaatttctctaatcaaaacagattttttctcgaacagagagccatgttaattacaaaaaatatttctcatctattttgactttagtgactataaaatctaagtttttttcttttagaaaagcatatattagtatttctgcattttgtgtgatcaatcaattggaaaaagggcaaagtgtgcttattgaaccaaaaaatg

SEQ ID NO: 107656 - DNA, 935 bp, Heterodera glycines
ctgaacatgatgaatttgatgccgccaaaaaaatgaaaaaaaattttcaaaatttatttaaaattttccccaattttttgatgtcgtcgtcgttgtcgccctcgctttccgcccgcttttttcacatttgtgttatgtgttcgcttgtggaaataaacaatttgattgttattgcaaaatatttaaacatatttacgttttttgaaattcatatttaattagtcacgaaattttttttttgtgaaaaattaaacaaataaaataaaggatttagtaatataatttttaaagaaaaaattcataatccataatcataaagaagaaattcgactaataaaagaaatgaagtctcataaaaatttataggcaaattaaaaatttaaattaaacttttatgtgaaaataaaaattaaataaaaccaaaattaataaattattaattagaaattgtttaaaaaatatttatatttaaattaattatgcaaaatgaaatattttgagaaaaaattggaataatttttacctaggtgtgaaaaatggaaaatgtaaaaatttgccgacgaaatttggcctttttaaaaatatttttaaagttaatttacatacatttgtcacttctattgcagatttttttaaataaaaatcgaatcgctaatgaaaaatgaaaaaatttgactccctatacaaacaaaatattgacgttgtcgatttattggacaaaattggattagctttaatatatttttttgttattttttcgaataaatatattatctaattgtacatttttattatatatattttattttttgcaatgaattcaggaaaaactaaaaaaattttattaaattaaattttattttattaaaaaatatatttatttttttttattaaagaaattctgcaacaaaaaattaaatttttgtttaagaatg

SEQ ID NO: 107657 - DNA, 64 bp, Heterodera glycines
agtacaaaaaatgggaaaaaggcagatgaaatgccgataaactgctgctaaatgtaattaaatg

SEQ ID NO: 107658 - DNA, 427 bp, Heterodera glycines
  unsure (1)..(427): unsure at all n locations
ctcactntcattgctctttaaaatctaatattttttaaattgtagctggcgttaggttgggttttccttttcacaattatgaatgaattgttttttttaaataatgagttcccttttggcctgcgaattaattttaaaaaatgacataaaaacgactgtgaaacccataaaaaaaatttagattttacgtcattacacagcttttttcgcatttggtgaacttaacttcatccgattactaaaaaggtaaaatcatcaaaatgaaaacgacgaccaaaagtaatctctggattgcattactatattttgttgtccgcacctttcacccgctcacattcaactgttttttttatttagcccgtctccgaaggcgacttgtgacttttgttttttcgccgaatttctctccgcgaccattttctcgatg

SEQ ID NO: 107659 - DNA, 835 bp, Heterodera glycines
agcctaataaattgcgtagtgaaattttaaaaaaatctccctcctaagctaatgtttaaataatttaactttttgaatgtgcccgaactttttcaataaatcttttggagaaagcgacgatccatcgactttttttgccaatttccgctgctttgtttggtcatcaatgttcttctgcttaaatcaaaaataaataatttaatcacaaatttttggccatttaatttattaaatattgaaaattcggaagactttaataaattattatatatttttaatattttatgcgctttattctgtgtaaaaccaaagaataattagtgcttagtttcatttcttcgataaaattgttattgtttttaatgtttcttccccattccaataatttttcaaaacaatccctcacggggaaaagagcatttcccaaattactaatcgtttatctcataaataatacatataaaagaataaaatttaaacaaattttcacattttaaggaaggagcaccaaaattcgtcataattccgagtttaatttatttgagtaattattcactaattaatggccaattttctctacggttttaaataacaaaaataaaaaattaattaatgctttattttgacgtcaaatcgattatcgttttgtgttcccgggagaaagaatttatttatttattttcgcccgttttcaaaagtcgtaattcaattttatgcatttcaatgctttcacatggcaaaaatggggctaaaaatagcaaatttaaaaagtaataattatttaattacatcactaaaatattataaaaatagtaattctatttttagaaaaatg

SEQ ID NO: 107660 - DNA, 113 bp, Heterodera glycines
tttttcacaaaaaaatttctgaatttgggctgaaacagttgaattcatgacaaaaaaaatcgaattttcgaaaattttagcgctatcaaaatgacccgacattcgcagaaatg

SEQ ID NO: 107661 - DNA, 250 bp, Heterodera glycines
tttaactgcccaaaacggactgccctccgtccacttgttccatgttagctcaatgctcaccaatttgttgaaggaaaggcgcgagaaaatggtaaacagaaagtttgggagttaataaaacgacggcttttaaaaaatagcctaatttttcttgaaatttaatatttaaatccgatttatgacactgggagttttgtcctgccaaatgttcaatattttgattctcgtaggtcggtccaatcaaaaaatg

SEQ ID NO: 107662 - DNA, 266 bp, Heterodera glycines
attgccgatttccgacatttttaatttggaatccgatttttgattgctaaattttttgagtcttcggaatcccaattccaaaattttgtaggccatcggaatgccgttttccgtttatcgaaaacatccctggtacatattcatagtttaattaattccacttttttcagattggtcgtattttttctgtgggaatttataggtgtcgtttataataattataaaaaagaatacttcaaaatatgtctattttttgcagtccaatg

SEQ ID NO: 107663 - DNA, 788 bp, Heterodera glycines
aaaattttgtatcttaggatcatgataaatttcagtacatattctatttagtgtatttttttcaagtgatatttgttttaatgctttaagtttctaatacgcaatttgttccattatcggaaataattaattgtgtcacttttcttcgcgtgatgtatgggcgaaatgctaaaagaatttattaggcaatgacattggtaagttattccaaatgaatttctcatacaaataagcaatggaaatattgctgaacaacatttgttaattaacatcaaaaatatttagggagaggggttcaatataatcaattacaacatgttgtaatgtatttttaccttttactgtaaaaagtggtagaggaggatttttaggataagtatatttattacttgaaaattttgatagaatggaacaattattattgatttataaaatttcgtaactcacccagttgcctggggggtacgtacccctcgtacgtcccccccccccctgggaccgtccctgtttttcgactataactcctttcataattgtccgaattgaatgtatttgatatcatccgataggcctaaaaatctttataaaccttgctaaagtttaaattgaaaaaatttccgtttttaaaaaagttgtgttcaaaaaatgtttggaaaaacaaatcctaagtcttttggcaataacttttttgaaattaaactaaatttttcaaaaatttacaaggaaattgagaactcttagggctatcgaatgatttcaaattcattcaattcgaacaggtatgaatg

SEQ ID NO: 107664 - DNA, 728 bp, Heterodera glycines
gccgggtcagcagaaaaaaaggccgacaattcataaaagcaaatcgaccatgctcgacacgataaaaaaaaagcttttaaaatgatttgggtggtgacagttcgcaatgttcattgtaaattaaaaggatggtaatagattagtgaaatgagatggaaaatagctttaaacacattaaatgaacagcaaatcttttcttatatactattttaatttaatcagttaaaatttttttagactatatatttttctgttgcttatttaagccttctcatttttctttttcactcacatttttattgctttaaatttatctgtggggttcaagcggtttattttttacaataatcagtttgcatcaatgaattcactctttgattatggtagtttagtgaattttcattatttcaaaccattttaatagacatttataaggttttgttcgttctgcctgctttatcgttccatatggatggattgacggacatttattactgcgcatttggcttctttatttttaacatttttacagtgtatctgcggaaagggccgaaatacacttaggaatttcgtttctatagggcatttttggcaaattccgtactgacgaggcccgatttgccaaaaatgcaaatgactattgctaattctttgctttgttttcagtgtcaataattgctcttgtgccaacatttgcctttagcttttgcaaaacgtgggccagaatg

SEQ ID NO: 107665 - DNA, 205 bp, Heterodera glycines
ttattttattaaattttttgaatgattttattttttttaattaattaagtttattaaaaataatttattttaaatattaaaaataataattctttctttctaatttagcccaaaaatctattgtttgaccttttttgtgcaaaatcatttaaaaatggagacaaattaataagttacctaaacataaaattataaatattttatg

SEQ ID NO: 107666 - DNA, 348 bp, Heterodera glycines
tttagaaatacgctaaattaaatataattaattaaaatatgaagcttataaaactgtagaaagccaattggattgggaatgtggccttaaagcgttaaaaaaaatttgatttcttattttaggtttggcgcttggcatggcgcaaattggcatgaaaacattatgccatttaaatttaatatttaaaaaatccggcttcgttcttcggtttaagtcaaccagccagccttttactgttctactgctccatatccaatgtattttgaactgttttttaaatctttgttttatggctcattcattaattagctcaatccgttcattaaagaagttaattgtggcccaatg

SEQ ID NO: 107667 - DNA, 76 bp, Heterodera glycines
tgcacggattcacgattcggcacgccttagttttgttagctaattcgcagatatgtagataagggatgcgcaaatg

SEQ ID NO: 107668 - DNA, 332 bp, Heterodera glycines
tcgcacaaacaacacattttggatacggatgtgcagcaaggtcttcaaatcatctgccaaaatattacaacactcttgtaaaggtattaagaatttttatataacatatttataatttatattaataaaaggatgcgtcaaaatgtccgcattgctctgccttgctcttcgagagagaagcaacaggccatgctgctttttcaaaatgttgtgcaaaaggccgtgtctctttgaccgcaaaatacgacggattacaagaaaggcccgaatacctcgaagccttatttacaaacaaagacttggaaactttgaggcgacaaaaacatctgatg

SEQ ID NO: 107669 - DNA, 73 bp, Heterodera glycines
tttttttcttttctgatattaacggatatacgaaggaaagggggaatctttcccccgttactttttaaaaatg

SEQ ID NO: 107670 - DNA, 437 bp, Heterodera glycines
tgcaggtcactttttcgttacaccaaaattaaaaaaactgaccaggttttcagttttattgtattttgatgctcatttttcttttgtttaggctcgcgaaatttggaacaaattgcttgagggggaacagtcgccctttccttggcttgaggcaattgctctcgaacgttcttacggcgatatttgtggctattttattttgcgtgttattccgcattattctgagctttttagggtacgcacgtcgtctctttttcaaggcacttgacgccgtcacttatcgtcaggatgaaatatttggccgatttgtacaatttgaacgggaggaggggacgagggaacaattggacttggcattggcacgagtgaacgccaaagcgacggaatacaacgcatggatggaacagcagaagtacagcaaaaccaaaccgaaaatg

SEQ ID NO: 107671 - DNA, 109 bp, Heterodera glycines
catgtcgcacaaatttcggtggccgagggttcgttggcggacgagttcaggcaacggcaccaccaaaattcggaaacggttggccacgctgcgggccgagtcggagatg

SEQ ID NO: 107672 - DNA, 646 bp, Heterodera glycines
ttctttgtgaggtgaaaaaagaaaacgaaattcgaatttgagtaccgaatttttgcggagaatgtcagaaattcaaaaaattgactcaaaaattggaagtagcgtaaatttggtttgagttcttgccaaatgcataaaatgctttttgaaaataataattttattaagaaagatattttaagtaaaatatttcacataaataataataattaaatttaatatttctttcatgataatttttgtaacttcgtctctccacattattgagcatatatacatactagaaagattcttaatgccaaatgatcaattacaaaaaagaatttagaatgaaaatgtgagtggcatagtgaagatcaattacggcacagtgccaatgctcaaattgaaatttggtggctttgacgtggacatttctttcgtttcgataccggacaggaaaaatttgccaaatgttttgagcgaagaaacaatggaaaaatatttgaacaaattttattcggaagaaagtgctaaatttgacaagcaaatccgaattttgtcgagtaattttttgtgtaaatattcataaaatataaaaattaacgtttaagttattaatggaacccgggttttgaagcgtttgtttattttatttttgctaatg

SEQ ID NO: 107673 - DNA, 75 bp, Heterodera glycines
tatagccctgggagctgtctgaataccggtcctgagtgttttagcccaacatttattagaaaaaataacatcatg

SEQ ID NO: 107674 - DNA, 250 bp, Heterodera glycines
ttgacaaataaggaaaaaaggcaaactaacagtcctccgaggctttagtttagccataaggcaaaaggcaaactaacagtcctccgaggctttagtttagccataaggcaaaaggcaaacaccttgtcctccgaggcaggtgtttagtcacaaaaggtccaggaccaaggccagactgatcccggaaaaagacacaaaacaacaagtgcaccacaacacacacacacgcacaaccaaactgcacgcaatg

SEQ ID NO: 107675 - DNA, 172 bp, Heterodera glycines
aaatgtgaactcaaatgtttgattgtttttccacatttcataaatgaaaacacagcagacagaagattatacaatattagcattttaattcggttgttattttctaaatcataatttgtttttgaaaatagcagtttggactcatctttttttccttgtaatttttgggatg

SEQ ID NO: 107676 - DNA, 110 bp, Heterodera glycines
ttttgacgtgtttcgcattgttgaaaggatagttttataaaattgttaacttttattgtttttgttgtaaaatattgtacattctttttttgttgaaattactgtaaatg

SEQ ID NO: 107677 - DNA, 121 bp, Heterodera glycines
ataaataaattcaatttaaggtcaacatttatcgactgctctcaaagggtctgtggaagaagagatcgttgaaagggccaaacagaaattagtgctcgaccatttggtcatccaaagaatg

SEQ ID NO: 107678 - DNA, 937 bp, Heterodera glycines
attccgtaagataccttaaatttttgtcttagcgaggttccttattgcccgggaatatcactgccaacacactcttctgatctttttgtctgacaattccacctgtttatgtttgattttatttaaatctgctgaataatcccccctcttttatgtttttttgcttgatcgggttgaatacaatttacttgattttgtctgtctgtatttgtttttaatttgattttgtcttgaaatcaactcgatcacgttctcctctcctcccttactcccagctttgcactccgtccatcttcaatatatgcttatatcataaacctatctttttcaattaaaagccttttatgattggatatgcacaaacttttgggaaatctttctacagtaacaaaagtaatttgatattcaaatacaaaatgatcgggtcggaatcgattctggcaattgttatggtcgaagctataaggcgaaaggaacaaataaaagcaaaagtgcttgacaattggcgatggtttagccattgctggcaattatttgtgaaatttgaccggacggccaatcaagccgtacatggcggccttccttcttgagttcagcgaccagatcaaagacattttcgtcccagaaatggtcagacatgaaaatacctaaaaattttcccttcaaaatgagtataaaatggttttgtttggtctattattgacaaagaaaagctaaaaaaaattcataaaaaatggtaaaacaaaatgtctatttttatgtttgtatttgttcttttggcgttctgtattcacaaaaaaaaatttttagcagtaacaaacggaactcaaatgtatgtatataaagaggcgttttcacacacttctgcctattccgttcttgtttcatcagcaacacatcgacgtgcccaacaaccgcaacaacagcgacaacaatg

SEQ ID NO: 107679 - DNA, 218 bp, Heterodera glycines
atagagaaaatcgtgcgatagaaatgtttctagaaaattctcgccatcatttgaatgcgattaaaaaagggaagggaaggggggggagagattttgtatgctcatccaaagccatttctgctgctgggccatccctttccaagcacacaatttttattttatcgccattcaaaaaaggaagctcagcttaaaaatgcccttcataaacagccaaaatg

SEQ ID NO: 107680 - DNA, 511 bp, Heterodera glycines
tgaataaaatggagaaatgaaagggaatgaatggtggaggtggggggggcacaaaaaaaggcactttcgcacagcggacgaaaaacggccaaatcgcaacgtaagagcggaaaggagagaatatgccctcagggggaacggcccaatcagcagggacaaaggaagcgccgcgggacgaatgggcaaaaaagtaagaaatgtgccaatataaaaggggacacattctcgccttatcagcagccagcatttcttcattctcttaacaacatttcggtttttacttaaacataaattatatttctaaaatttatttatttgtttctaccgaaaaaataatttaatttttaaaaggaaccaaaaaattccattttactcatcaactcaaaatattttattccataaaatgcacatttcgatttatttatacaaaattgtatccaaccaaaaagcattttaaatttgaaaattttaactcaaaattgaaaattcgcaaaatttagcgtaaaatatg

SEQ ID NO: 107681 - DNA, 364 bp, Heterodera glycines
ttttctagaatttgaataaagaatgatttcgatttcttgctgggaatgatttggtgcgcaagtgggcgtggccaaagtgcacacatcgtatacccgatcattttcccgattcattttaaaaattttgcactttttttttgcacattgctgtttttctgcgctttatgggcaccgtattatttaattgggaatttagggaaccgtataattaaattttattaaaattatatgagcatgcttaaatgtttattcatcttccgtctttcacctccttttattcttcacactatttccatgctttgcgcatataaataccgaaattttgttcactcctcctcaatccctgcacagatttaaaaatatg

SEQ ID NO: 107682 - DNA, 262 bp, Heterodera glycines
ttatggtgcctggttgaagcaactgaaagaaatggggagaattgtttaatcatatttataaaatatattttaatacataatttattttaattcgatttatcattttcattttaaattaaaacaattttggtttaattaggaaaagcatgtttgaatttttgatcaatttttaaggccgagctgtgtttgaccaagcttgccctgatgttttcaaccatctccgcaatgtctccggcggcaacactttatgcatttaagcatg

SEQ ID NO: 107683 - DNA, 464 bp, Heterodera glycines
acgtttttttttgaaaaatttcaaatgttgataaaaaaatttcactatatgtcgtcactttttcatacatttttgtgaataatattcaatattaagcagttttataacaaattcatgtcattttttcgggtgggctgagtccaagtctagcctttaaattccatattcctggcggcgacggttaggcaccaaaaaaaagatgaaaatgaaaagatccgcgcgatggatttaggaaacgctaattatgtggctgaatttaggaactatcgcagcacgacgaatgctggccaaagccaagttttttttttaattcttcggttttgataaattttttaaaattttctcatcgagggaaccaccatctccgctccactggggtacaaaaactttttaacagaaaagctcagcattttttccactaaataaatattctatacttttaaggtgaaccctccactcagatg

SEQ ID NO: 107684 - DNA, 404 bp, Heterodera glycines
  unsure (1)..(404): unsure at all n locations
aaataaaatttaattggtttgaatcaaggtaaaaaataagcaagtgattgaaaaaaaaatcagggacgtgtccaacagcgctcaaatgcccaaactaagctttanccaggctcttagcgccagttcagatttagttgtaggacccgtattacatttgtggaggattatggacttttttaaaataaaaaattaacaattttgtttttaattattgttcatcaagaatcaatgtgttttcacaaggttcatttaaaatggcaatgaccaatgacggggaggctaattaacgaaaaagcattcaattagtaatttatttttgtctttaaggagcgccgggctccagcaaatcaaaatttgcgcaaaatatcgccaaaaaatatgatggattcgtgttcatcagcatg

SEQ ID NO: 107685 - DNA, 1003 bp, Heterodera glycines
  unsure (1)..(1003): unsure at all n locations
tactcttttcatgtcttcattttctttgtncatgtatttctttctctctgtntatgcttgcncaatacacactctttctttcatctaatttctctatagtgtctgtgttactctttttatgccttccaatttctctacactattttcctcaactttgtttctctatatcttcaattcttcacttcactgacaattaatagtatcgattgaccctggagacgaggttggcaagcattgctctatatttcgccacttgctcataattatttttcatttacaaattacttttttctaatttaccccccccccatttaatgattctaactgcagtcctaacatgtttattctagcatttatttaaaaatcgaattatcgaaataaatgattaatatgtagattaaaagaccaaaatctctttttaattttaagatttatcggaatgtggaattattgagattttttggctaaaaaatgctagggaacacgggcagacattgaaaatgtttttttaaatttaaaataaaaatctttaaaaatattttcattttgtgatttttaaaaatagctatttaacaaaggaattttatgcatcaaaaaatttcaaaaaacaaaataatacaattcaaacaaataagattaacatttttaaattggtgtagaaatcttgtacatacctaattgtttaggaattaattaattttaaattttatatgaaattgttttacttagattagaaattaaacttgcattaaatatttaaatacaattttaaatatatacagccacagcttaaatcaactatatgtattgtggcttcagttgaacaaatttaaaaatgattgcatctaatttaaaaatatccagaaacaaaattaagccaatcaaatgaaattgttttggaatttttcgttcccaattttgtcgtctacaaacattcaccataattattgatcaacagtaacaacacacacaaaaaaatacagtagtccatccattcataatg

SEQ ID NO: 107686 - DNA, 286 bp, Heterodera glycines
acaatggaaagattgggaagagagcgatgaaaatcggtcgaattcgcaccgaaattccctttttgttgagtacactttcctcttttcaccaggcccccctctccgttcccttaacgaagacgtcgtcggccctcctgagaaattgttccgacccgacaatgtttcatcgactgatttgacgatgtatcagaaccagaaacctgtgggcactcgaacgagcgcaaccatttcaccagcggaattaaaaaaacgagaaaaatttatgggttcgaattctgtcgaaatg

SEQ ID NO: 107687 - DNA, 69 bp, Heterodera glycines
ttgtgtggacaaaggacgacagaagggtggagaacagtcgtaagcaaatttaccgtaattagttccatg

SEQ ID NO: 107688 - DNA, 949 bp, Heterodera glycines
tgtccccatcactttctaattgctttgcattcaaatttcactctcttctttttaggagcgttcctcgtttattcagcatcgccattgctccaatttgttcccgggcttatttggacgcttctaaattaaagcacagcaaattacctatttcctttgtctattgcttctgtttttgttgctttaatgtgtgtattttacgatttctgtctgaaattttacgataaattgaattttaaaagcatttccaactcaaaatgcaatggcattcatttgttttgtaatcacattttggtttcttatttttactttttccattcgcatattattaattgcattttgtctttcgaatgcgactttttccttccaattcgtcccgttgccactttttgccactctttcgccgccacctttcgtccgatggtggcaaacccgcaacaaatgcgtcgcttgcatctgccaacatggtgttttatttaaattgtcgaatttgtaaatttgaaaatgcccatggattttattcccaatcttccgtcctttaagggccttttcggcaattttcttctccgttctccgcacggctttgaactgctcacgcgagcggtggacgcaaagtcaaacgaatttgtgaaggaaattgtgcaaagagcggccgaaagggcagccgacagagggaaaaaaatggcaaattttgcatttgtttgtacactactgattttatttacagaaaacgacagtgtctctggtggacgatctgtccaacgaaatttgttcggccgctgatttggtgattttttcatctgatggcggggggggaggaagaatttcggccctcgtccaattaaatgcctcaaacagagggccacggagctaaattcggcgcttagtttctgggagacgcatcataatcggagaattgttcccatattagacggattgcgtccgctgtatg

SEQ ID NO: 107689 - DNA, 167 bp, Heterodera glycines
aaaagtccataaaatcaaaaatttgaatctccaatgttttcttcttcgactcggcttcggcttgggcatttgaaattggcttttcgaagcgaccccctctttaaataatgccgaaatttttttaaaataaaaaaaaaaaatttttttttgtaggtcgcacttggatg

SEQ ID NO: 107690 - DNA, 656 bp, Heterodera glycines
ggtttgtggccaccagtcggaacatttggttcgatgtgccatttgcgttgaagagaaggaactcggtgctaaattgcgtttccacgttacttgcgcaccgctggccgatgtcattttcgagcgccgcgaattccccggggcgttgcccatttgtgtctttcaccacagtgctcaattcgccggtgcttttggtaatatagcccattcaattttgctttccctcccaatcgcttctcgcacactcgggtttggaccgaaattgctaattgtgccatttggtccttttgtgtgtgtgccaaaatgaccgttgcgtctgaaacccatttgtgcattttgcaaaatgcacagagaaatgacgcaaacaaaggaaatgaaaaaaattggcattttgctacagctgttttatcaaccctcgttttttgtcagatccaacagactcgcgcgtgtttgaactcaaacagcgcgtggtcgtggacctgaacgaagagacgggcgacgacgacgaggaagaggaggagaagaaagacgagcgactgatcggatacgggctgatatactccatctcggaacatctgtacgccaccgtggatttcttggacggcacttcctcttccgaggtgttcccaagtgacatcgtcgactgcgagtgcaaaatg

SEQ ID NO: 107691 - DNA, 111 bp, Heterodera glycines
actttaattctgcgttggatttttgctccccataaatgtttgagtaccccaaacggacacttgaaaaaatcgatttttttgtttcataaatatttttttcagaaagtcatg

SEQ ID NO: 107692 - DNA, 171 bp, Heterodera glycines
attagagacacacttccatacaaaaaacaattttgtgtccaactcgtttgtctattcaatctttgcttttgccagactcagaatccgcgcaagagacggccccaaaatgccaatttggcattccaattaaactctggcccaatccttacaaatccctaggtgttccttatg

SEQ ID NO: 107693 - DNA, 662 bp, Heterodera glycines
  unsure (1)..(662): unsure at all n locations
gtgctttttgatggccatagattctgggattaaactcacnagacgaatgaatttcacgaatggaaatttaaaaaaagccaaaaaaaatatataaaaccaaagggaaataggtaggaggaaaatcccccaaaaaaattgttacaaaatcacttaaaatttgataatttctttaaaaaaaaattttttttttaattcaaatttttttaaattctggagctactaattttaaaaaaacaattttccaaagattaggtctcagcttatctgcccagccttcttctgtttttatgttctctgttggcccaatggaggcgccgaaaaatccaagtgatcgtcacaatgggcgctctgttggccaatttaattttatttgtacggaagatattaattaaaagaaaaattaaaaattttattttaaattttacaaattagattcgatttttgtttaaaaaaaagataattaaaagaacaaaaatctttaacttttacaaatttatttaatatataaaagatttcataaaaattttccataaaaattccattttccgattaaaaaaaatatacatttaaaggaatgaaaattcattttcaattttatttaatttcttttcaattttaaaataatgattgtttaaataatatttttatttggattaattatg

SEQ ID NO: 107694 - DNA, 1003 bp, Heterodera glycines
gaaatttttgataaaaagtcggaaatttttttttttgaattttttttccaaaaatttaacaatttttgtacaatttctgttaataaattgcactgaaattttcaaaaaacttcaaaaagataccgagtttgaataaaaattgcaaaaaaacaaacaaaaaaccattataatttatcttcacagttttaaatactctaaaataaactttgcaggaacaacattttcctttcgttcgaatttaggtcatttcttaaaaaaacccgaaatattcgtgattttaaactaaaatttaagaatacaataaaaaaaataataattttgattttaaactcaatcgcggaacattctcatttcttttttctttgaactcgccatgtttcagaataatctgtttcataataccggtactctgtgaaaaattgggaccttactagccgactctgcgaaaaccatatcggtaccagttttttcttctttttttttggtttgtaacggtacgaattggtatttatccaaagtgaacattttttttgtttttttttaaatttttaagaattcaagttattctatttttctgcttaaaatcataacttgaatcaaatattcacaaaatcaaagaacgagacgaaataaaaaaaattttcaaaaccaccaaatgtgaaggtgtaacattgacctggaagatctttattttaaataaaattttcattttattgctgtaattaatttaattatattttgtttctttgctttttttacgtgtaacaatatgaacattcttcatttgcatgtgaatacataataggtaatttcaagggtgtttttaacaactatgttttccctcaccctccctatcccctccggcatattgcattgattttttgttgtttcttttttacggatttaaaaacttaattattttgcataaaaattattttttgagaattttttttgaagaaatttcaaatttaattaaattcagctacattatttaccgataatg

SEQ ID NO: 107695 - DNA, 1003 bp, Heterodera glycines
attgatcggaatgcggacaccttgttcaaatcagaggcatttttgcaaattgaccagaaattattgttcaaaattctgtgccgggatcagttggttgtaagccaagaaattgccatatggaatgccgtaaatttttgcattttgtaaaaatttaaaattttgcttttttgggtcgattcttaggggtctattttttgaaaaaaaattttaggtcgattcttaggggtgtatttttcgtttttattgcatttttattataattttggacaaaaggcaaaaataggttctttcaaaaaatttttaggcttttaggctctaaaaataaaaacctagaaaataggctctaataactcgaaaagtagcttaacaacatcccaaaaaaccatgttttagtgcgtttcaggccacggggagctcaggaaaaaataggcttttgcctaaaaatcccagccctagtgaggaccgtggaaccaagctactttaagaccaattaattgttgctgtctgattgtgagatcgaaaaacccttggctttagagacttttttttgtatgaaaatgcggacgatttgatcaaatcggaggaatttttacaaattgaccaaaaaacattgtgtgaaattttgtcgcgtgacgaattgcaaatcaatggagaaatttcaatttggaacgctgaaattattttacaaataaattaaaactctaaattttattattcatttatttattttttaaattaaccattatttcctatttatttttcggcactccgttgggccgatgcaaaatgccatcaaaatggaattgaatgctcggcaaagaatcgtcgtgccgttctcggcccggcactgttcaaaattcgctttccgcttttctcaattgagaaattttcgaagaaaattggtaaaataactaatatcaaattattaattaaaattttttcaataattttaatttttatccattatggcattgattgttcagcagagaatcgccgtcaaatg

SEQ ID NO: 107696 - DNA, 109 bp, Heterodera glycines
ttccttggtctgttggatcgggtcggggacacagctcgcaacccgcgaaccaccggcgggagtggaggcccgcgggcaggacaaacccaaaccggtggcaaatgccatg

SEQ ID NO: 107697 - DNA, 558 bp, Heterodera glycines
aactaaaaatgctgtagtaaaggcaggaacaaaaaagaaacaagatacagtggcattgctgttatgggaaaatgatggatatgactagggctgggaattatattggatataaaatccaaaaatatgtccataaaatatggaccaaaaatcgcaaaatatgggcataaaattacaaaaatatgggtcataaattttccggattggagggaaaattttccaaaattttaaaattaattcaattttactaaatacatctaaaaatggctaatatggtattaaaatcagtttagaagaagaaaaaaaacatgttaaactcgggcaccaatttttagtttcgaaaaccgttaaacctaaacccacaaaaaagtatgctaaatttgatgatgcatatttggggatgccattttttaatacagattaaaaaaaaatcaattttgttacattgccgaaaccagctgttccattgagttttgcggaagagttcaaagtggtaaaatcaaattttgtgggcccccattgtggcgcgttaatttcacgttatataataatatccagatg

SEQ ID NO: 107698 - DNA, 1003 bp, Heterodera glycines
gcaattgtgaagattattggtcccacaaaaaaaaggaataaaaattcaaaaaacacttttctaggggttatttggtgcgctgagaacgaatttgaccttcttttgacttaatttcgaaccccgaacccggattcgaacatttgaaaaaattcaattttcaatttttgcaaatattgctgatgcattgcttagtactgtaactacaatatgagtaaaggagaatcgattcgaaggggaaaacgcgcttcttcaaaaaatgaccccgccctgattgacactttctgccctttgtgtgttgggcaacgccattggcacccgtcaaacgtaaaggttggatttttgacttgagtcatacgccgcgggcatctatgccgaccacagatgggggcaatttgccgtaagagaccaaggtttcgcatgtatgcgattgtatgctcattggtttgaaattgtgaacaaatttcaaaaatatccattgctaaattgttagtaagctaatagtaaggttagatgaaaatgttctcattgtctcttttgatctggtcattattattgaccgcctattatgtcaatagtttgcctgatttcataattttttgtttacgacttcatccaactgactcgatccgtttgttattcaaagttattgattaacgtatgtaaatggcatcccaacaaagtgtccaagccacgaaatgtccatccacgaaatgtccaagccacgaaatgtccaagccacgaaatgtccaagccacgaattgtccaagccacgaaatgtccaaaagagtaaaaaaccacgaaatgtccaaaagtctaaaaagctcataaaaacccgaaaaacgggtctaatttagggttttcggggtcactgagtaagaatacgacctttaaataacccatttcctaatcctagacccacacgaataagaaaaaatctcaaaatttgtttaaaatttatgcttttttttactccagatttttctattcattgatcgaactaatg

SEQ ID NO: 107699 - DNA, 1003 bp, Heterodera glycines
tttttaaatatgtatacttcctgcctgttatatgcacgccgaaatacagccttttagagcgaaaattcttcgattaacatcaatatacttcaaaatttaaaaatatataatttttcggcttttttacgattttgttaaatattttttgcattaatcaaagttaagtaatcataaaatgctaaaaaacgaaaaatacacccctatgaaatgccaaaaaaatgctctaaaatagaaattttcaaaatgtatccataaaaatgttatttttaatgatttttctttattttgtggctttcgaatgtgtaaataagatattaatttaattacgaaaaagttttcagctttaaaaaatttcttcgctttaaaaatttcaatatataagaaaattttgccattatttattattttcaccaaaagacaaatttttagttatctatctaatatattaattttgcaatgtatgtgtgtcacaaatatttcgaattttttattgacacgaaatctttttaaaaaaaaaagttttttgacacgaaataaaaatttcataagatatttatagggatgcgatttttaggcacaaaaaatcgcgaaatatgcacctaaaaaggcattaaataggcacaaaaaagcccgaataggcacaaaaataggcaaataaaattttttattaacgctttttaggtaacaaaacacgttaaaactttaaatatttcaattgtaaatgaaattattaatgttttaaagttttttttcgaatatgaacaaatttttaaaccaaaaaatttttattaagaaaaaaatattaaatttagggataatttttttgaaaaattttacaattcttagggtgtattttctgaaaatttttttgggtttttttgtttttattgcatttttgttaaggattttttcaaaaaccctaaaataggcactttaggcacaaaaaccccgaaataggcaaagttaggcattataaaagtcatcgtagacaccccaaaccatg

SEQ ID NO: 107700 - DNA, 187 bp, Heterodera glycines
ggtaggaatatttaaaattatataaattaaactaactttgtatttttaagtgcgttcccggcaaaacatttgttggaatgacttttgccggctctgagccaaatttgccctctctgctgctgtactgtcatgatatttaaatttaaaattagaatttatttatttgataaaataattagagcaaatg

SEQ ID NO: 107701 - DNA, 610 bp, Heterodera glycines
gctttgaagggttactgtagcgactgaaaatcgccattaaaaacaaaaatttcttttatggccttacagtatttagtagggttaagctccaacccctcgggaagaaattttggggtcacgggaaagggagaacagcagggatcggggagctcagggtcgaggcttattaaccccagtatttaggggtactaggtcgtttagtaaaatccgccattttagttagcgattttttcaacaaaacatggtataactttgcttaaaggcagtcaaatttcagattcttgttatcattcgatagccaagctttttctctattagcttgcgaatctttaaataaaattgtcaagcttaacatgagttatggaagaaatagtacttattttcatacaactttttctaatgtttaaccaaattttttaaattttgcatgctaattgagaaaaagcttggctatcgaatgataccaaaaatgtaaaattcgattgcatttaagcaatgttatgccatgttttgtcgaaaaaatcgctaaaatggcggattttaggaaacgacttagcacggtatttagggcaacaattagtatgtgttgtttattttcaggtccggtatg

SEQ ID NO: 107702 - DNA, 366 bp, Heterodera glycines
cgttctttactcatatcagacaggtattttggcatttattgtaataatttggggaaattggtttggttttgtcagaagtgctcggtttggaggtgccggtttcgtcaatgattcgccagtcagtcagcggattcaactaagtccttttgaccatcccaaaaaagtgtctattggacacatgtcgacaaaatccgaagctgttgatccagaagtgcaggcccaacttgacctccttctggccacacttaatttcgaccctcaaggcattcgattgaaggagcatttaattatgaattttcgaaattctaaggtctcggcgctggtggaacgggcgttaccattgaaagggaattggaggaggaaatg

SEQ ID NO: 107703 - DNA, 864 bp, Heterodera glycines
ttgtgtaaatgagggggcgggtggggaatgccttgtccgtacgtctcttccgtctttcttttttctttccggcgccctttaaattttttaattaaatgcgcagagacgcaacagaagggcaaaaacactgaagggattggcacaaaacattcatttctttggcattaacagatgataagcttgtatagtttttttcgcttttaataacaaaaaaaataattaatttaaaatgaaaaatattttgaaacgcaaaaaaatgcaataaaaaagaagtaatttttggaaattctttaaacagagaattacttaaaaattgacaaatttacaatttaaaatgaattaggtatattttaaaacgcaaaaaaaaaatatgaaataaaaaaaataattttttggaaaaattttgacagaaatatttaaaaatacgagcggaaaaatgttttattactttttaaaggtaaatattttttgaaccaattatgataaattcactcctaaattcctttttttttggcttaaatggtcaaaaatatatttttttgaaaaaaagaaggcaacaaatttataagtagggctggaatttttttgcggcttagttatggcgagagaagtcccaaaaatagcattttctccgaacaatttttgatttagagcgacttataaaaacataaaaacacatattttggcgttttggcacataaaaacatatcgcacatatttgggctattttggattttttagcacatattttggcatttttgagaaaaatcgtaaaaaaatacaagaaaatctgaaaatgcaccctaaaaattgactactttacgtttcttaagcatttagaaaatttctttatatatttaaatg

SEQ ID NO: 107704 - DNA, 355 bp, Heterodera glycines
ttctgatcaatcattatttccagcttggcattgattaaaattttgaatcgattattcccgatcaataccacttcaccgatcaatcaaatattttttagcttgcattgattaggttattaccggtcacttaatcaatcaacgtcaccatcctcatcaatcaaatatcgctcttatcaatcaatgtttccctctgatcactaatcaattatatcactacccttatcaatcgatatcgctctgaacaatcaatgtttccctctgatcacttcggcccatatgttatatatatatatatatcattttatcaattattatcaccgtcctaattaatcaatatcgctcttatcagctaatg

SEQ ID NO: 107705 - DNA, 1003 bp, Heterodera glycines
tgataaatcaattttagtaggaaattgaaattgatataggtaatttaattgttactgcacgaaaatgagcgatatgattcattgggtttttaacgttaagccttgaagcttctagcttcaacttttaattaatgtatgatcactaaattacttgaagatttacttgaaaatacacattttcatttgtaatgggctgtgatataaaaggaaaagaaattttttgttttatattcgctttcttatcacaattttatgtggtggatttgccaaagtttagagagattgccttccctttctcacaaataaaaatgagttatgataagaaaaaaaaaaaagaattttttttggaggggtcgtctttcggcccgttgaacaaatgataaagtttaaatgtgagaattgttgtgtggtgtgtttgtgttatgttcagcagaatacttaaatacctatgtgatggaggaacggcacggaaaaacgatggcaaactaaaatgtgcaaaaagataatcggaaaaggggcatcacggtgatgtgatggacctggaccttggaccccacaaaaatcacatgatttgatttggacctcccccgccccgttttcccctctttcttataaagaaagtacgcacattctctttttggttttattcttattgcatgcaataacagttctctcttttttgggtgcggaaaaaaaaagtaattaattaattaattgtcggacatgaatggaaaatttttatttttatagacagagaaattattattagattttagtaaaattagtaaaaaataaataaataaaataaaataatgcatcttattcatttagaaatgtttaaaaatcgttatagaacattcgtcttattgttagagagtgttttaatgctgcaaaagtatattagcgatttttgacaaagaattggcatatttttttgatcattttgtggttcagtttgagtttgtttatttatacattgcaatgatcgctgacccacaaaatg

SEQ ID NO: 107706 - DNA, 294 bp, Heterodera glycines
agccatccatttttggcaaagctcatcagctatgcctccttcgaattgcacaatgagcaactcattccagcaagaagcgctgaagaacgctcactcatcacgggctcagattttcttctgccggttcaagaatgtcctgtgggactaattaatgctttctcatcatttcgtgtggacccaaaaagcgattcgctcacagatgaccatcaaacagaagtggcatcgttcttggtacaagcacttttggaacattttggcaacgctttttcgtccagaattattgttctgtgtatg

SEQ ID NO: 107707 - DNA, 488 bp, Heterodera glycines
  unsure (1)..(488): unsure at all n locations
aatctcgaaatctcattttcgagttcaaatttttgtccaatcccataccatccaatttttcgaaattttattttcgagttcaaatttttgtccaatccccatntagtctaaaatttcggaatctcatttccgagggtctaaaaattttttttttgtttgtgttttgttttgtttttttttttgttttgtttttgacccaaattgtccaaactatccgctcttgataaaatcagagtcttagctctgacagtgcgtggtaaaaaagtctcacaaatcgtgaatcgtgtacccttccccctttctggtttttgtttccccctttctggtttttgaattactgattctcaactcagaacgcagttcggttattgattaaattggagtctcagttccaaagttttaaattgttcggtcacagttcggttattgattattgaattggagtctcatctccgaattttcgaatttggtcattgatttgagcaatg

SEQ ID NO: 107708 - DNA, 357 bp, Heterodera glycines
tatcgttcaaatggtatctgaattgaggataaaaaaaattatgaaaaagcctaaaactttgggtttttctggcccttatggcgggaaaaagtacgtagaatatgggctgtccagaattattattttttttttctagacgcgaaacccaaaattgaccctaaaatacgaaaagtctaggcccaaatgtccaaaaaaccgtattttcatactttggctaagttaacaaaaaaaaaaatgtgccgtttaaaattttgccgttcaatttttggcaagccaaatatgattggcattttacaattttttaaatttaatataattaataactttttcatttccgcattatactccagccgcatg

SEQ ID NO: 107709 - DNA, 194 bp, Heterodera glycines
tcattgacgaccattgatccgccgatgaattcaaacagtatccgagccacttcggcactttcgccgacaattctcaccgatctcgaccaattgaattcaatctattccggtgatttgttgcccgaggcgattggtgatgatgattttgatgggccaaatgcaacaatttctgctggccaaatgttgtcaaaatg

SEQ ID NO: 107710 - DNA, 99 bp, Heterodera glycines
aaagggattataataaattaaatatttgaaattacaaaatggtctaataattgtttaattccatccaattaaattattttttacagccatccaaaaatg

SEQ ID NO: 107711 - DNA, 288 bp, Heterodera glycines
ggatgggatttttaggctctaaaaactgccaaaatagtttggctctaggctctaaaaaacctaaaaataggcactaaaaaatggaaaataggcactaaaaaaccttttatccctcaatcttgatatcatttgaaagcttttaacatgctctattagccttattaaaaacaaaaagattttctggcttttaaaaaagtttttaagaaaaatgtataacttttttggtaattgtctaatcgcaaagaaataacttagaaaaagcttctaaacaccttaagctttcgaatg

SEQ ID NO: 107712 - DNA, 267 bp, Heterodera glycines
aaggacagtgaatccagtgaacccaaacaaagaagggagagaccaaagccacaatccaagcaaggccaaccaaacgcaactacaactcagcttcaatgttggagatgtgggaaaacgaaccacacccacagagaatgctcgcacaaatcggctaaatgtcccaaatgtcactacaccggccatttggagaaccaatgcgaaaaagtgcaagagtggcgccgcaaaaacttcaaagtgaagaaagttggaacacttagcattggaatg

SEQ ID NO: 107713 - DNA, 118 bp, Heterodera glycines
tttttttgagaaattttttatcaaccaacgctctcggacaagaaacgaaatgggggggggcatgggcatttttatttttcaaataatttttatatttaatagatattccagaaaaatg

SEQ ID NO: 107714 - DNA, 108 bp, Heterodera glycines
tcaattttcccctaggaacaaaaactttaacatgatacaaacttttttgggggaaaaatatttggtggatttttggagacaattctcagacgacaaatttaaaggatg

SEQ ID NO: 107715 - DNA, 968 bp, Heterodera glycines
agaaactgatgatgaacatcgattggacgattaaacctcaaaaccatttttcaatgaaaatctgttaaaaaacggttaaaatttctattttttctcccgcgacgcctatcggcacagccgagcccccaaaaactcttattttttcataaaaaattggctcaaaattataaaaaactagtcattttggtgaaaatatgttaacaaattgcactcaaatgttcaaaaaaaaagtgatcacatttgttcgtcacaattctgatttctccataaataattgtgttttgtagcataaattatttaaagatttacttcaatggatcgaaatagaaaatcataagcaaaatgtaaagaaatatgaaaatgctcttttataaattggattggtcgataaaagtaataaaatgcaataattatattattaatttttctatatcacagctaatagttacgggacattccggggctcgaaaaagctgggatttgggatgtcatggaacgtcctgctgctgtgtatcgagtgcggagcgaatgggacacggactaataaaagaagaagaaatttgtaaatttactaaaaactctgcagttgaaattttcaaattttacaaaaagttcaataaaattgaaaaaatacactcctaaaatcaatttttcatatttacaaaaagatttatttttatttcgaatgatgaaagatgccaaatcgaattgttcattaattggtcatttggatttacgaaattccttgctggaattattcaactgacaacttttctatttataaaataattttatcagaaaaatgaacagttttaccctcgaacacctccaaagcaaaatttcatcaaatacgtcaacatttcgctgttttggtttacttcagttgggccccacacatttgggctctaaataaatcaaagaatttttcaaagttccaaaaaatattttattgaaaataacaaaaaatg

SEQ ID NO: 107716 - DNA, 661 bp, Heterodera glycines
tttatgaatcccaacggggtgggctgtctgtttaaattgggctggaaaaataaagaaattttttacctacaccggcttccctttaatataccaaaaaaagtaaatttttaaataaataaattattcaatttaatatatttctgattatttaaattgaaaattttagtttggaaattttcgaagcaatggttttatttttcaatttttaatttaattccctaaatgaaattgttaaatacattttgtctgagcaatttaataatgttgttttggcatgaaatggtgtaccaccacaatttgtccgcgacggtcattttatgtacatttttgcctaaattgcagtcaattctaatccatcatttcatgtttgcctttctcgccaagcatttatcatcatgcctttgtgttgagactctatttacacacaagtccaaccaaattgtggtccattaattcgaaaaaaaatatttttttttcctacaatcaatcgcaaattactgggaaaattcaacaaaaaaaaagaaaacaagttttcatcataaatgatcggagagaataaaattattttatgttaaaacaatgaaaatatatttcaaaaacaataaataatattaattatccattaatatgattgcgtaaattttttctattattttaaatg

SEQ ID NO: 107717 - DNA, 910 bp, Heterodera glycines
gagagagagagagagattttgagagagatagagatttgagagagagagagaggggagagagagagagagatttagagagagagagatttagagagagtgagatttagagagagagagagagatttagagagagagagagagatttagagagagagagagatttagagagagatagagatttgagagagagagagagagagagagagaggggagagagagagagagatttagagagagaaagagatttagagagagtgagatttagagagagagagagagagatttagagagagatagagatttgagagagagagagaggggagagagagagagagatttagagagagagggagatttagagagagagagagatttagagagagatagagatttgagagagagagagaggggagagagagagagagatttagagagagagagagatttagagagagagagagatttagagaggggagagagagagagagaacgatcggattggcattttttatttaatcatcgaaactacttccaatgggattggcatttatatcgtttaaatgaaagaccgtctgctgattggattgaatttgataagttttcccattaggaacatgtcggcactgctccctatgatccaattttctttttgcaccacacttttattgattacgttggttttttattattttacataatcataaatgaaaacaaaaaacaattttattttaaattaattgtttccgatttatttaatttttacagatttgggagcagtggcgtttgcgcacacagcacagtttttctgagcgtgaaactgttttcccgccccaccatcaaattaaagcggtgtttagcaattaaataacaatggccatcatttttattccaaattaaaaaaataaaaatg

SEQ ID NO: 107718 - DNA, 88 bp, Heterodera glycines
ttttctttccccgcagctaaggcaatgggttgagctgtcgtcggatgagcaggtgccgccctcactgttgttgttgacccgtgccatg

SEQ ID NO: 107719 - DNA, 137 bp, Heterodera glycines
tttattgtccggtccgattttggaaattgtggttttccggttttttaatccatatatgaaaaaagacatcgatgctctggaaaatgtccaaaaaacatttttacgtattgtttttagacgtaataataataaggatg

SEQ ID NO: 107720 - DNA, 105 bp, Heterodera glycines
tttttttttcattaataaaaaaaaaattataaaaaaataaattctttaatcgatttatatgccaaaaaatccccccaaaaaataaaagaacacttttagcacatg

SEQ ID NO: 107721 - DNA, 74 bp, Heterodera glycines
acatcaactcaatttgcttgtttaatggcgtcttcttatgtgttctgcgcaatactttggcctcgactcaaatg

SEQ ID NO: 107722 - DNA, 208 bp, Heterodera glycines
cgtgtcaatgagcacagtcgcctttggccagtgtgggaacggaaaaatgggaatatcagatggggtgcgctctttctaaaaattcctcttttcgtctacccatccctcccttttgtgcactatttcgtttcaaaattgaatcattttttttggctttttgaaataaattgtgaaaaatatacgaaaattattttagcttttaattatg

SEQ ID NO: 107723 - DNA, 73 bp, Heterodera glycines
tttgttcctcaaaaataagtgtgaaattcccaaaattaaaatattacaataatatttttttttttgcaaaatg

SEQ ID NO: 107724 - DNA, 366 bp, Heterodera glycines
tccgagcctgagagctagagattaggttaatctcaagaatggattaaaacatggcacagatgccgagaaaaagaagcgaaattgtgaaaaaaataatttaatggcacaaattcagagacaacatctctttaaattgcggggtcatcattgtttaaatagttaatttatacatgtgagaaaaagaattttttgtcaattagatgtcatattatgacttcgttttatgaatagaacagaaaagtgccaaaaaaagaatttttattaaaatttttagttaaaattaaaattttcttaaaaattttcgttctgagattttttattttgttagtgcaacgccaacgcgtcaccggctcgctggagggcatg

SEQ ID NO: 107725 - DNA, 67 bp, Heterodera glycines
cgtgagtgcttttttcatcggaaggacacttttctcaataacaaatgcttttcagcaaggcattatg

SEQ ID NO: 107726 - DNA, 154 bp, Heterodera glycines
acaggtggtcagttaaattcacgaacacgtttggaggggggggggggggggtttatcggggcccgttgtttggtgcgccaaggggatggacggagaaagggaccaaccatctcgcatttgattgaaagagaggggtggttttcttaagcggatg

SEQ ID NO: 107727 - DNA, 101 bp, Heterodera glycines
ggtgaatcaatctgaaagcgttcatttttctttgcttttcgtctcttgaagatcctgaatttgaagaagcgcggccgtcttcccttggagaggaggaaatg

SEQ ID NO: 107728 - DNA, 554 bp, Heterodera glycines
tctcaactcgaagagctttggatagacggtttggcagacactttggatgtctaaaatttgttccagtttttattattattttttaaggaaaatttgtaaaacgaattaggtaatgttaagtaattgattattatcagaacagacatcagtaattaagagaagtagcaaaactctcaagaatccgtaaagctggcgattcgtggcgtcaaaaatacaaaaaatgaaaaaggatggagtaattaatatttacaaagcttttcctctaaaatgttctgaggtgcaaatagatagcgaaattgactagtcgtatttgtgcagtgagaataaaacggaatgaatgaacttgacaaaaaggcagtacaaagccaacccgaaatccacatgggtatgacatggttatgttttctaaggtttccaatttttattttttatgaccagtgaatacctttgactcctcttcaatccgccagtcttgggttactaaatttgctatcttttcagatttgtgataaatttgatttttcctttcgtttcttcttcccgcttttctaatg

SEQ ID NO: 107729 - DNA, 102 bp, Heterodera glycines
actaaaagcgcacaaaaagaaaagcacaattaaaaataagaagcggatgagacgacctgaatgtccaattgggctccttttcgggccaccatttcctcaatg

SEQ ID NO: 107730 - DNA, 1003 bp, Heterodera glycines
caaaaaattgacgacatcatcagagttcggcacagatatttatgcttaaaatggagtctcaaattattatttcggtaatttattgaaaaaaattaacatgtgtgaaatataagtaaggtatttttaccgaatcaaatattgcattttctcatttttattgataaataatttagtaattattcttgaatctccgcaattcggagcctgtttatacagtagcaatttcgtaaaaaatttaagttttttttttaaataatggttacttgggccgggaaataaattgtggaagattttgccggtagatcaagtctataggctaaagaacgctgaaccctaaattatgaatgatcccgcgtgagaagtaaatgattaatgaatcatacagtaattttttaacttttatttttgtgttaagccttggaaaagctaaattgtaattaaataaaaattatagaaattaaacgaacaatttgctaaaattacaagcgaaatttgccgaggtaattagtggcaatactaattatttaattaaattagtaatttaattgttcctttccaccacttttcgaactcgtaaatgacgatgagttgctccgccgtcttcaagcagaataatttgatgttgtacttgcgaactttacaaccagtgtccctcggcacttttccatcgaattggcgccaaaacaaaacttggcactttagcggtgccgttgtatcaaacggttgtccgtccctttggcatcccaacgctgagcagttacgtgacaaatgaggaatgtgccaacaaagggggaagacatttaattaattaatttaatcaatttggttaattataatttagaaaatagagaaggtctatttcgataatttcaatgttttcatatattcaattttaaaaatcataagaaaaaaaagtatcgtggacaattccagggatggcgcagtgatcgtttccttcggcacatttgccgatattaactcaatgaaaagggaaatgaaaatg

SEQ ID NO: 107731 - DNA, 57 bp, Heterodera glycines
ttaattaaggcaatttaaaaaataatttctaaaattaaatcggatacattttagatg

SEQ ID NO: 107732 - DNA, 1003 bp, Heterodera glycines
cagcgcttcaaatccatcggcagggcattcggcttccaaaaggggcagtaagggtggacaatcagcagtggcacagaccaatatcataatttgacctgtaaaatgtgcggaaaaaacgaaaactacaattttgaacaggcctgatagcgtaacttgacgcagctttattcgtaattgtgccatcaacggctgacaattttcgttctgtgtcggctttcaacaacttcgtcgttggacctgttgagtcggccaattcctccccagccttcgaaaaaacaattgtcctcaattggccattccctttcggtgttttcactttgctgttgattctgttttctttggaattttcccttttcctcaatttttcaaatgcaacattcaacggatttcataatgccggcaatctcgagctgctactagccgtagagctgattcggcggctatgagttttagtcttcacattcgaaaacgcgttggcaacaaccaaaaatgaagcaaaaagaccagcaaaaattgttgaaacattggctgactctatcggtttctgcgacaaattgcgttcgtttcggccatcctttgctcgtttaggggcggagacttttgggaaaatttttgctctcggtaaattgtcggtcctaattctttggttctctttttgaaaattcatattgctgttattcacagcggcccaattttgggctcccagtacaattatgcttattttttatttagtaatcagaacgccaaaactttgcataactttaaattttcttgggattttcccttgtaaaaatagaagagccgatctcgagttaaaaaatatactttcaaaaaacaaaatagaattcgatagatggggccaaaaaatatgcctacgcaaaatttcaagaaaatctgaccctaggaaaatttttttgaccctagaaaatttcaataaatttctatcatttttcagctaaaaatggtcttgacacgcaaaaaaagcgaaaaattaaagaatatg

SEQ ID NO: 107733 - DNA, 660 bp, Heterodera glycines
aaaatgggcaaatgggccaattaatgtgtaattgatcactctttgcggtgggaagggatggaatttgtggggaaaagaagtgatcgaacggacaatgagcagggagtgatcagtcaaaaaaagatcatcagcccactatcctttattcaaaattggttctcttccctcttcccaaaagtgagttcatccggaacggcttcctcccccccccccgcccacccgcgcagcgcctttttcggtcattgcctttgctaaataaaaccttgaacttttcgtccccgtgccctcctccccttctctgtccgttttatttgattttcgttttcggcggtggtccgatttgatgtaatgaaaaggcaattttgttggtgccccaatcagccgaagaatgaggttgacacaggcaaacaaaaactgtgaactgccgagcggaaatatttgcattggttcgtcgtgggaagtgccgacaacggatatgggctaattggaaatgaattgggggaataatggggacagaatgaggggagatgaggaggagaaaggacggaagaggaggaagacgactaatttgacggaggaaaatgggaacgggggaagggaaccaacggatcatccgaaagggcgacttaccaatgaatgatcggaaaatgactagaaatg

SEQ ID NO: 107734 - DNA, 145 bp, Heterodera glycines
agtttttttttgaaacgaattttcattggtaaaacagagcgagaagaaacgctattgcctgctgagaaagtcggcggaggagtcacgcgtgttcattgaagtgtacaaacaagcattggcacaaccacagcaccaacagcaaatg

SEQ ID NO: 107735 - DNA, 122 bp, Heterodera glycines
atccgatgagagtaaatttttagcacacacttctttctttgctagcgctagtttaggcaatttttatgattcccaccaaaccgccgccgacactaaaaatcccagaagaatggagcgaaatg

SEQ ID NO: 107736 - DNA, 1003 bp, Heterodera glycines
ttcgataactttgtcaaaaatgttaaaaattactttaaattttcatgatcaagtcaaggaagattgaaatttttcaatttctaaaatctttcatccgccggggccgattagcatcgcaaaaattttagaaaagacggggtttgctagggttgaaagcatcgaggtcgggtcccgaaaaattaccaaattttgcttttgagcaatttttctaagaaaaaaataggagttttggggtcccgcggtgcggaccagaaaaaacgcgccagctaaacttcgccgggcgaatgtttgtaccataccttttttccttctaaacgaccagacagaccagtatttaagcggttctttggactctcctcctctcactttttttttatctcatctcttctgcccccaactttgatttagccctttttacttaaatcccattttaacatttatttttattttaaattttcctttaaacaaactaacattttctaaaagcacgggttttcaattagtaaaacgccctaacaaataatgcaagacacaataacagttcgaacctgggctctattccagtttactcgtccaatcaatgaccatcttcagtttcttataccaaatcttttactactaggtcaaagtatacattcttgatatcgaaagagaaagcttagtctccggaattttaaataaaaaacgagcaaatactggtttattaattaatgttttgtctgtttttgagtatagaagtttgttaaatgaaacttctgtaatattctatagtttattccaacgtttttggcgaaaatttttaaatttaaaaagcatgttaacatgttttagggggggggggggggggagggggttcggttgtcgcaacgtcaaccatttccccgaattctgaaccccgggcccaaattcaaacatattttacatgactttaaaatatgagcgctaaaaaatggggaacaactaatatgtagtatatattaccaaaacttctagagatttcatg

SEQ ID NO: 107737 - DNA, 191 bp, Heterodera glycines
aaaataataaaataaaaattattatttcaagtaataaaaatgaatgaaaatctttaaaattgttatttaaaataataaaaatgaatgaaaatttaagtttgtctttgtcgcaaacgagccattgcaccttttgatgacacagtgagttgccggagtgtacaatcttcttcgggctcgacgttttcggcatg

SEQ ID NO: 107738 - DNA, 606 bp, Heterodera glycines
ttgatccggtataaatcacttgtcaacagtagtataaggccccgggggcgggggtccagacccctgccccgcttaaaaaaacacccattttttgttcttcatgattttgtcccaggtgccggggtccaaatccaggagaggattaattaaattaaattaattcagaggcagagggactcgaacccaagaggtcttaatccaaagcactaccactgggtcagcgatacagctatccgaaaaaggataattagcaattatatatatataatttaaaatcgattaaataattcaccaatgggagggggattcgaacccaaaaggccaaatccaacgcacaaccaattgaccgaggaacatagtcatccgaaaaaggatatttgtcagttatgtagtaaaaaaaaagtgtcgcaagagtcaaaaatggacgggagaggggatgcaggcgacattctcccttttgcctatataaagggatatttgtaagcaaaaaagcacaaagaaattttataaaaaatgttcaacgcaccgtttacattaattttatctggcgctacgggaagtggaaaaactcaatggctattgaaacttttaaaacattacagtatg

SEQ ID NO: 107739 - DNA, 160 bp, Heterodera glycines
agacaccaccgatggacccctccccccaaatgccgtcctcaaggtcgtcgaaaaggcgccggacattttgatcggcatccgggaattttggcaattctttattggccgttcaacgcttcactccgggcttcacctcatccaaacaattttcggcccaatg

SEQ ID NO: 107740 - DNA, 258 bp, Heterodera glycines
tcttttttctgtttttaaggctgtcgtccgtccttcgcgtcctccgggcccgaccaaaccactcaaatcaaccgcagtgagcacagcgcttttccataatttgcatttatttatttgcccccactttaagaccacgccggtgggccttccgcatccgaaaaagggcgttagcgcgggaatagtgagtttttgattttgctttttgttttgcgcttttctttttttcaatcaattcttgttgtcaatgtgttcaggatg

SEQ ID NO: 107741 - DNA, 223 bp, Heterodera glycines
ttcattcgttcatttatttgtctcgggttcccttacccatcgcttccgctgcctttaggctccgcccgtggttggacttcctcgcagctcagatgcaatctttgggagcgaaaagggcttacacttatcaaaaacgaaatcccttgtcgttgcgggaaagggcttatgagtcgtgatgtcgagttttacaaggtaatttcacttgtgaaggcattataaaatg

SEQ ID NO: 107742 - DNA, 1003 bp, Heterodera glycines
attccaatctgcactttaggtcagttttgccgaaatttggactccgatcctgcaaaatttgggcgcaacattagtcggcattggtcctggtgaaccgtttgcctccaaatcgagcgctaaccttgaggaaaagatggaattctgttccaaaagtacacatttgagtgaattattgcaatttcttttggatttatttctacagttgagcctcacgtggatgtgctgctagcggagacggactgccaagccgaggtggctgttgtgtccaaagaacacaaatatttatcgacaataataaataataaaagtctgaggagagagagtgaatgaattaattgccgaaataaatttgccatttccgcttgacttgccatggtgatgatgtgaattgacagagatttcaaagagaaaaagatagaactttgtgtgaattgaatgaatgtgtgcaagtcagcggtgggcctttttggatgtttatttattgattgcacagtccgaggtcaatgatgatgaatgaatggagcgaatgatatggctttcaaccctcggcgaattttgaggaatgcgcagtggagtggctgcacgtattttggcttctcggtccacctcaacgcgttccaaaccactttaaactgtgcgggtgttcacagagctcgcagtgagatggaattccgcacagagtgttacgggaagggggccttgggttgtgccaaaaatggatgaaaatgaatgagaaaaatggcctaggactggcaaaatttagagcagaaatttaattgccttcgctgactgcgccaaaatgttgtgtccaaagaacacaaatatttatcgacaataataaataataaaagtctgaggagagagagtgaatgaagagaagagaaggcaaaaagcgaatgaatggggagagaacaaaatgtgtgtggaacagtcactatttatgcacttcgacgggcagagagaaaggaaaagacattgagggaaaagatagagaaaataaatg

SEQ ID NO: 107743 - DNA, 1003 bp, Heterodera glycines
cccttttttgctcaccccactcaattaattgactatttaaaatgggacgaattgtaagccaataaaaacattatctttcccaataacttctgatcaaatcagacaaaatttctgatcaaatcgaaacaaaatttctgatcaaatcggacaaatattttttgttgcatttgcattttcggcattaacaatggcctttcagcaacatttggtcaacaaattctcgccgcttctgatttccggtcattattattcattgtttgagggatgatatttttggtttttgcctatttttttcctgagtattttatttttagagcctaaaagtcgagaaaattttgtaaaaaccctgttttaacctattttggcgttttgcataaaatttattaacaaaaatgtaataaaaacgaaaaatacacccctaatttgcgaggatcaactttttgggaattttttaaaaatgcacccctaataaacgaccccaaaatttcatttaatattattgatttggctaaaaaattttattgaaaaatattttattggtattcatgagtattctatgcatttgaatcgtttttagggacactaaaatagaattttggtgaaaaatgagttttagacttttgttcgaattcgggtccggggttcgaaattgatcgaaatggatgtcatatttcgtgatgattgaccccgaataccacggaaaataatttttatcattaaaaaatgcttatgggtgtaaactgtacaagtaccaattaattaattataaactgtacaagtaccaattaattaattataaactgtacaagtaccaattaattaattataaactgtacaagtaccaattaattaatttatttattaatctttttttgtctcttctctcattttttcctgttctttccgtgcagtgttttcgcctctccgccactgtgccaacatcgctgcgacaacgcaaaatgcggcgcactctccgccgccgcccttttcgctgaaaacgatg

SEQ ID NO: 107744 - DNA, 538 bp, Heterodera glycines
ggtagtaaaattaataaataaaaatgtttataatagaaacttttaaggaagttgaaaaattgcttaattttatgtgccgaggactgagtgacgaatttgattatagaaaaagtgaaaattggcgaaaaattggccaacttgattataatgttgtgccgagagaaaaatttgccgattttatggactggcaaatttgctacgcatccattgaacattatttagagtattgcaaatacagtcatggtcataagtgttgtcccatcatgcttttaaaaaaaataattgccgtataaaattgtcattttccaatttcaacagataagtagcataccattggatagcattttttatgggctttccaatgatgccatatttgcttttgtgacataaacatttatttgatttattttaccatattcacaatttgatcaaaatataggtggtcaaaagtgttgtcccatttcatttttaaaatattgcttctctggatcagcattaaaaaaatctaaaaaaattcaggtaagcataactttggatg

SEQ ID NO: 107745 - DNA, 600 bp, Heterodera glycines
ttaattctgcgttggatttttgctccccataattgtttcagtaccccaaacggacacttgaaaaaatcgatttttttgttttcggggcagtccccccgaaccgatgcgcccagatttatggggagaccgaatccttcgggaatagcttccctatagcctgtactttaattctgcgttggatttttgctccccataattgtttgagtaccccaaacggacacttgaaaaaatcgatttttttgttttcggggcagtccccccgaaccgatgcgcccagatttatggggagaccgaatccttccggaatagcttccctatagcctgtactttaattctgcgttggatttttgctccccataattgtttgagtaccccaaacggacacttgaaaaaatcgatttttttgttttcggggcagtccccccgaaccgatgcgcccagatttatggggagaccgaatccttcgggaatagcttccctatagcctgtactttaattctgcgttggatttttgctccccataaatgtttgagtaccccaaacggacacttgaaaaaatcgatttttttgtttcataaatatttttttcagaaagtcatg

SEQ ID NO: 107746 - DNA, 263 bp, Heterodera glycines
gaatgacatttttttcacacattttcactttatttttgtgttgtatttgcaattattttccttaagttctcagataaagacatatattttaatttataaagtactttctattagtttgtacgtataatgttaaaagtgtccacatcaaatttaatacttaccaaaatgtctaaaatactgatttaaaggaaatattttatttgtgattttgtgtcttcgtaatttctcttgcttttttattagtggaaaaatgcatcgaaatg

SEQ ID NO: 107747 - DNA, 66 bp, Heterodera glycines
ggtgcttttcagtttttgttttgcttttcaaatgatctaaggtggcttattcaattgaaacaaatg

SEQ ID NO: 107748 - DNA, 90 bp, Heterodera glycines
  unsure (1)..(90): unsure at all n locations
gcagttgattttttatattttaatttaaaataaacaattttctnttctgtgctaattcataaataattcagagcgcgactttcgatgatg

SEQ ID NO: 107749 - DNA, 87 bp, Heterodera glycines
tcatagaccaaggcgagaaagaggtgattattcctcgccaatttcaccgaaattactacaatacgggccaaattgcgtgccatgatg

SEQ ID NO: 107750 - DNA, 688 bp, Heterodera glycines
  unsure (1)..(688): unsure at all n locations
acactaatttgaaatgattttatttnttgaaaaattattttaaatatcacttttttgggttcttctaaaattaatttattccttgtttttatccgctattttgaattatttttccattatgaacaccattttttacattttttctcaaattaatttgctattcgatttttagccattttgaataattattttaatttgaaattattttaaatttcatttttggattaatttgttttttttcgatttttagcaattttgaaccaacgaacatctgccgagaagggcagatggcagttgaatgtgtgcagcatcgaatttgtcaacaaaaaactacaagattaaagcaaccgacagaaatttgtgcagcgaatcgtacaaacaaaaaaaatgctagcacaaaattatggtaaaaataattaaatataattaaaatatttgaaatttaatacaaaaaccaatgctttagggtcaccttttttgtaacgacaattttatttctcattggagttaccattgttgatacggtattgggaaatattttaattttaaaatatttaataagtgaatataattaaatattctattgttacggtattggaaaatatttaattttgaaaatattaattcgaatttaaaataaaatattgcattttttttattttacagcaaactccatgcagcccttatg

SEQ ID NO: 107751 - DNA, 94 bp, Heterodera glycines; identical to SEQ ID NO: 97954

SEQ ID NO: 107752 - DNA, 101 bp, Heterodera glycines
tcctaaaaaagtatcaatgataatgaataattaaatttaataattgttaataaaaatattttgaaatatagatatcatttttcttttcattagtccgaatg

SEQ ID NO: 107753 - DNA, 995 bp, Heterodera glycines
gtattgccgactggggccttattcccggttaagttaaccgcggttaacgccttaaccgtggtttatttaaccgcggtttatttttaaccaaaatatgtattctcgtctttaaccgtagttaagctaaccacggttaaataaaccacggttaagcacttaatttattaaataaataaatacaaaaaataaatttttattctaaaattcgtgagaattaattttcattgattaaaattaaaaaaatatatatctaggctaattactcagcaaataataggtataaaaatcgtaaataattttttttatttactattggtgaaaatcatataacaagttacagaataatttttaaaaaatttcacgagggcgactgcctgcatcgccggcctcctctccttgttctaaaaagtttttgaaaaaagggccgcataaaaagttgttgaaatcgataatgggaggtgtaaaatatttgatcgcataaatcagagtcccaaatttttttaaaataagacaaaatggctgaaaaactaagattcggaccccaaaaataagattttttataaaattaatagtagcgcgaaggaaacgcaataatattatattagcgtaaaacccaaggtttgccaactggaaattttctaaatcagcgtttagcagacaaaaaatcatcatttggggtcaaaaatcattagaaaatcttattcaaaatgaaaaaaaaatcaataaaaatgttttttccggcgcgctttttccaaaaaaaattttgggaacagtttccccgtcgggaacattttttgaaaatttggatgcaatttgttaacagattttcaccaaaaaagactagtttttgagcctaggtacactgccggaggaaaatagaaatgttaacatattggctaataacagttaaaatgtttaattaattttgaatatcaaataattttacaattaatcatttttaattgctataccaatgaccccccaaattaaaaatg

SEQ ID NO: 107754 - DNA, 804 bp, Heterodera glycines
ttttcaaaattgggcttgtcaaacccccactagagctctaaagttgatagtcagtctaccaactactgtagagatctgagatttcctaataatgttctccatccctttgggatttgtttcgctgatattgttttccttctcttcattgcttccagttgggtgggggttaggaaatttttttctagaagacttgaatcggcttattagaaagagcattaaattcgattaaatgggatggaaaataattttctgaggtttttattttattggagtcgaaaaattgagccgcaaatatcatttttggctgtggccgcaaatgtcctaggcgcaaatgtccgaccgcatttgtcgggccgcaaatgtccgattttcagcaggccgcaaatgtccggaccgcaaatgtcctacaaccccccccccccccctagatacgggcctggtgccaaaataatattttgaacggagaagcaattttataaaaaaaattttgggaaagcgaaaaagaatgattgggaggggattttcaaggaaaaatgaagcttttaacaactattaattttatccccataattcaaagaaatatgaattgcaactccataacaatgcgtttttttccaaacataaatttttcatcatgtgataccgttttttcatttcgtattttcagcgatttttgaaaatctttgtaatacaccataaatttttcgaaaaatttttcttgtaattttctgtaaaaattctaagatttttttcttgcataattttttttggtaattttttttttttgaattttcgtgggaaatg

SEQ ID NO: 107755 - DNA, 133 bp, Heterodera glycines
agtgaggaccagcggaactgggatgggatgggtatacgttaaattataatcgacaatcagaaagtgccatctctgactttcttgccctaatcacaatcattgccagattacccgccccaagtcaggtactatg

SEQ ID NO: 107756 - DNA, 371 bp, Heterodera glycines
tcttcaacatcattcagaattttggtaataaaaagcaattatatcagcggcataaaacacccataacagtttaaacgtcctgtgatggatcatcataatcctattctgttattcaagcataattcagatctctttgataacattttaattccaatcgcggcttatatgcctcctaaataatcgttgcgtgccaaaactggcgctttttgctctctttttaaaaatttgggggggggggtgggttggcggcttcataggggtggtgtatttttcgttttattgcatttttattaaggatttctttgaaaaccctgaaaataaacgtaattaatagggatggtaaaaatatggatataaaatcgcgaaatatg

SEQ ID NO: 107757 - DNA, 451 bp, Heterodera glycines
agtttgttgcggcgcctaatagaggggggaggtgtccttgactcttgtaaaaactggaatatcatgggataaggaccgaaatcctggaaaatccactagggtcaataatgtcttatccggattaacttatcaaattccaatttaaatttgtctttcattcataaatccgatccggggatttaaattttcaggctcgcttaaatgctatggatgtccccgggggcatatttttttaaattaacaaaacatgattaagctcttaaatgtttggccccatgcatgtttttcccatatgtggaaaaattttattcgaatattaaaataaaacaatttaggcctgcctataattccattaagtttttcattgccaaaatttggaatttgcgtcggctagaggagcctggattttgaaaaaatcctgactaattgtaaggcccggatttaggagatg

SEQ ID NO: 107758 - DNA, 520 bp, Heterodera glycines
tcggagtatgtttaaaaattgatttattcataaattaagaaaatatttttaactgattattttgtctttccaatatttgatttgtatcaccttatatttccccacttttcgggccaatttttatgtgaatttgacctaaaatcgctttttagaaaatccaactgattgatcccttttccgacgttttgtcggaaaccctttccccttgttaaccctttggccctttactaatgaaacctaaaattgtccgcaaacttccggcagaattgaacaacgaattgcttcaatttgcccccgagcttttgtgtcgaagcgttttggctaactctaattttttgttttatgatttgattcggaggagtgaaagaggcaaaaaatggaaaaccaaagtatggaaaactgaaacaccatcacgttttttgcgtctttttatttagcaaatttaagcacatcaaattttaaaaatgggggttttttaagagctctaataattgtccccttcctatgacttagtgcaatg

SEQ ID NO: 107759 - DNA, 303 bp, Heterodera glycines
tgtccaaagcctgtagcggaggtggtgcgtgccggctccccctggcctgttggccaccccccggtgtcccgtaccatcctctgacccccaatttatgatggggtgcaaaagcgtgcagagagaaattgcaacacgccgccctattttcgtttttgtatgttttctctgcattctctctacttgctttttccctcttttgctgctttttgcttctccccgtcccccccccctttcctcgtatatcaaggcctggctataaaattgcctcctcatgcgcttctaaatcattcactttcgcaaatg

SEQ ID NO: 107760 - DNA, 259 bp, Heterodera glycines
ggaaaaacccatttatcacgtctaaaaagacacctccttaaagcgtgaaaacataggcttttactttgcgagaatagatattataagtttttccttctttataattgacaaaaaaaacatttgtaacagttatggacaaaaacagcttgccgtactaaaccgaccctcgtactaaaccggccgtactaaaccgaccctcgtactaaaacggccgtactaaaccggccgtactaaaccgaccccgaccgtcagaaacatg

SEQ ID NO: 107761 - DNA, 538 bp, Heterodera glycines
ttaaaaattaatctcgtcttaaaataaaagcaattgaaacaaattagtgagaaaaatatgaaggttttcagagtcgcggaacacgaattttcttcaaatgacgccgcaataaaaaaaaaaatcaaatttttgaaatttattgcaatttttgaatgaaaatccatcaaatcaaaagaaaaaaaaccgccaagaaaaaataagcacattcaaagagaaaatagcatcaaatcaagtccagttaggctacatgacatttcgcctactcgacatttcgcctactaagccaaaaacattcatttcgcctactaacccaaaaccggacatttcgcctactattcatttcgcctactattcatttcgcctactaagccagaaacattcatttcgcctattggaaatacataatgccaaagagaaaataaaaagagagaatatacaatatataatgtttttgcatcaaataaatcattcatttcatttttatgtcatttcaaattttcttcaaaaacaaagaaatttcagattctaataagaaatg

SEQ ID NO: 107762 - DNA, 87 bp, Heterodera glycines
aatcgcatcattcgtcatgtcgaaatccaggaggaacaagaacgttcccgtttcggacaaaaggcactgacattggaggaagagatg

SEQ ID NO: 107763 - DNA, 958 bp, Heterodera glycines
ggtgtgaccaaacaatttttaaaataaagaacatcaatgacaaaataaggtttagggtcaaaaaagacaatcttgcaaaattggttcgaatcagttaatatataattttttcgataaaaaatgtattaaaatgttatgtttttcacatcctattatggattttaacaatttttggggaagaaattagcaactgctgaaaaaaaagattttcaaacgttttttttgcagtgtatttttttttacaagttgatgaatgggaagtgggtccggcggcgccgataggcgacgccgggaaaattttttgaaaatttgagtgctattttatagcagattttcaattaaaatcggtaaaaacatgattaaaaaatcggtaaaataaagtgcggtcatgcgggatcgaacattaatgcacagcacaaagcaaacctgctgttttcaccactaaactaaaatacttaaataataaaacttattatttctttccaaaaaagtcattcttaagggtgtaaatattttcgtctttttcgtaaaatattgctctgacgaaaacgaaaacgaaacgaaaatcctaaattttaaaaaccgaaaacgaaacacgaaacgaaaaataaaattttgaaaaccaaaaccgaaaacgaaacgaaaaaactttagcggacgaaaacgaaacacgaaaacgaaactcaaaaagtgccgaaaatgtaggacgaaacgaaaacgacacgaaatttcgtccagccctggggggggttccggcggtgccgataggcgccgccggaaaattttttgtaaatttcgttgatttattaacagattttcaccaaaaaaggtcaatttttgcaattaaaagccaagcgacgacttttttttttttacttttaaaaaggctgtatgacatttcgcggtcagggtcgttttcgcgtggccgtttcgcgtggtttaatttgctaaaggaatg

SEQ ID NO: 107764 - DNA, 522 bp, Heterodera glycines
  unsure (1)..(522): unsure at all n locations
accagcaaaatcaaggttctaggcagatttaaaattnaatgtaaaaactataaagaaaatagatgaagaaaccttaattacatnntagttccaaaaaatcacaaaaaattgnaattagcagattttacacctcacataaatggcggattttgatcatttttagcaaatttcaaaataattttgagttcgcttgtaccgacaagctccaatttttatntaaaacaaaaattctggcccgtttgtaatagaaattaaaaatgcattaattgtcaaatgtgtcaaaaagggagcaaaaggcaattagacttggatattggattttaaatttttaaacgaattttaagtgttattttttactttttttttattttgaattaattttattgtaacatttcttctttaaaaataaattttgagtggacattcgtgaagaaatatgtgaagaagactgcgtagaaaacataattgcaaaacttccaaaaatcaaaatcaaagaagtgactagaaagaacatacaaaatg

SEQ ID NO: 107765 - DNA, 258 bp, Heterodera glycines
atgactcggcagagtgtgaattaattcctatcttttatacactagtagtttcttttatttttatatacacgctttaatagcaattttactttttaatttactataacatgcttgtgaataaaggacttaaactttgacgagggctacgatttatttaaatctcacgaagtgtgaaaaagcatttattttctttttcagtgtttgagcttggcactctgtttcgttcgtataactaaaaacttttcttgagaaggaatg

SEQ ID NO: 107766 - DNA, 890 bp, Heterodera glycines
ttcttttaaattttgcgtcgaatttccgttttgtccaatgtccatttgcgcgttttgaagtgtttgtcaacgaaatagtcaaatttttgactgatcacgcaaggctaaggccaagatgagagcgtggaagcaaatcgaaaacattgagccaacagttgacagagatattttatgaaaaatgggtttttttcacatttgcggtccagtctgtcctaattaatacataggtgtcatgtcccctctcaattgtctatcgggccataaaacacacacagcgacaatattacttgctgcttatttattttattgttattttaatataagcctaaattttgtcaaaatataaaaggattactaataatcgtgctgacgcgtttcttaaattccgtcatgggggtaagaaaacaaaaatgaaatattgcatggtatccatccaatagctttaagtgttgcctatcagaatattaatttagattttttttacaaaattataaaaaagttatggtcacaaaatttcaaaagtcttgagtcagaatttgttggccataacttttttgaaactcaatgaaattttaaaaataaatagagaattctcagagctgtcgcggccgtaaaaaaacgaacccctacgaaaaattttctcaatgaaaaatagttttatgacgtgtcgttgattgatttgcaataaaacacattgtaacgtataatttggccggaaataaaaatggcaatttttataataataaagaaaatataaaacaaaatttttaatgataattttttatgttttataatattaaaaatttataataaattttctaaagaatatattttcaaaataattatttttaattataaaaaaataaaaatttatttttttaagaacaatg

SEQ ID NO: 107767 - DNA, 569 bp, Heterodera glycines
ctagggctgccaaaaatatgcaaatgcatgtttttttcctggcttctccgtgctttaaatagtaggaaaaacactttttttgtgtttgcgtataaaaatcgggacttttatttgcatatttcgggtttttatgcatattttggatttttctgcatattttgccattttttgtgcatattctcagatttttatgcatattttgccatttttaactaaatatttttcgatttgaataaatcttagaaaaaaatttgattatgcttaaaattaaatcaaattttgaatggatgcgcgagtgggtcaacagtgaattccatgcgaaaaattgaaaaattttgatttgaaattgcaaaaacaaccgataaaatttatgaggaataaaaaatttttttttattaatttgcacgcctaatttttaagtttttttatgcatatttggtgcatattttgcgatttttgtgcatatttcacgactttatttgcatatttatgcgcatattttggccacttttcatgcatatttttggcagccctagttatagcatttcaaaatttgcggcgccgaaatg

SEQ ID NO: 107768 - DNA, 173 bp, Heterodera glycines
aataaacgcgaaagtgaaccaaaaagtcgcgaagccttctaaaataaacttgcgtataattatgtccttgaataaatcaaccaaatatattttttaaacctctattttgctacaattttcaaatattagggtaaaaaataaattttcatagatcattgtagacttagtgcatg

SEQ ID NO: 107769 - DNA, 540 bp, Heterodera glycines
ttttcatttgataatttcaaataaaatttaagatcagagcgtacttttttttattggcgggatcgaaattaattgcagtttcacccaatcatgcgggcaaattagtagcgctattcgagaccgaaaatttcgaggagctcgaaaagcaatgttaattagacaataatgaccacccacccaccacctgccccgccccatccatgtgtttgcatttttataacagcacaaaactttttaaaaataaacacgcgattgacaaaaaaaaaaaaaaatttttaatttatcagtcccctccgccggctttcgtgaagcgttccaaatttttttttttagattattgttctgaggcacatggctgctcaatgcagaagcgcccactattagcaacaattttgttcattccaaatggacatatactaaaattggaacaatacagagaagattagcatggcccctgcgcaaggatgacatgcaaattcgtgaagcgttccaaattttttttttcggtttaattacccaagtttgagattttcaaatatg

SEQ ID NO: 107770 - DNA, 562 bp, Heterodera glycines
  unsure (1)..(562): unsure at all n locations
ttaacaaaaaacggaatttaatttttggaaaaataaacaaaagtattttaaagaaaccaagccatatacataggttaaacgcttttgtgcggcatgctttttccaaaaaacttttcgagtacagggggcagaacaggggtggcgctaatgcgatttgttagcagattttttcctaaaaatgacaaaatttacgtttttgagccaattttgcgggggaatgagtcgcgggggcgggggcggggctgaggccaaaaaacccgtcctgccccgggaacgcaggcgggggcggggccaaaaccnctaataaaaattttcagaaaattttcattaatttaaaaatattaccaggaaaaaaatttaaaaaattacccatgactttaatgaaacttatttgttagtgaattttttaaaatttatttatagagaacactttgagttattgaatgatagataattgggtttcttccttggcacttttacaaaacgatcagcactatttaacgaattttgttaaaataaaactttattaagtttatttgccgacagaacagaaatagaaatg

SEQ ID NO: 107771 - DNA, 75 bp, Heterodera glycines
ttgatttcacaggccaaacaaaaaacggaaatccttgcatttccgcgagctttttacccgtggatcaaaggaatg

SEQ ID NO: 107772 - DNA, 286 bp, Heterodera glycines
ttccgtgttctggtgaaatttcgcataatgaacccgttttcttgtcgttggacgaatttgaaattgccgtgtggtatataggcaaaaaacacgccgtttgggtgaaaggaacggacactgtgtcagttttgaagaagaaggtccaaggtgtgatgaacattgaccccgcacgtcaaaacttgtacaaattcgatcttgctgatttggaaagtgccattggagagaaaattaatgaacgagtactgcttgatgcgacgcacgagcaacaagaattgaagaaacaatg

SEQ ID NO: 107773 - DNA, 234 bp, Heterodera glycines
  unsure (1)..(234): unsure at all n locations
taatttcaactattaaaaaaaaattacntatacataaattaccaccttttcttaaatatttataaaaatcttttantccacattaaactttctcctcattacnaaaattttttacctttttattttctcaataattccgaagaattgtatacaaaataaaaaatccgggcatatgtaaatataggtaagtccagggctcgcagatctgaggctttagcctttgcttgccgaatg

SEQ ID NO: 107774 - DNA, 573 bp, Heterodera glycines
ctctaattacgccaaagaatctgattgtcgttgccttccacaattcgttttattagcactttattgctttatttttattccaccattccttcattaacaccaagcattttgtttatggattgaaaaacgaattatgtgaaccaaaatttattagtgaacataaaattaagtttcgaaacggattagtatttcatttctcatttgtttactccttttaaaaattatttgctgaattgaccttaacgttcttgggtattatttggtagccccaagaatcctctaaatagtctcaaaggctgaaaaatgcacccaatattatggcaaagattcagaaaatcaattttttgaagttttctggtcaaaactttttgaaacataacgaaatggtcatgtctctctcttttttatggtcgtgtaaactggaatagaacacaaacatttgcattgttattaaaaatccataaaaagaagatataaacagatagtaccacacaaaatttattaccttttatcactttataaaacggcagtctttttaatttgtcaatggtttaccgcttattttgacaaatg

SEQ ID NO: 107775 - DNA, 971 bp, Heterodera glycines
tttttatatttgaatgttgcaagagcgtaataagtagggctgggaattttaggttttaactattttttttgctcttttcactatttcgacattttttgggaaattccttaacaaaaatgcaataaaaccaaaaaatacacccataagaatcgacctaaaaattttttcaaaaaatacactcctaagaatcgacaaaaaaatttcaaaaagcactcctaagaaatgaaaaaaattttctcaaaaaggtattttcgtggcaagaattttaattttaaaaattatttttttatgtacctattttgtttttttgcccttaaaaatcccagccctactcatttgcaatgcaatcagtgaataaaaattatttttgcttaatttttggctgaaaattatgtcactattctcactattttggactttttgccactattttgtcactattttggcatttttactcactattttagttaattatttcgagatttttcgtcactaaaagtcccagccctagtaataagaaaatgcaaattgttagaaaaattacagtaaccccaaccccgcgggatcccgctggattaccgaaatagtcggcgggagagagctcttttgcaggctaacagaacatattaagcaagcgtttttaaaaggagcaaactttacctaatttaattgtcaatgaggaaaaaagttatagtgcggcaaaaagcattctttaaatttcttaattatttttcaaattttcaaagaatttttgaaagaaatggttaattaataaatgctttttgaaaagaagttctctgaaaatatcatcttttaaggaatttttgatcggtacccaaaataaggataaatcttgaaaacgaggacattttaaattggtaagttttctattcttctcatcagaaacatcatttataaataaggacaaatcgaagccctgctgcttctttagtttgagaacttttacgatg

SEQ ID NO: 107776 - DNA, 397 bp, Heterodera glycines
ttgattcacattgttttaaataaatatattggttctaagcataaagacataaattctctattactcattatgctcgttattcattatgcgtccatccacttaaaaattttttggggtttgaactagagtgccacgggaccaggacctggaagcggacaactgagtaccaaggtcccggttttgactgggaccagtcccgggtttttcccagccaaaaattcccgggttttcaaaccgaaaaggtcccgggtttgcccaaaattcccggtcccgtggcactttagtttgaaccatagtaagggatgaaagtaaattaaaaatttgaaattttccatttctaattactaagacacctttttcaccatattttgcaccgttttggtccgaatttttaatg

SEQ ID NO: 107777 - DNA, 891 bp, Heterodera glycines
aaatgggtcaaataaaaaattgaatatgcctatcccctccattaaagtcttggctttctagtgatgtataaattgtcagggtccgggtccgggaagtgccctaaaaagggagttcaagcacttttgatcaggattttttcaaaaaaagaaagaaagggaaaaggttattaaaagggatgtgagcaagtaacttggtggtcaagtggttagtgtgcctgcctttggtcatggggtgttgtgggttcgagtcccattaatttattggattttcccgtcaaatattatatttaaattatttggttttaaatttgtttttaatatttttcctataaaaaattttatgggtttataaaagagaaagacataataacaaaaatttggagcaaagtacttttggataaaaattgattactttcctttctttcctttttttatatgtaatgcacgctcgccagtggtctttgacctcgccttttcaataagcaaaaaatgtctcctccttttctttccccagttcattatcaattgtttccatttacatcatcggttttttactgctcctacttttattcaataaatatttccaactaaattattgctgttttaatagcataaatttttagtttttcctttggtggtggtgggcgacggctcgggtcccacctattctgggtgttttcatccattattttattacattttttgaatgattttatttttttaaaattaattaagtttattaaaataatttattttaaatattaaaaataataattctttcttcctaatttagcccaaaaatctattgtttgaccttttttgtgcaaaatcatttaaaaaatggagacaaattaataagttacctaaacataaaattataaatattttatg

SEQ ID NO: 107778 - DNA, 259 bp, Heterodera glycines
ttttatttataataaaaaaatctccaaaaaatagataatttcctgcaagtttaatattgaaaaaattagattttttctcatttacaataggcccaattagattttttattttaaatatttatctaattctcatttactaattaaaccttcctaattccaacaatttactaaataagcagcagcttcaaagaactaaaaaagaaacaatttcctttttacagagtgaaacgaaaacagagcgaaacagcgacaacaaatg

SEQ ID NO: 107779 - DNA, 831 bp, Heterodera glycines
ttgattataaattttgtacatgcaaattatatattaatatattaattcatgtgtgcaataattacgtaaaaaattaatttaaagtactgtcgaaatcaatcactgtcgaaaacacctggtacgatccatgttgtgtgtgtgtgcaggttgaactcagcccaataattagtgataccaccacaacaaaaggtcatctgctcaatccgctaaaaaataacgaattttgctcctatttctggactggaatgaaatcccggggatcccctccccattccggacccgagaaaaaaaacatgaattttttgttttctgcgtttttattgataaataatggtaccggaagaactaaaattaaaataaaaaaacaaaaatttgctaagaaaaactcaaaaaagttaaaacaatttttaagcgaataaaaaaattttttgaaaaaagttttgggtctcgggggttttttttgtgttttttgcttcctctatacatacaaagcaaaaattctcgaaaccttcgtttttcttcatattttttgatgggttttccctatcactttttccaaatttttttatcaattttctcgatttatcgtccttttcccaatgttttgccccatctaaaagacagaatttgttggtgctgctctttctttcctcctcttatcattatcagcaattcagctgctaaacccccctgcccattttatagacattttggccctcttccgttgctggaccctccccctccccgctctccaatttattgcaaaaatttggtaaaatttcggaaagcccaaaaactggtcgaaagcgaccaaatttcccagccaaaatg

SEQ ID NO: 107780 - DNA, 252 bp, Heterodera glycines
tggcaaagaaaatgtgagcacattttcgaccaatgatcccattgataagatgccaatgcctgtgggattagccaaagcaagggagggaaaagtgggccaagcccgagattagtaaattttggcaaaaaagtgtgtttatacgggaaattattcccttcaatccccaaaaaagattaactattaattctacaataaacccaaaacaaaattgtcgcagacacctcaatttattttaagattcaaaataaaatg

SEQ ID NO: 107781 - DNA, 101 bp, Heterodera glycines
cgcaaacttggtaccaacattttccttctctagtctccgctctaccaaacactcacacgatatttgaaatgctaacgaaaaaaattcttgcccaaaaaatg

SEQ ID NO: 107782 - DNA, 244 bp, Heterodera glycines
  unsure (1)..(244): unsure at all n locations
gggagctctaattcatggcggggttngtattatagggaatacggtattttttggatttcaaaatcgttcataaaattagtgatcacgaatgcctaaatgccttaacaataaatttttgttacgtttttccaagacttccaaaatttgaaatttttacattgggaaaataattgaaaaaatttaatttttaaatatatgaatttttgcatattttcatttttgtgttttaatgcttttggctatg

SEQ ID NO: 107783 - DNA, 543 bp, Heterodera glycines
tgcaggtcaaatggcctggcccaaaaatcgcaattttacattcattttttgtaatgtatcctctaaaaatcactttaaaaaaaggaatattgaaaattacttttaaaatagctaaaaaagttatacagaatagttaggtcatttttcggcatttgtgccctatttcacgctttctaagaattttttgtcaaaaaaatcataataattttttttattttggtacatatttgagagtttttgtacatatttcttaaatttttcgtgccttttttcatattttatgtatatattttgcgattttgttaagaaattttgcgtcaaaaaaaatttttttatgaaatatttcgtatttttcccaaaagtgtccgctaatttccgtccgcatctgtccgtaaggcaccaatgatgacaatatttactgtgagctatatgacacggaaaattgaaagataaaaataaacaaaaaactaggcttcttacagattgaatgtgctacttcttaacaaaaaaattttacttaatgataagtattttaaaaatatg

SEQ ID NO: 107784 - DNA, 182 bp, Heterodera glycines
ggcccttttattttcaaaataaattttatttttaaaagatatttccaaaaaaatgggctatctctttttttgagaaattttctatgcaacaaacgctctcgaacatgaaacgaagtgcggtgcgccatggccattttatttttcaaataatttttatatttaatagatattccagaaaaatg

SEQ ID NO: 107785 - DNA, 459 bp, Heterodera glycines
ggataaatcggtggaatttttaaatttcatcgaaaacattttgaaaattattgtgcacatttgttcttgttttttagtataaaaagtgactcaaaacaaaacacctaattaatctttcgtttaaagaaaacattttttaatttttcaattttttaaatttatttcatagtgtcgcctttttgaataaattaaaaataatttatgaatatttttgcagatttatgcaaagggccaaaaaaccatgacatatttcacaaaatgcaaattgtattctctctcagcaaagcttcaaaaaccatacattttttacaattggtttcattccatcgatacttttcatgcaatatttacatttttattataatattattatcattaagtattaaacaaggtttatattcataggtaatattaataataaaaaaatatatttttaaatgtttaggaaactcaattatg

SEQ ID NO: 107786 - DNA, 163 bp, Heterodera glycines
aacgctttttcttcgaatttaacttcttttcgttatttatgtttttattttatttttattgcttttatctttcactcgtattgaacgaaaagcggtttaatgctgctttatttttgattttaatttccatttacatttattttagctttctcttttcataatg

SEQ ID NO: 107787 - DNA, 1003 bp, Heterodera glycines
gatagaatttatgaatttttcgtttccttacaaaaattttaaaacaccgaaatttggaattgctaaaaaaataaaaatcactaaaatattttaatatttttatggtttggctgtatttaaattagtaaaaatgactctctctctctgttttttttttcaccaccgactaatgagcctttttggtcagcaaaagcagcagtattccttttttttgccaaaataatgtccagcagcccatcagcagacggacactttcgtcgccgtcctcctcatatttataataaaaagggtcgaatgcttagggagggggtatattttgccaaaaataaatgtgtacaaatgggccaagtggggaacggctggcaaaatagtggccagcagacgatggccggccggcgccacccgttttagtgccaaaaacaacaaatggtggccggccattagtccggcttggtgcctcgttttacaatacgacattataaaaattgtcaattaattaatattttttaataaacagggtccatgtttttatgcacaaaaaatctttgaaaatacattttaaacccataaattggcaaaaacccacaacagaggcagtgcatgtgcctcatgacgccggcaaaaatatttgtgtgcaaatccgagttttttcgtggccatttttggccctaattgagatattttttacagaattaaataattctgaattcatatttatactaaggtaaaaatgtgtaaaaaataaataatgataataataatagaactataatttgtgaaaatgttcaaatgaaaaaattaacagacggacgacacctttccgtgccagccgcaaaatttaaacgtacaaattgggtgggaatgtttttttgtttgtgccagaaagcccacaaattaatattgtcaaaatgggcgagtgaatgaatggtcattagccattagccagggcaaacaaacggacacttttcggagtcaaccgaaaagtgaagtgtttgtggccatg

SEQ ID NO: 107788 - DNA, 136 bp, Heterodera glycines
tgtgcgcggtggcctcgtcgatgagaataattcgcgggttggacaaagccaaccgaagcagcgaaatcagttgcctctccccaaaggacaaattccgtcccccttcggtgagttcggcgctcagaccaccaaaatg

SEQ ID NO: 107789 - DNA, 405 bp, Heterodera glycines
acagccgacgaccgatgagccaccgccgaaggatgaagcggatggacggatcaatttttttaagggggaaggtgttaggccggtacccaaatgtccgcctcactttatttattttgtatgtttccctcgtcccccttatctctgtctctccctccgtccataaatagcccgctttttgaccttccctcgtcatttgtctcattcgcatcattttccccaattttgttatttctttttatttgctccataaatattgatttatttgtttgccactcaacggcataacagatagtaagtacccaaattaaaggaagaaacataccaataagttttcaaaaaattaccccccccccccttacggttttcattaaaaaacaccatccatttcacagaggaagtgcaatg

SEQ ID NO: 107790 - DNA, 93 bp, Heterodera glycines
agtaacatcgcaagaaatgtttgttccccgctaataaaaatgcatttctatcagataaaattggtcgaatgaacgcgactttatgtgcgaatg

SEQ ID NO: 107791 - DNA, 929 bp, Heterodera glycines
ggtaggggaagaaacgggaaccgcccacttcggcgccggccttttcggcgccgttgctaacaacttgatagctcttcagattctctattagcctgtaaaatttcaaaaaatttcgtcagtttacaaaaaagttatggccaaaaaacctcaaaaattgactttttcttggctttttcggcgtcgcgtggcataacttttttatttttgaatcattcatttctatttttacatgtaaatatagagcacacatagagctttcaaatgatgctagattggctaaagctaactgacaaataaaaaagttatagcatttcaaaatttgcggcgccgaaatggtccgcgccgaagtgaccccgacccattaccccggtctctagtcatttctgtctatttaaatggtgtctttcccggttcaagtacagtttatgcgttcaatcgactttatgcgtccaattaatttttacgcgtccattcaatttttatgcgtccaatgaattttttacgtcgacttgtatagcactgacaatatcccgccaagatttgctagtctagcattgggtttacccctccctagccatgtaaattaaatttgttgacagattttataaaaatgtctaacaataagtttgcgttaaataaaaagccgtggatacattttttgcatgacatttaatgcagcaatttgcatccatcggcgatttataactttttcgcgacccgcaaactgatcaatttgaaataaatcatgatgcgcaacttttttgcgctacatttactacccttttcttttagcataaaaaatttgctttttattttcatgaacgcccattttaatggtgccttcggttttaattttgggtttatgcacggggtaagtgctttagatgttaactattgcccccaaattgatttatatgctgtgttaaatg

SEQ ID NO: 107792 - DNA, 781 bp, Heterodera glycines
actagaatttctttttaacactggcaaaataatgcaaaattttttactaaatttgaactaaataatttttgaaaattttatttaaaatttttttcattaaattgagattaaatacaaacccatccgtttttctaattataaatattttctttttagtcccctgaccctaattctgtgccggactctactgaaactgtgaaaatgtgcgacttcgccttcgctatttcagccattttcggtacgaataatttataattttaaatatcattaaattactaattgaaatctgatgatgataataattattcatttaagtgattatgactgtgcatttgctcattaatgctgcgtaatgaagtgaaaatgaattcagatgaaaaagaaagaatttttgttttgatcaaccaaaactaatatttatggttataaaaactgattataaaaaatgtaaagcacattttgtaaaatttattctgaatatttgtcaatatgacaaaaatgttgaaaaagttgtaataaatttaaaattccaattaaactgaaaagcagagatttttagacattttttggaaatttagttatcccgtaaaatatacaaaaagagaatgattttgtattaatctcgttgtttctgggcattgaaagaccagttttttgtctcgattggcacggcactttcacggcttttcatcttttgccgaacagactccaaaaactgccggagtctccgccggcaccgcgggcggccgacagccattgcctccgatgtcgcggagcgatg

SEQ ID NO: 107793 - DNA, 1003 bp, Heterodera glycines
aaaacgccaaagaatttttttaattgcctaaaaggcgctaaaaaatagagatcggcatttctccattcatttggcagccgcagctgcactagcagtagtaaatatttcggcattggcgacggataaattccggtctctagttgaattgttagaataaaattaggtagttaacacttctaaaaatcatttttataatttgaattttatgcctaatgttctttaaaaaatgttagagcaagcaatggttttatgacgcgcttcctcaacacttaaatttagataaaaatgtctgtttctccttcagctaatcggtcggcctcaattggaatttctgcaacagaaacaacttcaaaccaatcttttttctctgaccaacaatctctttcagtgaatatgtccgctaatcaagtcagtcacataaaaaattgaatttattcattgtctcatcttgttatccgccgaaattagattttttcatagatattaggtaaaatagtatgctgatagatgaacacgaaaacgtgaattctggggtttttggagtcgccgatcacgatatggcattcttttgactaattctggaccactgggctgaattcgaaccaaagtcgaaaacaaatttttattcacattatgttcgaatctgaacagagtaactaagatttaatcgtgttatgttatatgactaatttttgctagtcttattatcaattttaaaaacaaaagtgcgaaattgaaaaaattctcggcgggagcaattcctagggattacctttttaccgacattaagttttaaattgggttttgaatagattaccaactcggaggaaaaaacacaacatttgcgacaaagcgaaggtgaaacaaataaagcaacttacaatgaacagcaaaaaaatggtattcttccaattaaattattattgcaaatcgatgccacttaaataaatatttgttttgaatagcaaactgtgaaatgtccacttttgcagcggcacaaatg

SEQ ID NO: 107794 - DNA, 593 bp, Heterodera glycines
tttttaaaaattaattcacttttacattttcgaattcaatccgatcccattgattgctctccctttacttcgctttcactctccccccccccccccttcagcccatctgtcctccgccaatccgtcctcctccgtcgtgtccgatgtttccccgtgtccctccccctctaaatcgtcctctctgtacggcatgtcgctgagttccattgtgccgctcacttccgacgcgagtccgttgccgcgtttcgtctacgatattatggaatggctcaagtgccgggcacacacttcggatggcatcttccgcaaaagtggtgcgtccgactcacaacatcgtcaacatttaatcgctctttttcgtgccatcaaatgccaccctccccaatctgtccgtcctcattttgtcaggtgccagcgtgcgcatcaaagagatcagcgaggcgtgctcggctctctcggctgatcagccaatcccggcccatctgttggccgactcgtcgccttacgacgttgcggatgcgctgaagcagtacttcgccagtttgtcaggcagtctgatgaccgaagaaatctcggaaatcgtcgtcaaaatg

SEQ ID NO: 107795 - DNA, 59 bp, Heterodera glycines
ttactttttcttatgacagaaaaagcatcaaattgttaagcaatcgaaattaaaatatg

SEQ ID NO: 107796 - DNA, 129 bp, Heterodera glycines
ttttgaatgttgattaaaccgcacccagcggaacttaacaccacccaggtgatcagtttttgtctatgagaaaccgcacccagcggaacttacaccacccaggtgatcagtttttgtcgatgtccgatg

SEQ ID NO: 107797 - DNA, 722 bp, Heterodera glycines
tgttcaatgtttggtttttcatcagcttgtacaaaaatgcggcatcaattaccgaaatttgggctcctccgtcaatagcattgctttcgtcttttcgccaaggacgtcaacttggatgaccataacatttcccactgtgttattatttaaattagtgcgtaattgcttgtcgttttgaccatttattgatgtttgttttattcattctcattttcatgcaattatttctcccctcttaaagtttttgtcatgttttgctgttctccgtcattttggatttgattgattgttttgttccccctcgtcttctgaatttgtttgtgtttgattttaataaagtgaaagcttatttggtcattgggttgtgagtgttcttcgagtgcggtggaccaaaataatattacctggcgctcctgacattttgggtaagctcactgcaggttttcttgaattttaaatttggtaggagaccaaatttggcttttgtttttctacttcgactttcatatctgcggcgttgttagagcccgaagactgggaataaacgcagcagacggcattgcaaattgctcaaagattgagaaattgcacaaaatttttgctcaaagactgagaaagtgccgaaatttttaaattgttgaaagttgtcgaaaattgctcagagactgagaagattgtcgaatttgattttggaattgaaccaagacggttaaacgagaatg

SEQ ID NO: 107798 - DNA, 289 bp, Heterodera glycines
ttttgaagcaatgattgatcaggaactgatcagttgtttgaattattaatgattggaggaagaaaaaaaaatggtgagactaaagattagcagtcccaacgcgaaattccttctaaaaaatggaatttaaagataagcattttggaaaagtaatgtatgtgctaacaaaaagtgaatttaatttgttataattcccaataaaattatctaaattaggtaactcaattttatttttaaatcatattttttaataaataaatgcgtaattaaaaacggaaattaaaaaatg

SEQ ID NO: 107799 - DNA, 108 bp, Heterodera glycines
  unsure (1)..(108): unsure at all n locations
aaaaaaagtaaaaatttttaaaataaacaccattttagctactgcaaaaatgatgtcgatattttgatggctggtntaattgctttccgctctgaatttttggagatg

SEQ ID NO: 107800 - DNA, 299 bp, Heterodera glycines
tttttcgggactatttctggtcaataccaattatgttctgatcgggttcccaccacacccatttggttaccaaacgtaacagaatgttcagtaccggagtaccaaaaagctgacgagagaaaagttacactttttttacctgttcgaatgccaaagcaattcccagtttataactgctatcagaaaatgatgaaaatttgtacgggaaatttttttttttctggaaagacataaaaagtcaggattcgtacgtgaagggagtaagtcaccgagcttgtcatggatttaaaaataacatg

SEQ ID NO: 107801 - DNA, 367 bp, Heterodera glycines
aacattagcaattattcctgggcttaaaaaatcccaattagagcatgcatcttgaagaaaaattaaatcggaaaaaccgaaaattttaaaaatcccgggtttaaaccgttaaataatgtaataaaaaccaaaaaatctttaaatctataaagagttttacatgtattaatttgcaggccccttcatcattacctatggtgctgctcaaagttcaaaacaaaggcacacaatacgcaataaaattgtcaaattcaaagaaaatgccatttctgtggttttaaaagacacattcacgaatgaggacatcatacatatagctaaacctgatttagctttaattgaggtaataaaataccattaagaaatg

SEQ ID NO: 107802 - DNA, 118 bp, Heterodera glycines
gaataatgattttatgataaagcaaagacaaagtgacatgcccatgatgtcataatgatgagaaccaaagtcgaaaattcactttgatcaacgcaaatcgactgggacaatttcgatg

SEQ ID NO: 107803 - DNA, 166 bp, Heterodera glycines
ttttgtctttttttagtccatgcaaatacgagcttaataaaaattcaattctcaaatgtttatttaaacattttttctcacttgaaactttaattactaatttatcaaataaaaatcaattagcatttattttgtgttgtacaatactacagtatgcagaagcatg

SEQ ID NO: 107804 - DNA, 389 bp, Heterodera glycines
tcttagagctgaaacatcgtttaagtcaaagcttaaagtgcaaatgctacaccgtccgagattcataataagaaaattattttagttaatgctgataaatttagttttgtgtttttgtatatgaactaatggaaaagggtaaaagcaaaggaagggaaaacgaattcagctgattaggcacatcataaataggcaattacatatatgcgttaatctaataattaattgttaaaaaaaataaataattttaatgaataaaaaaattaggtaatttaaaaaatttaaataaaaattattcgccaaagatcactttgacaaaagtcattttacaaattttaattaaatttaaaaaagcacttcgcttatttatgtttttacctgtattaatg

SEQ ID NO: 107805 - DNA, 281 bp, Heterodera glycines
aaaaacttagtagttcatcataaaatttcgaaaaaatcgctgaaaatttttcttgaaatttttatactaagaattttcatacgagtttttttatgaaaaatttctaggtttgaaaatttttttaaaaaaattttcggggggaaacgacgtgggggggggaaatgaagtgcacccagggaaacaattggcttaaacgaaggcggggcaaaagcatgtcaatttgaattaaatttgaacttggcattactttagctttgctcctttttagtatcgaaaagatg

SEQ ID NO: 107806 - DNA, 64 bp, Heterodera glycines
ggggactgccccgaaaacaaaaaaatcgatttttcaagtgtcgttggggtactcaacaattatg

SEQ ID NO: 107807 - DNA, 246 bp, Heterodera glycines
tttgaccctgaacatcaaatgcaagtttggttttgttttttgacaatcaaaatttagttgttttttttaaattactcacaaaaaaacgaaaaaaacttttttcaaatgcatattttttcacgaaaaaaacaaaaacaaatttaatgtcactgagaagtgacggagcggggggggggggggtgaaaattcgaataatttttgggtctacaccaaaaaaccaggagccaggtcaagcagttggagatg

SEQ ID NO: 107808 - DNA, 372 bp, Heterodera glycines
tttaccatctggagtgcttccagtgcctggtgtgcaaagtgagttttttttttgaagcgagcgagccatcgggaatcgatctgatcattctggtctgatcaatggtctgatcaataaacgacaaatcagtttgatcaatttggcacctaaacgggcaacgatcactctgatcatttttgatcaatcgggaaacattgattattctgatctgatcgataggcaacaaattattctggtcactttgatcaaatgggtaaccgtcactctgatcaccttgataaatcgggcaatctgatcattcattgcccattgctcactgatcgatcatttgatcactttgactgatgccaactttgacaaatttcaaacatg

SEQ ID NO: 107809 - DNA, 80 bp, Heterodera glycines
tcctcgttctgctgagcactcctttcccgtcttgtcttgacctctggctgacctgaccccggctttgtgtgaccacgatg

SEQ ID NO: 107810 - DNA, 77 bp, Heterodera glycines
gaaaatctgtctacaataatgaccgattcccttatgcgagtgatggttacgaatcggcgcagcactagggtgccatg

SEQ ID NO: 107811 - DNA, 78 bp, Heterodera glycines
cgtaaatgcacctattctgtcatgaaatttatgaaattttcaattttagcgttcagtatttcccaggcatccataatg

SEQ ID NO: 107812 - DNA, 186 bp, Heterodera glycines
agctttgttaataaactaacaatgaccaatttgttgatttctgtaacaaattaaaaaaataaataggcgccgccgggaaaatgttgagaatttttggctaaattggtttaaagattttatcagaaaaaaggacttggatttttagtagatatattttgtaaaaatgaagcagttttcagtaaaatg

SEQ ID NO: 107813 - DNA, 232 bp, Heterodera glycines
atataaaagggaaatttttctcaaattaaaaaatgtaatttgagaaaataataaaaattaagggataattggtttaaaattgtaattaactcatgtaatttcaaattgtaatcatataattaattaaaggaacctgtaattaattaaaggtacattgatttcttatttatgatggttttttaagtatcgcccaaatttcattatgatggttttttaagtatcgcccattatg

SEQ ID NO: 107814 - DNA, 795 bp, Heterodera glycines
attatgatcagttttggtgttgcattgtatggataaaatttagaaaaaaaatatttaagcctaattaagaacattaatgcctaagccataggatgttatgattatactttgggaattgggttttagtggcgaatttaaaagagcgatttttcgtaataaatttataattttgaccgcttttaaaattttttcgtttttgtcgatattctataagttattttttataaattcgcaacttaccaacataatatagatagaaatctaataattaataaggggtttattttttctacaattaaatttacatattcattcaacaactgtttggcatatgccccacccccgcatatgccaacaattgtttggcgtatgaaaaagcccccgcatatgccaacaattgtttggcatacgtcaaagcccccatttataataaaattatagaaaagatattatgtggtgccaacaaaatgtatgacatttgacacatatcattttcccctttttctctgccatactcttcatttaacatactgtctattctacattgtcttcgtatcttttccgctatcctttatacaaatactattttaatacctaccccatattctcatatgaatttccatattagaacagattgtgaatatgaaaaaattattattatttattgtaggggaatagtgactgagaacccattactaatgaaattttcatttttccattatttatcaaaaagtaggcctcgggttcccagtcaatttttttgtataaagattaaaaaattttttatagaaaatg

SEQ ID NO: 107815 - DNA, 790 bp, Heterodera glycines
ttttatcatttttaaagaaaatccatacaattgagcatagtaatcccaaaaatcagtcatttttgttgaaaatctgttaacaaatcacactcaaattttcaaaattttccccggcggcgcctctcggcaccgccggacccccttcttccccaaaagttttttggaataaacgcgccgcaaaaaattgatgtgaaaagtaaatctgaattcaaataatattcgatcatagtccaaaatgattaattctttgaaataagtgaagaaaatttgtttgaaaattttcattaatttaatttagctttaacttttggatttattaaataaaaaacaaaataaaatttaattttgtgccattttctcttgaaataaattaaaatttgaattttttaaaatttttttgaatttttaaaatttcctggttggtcccggttcccggtcccgaacaaaaatcgaggtcccggtcccggcttctctcaggtcccggcaagtcccggtcccggttgtttcagccgagtttttgatacaaaaaaatggggggggggcggatggaagccgtaaatccgtaaatggaaagccgggagttatggggaagcgcaaatccgaaggctcattaaaaaagggacaaaaagtactagaataaaggggacgacagaatgttaattttaaaattttcatttttttaaaaaaaagcaaaaaaaaaaaaattttttttattgattttcttactgtagcagggagttgacctgtgttcgatttgaatttgtggatgaaatggtagaaggacagaatg

SEQ ID NO: 107816 - DNA, 55 bp, Heterodera glycines
tttaattttttttttaatttgaattctcaattttttagccaaaaatgtgctgatg

SEQ ID NO: 107817 - DNA, 402 bp, Heterodera glycines
aattagaaaaggaaacaaaaattcaaaagtgtaccatttggacagattcaaccaatgtacttgattttgttagaagtgaaatgaaatttgataaattattaaaaacagagtacaaaatatcaaaaaatggcatttaaaacatgtggacagcaaaaataatcctgctgacctagcatccagaggttcgtctgtggaagaattacaaaattctgaactttgctggaagggtccagaatttctttcaaaaatggaaatagattggcccaagacaattcgtgagcatgacccaatgaatccgcctgaggcaaaagaaaaacaaaatataatatactaaattaattcagcaattgaacaagaaatattttttaattctgaaaaattcttccaaagattttcaaaatg

SEQ ID NO: 107818 - DNA, 587 bp, Heterodera glycines
ctttttttttggaaattaagtcaagggcacccgaacaaaacatttgtgggattaaaaaatgtgattacagactttggggtgatcagaagaacatattggtaaaaatattaagaaaaattaaacaaatttatttatataaatttatattgttttacatatctcttaaaaaatttaaattctctaaattcattttattaaactttaaaaagcttttatttaagaacttcaaaaaaactttatttaaaattcctattatattaatagaattgttttttatttaaatttattatttatttcaaaatttttaattagtttggaaatataacaaaatgatattgaaggaagtatttaaaactttttttaaaatattttcgaaatattaagattagttgaaaatatttgtggattttacaaaataatctatttctttatggcaaatcaaaaaacttgaaccatgttacagaacattacactaaaaagattttgtatatattaaatggggcataaaaatgctttacttttttaaacaattttaattaattttagcaaatccaaaaacggtggcatttgtgtcccattgtgggatg

SEQ ID NO: 107819 - DNA, 860 bp, Heterodera glycines
acagaaaaagtataactacttttaaatgaaaataattttaagtgatgaaaattttaaaataacttcgtagtatccgctagtcaaatctattttgcattaaactcattattttgagcaggagggagtccgagatagaattacacaaaatatgtgaatatgttcttgtgtttaattaaggcctttaagcgaatcttttaaccctttaataatataagcgagttgaaaacagtctcactataaatatgtgcttattttaaaattatgaatacctcttttgaaaaatgcaagtatattttaattggtgagtaattttcaaaattattagctaatcaagaaaggccaaaaattgtcctctattagtgaaaagaaaaaattcctatttttactccgcagtattcaaagtcaaacagctgcagacagaaaaagtataactacttttaaatgaaaataattttaagagatgaaaattttaaaataacttcgtagtatccgctagtcaaatctattttgcattaaactcattattttgagcagtagggagtccgagatagaattacacaaaatatgtgaataggttcttgtgtttaattaaggcctttaagcgaatcttttaaccctttaataatataagcgagttgaaaacagtctcactataaatatgtgcttattttaaaattatgaatacctcttttgaaaaatgcaagtatattttaattggtgagtaattttcaaaattattagctaatcaagaaaggccaaaaattgtcttctattagtgaaaagaaaaaattcctatttttactccgcagtattcaaagtcaaacagctgcagacagaaaaagtataactacttttaaatg

SEQ ID NO: 107820 - DNA, 538 bp, Heterodera glycines
atcaaatgaataattggagacagaaaattagtcataatctcgtctaaaatcgatcaaattttataatattgatatttttcgatagccctaagtgttttctattatcctgcaaattttaaaaaaaattctttaagtttaaaaaaagttatgacctgagaagctcaaaaaaccaagtttttttgaacatttttagtcataactttcttgaaacttaacgaaattttttgaaattttgtaggctaatagaaaacccttaggcctatcgaatgatatcaagaattaaaaatttagatgcttttgagcaaaattatatcaaaaaatattttcatttgatggttttttgactaacgcccattatgatggtttttgactaacgtcatagcaccgccaaaaatggctgtattacgatgcgttatatagatatgcaaaatttggtgtggatttaccaagtgaattccgtttttctctattaacagagataaagaaatagtacgccaaaatgagagatgtttttttctctacactctattgacacatg

SEQ ID NO: 107821 - DNA, 606 bp, Heterodera glycines
ttgcccaaaatttgttaacaaaaatgcaataaaaaggaaaaatacaccctaagaatcgacccgaaaattttcaaaaacacaccccctgagaaatgaaaaatttttcaaaaaatcatctccaaaattaagttaattattttattgacgataatttttgattttgaaaattatgtatctcattaatggtttggcataatatttttgctttttgaagagaattttcgattttacagcccctaaattgccccacgcgaaaagaccccgaccccttaattggcgtccttcggaaaacggcaaattgtgctaattgccacaaacagatttaattgagtaattaaaatcaaacattatttggcattaaaatcattacctttttcagttacatttaccattccgtcgtcgcatttcttcgtttggcaaaggcatcaatttccatttaattgtgtcgtcacataacaacaacaacaacaattacaacaatgtccaccgaattttgaatgtttatgtctatgcaattttgcccattttgcgccaaacattcgccatttgatcctttccgatggtgttaatttggacaaattgcttcacctcacttcgccgaaaatg

SEQ ID NO: 107822 - DNA, 609 bp, Heterodera glycines
gacattcacgtggttcggcaaaagcacagcgcaggtggacatggaagacaaaactttcaaataaaaaaacggcttaaaaccccaaaaatggcattttgaaaatcttaacaattcacacccaaaacttcaaatttttcccggcgcgcttatcggcaccgccggcttcctgttcccgaaaaatttttcgaaaaagcgcgttgcaaaaaaaagcatgaaaagcaaaaaatattttgtcaggggcgggcccgtgcccttggccctccgcccaaggcaacttaaattatggtcaacatttcctcctttctcatcgattgtcagagttcggccggtgaacacgtcggtctgctgtgtaagaatctatactatgatccaatttcgcgtggtttttggttgacaaagccgggaacagtgacgccaacgaacattttgaaagtttttaattcctttgaaaaattgtagtgtaaaataactgattaggtggaattcttcatgttgagcgaggcggacggcgggcggaggcagggcattcgtaacggattccaggaaacggtgttctgtactacttggaattcctgcgcaaaattatttttcgactcggaattggtcatg

SEQ ID NO: 107823 - DNA, 227 bp, Heterodera glycines
aattattgggatgccaatgattgtcatgagaatctcgaaatcagtggcgacaaaaatttgactgtccattacaagaaaaatgattgtggtattttgaataatatatatacgacctaatctttttttcctcatcaaaaggttggtgttttgtctttggtgaatattcgattttattaaacaataactcgtccaacattttttattacgaaatttcggtcaaaaatatg

SEQ ID NO: 107824 - DNA, 140 bp, Heterodera glycines
accttcacaacatggtaagcaaaaaatttagttccatatttaattaaaatttaattaaattgtttttcaaactttttggagtcgaaaaaattccattccaaattccttaaaataggccaagtttcaggcattggccaatg

SEQ ID NO: 107825 - DNA, 115 bp, Heterodera glycines
tgtgagaggacatgttgcgacacaaactggcactttttttatttttaaaaatatatttttgttttttcaatttaacaaattaatttttcaattttaggaaagtcaaatacacatg

SEQ ID NO: 107826 - DNA, 208 bp, Heterodera glycines
ttcgctgaccaaagtccacaaacgctcgttcatttcgcccatttcattgcccattccctttctttgcctaaatatcgcttctttctcaaattagtcacccgtataatatttctttgttctcttggtcaaattgttgtacaattttcttgtttcagttattcaatacaaaataaattccaaaccaaacaccaacttttccctgctgatg

SEQ ID NO: 107827 - DNA, 168 bp, Heterodera glycines
cgtgaagtgaaaatttgcctaaattacccgtaaatcacatgaatcggcctccttcagaaagaatagatttggaagagacaagactaagtgaaaaggcacagcgagaattttttagaccttatcgcacccccggagactcagaaagaaattgagagacaaattaaaatg

SEQ ID NO: 107828 - DNA, 298 bp, Heterodera glycines
  unsure (1)..(298): unsure at all n locations
atattgatttaaaaatactcatattagtgtccaaacgacgactttttagttttaaaaatgctattngcggcgcgcttctaaaaaattttctggacggtgggtctggcgacgccgatagccgccgccgtgaaaaatttaatgcgatttcttaacgattttgttcaaacaatgacaaattttacgatttgagccactttttaaagagatttttccagtttttttcatgccttgacctggagctgggtttcctggacaaaaatccaggcccaggaaaaaaaatccaggttgccgaaaaatg

SEQ ID NO: 107829 - DNA, 66 bp, Heterodera glycines
ggttaattcgattgttggccattttagcatgaagtgattttctataaattacagaaaagaaaaatg

SEQ ID NO: 107830 - DNA, 367 bp, Heterodera glycines
aataaggaatgcttaaagtcgcgggaattttacattttttggatgaaaaacactcagcaaatcttaaaatttgtttacttcccaaccatcccttcgctctttgttagggtcgtccgtttgcagtcgccttccctcgtctccccctcgtcgccccacgtgcgctatttggccgtcctctccacccaattcgacgccaccgagtcgcgcgaggctgcgctgctcggcttccatttcattgggccgtccacttccaccgcccctcgcagcgcgtacgaattgcaatttttggcaaaattatctgacgggttttgttctccccttttgcttaaaaacatactaaaattcaaagtttgacaaattttccatg

SEQ ID NO: 107831 - DNA, 160 bp, Heterodera glycines
caaggggtggcaatgcgctgcagcggcagccaaacatttcccggaatattgtgactccgggaaactcggtgacaaaaaatgcgccgattgcggtgcacatctcttctcacatgaagacagtagcatttgctgccggaagggaagagttgtgctgccaatg

SEQ ID NO: 107832 - DNA, 207 bp, Heterodera glycines
aattaatttaaaattattttttattttaatttttgtgtttgaagcgtttcatcttcttctgaaatagccaaaaagatgattgaagtgaataaacaagtttctcgaaatctcattttttaggttaattgagcacttttttgtactatttaaatataaattattcaatattttgttattaaatttacatttattatttaggcttctatg

SEQ ID NO: 107833 - DNA, 297 bp, Heterodera glycines
acacggcgagtcaattttgggctcccagtgcaaataagtttattatttatttagtaatcaaaacgccaaaactttgcaaatcttaaaattttttttgggaatttcccttgtaaaaatgcaagagccgatctcgagatagaaaagaaacttttaaaaaacaaaagagaattcgatagagggggtcgaaatatgggcctatacaaaatttgaagaaattttaaaagctagaaaatttttttgaaagggacgaacatttaactcatttaccagaaattttattattgttttttaataatg

SEQ ID NO: 107834 - DNA, 211 bp, Heterodera glycines
actgtaaaatttgacaccaacgcaatgaattacaccgtcagcggaggtgaaatagccaatgagtaccttttgaataatacgcgttatgctaattaattgtaaactaattaattaattgctttaattaattgattatttattgttttcactttcgtttgctcatcatttctctcaactttaatgttcaaaggttctttgtcattaaagtatg

SEQ ID NO: 107835 - DNA, 1003 bp, Heterodera glycines
taattaatacattaattatgtatgcattttgctgatgctattgcaatttacgggtcatttgtgttgtcactattaaattttttattcatttgtgtgagggcaacgttttatgtatcaacaacctttgtaaaaataataaatagcaagaaatatttatttgaacgaatttttaggtgctaaaaagcgagaaaaaatcgttgctaaaaaacagaaaaatgccaaaaaattggaaacatataaagtaaatggaattgcatcattctttatccattccgatcagggaagggcgaatctcggcttaattaattattcacatttttaatacattaattagctgaagttattgtgaattttacgggtcatttaacctatatttggacaaattgatgataatcaacattaagcaacccattggatatgctcaaaaatgcattaaatgatattaaaacattgtataaaattcgacaaaataaattaaaattgtataaaattaaaattgaaaaaaatataattacataaattactttcgctttataaaataatttgtaaaataattttaaatttattaaataattatttaataaaaattttagaaaagcaaaacaataaatgctcttgttcatcattaccaatttaaaacattttgctttttttgtaattaccgtacatcctctttttatcctccttgggggattatttttaaacctcctcagaaaggggaggcgggataattggagactgggggattaagatagagggattaattttcaaatgcttcatagactgggggataattggagactgggggattaagatagagggattaattttcaaacgcttcgtagactgggggataattggagattgggggattaatggagattggggggattacagctttctttttctttttaatttaattttttcatgcattttaatcatgaggatttttattaaaaaaaaaagtgttgaatatatgaaatttggccaaattttacagatg

SEQ ID NO: 107836 - DNA, 376 bp, Heterodera glycines
aacaaagttcactccattatcgattggtcccaaacaccacactattcggtatcagggatgcgatttgagccctatttgttgatattttctcctaatttcagagagttttttaaacatttttacagggttaactatatcctagctttgggttttttgtaacttgtattttaaaggaaatcagcatcgccgaatctaaaagttccttgaaatttttcaaaacttggcgttaaatcctaagaaatagttagttttggacatttttgggaaaagaaagggccagagattccgttagggcctcggttaatcggaaaatattttgcttagactcaaacaaatatttaaaaaagttaattatttcccgaaatctcaggcaatg

SEQ ID NO: 107837 - DNA, 864 bp, Heterodera glycines
aggaaaaagcgaaagagagcgaccgatggacacatttcgcgttaaatgtactcattcaaaaccccaatcaattcatctcttcaatattggcttatttttcgggaaagacttcatctttattctgcggtattattgtgtgtcattgtcttcagaaaatgtgttccttttgttcccagttttgttgtgatgtggtattattattgttgctcgttgaatacattttacgtaagaaattaaaaacatttaaatgcttaattcggtgcagtattttcttttgtccattttactactatgtataataaatataaaaataaccattaatctggcatcaggttgtttgttggaatgcatcctgccaaacacccatcttcggttaccgtcttgccaatgcgcttttatgccaattgggacgtcgatcgtacgtcttcgccaattgctgtacaaaggtgccgtctcgtttctccatgtgtttacaattgaatgtacattccccaagggttctgtccatggttttcacccgcctgcgtttgacaaaaagtttggcgataactgaaaatacgccgttcacaatagccatccgacttcaggtgggttttcgacaattctttttttgattggattttatgacagaacaacaaaaggacactgcgaaccaatgatttgaatgttccgccttcgaaattggacattccgcttgacatttcttttataatacaagtgcgaattgccccgtcaattaaatcaccttccaaatttaagtactgtcactttatcaagcgcaaaccgaacattctccaaattttgatacagcggcggaagagatacaaaaacagacaaattcccgggtttaaaacgctcgcaatg

SEQ ID NO: 107838 - DNA, 342 bp, Heterodera glycines
aattttcaattggatgaaaaaaggaccaaaaaacattttgattttgacgatttgtacaacagcaattgaaggacggcttggattctcttaatgactttgtattgttttcatttgtttctcattttgatttgcttcttcttaatttaacaaaaataaaagtgtaaatgcctttggaaatgctctaattcgttttatgtcattaaaatatttattccacccatttgagtgcgtccgatcatccgattttatttgttccccgactcggtcgagggcagtcctaattttaatccttttaaaactcgattacactttttttgttgctatttcagaataatttaaatg

SEQ ID NO: 107839 - DNA, 679 bp, Heterodera glycines
atcccgatcagtgcacccgaattttttatgaattttcaactaattctgatcatttaacacatccggaaaatgagagcctgtaccaaaaaagattcgcatgtgtgactcattttcagtagtttttcaaagatagaaaagggaatggctgatgagctttaagcccaccacaagacattaatatttttaaatattttgaaggccagccaaattgaacggtttggtatcaaatgaaagctctcaagaaggagaagctttttctaagcatctgataagcgattggatgcattataaaaaatatataggcgcttttcagctaatcctttttttggtcttaaaaaccctcagattttttttctctatcatatgcaaaatttgaagcgaattcaacgtgtagaaaaaaaatttaaacgtcacgaagtaaattcagtctttctctattaaaatggataaataaatagtacgccaaaatgagagatgcatttttctctgcactctctatttattggttcatctctcgtttttttgagtcggtgtgtaaacgaaaagtgatcaggacatttataatgcataaattaattggtgactattagttagaccaaatggacctatattttcttttaaactgggtttccgcattgcgcaggttgaaattgcctttgtcacgcccactgggcgaatg

SEQ ID NO: 107840 - DNA, 1003 bp, Heterodera glycines
taaaaaaaataaatttagtttttttgttggttatttgcattttgccaaatttataaaacgcgcaaacccattttggcggatttataaaacgggactggcggatttataaaacgcgcctttccattttggcggatttataaaaacgcgactggcggttttataaaacgcgaattgttaggtggcggatttataaaacgcgactggcggatttataaaacgcgcctttccattttggcggatttataaaacgcgactggcggttttataaaacgcgaattgttaggtggcggatttataaaacgcgactggcggatttataaaacgcgactaggtggcggtttttataaaacgcgcaagcaccatccataggtactgtatctacccaccaaattttcattcggaaaccccacggacacccggggaccttcctttgttagtacttatatattcttctggagaaacttaaagctatcgaagcataaccaagaatgttaaatttagttgactttaaaaaatctgtgagtttattttttaattttaaaagacagaatttttgctgttttaagagaccataattttaatgtttgaatttatttatttttttccagaatgtcctttatccaaggattaatttattataacattatttaaaattgtatatttttctagagaaacttaaagctatcaaatcattaccacgaatgttaaatttagttgactttaaaaaacttatgagtttatttttaatttttaaaatgccaccttcacagatcactgaattttgctgttttaagagacctaattttttccttattagataatgctcgaatttatttatttttttccagaatgtccttgtatccaaggattaattacgcacacaatttgatcgattgccctccccccattttcagagtcccactttttttatttggctttcgaaaatgccgtctgcacagaatatgtgactgaaaaattttggaaggcgttacgaaatttgatg

SEQ ID NO: 107841 - DNA, 76 bp, Heterodera glycines
ggtttgtcgataaattttgcattccgattttttttttgaaatttttcttggtattttaaggtctgctacaaacatg

SEQ ID NO: 107842 - DNA, 1003 bp, Heterodera glycines
tagaaactattttggcagttttttagcaactattaggtacccatttcgggatttttagcatttaaaaatccgggccctgtttagaaattaaaaaaggcatggaaaggctctaaaaaatgcatttctcggtttaagttctcgataatcgcatagccttatgaaatataacgcaaataacagaaagtgaataactcaaatccctaaaaatgtaaaatgcaattaagaaattcggcattctatatagcaactatacaactatacaaaatataacatgcataaattgattaacaattttttattattattaaaaatttacaactcttctgcataagtagagtaaacacaacttatagcttttattgatatataaatattattaataaaaaaatattcatcattgtattatatgcgtattattacatattcactacagattctatagtttgtataagtattttaataaaaaatcatcattatattcacatgcttaaaattgtataatattcctctgctgatgctagagtttgtataaatattatataataaaatgttgatcattgtgtttgcatgctataatatttagtaatattatatttagagatcagatacgggccggaaccgtatacgaattttagcccgtaacccgtacccgtttccgtacagacggaaaattccattctctattctattttacgctgcaatttgtaaaaatattaaataatacgattcacatgcttaatgtttgtataatactttctgatgctgtagtgtgtatatatttgtctgtatttgctataaacgacgcttaatattctgctattaaacagaaattcgcaatataaaacaaaaaaaatatgaaattattatcactttacaatatttttttttcttattttttaacttatttttcctaaatttcacagcgttttcaggcaaacattaagttcacctaacaaataagcatagaacgggatcactgatcaactgtatacccaacaaaatg

SEQ ID NO: 107843 - DNA, 1003 bp, Heterodera glycines
tcatttttcgctttgtggggggaacatttattatcatttatcaaaattatcagagagaggctcagtttgctgtcaattaggattccaagatctcggattgtttgggtctctttaataatttttccattaaattggcagggaactttaaaattatccttgccaatgtacagagaagctgatttttctggtgaaaatggtagaccccacataaaaaatttttggaaaaatacacatgtatcttatttgtaaccgcaattagtgaataaaattgcttgtcttaattcgaaattacttttcatgtagaaaacagcaattttaaaaattatacccctaaatttggaactttttcgcccttatttacggccttattcatcaccccataactttaaaattggatagaaaataaataaataattcagaatttttttctctattacctaggtacctatatgcaaaatttgttgtggatttatgtaacaagcagaaaaaaaataatttatttttacataattaaaacaaagagatagtacaccaaagtgagagaaattacaaagaaaaaaagcaactacgagatagtatgtgttaggcttttctctgcacagtggagttgacccatagagcacacctctgaactaaaaaaaccttataaatatgtcgtctcttggggttaattttcattttgttgtatcccattgttttttcatttgtttgcattttttctgatttctcccacctttgaaaaccttttgcttctatctctataatatgtaaactcggccaaatttttcttttttcacaaaaaacaatgaaaagctctaaaactgtttccgaattggataagtattccccacaaagtccttgcttttgtgagtcgaccttttgacactttcattggttgggtccatcattttgtgggcttttcctaccaacaaaaaaaccccaatttctgctgatagaggcaataatttattccgtttaaattttcatgtctttatttgctatg

SEQ ID NO: 107844 - DNA, 720 bp, Heterodera glycines
accaggtcattcaaaaaacaaaaccaaaaacagtaattcattttagacaatagagaaaattaagaggtattttaggcatttgcctcttctttaaaaaaaaataattaaatgtaaaatgccattcctaaataattaccagccctagtaatgagcaataagtgtcggtgttttgcctttatgctattgattttgccgtttgtccactccgcttttctgcttctccttttcaatgtctcttctccctttcgttggcatttatctttccattctcccaacaacaataataataaatccatccattctctgtgccgttttaccaacatttttgatttttccatcactttcttagcttctttgaattaaattttattgcctattttttgtatcaaaatatctaggcaaatttatatgacaaaaaatcactaaaattattattttttatccgaatgtttagttaatttgagcattttaactgtgtaaaatttaacgaatgtcaaaaattacttgtaaatatttaaactcatcttggaaaaatttaattcatattattttgtcacattcctttatttttaaatattaaaaaatttaatttctttatcaatatgaaaaattaaaacttttttttaatattattttcggtgttttataataagattatgcacaaatatttaggggttgggtaccatgcataacattcatttccctctttaattagaaatg

SEQ ID NO: 107845 - DNA, 445 bp, Heterodera glycines
atcgatttggtttttgatttcttcaaagtcaaaaaatggcccatatgtaggcggaaatggaattaaaaagcgtgaagttaaagaacaaaagttaaatttataattaatattaaaatattttattaaaaaaaattcatccatttgcattgagttggatatttttatggaaaatatgtttatggattataactccatcctagaggcttcaaaccaagatatgtgcagaatttattcattgaatgtttttcatatgtggacccacaaaagttggcattgtttttttttggtatttcaattcattttgcttaagttttgctttttcgaggatcaagcagaaatatttggaattggatgtatttattaataaaaaaaaatcaaattaaaattaaaatttaagggcaagggttgttttcaatcttacaaattctttgaaagtcgaaggatg

SEQ ID NO: 107846 - DNA, 254 bp, Heterodera glycines
aaaatttagcctattaaaatatttagaaacttttttattatattttttattttttgaaaaatttccgatttccgacgtttttggggtcgaaattccgatttccgaaaattttttgatccccgaaattccgatttgcgaaaatttttggggcctcggaatgccatccctggtggctggggaagctccaatattttcataataattaaaaaaaaattattttgctaattttcaggtggttatacacttggccaatg

SEQ ID NO: 107847 - DNA, 455 bp, Heterodera glycines
atgctgtccgcctcttcctccgcgcggtcggctacgcaaaagtgaaactgtgccgtcagttttttgaccggctgagggcacgcgaaaatttggggccggacggcgaagtgttctgtcggctggccacgaagagtttgatgcacattttcaagttagttgctttttcctattccaaaaatttatattttttaacgaatttttctaatttgcgattggatttgccgaatgttttgcagaagcgcggcccaatcgtccgtcggccccgtcccctcgtgctcacttgaggtaattctgatttaaaaattttaatttttgcccatttcaatatacattgtcctatatttccattttttaaaatttagttggacccccaatcggactttgcctacgtccatctccaatgtttgtccggcattcggcgctgttttgtgctgtcgttgcgtgagtatgccatg

SEQ ID NO: 107848 - DNA, 1003 bp, Heterodera glycines
gtctcgactttagagaaaagcccggaattttttttttgtggtttctgtctttggctcgatccgcaaaatttttaattcaaatctcgactcaaaaatggctaaaaattatgtgttatacaaaatattatttatttatagtggcgaagaaaaaaaagagaaatttaaatttaatttcttcggcaaatttttgtcggttcgattggacagcaaaagtgccgaaaaatgattaagcgacgcatcaaaaggcgaacaccgacagtggtgatcatcacttgtacagtcagagtggtcagtgcctgaggggattgagttggggcacaattagggagggatatagaagcgattctcgacctcgaatttgtcgatttttgggaatctctggggtcacattggtctcgataaaaagtgttggcgatgagaaccaataaatctctctaatccccctcccccatttttattggataacaaaaaatggaagccgaaatttaaaaaatgtaaaaatgcaattttaaaataaaagtgaaattccgccgcccaatttttgtgctaaaatttggcatggatcagctcaattttgtgcgagttggccttttctttttgaatgtaaaaatgggataagaaataaaagaatttttgggattttaatttttttttggggatcaaatgacaacaaatttttgaatggatttcgagggggcggagaaaggctttttgtgttacttttggtgcacttttttgatcggaaatgggagaagggatggatcaaaatgggatttgggaagggattttgctgcttttcaatgggtcgggggccgaggttcaatttcaattttaaaacaaatcccgccaaaaaaaaaaacagatttcggtgccgtgtgccgccggtggtgcgcaaaagtcaacaaaagtggcggcggtggcggcaaaatgcgccgacgcccgggtggcggaaaatgaggcggcaacggcagatgaaaagcggcggcggctgcttcaaatgatg

SEQ ID NO: 107849 - DNA, 981 bp, Heterodera glycines
ttttaaatttctgtccgggctagtcgaagactaaagggactttaaaaaagagaaaagatgtgagaaaatctgtccgggctagtcgtaaactaaagggacattaaaaacgaagagaaaataggtgagaacatttgtccgggctagcgaaaagctaaagggattttaaaaatgcaaaaaaaagaagaacgaaatttgcccgggctagtctaaatgctaaaggggctgactgcatcgaaaattgacaaatttgacaattatttgtaggagagagagagaataagaaaagagagtgaaggaagccaaaaataactaaaaaaaagtcctggtagcaaacgaataaggaccaatttataaaaatatctgaacgattgagaagcaaaaaaagagagagagagagagagaagaagtgagacaaaaaaaaatagaacaatttttttttgaggagagcaaaaaggcccgggctgataaccaatcaaggggcactattttagctaattaaaaagagggaccaattaaaaaaatgaaaattaggccctatcattttgcttacagtatgagatacagtttttacaagttccaaagttcattttatctctttgttttctctcgtttctcacgccataagaatattcacgtaatcacgtgccgccgcatttttcattgggcgagatcattcactttaaacatttttgcggcgcctgagaattgttaattgctcttgataggcggagtttaaacggagatggaacagataagcccattcctggaaggcgttcgcgtccattcgattacccgctatcattcattaattttttttctctctcaattaatgcataatgggattaccaaacaaatttttttttagcaaaataaaacaaaatcttattacgaactgaacgacttcgaatgtctacatcagggggctcgtcaaatgagttcccctttggtacatcccaagccttcgggcaggaaacaaagatg

SEQ ID NO: 107850 - DNA, 426 bp, Heterodera glycines
gaccttttgttaatattcaatagcaacacaatttccccttttacttctgtcccgtgaaacttttgtccggcatttgtccgaattccgaattttgccgggtccaacggggggtccgttctgttcacgcacgtttggctgggcaccgcccaaaaaatctgaggattgccaaagtgagggaattggggggacaaaggggggaaggggacatgcctcgaggggactgacggggtcgaattggagggtgaaaagcagaaatagggagatgaagaagcggagggataagcgggagaaaggaaaatggagggaaaaaggaaaaatggggtaaaagagagggccaacggaagaacgcatcggacggagcatcttcttgctgaaaacaaaacttagtacaaatggatgaaaagtagaaaaattgagcgggtgatg

SEQ ID NO: 107851 - DNA, 147 bp, Heterodera glycines
ctgtattgttggcagttttttttaaacgagatgcaatttttattttaagatcaaaatctagctaaatcaattttaaacagtacctttcattcaaaaaactgtacttcattttggcccattttttctcacaattttcatctgataatg

SEQ ID NO: 107852 - DNA, 451 bp, Heterodera glycines
attggtagaaaaggctggattttttgataagagagagtccatgacaagagttttactgcgcatatgatactttaaagttgtgtttttcttgtataatcccaaacgatggaatttttctattgtagaaattttttcgaaaatgtctatttttcctaacaattttttttaaaaatgggaaccgacggggcagagggatgaaaacccatgtacgcccggtaggtgcactacataacccgcatatcgtttcccccggatttttaaaaaaattttaaacagtaatttaaaatttttaaacaatttttttgaaaaaatagtaattcactataaaattttgtaaaatttctattttgaaaattaaaaaaattcattgttcattgtcagatggcgaccacctcttctgccagcggcgccggtctttccttcgcctccgattgcccttaccccccaaatg

SEQ ID NO: 107853 - DNA, 652 bp, Heterodera glycines
agagttggtcggtaatcggtaattgtaaaaaaaccggtaccggtactgaccggtactgcaagaaccggtaccggtactaaccttttccaccggtaccgctaaaaaccggtaattttgtaaagttaaaaatttttgaacaaaatttttaattttcgcgcgagtgactgtttttaaccaagtttttttttcaaattcaggtaaagaacactaaaaccagatttagactctaaaattaagattttttgtaaaacaagggggtcagcggtcaattttccaattttgcgaaggggtccgaggtgtaaaatgcaaaaaagggatctgatcggtggatgggaaaaaaatactttgattgaagattacttttgaaaaaatgttacttttaagtaataaacccgttgtaaatgtgcaaattgatcaacaaattttttgcggtgcatttttccaagaaattttggagaactggcgtaggtagtgagtccggcggtgccgataggcgccgccggggaaatttttaatgatatttgttaacagattttatccgaaaaatgaccaaattaggttaatttttggggtttttaggctgtaaaaaagaaaaaaataataattattaagtttaaatatttataattaattaatttcaattaaaataatg

SEQ ID NO: 107854 - DNA, 245 bp, Heterodera glycines
attcctccaccagccgcggcctctccccccatcttttcccttcccttttccgcctccctttccggcaccgccttcgctttccatgcgcccgcccgtggaggcaattccgcctccctttttgatgagggccgcgatgatggcagcggcgccgcgggcatttcacgcgggcagcttttggcacaacgccaacacgtaatgatgagcaatcaagtgctaattatactaattgactatgtgtcaaaatg

SEQ ID NO: 107855 - DNA, 125 bp, Heterodera glycines
ggagaaatgaatgttttgaaggaatcggtcgataaatgggaaatgggtggaagggaagtgccttttataggcgggaaagagtcgtctcattgtcagtctccgcgttgtttttcgtcggcggcatg

SEQ ID NO: 107856 - DNA, 69 bp, Heterodera glycines
ggttgccaaataattttaaatacttttttaaaattaaaaatattttgcttatattttcaggcaccaatg

SEQ ID NO: 107857 - DNA, 287 bp, Heterodera glycines
atccttagggttagaggcaataaatccgtagtaaacctcactgggagatattaataatccttatttgtcagggttgccgttaaaaattccgtaaccccaaaaaaatccgtaacttttacggctagggggtgagggggaggggtaaaatttccataaatctttaggggttaggggctaaaagaattagctaatggtaaaattcataaattccccagttttgcccaaggctaaaattgtaaaataaaaattttgagctaaaaattttttgaaaaaattatttaaaaatg

SEQ ID NO: 107858 - DNA, 568 bp, Heterodera glycines
tccaactcaaatccgccaaatcccggggtaattgccaaagagaaaccattgaatgatatttatattttaaaaagcgatatttacttaatcatattattagtgaatttatattagctgaacatggccaattttgccgtcccaattttcatcggacacggaacgaatgaccaaaatgtgccactttcattggcgtaagtttttattgtttattttttgcatgcgaaatttgacagattttcaatggcaaatgcccttcggaggtttgaccccaatgtgaatttgcgcatttaccaaatgggccacgaaaattgtgcagccgaacttaacgaagcaattcaatttataagggaaattgtgccattggcatgagataatgataaatcaaatgccttccattcgcaattttccattgccatggcaaccaatgaatgaattggcccactttttttttaatttttggccctttaaattgaattttttttttgttctcaacaaaggccaattagtcctctcaacgtgtttcgtctgactcaattaattgatcatttatccttgttcccccaaaatg

SEQ ID NO: 107859 - DNA, 67 bp, Heterodera glycines
aatgagagagaaaaataaatgaaaaaaaggcatacagtaataaggaattgggaaacggtagaaaatg

SEQ ID NO: 107860 - DNA, 238 bp, Heterodera glycines
ggtatgtttttttttactcattcactttatttgatgttctaattgggtgtattaggtgcttggacgcaatcaaacttatgaggaattcgtatgcaatgaatattttatcggagaccaccctgccataaatgatgattgcagaagcggcaaaaaagaaaacgacaagacggactggaagactgttttcgtaacagtgttttgggaaaaagcattcaagcagatgcaacgcagtacaatg

SEQ ID NO: 107861 - DNA, 268 bp, Heterodera glycines
ggtacatatactgtttttatacttaaataaatttaattctttttttgaatggaaaaaaacaaaaagaaaattacataaaaataaattattttttctaaattcttttaaattttttataaatcccagctcaatttttaattcaataaatttagaaactatttttaaaatgaaaaaaatataaatttttaatttcgaaataaatatttaattgaataattattttacgattaaaatagtgtttttaggtcatttcggtgctcacccgatg

SEQ ID NO: 107862 - DNA, 576 bp, Heterodera glycines
ctacagaagtttggaaccctaacttaaaaaaagatatagataaacttgaacgcgttcaaaagtttttcacgagaaaagcacttagaaaatgtggctttgtgtacaaaaaatatggggaaagactaaaaatcactgatttacacaaattagaagaaagaagaaaaatcaatgatttaacaacagcttttaaaataattaaagggttcaccagccttgaggctgagcaaaattgctttttctcggaaaggcccaggaggcctttacttttgcgagtaaagcgccacacggccaaaactcaaaataattttttcaatagaatagtaaaaaactggaataatcttccactggtagcggtgcaaattaataaggcaaaggaattcaggggtttactaaaagcaatgagttctgagtaggattttccatgttgccatatttacactatatttttatcacctgtgaattcaacatttgattgaattattttattcatttttattacggtattcattttgtattttttatttgatcaaatttatttgtttgttttcatttttgcaccatgtaagagcactaatg

SEQ ID NO: 107863 - DNA, 114 bp, Heterodera glycines
aaagcacgtcttaccgacgagcaaactcacgtaagaaattttttttattacttttgaaattctcaaatttagcgtttcaaaactgacgcagcctttgcacaattcgccaaaatg

SEQ ID NO: 107864 - DNA, 861 bp, Heterodera glycines
ttttcctatacaattgcagctttctacgttttaaatcttttattttgtccggaaatttgtcattaataaccttttttaaaggtttagtgggaaaatatctgttaagcccaccagctaaaagacaaattaataatttatatttatcttcaatcccgaaacaatacgataattatattttactggtaaaattattgaaaattgtaaataaaactcaaaacaattatactctgacggaaaaatttttgaaaatgaaaaattatgagtaagaaaatgttgaagaaataatgcctccgtttaagagaaccgtaccaaaaaggttagagcaaaagttaacaagaagttggcccactggaacacaagcattaattattgcaaacaaaaagggaaaatttataaatgatttttccaccaaaaaaaggaaaataattttcttttgcattggaaaaaatttttggcgaggtgtgcttattcataggggagaggttgtttttttgttttatttgttgtagtgtatttgcaaaaaattttatgccttgccgcacatcatttcaatactcattagtctttattaatagagtatgtcaactttctggcataaatgcatgtattaatcgtccatatttccaaatgtccattcattcattcaccatcaggggcagggatggacgaaatttcgtttcgttttcgtttcgtcctacattttcggcactttttgagtttcgttttcgtgtttcgttttcgtctaccaaagttttttcgtttcgttttcggttttcaaaattttttttttcgtttcgtgtttcgttttcgtcagagcaaaattggacgaaaaagacgaaaatatttacacccttaagaatg

SEQ ID NO: 107865 - DNA, 260 bp, Heterodera glycines
gtcccagcctaatgcatggaagaggtccctgcgtgcctacacttccactgcgtaccctttgcacaaaaatagttaaaagcacactcctttgcttcgctttttagtacggcctgtcctaacaaaagtaatgtgctcttttaattttgagttccattgcttaaataaatgttattttatatttttaatgttacctaaacctaactatgttttttttagtttaatattctattaatttattttgccattattttaaattaatg

SEQ ID NO: 107866 - DNA, 113 bp, Heterodera glycines
atacagactcaaattccatgagtctgtctgtgttttttctttgtatgcgatacaacagcccattccattgttgcattgacaagcaagcaactaatgatctaatgtttgatatg

SEQ ID NO: 107867 - DNA, 1003 bp, Heterodera glycines
cttctaccgcatttattaagtcagtttttgttgaaaggattaaatctaggaaggattgctccctagttggttcattaatgcaagatgtcaaattatatttattaaagaaatcacaaaataaattaccaaaattacttaaagggaaaggttttttattttttatagttaaatctttagttccaaggttaaaatccccaagtatacagcagttttctgaaatgtaaaggtcaagaaatttgaaaagatttttggtattttttaaattagtagatggagggcgataaataagaatcaaattattttgacactgggtaaattcgacactttcctcaaaaattttgttattttatacccctaaattgaaactttaacacctattttgaggtttttagaaccgaaaatctaaatattttggtatttttgaatattggcaattttcgtaacaaagtgcacttaaatttaaattttcaattttttcaaaaaaaattttcacttgggaaaagtcccggttggtcccggtcccgggttttttcgctgtcccggtcccggtcaaaaaagtttgtcccggtcccgacttttctggtcccggtcctggtttttgtcaaatttcccggtcccgaccaactctagttataccaacctaaccttttaaaaagtacgaattagaaaatgaaataggaaaatttatcatacctaatactaacaccaaaatttcttattaatttttaaaaattctcaatagtgtcgaatttactcactgtcgaaatggtccagtgtcgaaaatgctggaaaacagtgaaagtttttgaatagttcagtgtcgaaatttctctatttcggttttcgggccctggaagccctacaaagcgcttttgaaatcaattgaaaattcgggaaaaaaattctcgatccaatttggaatccggagaccggataaagctggtaaaatagacaacattctattttaaaaatttttacttagagtaatgaaaaagtattaatg

SEQ ID NO: 107868 - DNA, 731 bp, Heterodera glycines
ttacttttttctagttcatttaaatgtgcgcacttgttgaatggcatttgctaattgccccattcattcgttaagatacaaatgctgaaaataaaaacaaataaatttccgtcctattttgattattttaaaaagagtagtgcaaaaacaaatatgacactttcacttaaatgatttttgaaatttataaaaaaagaattacgcgtttttagtttttcttaggtatttttcggcagaaaattaacaataaaaaaaatcacagtcaatttttggcacaaaataaaagttaaacaataaagaaatacagatgttgaaaaaaatttcaatataaaacttttaaaaaaatttaattaataaaattttacaaataatattgccttaaagattttcattaaataggtacaaatttaaattattagtgattttttggattgattattgcgtgtgccatttgaaaatatttttttcccggaggtgtcattgtggcattaaacgaaaatggaaattattacagaaataacacacgtcttactctaattaaattaccatttaaatgacttcatttaaccattattatccatttatcaaatgaaatatttttgaaaatgccctcctttttcattttcaaatttataatatttttaaattataaacgcttaaaatatgattttattaagaaaatgtcttccaccttttctaactcttcaattctgctgcttttcaccacaatg

SEQ ID NO: 107869 - DNA, 508 bp, Heterodera glycines
atcaaaataattgtaatttgacatcgctgagcgtctcacaatcagcgaaaagcccatctttttaaataggaggttttcaatcctgtaaattgttagtatttttgaagcgagttcaaaaaatccagctgtcgttgggttttgcaattcaagcaattaaaaaatttgaatttaatttttaaataaacgcaatttggcttctcgaaacttcccgatcaaaactgaaccaactaacaaataagtccgtcgcgtttgcgttatttcatccctcttaccttcctttttttttgtttcgcttacatctgtttactgatctgttaatgaacgacctttttggatcaaggacagagacgtttggtggatctttcctttctcgcttcacttctctcttcgatcgcttaggattttcatctttcctttataatcatcttcggttgactcctcataaaattggctaattcttccaacaatttagattctgatttaaatttttttgatctccacaaatatg

SEQ ID NO: 107870 - DNA, 480 bp, Heterodera glycines
aaattgatattttgaattacaagataaactctaccattttatctgcagaatagtatttcaaaaaaaaaattcttttaagttacaaaaaaaaagttttggcaaaaaaacaacaactatttttctcccttttatgccaccgtataacaacacaacttttttttgccacccaaatgaatcgttttgaattatttaaaaaatcgcaaaatgtcctttttgttgaatgaatgggaaaaaatgttattgcgccttaggcgatggcgaaatggcccactccgtagttgctgttattaaacttttctatcaattgtcttttcataggaaaatggtcgattattggtcaacacgacaattacggataaatcaatgatagaagaatgttttgagggaaataagaatttgatgaaaattgatttttaattgtgcgttttttgcacttatgtttgggtctcatcagataaatattttatccaagtgtaaatg

SEQ ID NO: 107871 - DNA, 1003 bp, Heterodera glycines
aattaccgagtctgcaataatataaaatatttgcgtactgtgctttgtacaacctctgaggttcctattaggaaaagccttcagattaagcctatatcctatacgagtatggcttttaaatgacaaaataaatatatgttaaattaaaatgctgacacaaaagacctatgttttgtagaaaatccctaatagtttcagctttggctagattttcagcgaatatttttgaacgaaacttttctgtatgttgaatttatccagaaattacagacacatttccatgaaatattgtgaacttgattataatccctagtgtaagtaaccgatattcatacaaataaaaacatctctttgacttaagcaaaataaataataattaagttattaattaccgagtctgcaataatataaaatatttgggtactgtgctttgtacaacctctgaggttcctattaggaaaagccttcagattaagcctatatcctatacgagtatggcttttaaatgacaaaataaatatatgttaaattaaaatgctgacacaaaagacctatgttttgtagaaaatccctaatagtttcagctttggctagattttcagcgaatatttttgaacgaaacttttgtcgcgactcacgtcacgagaaataaaatggaaatgataaattttataagcatgatgcaatttcattaaaaatgggaaaaaccttaatttaattggaaatgttccccctcttcgtcgttctattcaaaaaatatttgtttgtttacattcaattcttattcatttctcacacaaaaatgtattaatcagcgaatgacaccctatttaagtcgtggaattgttattgaaatcggttcagtcggaataaaacatcattcccctgcttgtctactgtttgtcccaatttctattttgccaaaatttttgccgggccgaatttgcatctgtttggtcccgacaagtggtgcaacggccgggaacctctgcactgatgaatg

SEQ ID NO: 107872 - DNA, 621 bp, Heterodera glycines
tggagactccagcctcaccctgtaactcgaacctaagtccaggcccctttctggtgttggctcgcactggttagggaacacgacagtctcgtataatcccacacgcaccgaaagccctagccctcgtaggcaaaggctgcgttgttggtttcagaactgtgagcaagtggggttcggatggccgagtgtaccaacctgcttgctaacaggtagcatagagtaatatgctagtaagcagggcacgagaaagggccgtaaaggctccggctatgaaggaccttgcgaccatgcgtgtgtctcccacgtgtggattcttgaagccagagtcttgcactgcgcgcaggatggagcctgtgcaactcctccctcgctgatcgcaggagtggaggatcaccactctttttaccttgctagcttggggtaccaccttgagctggggccggccttgctagcttggggtacgaccctttgagctggggctggccttactagcttggcgcgccacccttggagctggggtggcgcaaaatcacttgtatacggtctaaccaatacatttgaaaagcgatcaaaagcgaaatgatatcctgtgatttggaaagagaaaccttaacccaaatg

SEQ ID NO: 107873 - DNA, 1003 bp, Heterodera glycines
ttttgggtttttagtccatattttggccattttttggaaattttcacaagaaaaatgaaaaaaaaacgaaaaatacacccctaaagatcaactttttggaaatttttaaaaattacaccccacaaaacacgaaaaatttgagttttcgtcgtcatttttgcattttcaataaatattttcgtcatttttttgcgaacatttcttttttttttaatgagaattttttcgaaatttggcaaacttggaggtgtttttgatacaacgaacaacaataaaaaatatgcatttttaagttttaaaccccattttttggttgtttattgtactttttaggtttatttaagcaaatattaaatatgcacaccttttttgggatttttgggggtttacaacatatattttggcattttttatccatattttggtccatatttggccatttttggcctttttagtccatatttcgggcttttttagtccatatttaatgtccatatttcgcgttttttagtccatataatttacaaccctactaattaaattaatgaaaattttcaaaccaaattttcttcaattatttcaaacaattaatcatttttggactaagtgatcgaatattattagaaattcagatttacgtttcacataacttttttcggcgcgctttttccaaaaaatttttgaggaagaaaggggtccggcggtgccgataggcgccgccgggggaaattttgaaaatttgagtgtaatttgttaacagattttcaacaaaaaaaggctggttttcgggattaataggctcaacaatttgtacggatttccatttaaaaatgataaaatgtgtcaattaaaataaaactatgaataatcatattttgtcgataggaaagccatgaatatacaaaaagaaaattcaaatcgaatcaattaatatctggcaaatctcttgggcaaacatttttaacagaaactgaagaccagactttacactctttgtccaatg

SEQ ID NO: 107874 - DNA, 123 bp, Heterodera glycines
cagctttcatttattcattaattttaaagtatttaacaggaaaaatgattaatcaccgcccgtctgaactgaaaatgtatataaatgacaaaggcaaattacaaattgcaaaaaataaaaatg

SEQ ID NO: 107875 - DNA, 157 bp, Heterodera glycines
acatattttggttaaaaaaataggagcctgtgaccgtgacgtggagcatcatgtttccaacaacgtgcagtcacttgtccggattcacaaccccaacgaccggctctgccttgcgcgtgccattattttggggatgcatgaccgcgagacgcgaatg

SEQ ID NO: 107876 - DNA, 676 bp, Heterodera glycines
tttcctcaaactttggtcaacattttgagcctgaccccaattcttaccatgtacttttggacccggacctaccgggtcgggtatcgggtattggattttccaaaaaccgggtccgggtagtgaaaaaatcgggtatccgggtctgggacccggtcgggtacccggacccggcctaccctacctaaaacctaaaaaaattcaaaaaactattatttattttggcgttttgcccaaattatttaaaaaatgcaataaaaaggaaaaatacacccctaagaatcgacctcaaaaatttctgaaaatacaccccctataaaatgaagaattgctcaaaaatttacaaaattatttatttaaatgacaagaattttggattttaaaaattatttatctcaatattaatttggattaattttgttactttttggttaagattttggattttaaataaatataagccatatttacagtcaagctcaaaatttattgagcaaaaaaaaaatttttttttaattagcttttctcaaaaatgaatggtggtttttgagaagccacgtttcggcaatttttgagggtctgcggaacttcctttgatacccacctatatatgtatgatgtaaaaattatttagatgttatctaagaaaattcctaacgaatgttgggtggctattatg

SEQ ID NO: 107877 - DNA, 134 bp, Heterodera glycines
ccatcttccacaaattcctgccctgaatttcaattcgggaatattttatttacatcccgataaatcaaaaattaatgaattatataaatttttatgtttatttaaaatttaaatttttttaattttaaagaatg

SEQ ID NO: 107878 - DNA, 846 bp, Heterodera glycines
tttttagatttaaaaaaatgtgaaaatttgttttcgacttttggttcgaaatcaggtctggaattcggaattgggttgaaatggatatcagaatcggattctccgaccctgaaaacccctaaaatgacattatctctagaaaaaaaaaactggaaaagtggatctggctaccatcggcactattaccgtaatttttatttgactaactattagtagggatgataaaaatatggatataaaatcgcgaaatatggctataaaataatatggactaaaaatcgcgaaatatggacataaaatggtaaaagctcaaactatggacataaatggcaaaaacgtcaaaatatggatataaatttttcaaaattaagggtatactttctcaaaatttttaccgaaaaatcaacccgaaaagcgaaattttcgtttttttgcttatttttgacataaatttatcaattttaagaattgaaatttatcgaaaaaaataaggacataaaatatggataaaaatgccaaaatatggaaataaatcgcgaaatattaggctcttttgtacacagcggcccaattttgggctccaagtacaaataagtttattatttatttagtaatcagaacgccaaaactttgcaaaacttaaaattttccggggattttcccttgtaaaaatggaagagccgatctcgagttaaaaacataacttcgaaaaaataaacagggattcgatagagggggtcaaaatatgggcctatgcaaaattttaagaaaattggtcaataggaaaatttttttttcaaggacaacaaaatcaaatttatttgcaacatttttagcataaaaatg

SEQ ID NO: 107879 - DNA, 339 bp, Heterodera glycines
cgtaaatattatcgttgttttaatttacatttcaaaattctccggcaagtcccgcctcggattttcccaatattcatgttccggagcaaatttacatcatatcttaaaactgataaaaaaacaaaaattattttcaaattataccattcttttgatatttttttttataaatctctttttactttccattcttttgctgcgaaacaaaaattatttaattttattgtgttcaattgcattataaaatgtgcaccttttaccatcccaaaatcttcgccgtttgtggcggacgcgcggggggggggggggggggaaaagcggaaaaatcttcgccggatg

SEQ ID NO: 107880 - DNA, 702 bp, Heterodera glycines
ggcatttttattaattaaaacggaaattttgtagtgataataatgtgtctcttggtctcgaattccccccccccccgccctatcatttaattttaatagccactcaatgccgcatatatccctagagaatgaatttaaaaaagcaaattgagattgactgttttcaaattctttttgaattattgtctcctcattcagattcattttgtcatctgtgctcaatgtgtgcctttttattgccattttgccgttagttaaacgtatgcacaacagcgattccacggagtctctaatccaacgcggatgaattgatttctttttattcacttccaatttgtataaaccttggccatagctgaagtgtgaaatcgagagtttcggtataggtgctattttttaagaatttgagaccaaaatgcctcaaatggtcatttcttccccggttatgtcctgacaaatcatttatcttttagacactttgattttgcttttgtattttgggctttatccattttgtattaaaggaaaaaaatataaatatacatatgaaattgataaaattacgtttcttttgttttttgttgtttcatgttgtaatatcaaaccattcggtttaactttattttatgtttgtaatgatataattattgaatgtgaaaaattctcaaagaatagttttgatcattgttagctaattggatg

SEQ ID NO: 107881 - DNA, 290 bp, Heterodera glycines
aaaatggacagaagagaagagtgaatttgatgaattcaaacaaaaaaaatgagcaaaaaacttaaatttgtcctatttatacttttttaaaaatgactgacaaatttatgaaattttctgcgtatttaagcgatgaattccccacaaaaatcatccattcattcaattgcattcacccattgtttctttccatcggtcgaatcgtcttcctatacaataaataattcccgtcagttttttttctttaattttttaaaatgaactgaattttgtgcccttttttcaggatg

SEQ ID NO: 107882 - DNA, 695 bp, Heterodera glycines
agtaattttaaaagcaaaatatgtaattaaaagacaaaattcttgttctgaaaagctaatttagtgaaattcatacacaaacaaaattatctgttcaaacaatgcataatacataggaaatattgtttttattgatcctttactcacccaatcaatatttagacatacattcacccctttttcgacggcaacgggcgctgtgctcgacttttatcgaattttgtattggcccgaaagggatttaaccctgtaatttttgatgcaaatatgcggtctgaatataatgacgcccttaccaatttcactaacaattaatttaatcattgtgtaatttcatttttgccttaattttgatcttattttttgtgttttttgcttgtttaataaaaaagtgattgaaaaacttgttcacattttgaatttgaaataaagttgcttaaatggaggaggaacgcgcaattgccaggtaaaaaagcccgtgacagcccccataaatggttggggatttgaaaaaattgggtcgtattcacgagaatcggttgcacttcatttcgccctcttctaaaaaccgtttttgtgcccataacttattactaaattatttctgctgttttttgtacagtaggcccacgtaaccagcggggaaattcccccccccccccccgcccccgaaatgaaaaaaatttcagaaaatg

SEQ ID NO: 107883 - DNA, 1003 bp, Heterodera glycines
atttttaattaattaaatttcaattgaaataatgtaaagaaaatatggtgctagcgcgtttgttaaaaactgccacccatgcgcgtttgttaaaactgccaatgggtttgaaaacaaaaaatgggtaaaataattaaattaatagcttggctcaaattcaaccaaattaatatttcgtggtatcattcaatagctttaattgttctctttcagaatataattttcttaaatttttaacttaagtataaaagaagttataaagcattgaacaggctatgttttttgcaatggtaatgcatatataataataaacatttaaaattttaaagtctttaaaatgaaatttaaccaaaattaatttatatttcgatagccctaagaattctctatttatatttaaaattttagaaaatttcattgagtttcaaaaaagttctgaacaaaaaatgctgacttaagattttttgcaattttgtgaccataactttttttatacttaagtaaaaatttttgaaaaatcatattctaatagagtacaattaaggctattgaatgataccacgaaatattaatttggttgaatttgagccaaactattaatttaattattttacccattttttgttttcaaacccattggcagttttaagaaacgcgccagcacgtttcaattgaatgtcccttgcttttagtttaaattgtttgcatttttacagttgggtggaggtaaattttgaaaaaggtagacaagcagagattttcaaggtcaattatcggctgacaacgattatttcacatccatatgtaaaaaataaaaaaatcagagccgagatatttttttatcatctatttttttcattttcctaatttgtagattaaaaatctgaaaaatgcaaaggacaaacgaacaaaattgataatggcagaaaagcttccatcgcttgtggttgaactgaatgaaatcgccaaaaaaattgtaaatacagacacttcggtgaacatg

SEQ ID NO: 107884 - DNA, 91 bp, Heterodera glycines; identical to SEQ ID NO: 100405

SEQ ID NO: 107885 - DNA, 83 bp, Heterodera glycines
aagaaaatgccacaaaatttgcctatttacccctccaaaggtgctattggcacgcctgtccacgctgcttccaagatgatatg

SEQ ID NO: 107886 - DNA, 142 bp, Heterodera glycines
cctgagaccattttagtgacaaaaatttggctgtgaagtgcatgacggggcggaaaacagtgcaacaaaatgagaggtaatgagagaaggggtgaaaagcaaaatttgggatgaaaaatagtgctgtaaagtgggaggtatg

SEQ ID NO: 107887 - DNA, 542 bp, Heterodera glycines
ggttagaattgaagacaatgtgaccaaaaatgggacagcgaaaccgccgatggccaacggaattgccgcgggaatctgaaatttttggcataaatttaaagaaattcacagcaataaaaagttcacacttttgataaattggcataatgttcgacaatcatttaataatttgggtttttaatatatcttctaatattttgaaaaagtctgcatctgtattttttttactacataggttcaatatcagcaaaacgaaaatttagaattaaatgtgccacaaaacacaaaatgcttattgctaaaaaactgctcaaattgatcatggacaatcaaaaatataacatttgaacaatttaagagtgttttgaatgaattttgtaaaaatgcggctttttgacctaaaatgaggcttttgaaaattttaatctgggagccctgattaaaatgcttaacgattgaaaaatcccgggtcatatttcagcattttaatttgttatctcgggagtttggacccgagcggatcaaattgggcttatggcatg

SEQ ID NO: 107888 - DNA, 908 bp, Heterodera glycines
ttttgtaatttttttttcttatattagttgaatttctgttgacatcaataagtgtgcttagagttgcttttgcacttctcttttatatgcaaccacgcgaaaacgaccctcacgcgaaaacggccacgcgaaaacggccacgcgaaaacgtcctggcccgcccaaacgcgtgagtcccagttgacccatagtgagcattaagcataaaacaaaatgccaactatgtacataaattttaaaattttagtggagaataatttgctttgccaatttttttggattccttcaaatttggaaaagggttcggaattgattgaaagtattatccgcgaaaaattgttacatttcaagaaaaaaattatgaaaatttcgctcaatttggaaaattttaatgcattttttgagtataattggaagcatataaacattaaaaaaaagtgctaaacagttaaatctaaaaaattaatgctcaaaatcctttatttttctcaaaaaaatattttaatcgacgatcaattcaccgaagatactttaattaaaacagtgcaagagcattgattggaaacgcgataacaaacgaatactcaattcacaaccatcttaatgtttgtccacgtgaaagataaaagatacaaaggaaaaatggttccaccataaaaggctatctatttaagtctacgtggccatacattttctcataatttaaatatttaaaagctttttaatttctaaataaacttattcttgaatatactcgagaaaggatagaattcttgtttcctcattatatataatttctttaatgccagtttgcatgatttgacacctaatatgcatttttttttaatatagtcgcgctacaaaattacatttttagattggttttttttaattgaatcaacaaaatg

SEQ ID NO: 107889 - DNA, 160 bp, Heterodera glycines
tttttaaaattttctcggtgatagggggtggaagaaactttagtgtgtcaaatgcatttatggttaatttactaaatttccaacatcggaaattcagaaaccggccgacgaaggagaaatttacaatggtgctggacagtgggcgtactgcgacattatg

SEQ ID NO: 107890 - DNA, 236 bp, Heterodera glycines
ttattattttcaaatttcttatataaattcgcatccctaataataacataatatatattttgaaaatgaactaattctatagaaatattcaatgaaattattgaatttgaaatttaaataaactgatttagactaaatctgattcaaataaaaattctgccgatgcaaacataaacggagcagtcaaaaagatccgttacaacccaaaatacccaatctccaaaattttggcaatg

SEQ ID NO: 107891 - DNA, 155 bp, Heterodera glycines
tgccctccgcgctggaaatttgttagtttttttatagaaaattttcattaagcaaatttattgttttttctttgatggcaccccccgttaaaaaagcgaaaaatgtttcttctgacaaccgccccctcattagtgcaaatcaacagcaatcgatg

SEQ ID NO: 107892 - DNA, 330 bp, Heterodera glycines
atcaaatttcatttttccaaacattttcaccatttcacatttccactatctgaatattatgttgaacacatcttttccgctttctataatattattaaataaagagtttagtcaattgaataaagtttattaatgttaattggtcttcaaaaaaggcagtaatcagtatatcttttgaattaacgcgcaaaaatttacgccaaatgcgctatttggcgttatgagcaattttgtctgacactggcgcgtacccatagtgctatttgctttattttcatttcttttttaatttattaatataattaaaacattacagcaatagtcaacatg

SEQ ID NO: 107893 - DNA, 183 bp, Heterodera glycines
ttttgcaacaaatgcaaccggcaaggccacattgcgattgtctgccgtcagcgctcgtcgaacacggcacacaaatctcagaaccgatcatttcacacggtcgtggtcaagtcacattgtatggtgattggcacaacccaaggccgatggtggaagatcccggtcacaatcaatggcaagatg

SEQ ID NO: 107894 - DNA, 133 bp, Heterodera glycines
ggtaaatttgtagggaaaccttttaaaaattaatttttaatatttacatgaaagttattattaatccctttaatcgtatatatgttttttctgttttttataaaattattatccgattacaggtttggccatg

SEQ ID NO: 107895 - DNA, 219 bp, Heterodera glycines
  unsure (1)..(219): unsure at all n locations
gtaaaattaatacaataaattttatatggttaaataaaattataattagaaaaatgaataagactttttatttttatttttttgttatttcgattngagtattcgacctctaccaattccggtttgaaagaatttataaaaaatcacanagctatagaacttgtcaaaagctatcaaaataaagaaattaaaacattaaaaaaactccatgaacaaatg

SEQ ID NO: 107896 - DNA, 524 bp, Heterodera glycines
aaacgaaatcgttttaaaatattcctttctggacttgacttggtttcttgatatcgaagctgttttctacgctatttctaaaacggttataccaaaccccagatttttgaatccggttttcagaaaaaatgccttgtggtgaaaacaatatttcacatttcactccataactttgtgagttcggcacggatcgagaccgggataagaccattggaaagagcagctcgagctctacaagaaggtatggaaagaaaaaatagttatttctgggactttttcagaaatcagaattaattctccaatgtggcccaaattttaggcccccagccacagccccttgcttctcccagttttaagtcttggatttgtcaaataaattcaagacttcaaattaataatcaaaaattctcttaaaatttttttgaacccaattcaaaaaaggaaaaaaatttgcagtcaaaaaattattcgaatttctccaattttgtttccataatttccgaaagttattcggtatcataatg

SEQ ID NO: 107897 - DNA, 239 bp, Heterodera glycines
acgaagcattcagacatcattacaaaatcaaaaaacaacgtggaaagagagaagccagggcttgaagaaaccaaagactcaaaaaccgatgtagcaaagagggccgcagaacgcgccggtagatacgtagaaagacatttcaatcagatcaataatatctcgatttccatccaaacccaaataaacacactacgggaaacaaatcctcaaattttagaagagcctgatataaaaatatg

SEQ ID NO: 107898 - DNA, 223 bp, Heterodera glycines
gcaaaaaacttgtggttgtgcatttgtggggagaaaagtgacgaaaaaaggaataatttgcaggagatgtcaatcaaaaaccgaaatgagaaggttattagtcaaatgagcagtagatttgtgtaaaaacttgtccttggtagtattttttggttttgacgtgtcgtttgtgcggttatttaaagcggttgaaagttgttgtgatcatcattcgagcaaaatg

SEQ ID NO: 107899 - DNA, 104 bp, Heterodera glycines
  unsure (1)..(104): unsure at all n locations
gttttctgctgatccgttgtccaattgtgcgtgacgcggacaaatgggcgaaatgngaaaaggaggcgcttggctggcatattcgtgatcagtgcaatcaaatg

SEQ ID NO: 107900 - DNA, 98 bp, Heterodera glycines
tgtccatcactccatcttgtcagttctggtaatgtttttccaatatttccggcggatgacagtgcaaatgcatcggtgggccaagtgttggccaaatg

SEQ ID NO: 107901 - DNA, 186 bp, Heterodera glycines; identical to SEQ ID NO: 105842

SEQ ID NO: 107902 - DNA, 1003 bp, Heterodera glycines
catttctgtgtataaattaattttttttttttttaatatgtaaaagcttagatttttaggtgaacttttcaaaaaatcgcaattcgaattccctcacaaagtttttgggggttttgaattttcgagaccattttttaattaggcagatcaagctagataaatatatattaattaaaaaacagttaaataaattcacataaaattttttatgaatttatttataattataataaatttttaatgtatttaaaaaaattttacagatacatatttgaaaggggagggtatgaaatattgggaatttcccctcaaaaaaaaagtttttaagcataattttatgctttaagacatatgtaaattatacatttattattattattattattattgtagatttttaatttgaatagttattttttatatttaattattataaagaatcaattgcaacttaaaaaaatgttatattgccaatttctcgatttgaagaggcgcatttacgtgtgtaattttgacaattttctataatattaaatattacgcaattctacccatcgattaattgatggaaattaatgaaaaatattataaaataatttttgttaaagctgtttataaaaatgaatgtccaaatgaagacggaaattgccgaaccacagacattttggggcaaacaatttttttttaatattttctagtaaaaaaatatataaaatttttaatttcttttttgcgaatttgtacaaaattgcatcaattttaaagaataatttattaacgaaaacaaaagtttttatgcaattaacgtgttgttcaactatgcttttatcgggccaggacgttttcgtacgagtggatatgcaaaaaaaaattgcattcaaataatttgttaatttttttaattacttttaatgttttgacagttaagcttttattaactacaaaatgaaccagcagcaagtaattaaaacaaaactaaataatgataaattggtgcatgatg

SEQ ID NO: 107903 - DNA, 525 bp, Heterodera glycines
tttcgtacacatttaattttctgaaaatataaaagaacgttttaaagtttacaagttttttgttagaaattaaattttaaccctactgatttctgaatgaacaaattaatttcgtatagttaattaagaaaaggaaatcaaaaattaatttgaattatttttttttaaatcgcttatattcttatttttatgtgaaatgaaattgcataatttaaaaccctacaaaacagagtttatcacgtaattcacgaaaaattgaattcaagatttaaagttggcatatttagaaaatagaggcaaaaatgtaaaattctgccctaaaagtacaaaaacattttatttgaaaattattttttctcatttagaaaataaaactttcaaataattaaaaaaaattgagcattaactaaagtttttatgaattttcgagtcgaaaacaagtgaggttttacgaaataaatgaacataaaacttttcaagacaataatttttttaatcatttttttctgttccattctgtagatg

SEQ ID NO: 107904 - DNA, 196 bp, Heterodera glycines
cgtatgggagaggcatttttgtgtattttttgtgtgtaaaattggatttgcatccaatttcagcacatcgtccgcctctggtgtccaaccgctgcttttgccgtcctcttcagccggcgccggtgttccttatcaccagtgcgtccgccacggctttgacagttatccttcgtctacgaacgaaacggtggcaatg

SEQ ID NO: 107905 - DNA, 396 bp, Heterodera glycines
tttttgcagattggttgtttgactgtagagaattaaatgagcaaaagaagaagagtgaggaatagaatgaatgtgggcgctatttatgctaaaaaaaaatggcggctaaaatgtgcaggcacgcggagactcctttcgtgttgaaaaaaatccatttcaaaaagtgacgccgtcttactttccctctcacacactctctctcgtccatttctctctgctcccacaaggggtttgcattgtctgcctatgggatgggcgttccctccacattgtctacataaaagggctcacagtcgccccattccgcactttcattcgaaagcaagcggatcgattcacccagagcgttctcttcagcaaaaccttcacttttctccatattttgttaacaaaatg

SEQ ID NO: 107906 - DNA, 779 bp, Heterodera glycines
ctttggaactcagcaaagtggatgtcaagttcctgatctagtggtcccatagaccctaaaaaacatttttacaggcaagtggatctgaacccatggcccaaaaaaaccatttgcttccatctatgatcccgaattccaaaatcagtttatttttgtacttttttcaaaagtcttataaaaatatagaataaacagaagcttatagaggaagaatttcgtgtttttcaaaaaaccttttcagaacagcgctattaattttttttctcaaaaaacgaatttttccaaaatttatgtaataacttcttcattttgaagatagaaaattctaaaaaagtataaaatgctccagatttttctctatttttaatgcttttttgcactttaattgattcatttagaagtgaattatgaattttcaaacattcgcctaaatttccaagggccaaaaaatgaaaaatcttttcaattcaaaaatttagattaagatttaaattgtaccattatgcagaaagcaaaaaattttaagaatttatatagggaaagaggttgaacaataaaagccccccctcgattggaagcccccccctcgaatataagccccctttggaggggggttgaacaatagacgccccggggcttataatcgaggaaatacggtagatgaagcaaaggttttaaaggggaggcgcgaacgccgtccccagcactcaaaaatttagctgtgggcctatcccagttcgggaccgccctgcgggtcagccccgaccgaaagtgcaatg

SEQ ID NO: 107907 - DNA, 355 bp, Heterodera glycines
cagcaaaagacggaggacggagccaagccgacgagggtttgtattttgagaatgaaattggcattggcactcaaatttggattcaaacgcaaaatcttctggcatttcattcgcttttcttatctcaacacagaatgccgcgcctcgccgtgtccgtctgtttttccatcgtgccgacgatgacgatgacgaccattctggcggcggcagtggtggttgttcgcattgcctcaatcgatggcacaccgacaacagaaacagcgtccgctcctgtcgctgtaccggcaccgaccaccacttctctctgctcaaccgtcccgttgggctgcaggacgcacacgcggacgagcgaatg

SEQ ID NO: 107908 - DNA, 100 bp, Heterodera glycines
tcgctacggtaccgtttccccgttttagacctccacagtaataattgactacgatacctcccccccccccccccgttaagcgtactgtaagccattcatg

SEQ ID NO: 107909 - DNA, 926 bp, Heterodera glycines
ataccaaaaaataattttattttgttttttaataattctaattcgttaaagaatcaaataaatttttatttgtctccaacggattattatggtaaaactttaagaaattgttaggcattttgataataaattggttggatttgtgggttgggaggcgttctttatgaatttcttatccttacgaatataatgaatgcattttgcaagaaatagatgataattgtgacatttttcaaagtttttatcagtttattttatttgtttcttttatttctttaggagattcagttaaatttcggaatttaaattcattaatttttggtgttaaattgaaaatagtaaaaaaagaataaaatatttaattgattaaaagatatgacttataaaaatgcccaaagttttctcttttgaatggtaatgcaattaacacacaaatattgagccttttaaaaaaaattaacagacaaaaaaatttctctggtcaataggtttttttaggaaatgaataaataattgcatctttttcttaacaatgtttattcgttgttgaatttgaccatttcaatggaattgagctcactgtgtcgctttgtccagtcacgcaataaataaaacaaatgacacaattaactcattttgaggggttcacttgccttttttgaataaatttatttttttcaccggtttttatttttagaaccattattaaaaaaaattcaactttaatttaattaaaaatgccaaatttgtataaatttcaaaattaaaaacaccaaaacagtggctaaaaatataggtgtttttaagaatcccaaatatttttggtttttgacaaaaaatccttccagaaaactcaaacttttttgaacattgttgtatagttttttgaaattttaaaaagtcatctttagtgggtgaaaaaaatg

SEQ ID NO: 107910 - DNA, 114 bp, Heterodera glycines
gaaattcgccccctccaacttctccccccccccccacctcttacgatcgacaagagagcccccccccctatctatccccttgcacaggtatggcgtaaattgcagaaacaaatg

SEQ ID NO: 107911 - DNA, 253 bp, Heterodera glycines
aaaaggcaatattatgaataaataaaagataaaaaggaaaaaattacgaatattcaaatattttattatcttttgcccatcgcattttctcccatttttggtcatcgttttgccgtaaattttttactttttggcctataaatatgtgcacaattcagtcactgcaatagaactgaccatcatttgttctttctttttttctaaattcattaaataaattaaaactgaaaattttagatttaaaattaaaatg

SEQ ID NO: 107912 - DNA, 149 bp, Heterodera glycines
atcttcaaagcataaccgatcattgttttatttttgatcatttttctattggttatccgatgattcagtgatcaatgaaaatgatcactcatcactgaatttccaattcattcgattctttatttgttcaggtggtggtcgagcggatg

SEQ ID NO: 107913 - DNA, 717 bp, Heterodera glycines
  unsure (1)..(717): unsure at all n locations
accgttgtcagcttgaaattgtgtgagaagtgcacgaccgacaactgttgtgcanccgatatttcttgtcattcaagccaaaganatagaccaagtgatggaagtcgaaaatacgatctttgattttttaataataatgataagttcgataattataatgataaattcggtatttcaatatttgtaatgataatttcgataattataatgataatttcgatattaattgtatgcagctaattgataaatgttttttttataaaatcttttttatttggtcatctcgcaacttctcgcccctaatctccattacctcccaaaccccctaaaaaaaaggcaaaattttgttttgtttgcatagcaacaaaaaaaatgccgagcgcggaagcaatttgaccttttgctcattccttacttgatttaacggctccgcactgcaagggatgtgcttattcattgccttgttggggtaattggcggtagcctaaaagaaattgcccttccaacagttcaagcactttaatcgtcccaatattcccccctaaatgcacaacggagaaatatgagatgtggcgtaaaatgttatggactgttggtgggcgggattaagatcgtcatttattctgtgagccccttttggcatcttcctttttccctttttttacctgctttatattttttaatttttttagcaataaaattaattctgaaaacatg

SEQ ID NO: 107914 - DNA, 188 bp, Heterodera glycines
tccctcatgaagaggaggccgatcggaatcggacaaagccgttaggctctccaccgccacggaagagagacagaagagatgtgaacaacaccactcctccccaatcccccgtgctgtttgatgagcacggaaagcgactcgggtctcccccgttgtacgatccgaatgctggcgaagagcaacacatg

SEQ ID NO: 107915 - DNA, 67 bp, Heterodera glycines
ctttcttcggaaaagatttctgattgttgtggactcatattcgaagtacccggaggtattcgaaatg

SEQ ID NO: 107916 - DNA, 1003 bp, Heterodera glycines
aaagaaatgattattagttgacaagaagtcagttggcgaaatgtaggcgaaatgaatgtttttggcttagttagcgaaatgtagttgtgccgtcgttctcgcacgaaaataggcaaaaaaagaagcatttttcggcactttttaactttcaacttattattctcaattcaccatcaattcgaattcgactttcttttagattattctagagtgcaacgagaccgggaatttttgcaaaaaccgggaccgggacttgccgggaccaaccgggaatttaaaaattcaaaaaaattcaaaaattttttaaaaattcaaattttaatttttttcaactgaaaataatacaaaattaaatttttattttgttttttatttaataaaatccaaaagttaaagctaaattaaattaatgaaaattttcaaacacatttctttaattatttcaaacaattaatcattttttaactcaaatgatcgaatattattagaaattcagatttgcttttcacatcactttttttcggcgcgctttttccgaaaaacttttcgtgaagaagggggtccggcggtgccgatagtcgttgccgggggaaattttgaaatttgggtgtaatttgttaacagattttcaacaaaaaaggttggtttttgggattattaagctcaattggtaggattttcatttagaaaaatgataaaatatgtatcaatttaaaaaaactatgaggaatcatattttgtcgataggaaacccatgagtatacaaaaacaaaattcaaaatatcttaatttctgtagagggactgaaccaggggaaagaagaacccaaaaatccgagaaaattcagtaatggtaatcggatttcagagaccgaaaaaaccggaaatccggtaaaataaggataaatacacattccaaaattaaaaaagaatgccattgtaatcaaatctgctgcattcaggtgctgcaatttcgccgccgtcgtcggcgtcgcaagcgaatg

SEQ ID NO: 107917 - DNA, 75 bp, Heterodera glycines
attaaaaaaaaaataataataataataaataattgtggtgaaaattaatatggaaatgggcaggaacgtgttatg

SEQ ID NO: 107918 - DNA, 856 bp, Heterodera glycines
tttttggaacttttgataatttggacttttttctaattctgcgttcaaaattagggtataaaaattgttgaatttgagcacttattctatcctcccccccccccccccttcagagtgccgtcctcactcagcaaaatcggtgggccaatttcgccactttcgcctcgcgcggcagagggcgtcagggcatttgatgagagcgacggaagagagagaaagagaccaaatttataaccatttttttgaatttgttttgttgtgtcttctctatttttctttttgcttaaaacacacacacagcgtcatgacggaacgccacaacatttacaatttggggtgaatttttcacttggaaaactctggatttaggggcgtgggtgtttctcgaaacttccccaattaaaattgttttcacgaagctttgaagcaccaactggacgtaaagatgatgggcactttcgtctaaccctccctccctttttgtgcactatttcgttcaaaattggaccacatttttttttttttttttttttaattaaaatgtaaacaaatatacagtcatggtcatatgtttaggaacacctcttttttttgaataaattctttgaaaatattgcttctctggattgaaagaaaaataatcaataatctttttaatgcattttgtagcattttttctgggctatccattggtaccacacattcctcgtttgctttattcctttttgtaaaaatttgtgttttcttccatatagtcaaatttcggggtggtcatatgtttaggaacactacccatattttttttcatcagcattaaaaaaatctaaaaaaattcaggtaagcataactttggatg

SEQ ID NO: 107919 - DNA, 598 bp, Heterodera glycines
ggggggggaaggagggaagggataggtgaacggaggagagaatgggcagaaaaggggagaaatggattggtgaatgggaagagaaattgttcattctgctcattctattcatcgcctgttaaccagtcgatcaaccaaagcagagcgatcgcaagacagtgcatgagtaagtcagtcaatcagcaccaccctcatcattcacatccattcattccttcttcattcatgaattccccatcaataaatgcatggactgagaaggggtgaaaagggaggggcggcgggggggggcggaggaggaagagaagattctttggggcaacaaattaattaatgtgtattgtatactgaggttggaatttaatgtcgaaaaaaccagattacctaccttatgcttatgtttgtacatatgtgtgagctatgaaattgataacccgttaacaattaggtgaaataatacgcgacagaagaaaaagagaagggaaagcgaaattaaaaggaaaaatggatgagaaattattaagttcattacaatttagagcaaaatgaatgtgaaaataatgagttccgtttaggtaatttgtttgattcaacgatg

SEQ ID NO: 107920 - DNA, 145 bp, Heterodera glycines
caaatttacccctttttgctcagttattgttttttctcttgttgattttaccagaggaaaattatgataaggccgtggtccgagggtcatcgatgtgtgccattgcctcctgacgtccaagccacgggcatcctaccaaaggatg

SEQ ID NO: 107921 - DNA, 1003 bp, Heterodera glycines
aaataaaatatttataagattactaaatttttacgagtattatgacaaaattcccacaacttttatcataaattttttgatttaaattattttggcaaatgccaaaaactcaccatcctgcttcccagggacaagcctaagtgcaatacataatcataaattaacggcacacttttaaggggcaaaaaataacgatcagaaaagcggttaaaaatactaataaatcataattaaacaatgcataggtattatttacaatttttagggatgacattttaggtaaattcctaagatttgtgttcggcttgtaaaacgtgattttagtttggttttattgattgagaaattttctcaaaaattcatcccaaaatgttttttttggtttgaccaaaaatttttaaaaattgtccttattaaaaaaaatcttctaaatattaaatactttatttacaattataactaaattaagtttatgtgtgtttttgcaaccaaaaagttttcataaaaattttgctttttatgtcaattcaaagatttttgtgcctatttaatgttttgtgactttttttttttgcctttttaggtgccttttttgcattttttatgcctaaaatgtcatctttatttacattatcaatgattaatttatttttgctccaaaacattaatatttccgggggcatctatctttggcactttttaaaattttcctatagcgaacagcaaaaaaagggactccacttttggctctatccgaattttatcagctgtgatcagcattattagttccattgattacatctgtttgttcttgtgatattccgtgctcatccacttcggtatgtgctgattgcccaaatagttggcggtcagcaaaccggcacaaaattaagggcgacatacagcagatgcaatttctgcttttattcgtgaaagcttgaacgaatttaaaatttcggaggacaaaatctcagcaataacacgcgacactgaaaatacaatg

SEQ ID NO: 107922 - DNA, 209 bp, Heterodera glycines
tttttgtagtggcggatggaaattacgcccctttcaatttgtacgacggcggcgaattccaacctccgccgctgccggtgccctttcagccgagtgggtttcttttttgcattgaattcggttgcttcgcttcttcagacgttccgccgcctttcgcttttccgccgaacgatccgcgcttttaccgacaccacggcggatataatatg

SEQ ID NO: 107923 - DNA, 1003 bp, Heterodera glycines
ttcaaaaaagttgaccaagttcgaacaattatgtaccattcgttacgtacagacatcatataagcattttctattcactttatgccagaaaaaagtcattaaacacaaaatttttgtgggcaaaaaaatacgaaaatctgagtaaattcgaaaaaaaatccctagtgggctggaaaaaatttttcgtagaagtagggccattttgtagagaattttgtgctctttctgaccatcatatttgtcttctacgaaaaatttttacggctgatatggaaatggctggtatggaaacggcggtatggaaatggcggtatggaaacggcggtatggaaatggcggtatggaaacggcagtatggaaatgggtcgatcccaaaatagtgattactagtgatgaatagtggcgttaaaacgaagaatttccgagctaaaaatgttttcgtgcatttcagtcgaaacaaagccgcagaaaaaataattaaaaaactaaaaatccgttccctactaatcacactgtaaggccgcgaatggaaagactgattcttgagaccgttttgttttcatgactttcgaacaaaacttttctcccaaaaaagtggggagcataggcagtatttttcgacttcagggtttgaaattggtgcaaatgaatgtcaattcgtgatcagcagctatcctgaaaacccttgagggtaatactatcgatggtgccccccccatttttggaagaatttttttttgttctgaaatgtcgtggaaacatatttacggggggttttcagggtcgatcgatgatcgcgaatctgacatccattttgccctatttcaaagaaaattcaaaattttgaaaattcacttttagttcaccctctaaatccactccctagttcactaagttattgctcatgaactgtacataaatgttgaagaattttttaagtcattgaattcacagcctttcttccatctctcttttattatttcgcgaatttttgtgtgaaatg

SEQ ID NO: 107924 - DNA, 246 bp, Heterodera glycines
acatagcacccatattagggttgcgacccggccccgaccccgaaccccgacttttttggccattttcggggtaaaccccgacccccgacgcttccaaccccgaacccgaattttccaaccccgacgtcggggtcgcaaccctaatacatatgatccaaaaaatgatgacaatttgttttttgttttaccaattttgtttatttgttagtcattttccgtgccaccacttccgtcagttacaatatg

SEQ ID NO: 107925 - DNA, 161 bp, Heterodera glycines
ttgggcttttgccaatttagtcagtcattgtgccaatgattcagttcccaatttggttccattgccctcgaccaaatttggcatccgtcgaattgtctctgtgttcccacggcggcggattgactggcgtatcgcctctgtcccttcaacttccaacaatg

SEQ ID NO: 107926 - DNA, 176 bp, Heterodera glycines
aatttttttttaatttgacattggcctccactactttctctaaattttgtgaagaatttgcagttttcagtcttattttgtaattttaaaatttgtgtatgtaaagtattttgttggacgcaaatgtggaatacctacctggaaaagaataccgtttcaacacctaggcacaaatg

SEQ ID NO: 107927 - DNA, 550 bp, Heterodera glycines
ttgattccaggtcagaaactcaaaaaaaagttcatcccttctctctgaattacccctttaaaattgggggagcagcaatcctgatgatttttgagcaccttttgatcattttactagaattaaggtgtgccaaatttttccaaaaagctaactactaattgataaaattgaaaataaaaacttagggaaaacttttcggtgctttaattgcgaaaaaatgacttttccaatcaaaagcgtttcttattttcaaaatgtgtcctggtttttcatgtttgtcctggggcaaagcatttcaatttcattattttgttgtaattaatgaaattttctgcctgtccaaattttttatatttgtacagatatttgtaatcgatccgaaggcaataattttctgaatttcttcattttatacaacaaaaatttgttccgtaatcaaattgtataaattaaaagagtttttattgttcaattgaaaatgaaattatgtcttttattatttttaattattttaattgccgaaaaaattggaacagaaaagaaaaaaatg

SEQ ID NO: 107928 - DNA, 908 bp, Heterodera glycines
acatgaaaaagtatcggcaaaatggaaagaaaaagaaatacaagatttccatcgctccatatccgtttcgccgattcaaaaaatcgcaatgcgaaccccgcagatcccgcacaaaacagatttgcggataccactacgggatcgaaactcaaaatttttcgcggaactcggatctcgcgggattaatcccgcaatttccaaaaatgcgtggtaatagtgccgactttacattaaaaaaaattcaagaatttgtttctcgaaataaagtctttaggggttttcagagtcggagaatccgattctgataaccatttcgacccaattcagaaccccggacccgatttcgaacaaagtcgaaatttcaaatttttcgagcttctcatcataaagccctttatgatgttttttaaataacgacatagcacccattgaaatcacttataagtagcgaaagagaaagagattaaaagagagagagagagggtggggaagagaaaaagttgaacatttaaaaaagtttttttgacaattctgaattaatttttggtctttaggaatgtgtttcttgaaaattttgctctttggatttttcgaattttcttgtgacaagccgaaatatgtatgaataaaaagtgacagatggaaaatacggaaaatatggaaatccatttcaaatccaatctccaataaatcgaaaaaaattggccaaaaaataaatgttctctcgtcacgggtgacgacaacaacaatttaatactaaaattgatttttcttataaaatgcaatttccttgccatctttaataatttttttattactaatgcaaaggaatattatgtaaatatattaattaataattttatttaaataatttatattttccgattttcttttaggtcacagagatg

SEQ ID NO: 107929 - DNA, 949 bp, Heterodera glycines
ccttttaacactttcaattttcccatttaaagaaaggaattttttatatttctaagttttccagggaaaaccaaagatcagtggggcagatcaaagaacacccgccgctgatcatgatcattgaattgagcaaatgtatgatcaaaaatttcaaactcctttttaaaatatagcccgattgaaattttctaaagctaatttagccaaatgaaatcgtttagtagtgatctgatcaatgaattttgatcattcttgaacccaaaaataggccactgattggacgcctaaattggaacatagccaaaaattttccctataccctgatcattgatcaaacgctgatccggcattttcctatttttagagactgaatttgtcaggcaccaatttgtccattatatttttattgccttaaaatgtgaccaaaaattaaaacaaatatttgtggggggggggggggggggagagggactccccgccgccgccggagggattccccgaaatgaattctccgatttttgtctcttttgtgataagagcggaaaaacaaaatttggctgaacatattggacagaattttataaaaatgcagcaaaatttttgcatctttggtcattttagcaaatgcaaacaaagaaattggaaaaggaagaaaataaaacaaatatttgaaattaaagtaattctcaacatgaaataccgtatattattttaagagattcaatgaaagtttaaaataaccctctatggcattatgttcttatgacaaataaatttttaaaaataaaccaaagaaaaaaaataaattttgcgttggctctttggctttaacacttttacttaattgatgcttttgttggcttatttatgatttatacgcttaaaagtttgcttattttattacttaaaattaatttttattaattccacattttagctttaatgtatg

SEQ ID NO: 107930 - DNA, 166 bp, Heterodera glycines
agcggaaatgaggcaaaacaaaaacaaacattaattaattaaggaaaattaattaattagggggtggaattttttacgtctcaggcgcaatttcagcaaaaattgctggacgcaattcggcaggtggactttgccgatttggcagaacatccggtggtgaaaaatg

SEQ ID NO: 107931 - DNA, 396 bp, Heterodera glycines
ttttgttaacaaaatatggagaaaagtgaaggttttgctgaagagaacgctctgggtgaatcgatccgcttgctttcgaatgaaagtgcggaatggggcgactgtgagcccttttatgtagacaatgtggagggaacgcccatcccataggcagacaatgcaaaccccttgtgggagcagagagaaatggacgagagagagtgtgtgagagggaaagtaagacggcgtcactttttgaaatggatttttttcaacacgaaaggagtctccgcgtgcctgcacattttagccgccatttttttttagcataaatagcgcccacattcattctattcctcactcttcttcttttgctcatttaattctctacagtcaaacaaccaatctgcaaaaatg

SEQ ID NO: 107932 - DNA, 98 bp, Heterodera glycines
atgctcctcttcacgatttttttgaatgccaaagaatcgtttaaatccaaatttacaggacaaaaaaaatcaatatcctacccctgtctctaataatg

SEQ ID NO: 107933 - DNA, 836 bp, Heterodera glycines
  unsure (1)..(836): unsure at all n locations
gcatagctaactcagatttccaatcttccatcggacgcgaagaagaaaccgcagctgacattcaggtcgaaattgaataaaaaacaaatagaattcctntaaaactcatttttatattcaaaggacttgcagacttgtttttaaatacttgaaaatgaattgaaagtatccaatattcacactcaatttgcttattgtttaatagtttagaggataaataaagatgtggccaattcttattcttatattgatatatgacgtctcgatgcggagtgatatatacaatttaaaggggccggcgagctatagacccgggactgaagtgaccaagaataggagtaagctagaacctataaacgaagaaaaggcgaggacggtactggacaaaaattttcgtcccttccccttttggacacgttcaataatgatttttaatagagcattttttaaaattcgatacaatgacaccagatttaaaaaaggaaattatgcatcgaaaaagttttctataaatagaaaacgaagggataaatattttagagatataaaaaaaaaaagggaagtgtgtctcattttttatataaaaataaaaataaaacgccatgccaaactatggaaagaaaagttcttcaaatatatttcaaattctcgaaaaatgtttatttacctaattgtaagttaagtatttttctcgcctataaaaataatttattaaaaaagaatttgtaagctgaaaattttttttccgaaatacatcctagaaggtccaaaccaagttaaaatattatttacttgatttttacgccgaaataagtgtgcgttctagatgaaaaatg

SEQ ID NO: 107934 - DNA, 397 bp, Heterodera glycines
atgggcgatttcgtcaatagcattcaagcggcgacaagcaatatgcaatagcaaaaaaagcgcaaaactcgctctgccctatatataaaagttgttgattgctgcacgatttgtcataatttttgaaaatgttaaattctcaatcgttcagtaataaagatatttgtttcaaattgccttgcggtataattatttccgggccatcctcgtcgggcaaaacggaattcctactaaaatttattgctgagtgcaatgaactgatcgcacccagtcccatctcaattctgtactgttttggtgaaatgaattcggcggttccgctactgcaaaagcgggagttgaggtgtattcgggcgtgccctcggaggagctgattaggcgccttcccaaaccgatg

SEQ ID NO: 107935 - DNA, 554 bp, Heterodera glycines
ttttctgaaaaacatttagaggacaataaccaatcaaaatataatcatataaagttgaaaatgaaagtaagaaaccaactataaggaatttaaaagttcgaaccataaacacccgaaatttcgaacaataaccgaaattctaaaaaaacagtgcaccgaacgcgtttttttcaaacaatgacaaatgaaagtaggaaattaatggcgtcaaagaaaatacagtatccttagacagtcacttgtaaggaaatcacaagaaaaatgaaaatagcgaaggaaaaacatgaaaataaaggagaaaatagtgtgaagaaaagaaagaaacattttagaaatgcgcatcttttcaagcgctattttaaaaaaattacaaaatccctaaacctaatataatatttcatactgtaattgtggtttttattcggtaaaataataccgcgtgttaagctcaattacgttcaaattgtaaatactattccttcctttgtgtttattttatgcatttctactattgtcatttaattaggtagattttctgtcttttctttccgatg

SEQ ID NO: 107936 - DNA, 403 bp, Heterodera glycines
atgtatttaaagtgatttattatttatattttataattttttaaaatgtttattctatatactttatttttgataaatttttcttcgagttataatagccctattctctaccctgaacgatccagggacaccgaaatgactgacatttattataaaatagcctcctttgaccattcctacttgaataaaattaatcaatctgaattattctcaatgattgatgaaattgttgaaaagtttcaactttgtaatgttgaagaaacgaggtcattatcgagatgggtatactgtatgcttttggttttgttgtggatagctattgttatgacaggaattttcctctattttaattcattaattagaaatttatgtaagcttatgcatatatgtagagacgaaaatg

SEQ ID NO: 107937 - DNA, 218 bp, Heterodera glycines
cccccccccccccctcccaagggaatttttggacttttttgaaaaaggcttagaataaaaatagtctaagccttaaattgtcattttaagccctttcaaaatctttttttgctgatgttgctttaattttaattttttgttttattgtgctgacgagttcctttttctgccaattaattcctttctcgtgccatttacagattctgcatatttctatg

SEQ ID NO: 107938 - DNA, 1003 bp, Heterodera glycines
ttcttcaacgacacagaattctaagaacgaaaatgagaaattcagcctattaaagtgcttttcttatgaatttgtcattaaaaacaggtgttacgaaaaattctcgacattttggcttttttaaatctatattatctatgcaaaattgatatgatgatacaatgcaattgctccaacaaattgcaggatttacgcttgctttttcgttgctctcatagtgtgcattgaaaaggattattttttgtttagtaatcatcatttttatttctgagtgcgtctcaatttcaataaaatttttgtaaggtcccaaatgcttaatgcgcaatttaatccccgaccattggctttacatccatttcagcaagaaaaaaaattaactgtcattaattttgtgagaaatgcgtcaacagcactttgcctcgttctgaaaattttgtgacaaatttcattaacgcaatttgtctgagtttaatcatcactttcatcgttattatcatcccttcctctgttcattagggcaaattggcaccgccgcttcatctttttctgaaagccttcggctgtctgtcctcatttaagcagaaatttttctttaacgagtgccatttatccttccattctgtctcaaatccctccccactccctcccccgggtgctttgcccttcagcggattatctcctcttctcccgaagagaaaaatcatgtgagtgtgccaatgtaatataaaaaaatatactttatagtgcacacaaggatttcagttgattgaatgttggcattctgtgggaacttggcacattgcattccccgccccctccctctatcagtccgcatgaaatttaagcccgccagggaatataagccacggaaaattgtcctttttggcataacgttttttcttgcaactaaaactaatttttggccacattttcagctccctacaaaagtttttcctactccgacatttatctttttaaaaagcatttggccaaattcaaaatg

SEQ ID NO: 107939 - DNA, 199 bp, Heterodera glycines
  unsure (1)..(199): unsure at all n locations
catcattctctgactgtncattcccttgtctcctctcattttcccaccctctctcgccgtctctctttttctatctactcctcgcaccgttaatgggactaatgaaataccttcaaacttttaattgagtcttttgccactttactttattggcattgatggattttgttgaatgcttacaatttcaggtttccaaatg

SEQ ID NO: 107940 - DNA, 723 bp, Heterodera glycines
attccctgaaaagtccgatcaccactctttgtccgatttttcgagcacaaaatcactgtctgacgcttttcctatatacttttttttgcttcttttcgcctttacctcgcaatgctttttctgttctttctacgctttgctaattatttaaatttttaaattttcgcatttaattcctataatttttttaaaaaatgagaaaatccttttttctttttgtataatcgtgcacttttttgtgtcacattttcacagaattttccttcccgccgctcaaactttcaatttttccctttctttttcctatacaaaaagctgttgttgtttctgttttttttgttgtattttcagataggattatggtattttgttcatccgatggattactgtgcattcacaaaattcaaatagtcgcattattttaaaaaaatatataaatttaatttatgaagatatttaattgtcctaccttttcaaaatatcactcaactaatataatattctcttctgtttttgtacgcataaattgagaattgaaaatatatttatttattttatgggcgaataaatgcgaattttttttgtgtgcctaaatttttctttccttaaatataaaatggtaactaacaaattcaaatattcttatttcttactgtttaaatatttaataattttttaaaaataaaacaatttttcggttttgcaaattaaattctgccgatg

SEQ ID NO: 107941 - DNA, 405 bp, Heterodera glycines
ttaaatacggtaatggttagagcccggacataaactgcattttctttcgtcctaaggttcttgtttttgcccgcgcttacatttatttcttagccattattttagaggaattcgttcgtttaattaaaattttaaacccctttgatgaaacttcgtccttttcattgtgtttgcttgatcaataaaatgaaatttgctatataaatgcacatttaatttgcttttatctcgcgtttatttttcgctcaattcctttattggatttgtatatttacgtctttcaaattcaatatttttaaggctaattggccatttgttgtattttggacagttttttgatttttacttcagaaaagtgctgaatcatatcacttgaagctcataccgaatttttgctcacaaatg

SEQ ID NO: 107942 - DNA, 91 bp, Heterodera glycines
ttgcttgtgggtgaattaattggaattaaatggtatcatgggtttagaccccggcccctgaggctgggtaattttaaattacagatatatg

SEQ ID NO: 107943 - DNA, 80 bp, Heterodera glycines
cggcggctgccgaacagcaccagcgtttggccaccgactttcgcgagttggccgaggaccggggacgcattgaacagatg

SEQ ID NO: 107944 - DNA, 630 bp, Heterodera glycines
ccaactcatccacagcttgtttcttatacgataattagtgacattttcgtgcatggacaaattaagaatggatgatgagttttctatttattatatggatatatttggttttgatggatttatgctacataattaaattttaccataaaatctgatgagtcatcatgcggatttagacaatacacaaaatataacaaacgtttcacagagcaaacaaagaaagaaccgagaatgttattaaattaagtttggtttcagccaattctaataagagtgcaatttatcaaatcttagtataagaaaaagacagtggtaaacaaactgatcgcttttgcggattactacaaatatttaattttagcccaaaaatacaaaattattcaaaaaatcccaacaaattaataaatctggaattaattttggataggaacgaattataatacagcgttcatattttggcttaactttcgagttattcttacgatgtatttactgatcaattcgatttttcgggatcagcagggctcactttagatgaattttaatatatttaacgctcagtccataattttttttattgatttataatattaatttttacgattaaatattggaaatataccgaaaatg

SEQ ID NO: 107945 - DNA, 664 bp, Heterodera glycines
ttgtcattttccaatttcaacagataagtagcataccatcgtatagcattttttatgggctttccaatgataccatatttgcatttgtgacataaacatttatttgatttattttaccatattcacaatttgatcaaaatataggtggtcaaaagtgttgtcccatttcatttttaaaatattgcttctctggatcagcatttcaaagcatgatgggacaacacttatgaccatgactgtatctgatttactgcgatgttttgagcagattttattttattaaaagattattagtcaatttaaaaattaattattattcttttgcttttttttactctgaaagtttcatttgtttttccttaatttatttaattttctttttcaaatttatgcaaccatttctcgagaatatttgcaatttatttataacgaatccgagcattggaaatgatgataaattaatttattgcaaattaaaaattatttggacgaattttttgctggaatttttaaatgaaaatgaatgggggagaagggacgacggggcaatgggagaaggggcaattaacggacaaaaagcacaaaagtcaattaaaatgaatgcggaatgaccgcccaaatgaattttttgaaatttaattttgcagatggcgtaaataaaatg

SEQ ID NO: 107946 - DNA, 71 bp, Heterodera glycines
  unsure (1)..(71): unsure at all n locations
aagaaaccgtgaaggaccaantgtcattcaatgcaaaacgaagggcgcgcacaagcggagagtgggcaatg

SEQ ID NO: 107947 - DNA, 185 bp, Heterodera glycines
agtaaataaaagcaaaaaattgtttgaaatcgggttagggattcgaaataggtcgaaatgaatgttcggcacatatccgacccgaccaaattcagtcttaaataggcactcacgcgaaaacgtactccacgcgaaaacgaaggaaatcagtacattttcctagccatagacagtttttcaaaatg

SEQ ID NO: 107948 - DNA, 70 bp, Heterodera glycines
tttccctagaaataattttgtaatttaaaatgagatcacttttttcaggaaatttttttacaagcttatg

SEQ ID NO: 107949 - DNA, 421 bp, Heterodera glycines
ggtcgaccccccccccttcgtccgcaaagtgccccaaaatgggggaccccttcgcatcgaggggggccggtgtaaaagaggtggaggggggggagggggcaataagcttctgaaaaattgggttgaatttttgaaaaaattcatatatccataattttttttgtcaaaaaaagaaaaataatctatttattacatgatttatagtgtttgataaatgaggtatcctatttattctttactaaaaattgaagttagaaggtgactttagtaaaatttttacaagaattttgctgatgaaaaatttttgtcgcaatttttggaaattttcccaaaaatttttctattttagagagtattttccaaaagttttccatctttagggatgtatttttcgaattttttgtgaaaatgccgaaatatg

SEQ ID NO: 107950 - DNA, 180 bp, Heterodera glycines
agaaaattgtgggaaggtgggaatgggaattctcgcaaatcggattatggagggggaggaattcaagaaattcggaaaatttttgactctcgtcagcactaaattatacccaaatataaattgacagtcaaatcattgatctaattatattaagcattgacaacgccatttacagacatg

SEQ ID NO: 107951 - DNA, 1003 bp, Heterodera glycines
atgtaaataaatccgtttaaaattaaaaaaaattattataatatattttattagaaattttcatcagtcggagaaaccacaatagattagtcagatagtgtatgataattattcaattgttttaattattatgttatctaattaggttgaataaattaaataaccataaatttttcttcttctaatttttgatcttaatcactgaatttattcaaatgattaataaaattcactttatcatctgttaatggatattttatgtacacaaactatataataatattttttcattattctgtttttaattaattttatctttttaaaggtaaatttcttttcggttaaatatattttgttgcttacatggtaataatggtgattaatattaatttttaaaaggatataaaaggtatgattgtaaaatttcaaagtcttaagtcagatattttttatccataacttttttgaaattcaataaaattattttttttttgatttaaatcttccaaataaatatttctcaaaaatttttttttaatttttttactttattaattgcaatataattttagttgattgtcgcattttaaaaaattaaataatttttaaattattccagaaaattcaattgctcatcacataactcttttttaacttatcacattttaattggattaataagactttataaataataattaatttaaatgattattaaggtcttcaaatggttttttatgaattaataaattggaacaaaagaaattgaatgtctatggttttccacgtaaatatttagattataatgaaagtgcgaaaatcacgctaacgaattgataagaagaaataattagcttggaaattggctcaacaaatcgagaacgggtgaattaaaaaaatttttactgaaaattagcaaaaattataatcaaaatgaatacaaaaaacaaatacattttataataataatttaaattatttactaatattgtcgtttagcatg

SEQ ID NO: 107952 - DNA, 721 bp, Heterodera glycines
  unsure (1)..(721): unsure at all n locations
attagggatccggccccgatcatttttccaaaatcttcttgatcaatcgggatcgggattcggtcgggatcncactcannggatccctccgancnttagtcagtgtctggtctctagtcagtactcaattcgtcgttatcattcaaacacaaaaataaataaaaaatattttggaggaaatgcgtcgcaactatcttattttttgataattatttcctatttataaatgcctgttttgtaattaattaatccaattggatgggacccgtaaaaccgactaaaattgtatagaatagtcatttgcctgctcaaatgttctttcctcttcccaactcggcgcactgcgcggcgtgtacaattccttggcgtccaaaatggtcgcctcgcgaaggcgcagaaagccgcagctgaacagcgcggtcagaagaatgggaccaactgaaaagagaacactttggaaaagtgaaaagcaattcgaaaaatttgggaaaattataaattaatttaaataaattaaataataattaaatgaatagagagagaccaatgaatgcgcggtgccaatccaccagcaaatggcgcgtgtacgcgccgaacattcgctgcaacagacggtcaaaggtcggcaacagttgaacgcgtcgacgggggcctgcgccagaagcggaacaccgacggcacaaagggggtcgatgcctgcgggcacaattagggcaaaatg

SEQ ID NO: 107953 - DNA, 217 bp, Heterodera glycines
ggtgaggggaaagtgtacgagacaaagtgtacaagggaaaagcatgccaagacaaagcgtaacatggcatacaggaaaaagccactcaaaaacttaggaaaaatgtgttttggaaaagaccgtaatttaaatggcatttattgccaagggcaaactttcttaaattcttttccctattttaacgttggtttgccctctttttcagctccattcgatg

SEQ ID NO: 107954 - DNA, 1003 bp, Heterodera glycines
agtggtcatttgaccaggtcatttggcaatggttatttgacccggtcataactccccaaacatgagaaaaatggcaacaaaaaatggttgtaatttctgtagtatttaaaaaagaaaaataaaatgccaatttcattagttttatgatttgatcttgcaaataagtagattatattattaaattgtacattttcttcaattttgataatgattttgtatttttattaccatttatttcataagatttgtactaattgtaatgaataatcatttatttattcaaaattttaaaatattatttttttaaatctttttttactattttaatatcatgttcacatgtcggttttttccttttcttcattgggccactttgatttattaattagagaattcaaatttaattttgttgcaaaatattttcgtctttttgccgaccagttgaatgaatttttgtttataaaatttttttttataaatgatttcttttacttaataattatacgaaaattaaaaatttaatttttcgtttattatgaatttataaaaatttgaatttgaattacttaaactctattacttggattatcatttattttttcaaatttattttttggcttctatgagtgggcgccacgccgattttgttgatattcgtacgtaatttttttgcaattcgtaaaatagcccggttttcaccgggaaatttcgtaaaatccatttgagataaataacattcattcactaaaatagttaaaaggatgaaaagaaaaaattaatataaaattaataatattttggtttacaatattttttcaataaaaataatcaatgttatcttgttgcttttcttgtgacctcgagacaatacaataggctttttactttgctttaagcctttcttttattattatcagtaaaattgttataatttatttctatcattatttaatttaattttcatgctcagttctgggcttctgattccggcctgtcgagaatg

SEQ ID NO: 107955 - DNA, 360 bp, Heterodera glycines
ggtcatttttcgacaacctggatttttcctggatttttgtccaggaaatccaggtccaggtcaatttgaaaatccaggtccaggtccaagcacaaaaaacctggatttcctggataaattttttttcggttttttatggcgaaatgtattaaaattggtataaaatgtgccaaaattttcactccgccccctaaaaattcttatcctcttaaaaaattggctcaaaatcgaaaaaatttgtcattttttgaacaaactcgttaacaaatcgcattaaaaatacaaaattttccagcggcgcctatcggcaccgccgggctctcttccctcacacatcctaaaaatttttttgaaaaaatg

SEQ ID NO: 107956 - DNA, 70 bp, Heterodera glycines
tgtattccgaatttacgtaataaacatggggaaaaaaacaacattttcaggctgaaagaacgtgagaatg

SEQ ID NO: 107957 - DNA, 284 bp, Heterodera glycines
atcagtttataaaaaaaaagttaagcctaaaatctttcgcaaatttaaaaagcaattaaaaatttttagattttttattcatctccctttttgatagtgaaagcatcagagagccttatttaacttttaattaacatttggtgcgtttcagagcacgttctaaaaaatatttatgaattaattttgcaaaataataaataattaatgaaaaagtcagaatttcgaaaaattttaaaaacaacaagcgttggcattttttcaggttaagttagtcctttacaatg

SEQ ID NO: 107958 - DNA, 1003 bp, Heterodera glycines
actcttctaatcactgttgtacctctttaaatcacatttgtacctcttctaatctctgttgtacctcttctaatcacttttgtacctcttttatcactggtgtacctctttaaatcacatttgtacctcttcatcaaatttgtacctcttctaatcgcttttgtacttcttctaatcacttttgtacctcttttaatcacttttgtacctctttaaatcacatttgtacctcttcatcaaatttgtacctcttctaatcgcttttgtacttcttctaatcacttttgtacctcttttaatcacttttgtacctcttttaatctctttttacctcttctaatctctgtaaggccaacaaaatttgaaaaactggcgcgaggcgcccgactgaggccgcgatcggcccaacaagctaaaaaatgggcgcgaagcgcccgtttgaggtcaacaaaattgaataacgggcgcgaagcgcccgtccaaggccaacaaatttaaaaacgggcgcgaagcgcccgtcttgatcctcgatgtggactaaaaacccctaataattttttaaaaattcaaaaaaacctctccaaccaattcgatccgaagctcaagaagtaaaaaacgggcgcgaagcgcccgtctgaggccgcgaagcggccttaatagcccaacaaatttagaaacgggtgcgaagcgcccgtataagcccaacaaaatttaaaaaacgggcgcgaagcgcccgttcgaggccgcgaagcggcctaaaagtcccagataatttttaaaaaattccaaatctccacaaccagagctaaaaaaaccgtagttgtacctcttctgatcacaattgtaccttcccacccgtggttgtacctcttcccccgtaacagtctaggtagcgaagctcccaaagcgcgaagcgcttttccacagctaaatagccgacggttcacgcacccgctagtgtattttattacagggacatttgtttggtgattgcggaatcatg

SEQ ID NO: 107959 - DNA, 805 bp, Heterodera glycines
tgacgggctccgagtgaatggatcaagaaccggacccggccagggagatagtccttgaaaaaactgaacaaaaaattgttcttaaccgggccggtccggattccggatcaggcacttttggtgccccgaaagtggtgcgataggcttttggaaaatgaccaatcaaccactgagttttttgtggaacgcccacactgagcttttttgtggaacgactcaccacgggagggaacgaccggcggagatgcgatgatcagaaagagagtgatttacgaggaaaagcgccatttgggagtgactgattaatggggcattattggacaaaaactgtaattattgggttttgcctttattgccgaaaattgcatttgccgttgatttgtctgttgtcctcttccgtcatcgttcattttcttaggctttcgctttcgaaaaccgcgttggcccctctccaatttgcgttcttcggctgtctccgcaacggcactgacaaaacgctcttccaaccaaatcccccaaaacttccgatggcatctttcttcaccaattcgaacattggaaaagtcagcggaagatcaaaaagtaaggcacaatattaaattatgagttaatgaactgaaactttattaaatccaaattaatagaagcaaaacgaatgctgcgaaatttcaccgccaaacgccacaaaaaatgagggagaagaactactgtacgacgacagaatgtgggcacataataccataagaaaaacaagtcaaagttttggaattactgtaatttaagcaaagaatggatttatccgatg

SEQ ID NO: 107960 - DNA, 68 bp, Heterodera glycines
tgttagtctggcacaggcacagccactgccccgccgccggtggctccgctgcttacatcggcgccatg

SEQ ID NO: 107961 - DNA, 219 bp, Heterodera glycines
  unsure (1)..(219): unsure at all n locations
cgaattttttccncgaataatgtgaacactgcccgggctttgaactttcgctttcacagtgtaaagctctcctatatgaatctgacttttttaagtttataaaatatatttgccttcagtcgggatgtcctgctcgttcagcatcctttgcacactgatacattcgcccggatactcggttcctcttcgattgatttttagcggagcttctcggtgatg

SEQ ID NO: 107962 - DNA, 194 bp, Heterodera glycines
tctagagtcacaaagggaggggcggagacggaagtaatgagggcaacaaagagaaagtgaagcaagaccatgaggaaaggaaaggggagaagaagaaggaaaggaagagaacggtggagaagaggaagaaattttccaaatttgaaagcagtccggaggaggaggaggatgaagaggaagaggagtcatttatg

SEQ ID NO: 107963 - DNA, 155 bp, Heterodera glycines
gctgaaaaatcgcttttaagcatcccaaacggatttggatgaaaaagacaaagatgatcggatctgatcagaatttctgattgacctcatttacccccgcccctccccaaaaatttaaaaaactgacaaaaatgctcaaaaggttggccaacatg

SEQ ID NO: 107964 - DNA, 913 bp, Heterodera glycines
gttttttcccgcccaaaaaaaccccccccccgtttttttttaaaaaaaagaaaaaatttccccggggggaaaaaaaaaaaaaaaacaagaaaaggaatttttttttcaaaaaaaaaaaaaaaaagggtttttttttttttttttaataaaaaagggggttaaaaaccgggggccgaaaaaaaataattttttttttttttattttaaaaaaaaaacttttttttttttttttaaaaaaaaatttttttttttttttaaaaaaagtttttaaaaaaaaaaaaaatttttttttttttttttttttccccccccccccccccccctttttttttttttttttttttttttttttttttttttttttttttttttttttttttttttaaaaaaaacaaaaaatatttttttttttttttttaaaaaaaaagagtttttcttctttttgtttttccccccccttttttttttttttttttacccccccttctcaaaagcccccccccccttttttatccaaaaccgggggaaaaaatccccctttccggggttgtttttttgtgggttttgggttttgggcctaaaaaaaaaaaaaaaaacaaaaggggggcccccccccccccaatttttattttttttttttccctttttcccctttccaaattcgccctttccctttagggttttgtttctttttttttttggggaggcaaatttttgcttccccattttgaccattttccttcctttcacccaaacaaattattaatctgttttctttttcaaccatttgcatattcgtaatttggatttgttcatttcttagatctaaattttagtgcataatgcttaatgcacttccgcgtttttttaaatttttttacttatttagttaaaaattttgaattttaaaatg

SEQ ID NO: 107965 - DNA, 721 bp, Heterodera glycines
attgcacaattaacgaatgtgccatttgtttgttttttcactcatttttattgacacttttttccccgaaaatgggatgggatggtgtgaactatgaattcatcctcaaactgtgatgatttatcacacatttggcgtgtgatggaacgacggggacataaaaaacaaaaaatcgtttctgttttttcaacgccaaacttttggtgggggctcatcaatcacaactttcgtcatcatcatcgtcgtttcgttccacattacctaattttatttgtgcattttttatattaattatataacaaataatccaaaatccgatcgaattgaatcggatcggaaaattccccggcgccctttcccatcgcccatttcaatctttcccgcccccctcccgccgtcgttctgttcgtcattctttttcatcatttactccctctcccctcttccccgcgcagagattggctatgttccgtcctgcaccgcatccatccaacgtagcggtggcgatctccatcatcatcaacagttggcgctgtttgatttggatttacggcgtcgccaattgctgctcggcgttggcggcagcaaagacagcgacgacgacggtgggccgtttgttggagcagtaccagtaacagcagaaaatgatccgcaaccgcagcaacaacgacagctgatgcggacaatgataatgaagatgaacaccaacagcaacaacatg

SEQ ID NO: 107966 - DNA, 262 bp, Heterodera glycines
aaatttttaacaataaagtttttagaaatgagagcattttcatttaaacaaagcaactcgtacaaaaaagttgaaaacccaataaatttattttttttccaaaggcaattagtcccaagaaaaataatggacgaaaatttcattttttaatataaaaaaggctgacggaaataataaaatttaaattgattttcaataaaatggtttttttttattgtacgaatcgttgttatgattttgttaagcttgataagaattaatg

SEQ ID NO: 107967 - DNA, 287 bp, Heterodera glycines
tttttaatgcatcttatttatttgacctatttatattttcatagggaacatgtttcgcgcatttggggcatagccagaaattatcaaaaaatgatgtaccgaaatgcaaaagactgtgctttttacatctgttacaaatctcgtaatgacagggacagtaatgacaacacttaattttatgtggacagttcatttttcaatttaattttatttttggttgctatttatagaaggggtatataaagggagtggaaggaccatttgattggtaaattgtatcaaaaatg

SEQ ID NO: 107968 - DNA, 729 bp, Heterodera glycines
attatcaaactgctgattcatcctcatccgttttccattccccaatccttttcactatgttcgacaaatgcataaaaatattccaaaacaattttgatatcacacggaaaaacactttcaaatgtaaaataaataaataaaaattaaccatggggcgaaatcactctctttatccctttatcccacactgccacataggcacaagggggaagagtgccgcatttatcacaccaaccatggaccaaatgaaaccgtagtgaataaattttgggtacctaattaaattatatattaactccccagggaaattcgattgaaaaagaatgtgtgcaaaatatgccaaaggatggcaacaaaaatggcacaatcatttggcgcgccattaaattcgcacagtgccaaagcaaacgaaaaatgacaaaggaaaagtcatcattttggagtcatcaattgcctctaagaaattgtttgaattttttttattaacgttaagcaaagtaaattaaatctttgaattttttaattttaaaattatttatagcaaaaaaaaattataatacaaaattggaaattatttaagttatccgttgggtgcagaacaacacaaattttttgtgctttttgctttgaatcaaactgctgagccattcactcgcttttcatcggtggaaaatggtgaaaatattaatttatatattttaaattggcattctcggctttcccaacatg

SEQ ID NO: 107969 - DNA, 984 bp, Heterodera glycines
aattttaatgggaatcaaaattcaaacaattcccggtggaaccaacaaaatagaaatagggagccaaaccagttggaacataaaacggagagattagaagggatgattgaagacttagctgtacaaattcatgagatgagaatgagtaggaattttgcttcggcagaccaacagaatgttaaatcgctccaccccatggaaatgtcagaaggggagagtcaaccaaaatcagagtccatcaaatctgaacccaaacgaattaaaagttgggagaccaagggtaagggcttgagctcagcaacctcaattctttcaagtctcatggttgtgtcgttattttgttcagttaattgcgtgaacaaggcattagttccttctaagccaatgatttgccaaacacagaaacaggcaatgatttgggagcttccaaaaatgccaagttgtctgcctctcagtctagtagctgagcacactcctgtggctcaggacagagaattgtttatttcaaacagcatcgaattctctactaaagcttggacttgtagaaaaattaagaaaaatgctaggaagtacacaacaatttcgggagtgccagtagaagagaagttagactcagaaaatttggacataagcattgatgagtgtcaacaaattattaaacatagaagttgtagcttaggcgttctcaaaaatcaaactaatttttggcaaactgaaaatagcattgacctaactccaagaatgtggctatttgggtcctttggttggaaaaatgtgtcaaatgaaaattgttttctatttgaaagtcgaattgactcacacttcggtggttcttcaattgttactccgcttgggtcaccaaatgagtgtccttatgagaaggggagttgtattttggatgacaaaacggtacttatttggaaagtggataatgccaagaaatgcaactttatttcaataggaatcaaaacgggaaaaacaatg

SEQ ID NO: 107970 - DNA, 400 bp, Heterodera glycines
tcaggtcacaacatcatccttatttttttaaatcgacagatcacttaacttggctattttatgaacaaattctgttaacaaatttgtcgaaatttcctatttaacttttggtttttatgaaatgaaaaacaaaagaaggtttaatattataataattttcacttgaaaaaagtaataagaatttttttttgtgtttttttaaaggaaattatcggggttttccccaaaattcccggtcccgctttacattagatttttagtttcgaaattatatttactaatcactctcacccgtttagcgtaaaatctgatcgttttggttaagattcagatgaacatcggtgcaattggcggatacggtagggcaacgcgtgccacaaatctgcatcgccgaaccatg

SEQ ID NO: 107971 - DNA, 555 bp, Heterodera glycines
ggtaggtcgtccgtcaatacaatattttaaataatatttattttaaaattcctatttttgtcagtgccatccggcgtgttgaccagtgacgagttggtcggcgtcttcctgacccacgcccacgcggaccgtcgtgccaactccgagttgtaccccaaccaatttcccacccaccatcgatcgcactctgctcagcgcttttttcaacgaaaaattgattagtcgataaagctattttgcaaattgttctgatttttaaccaaaaaattcattaaatttatatcttttctttcttttgtcgctttaagttttgacttttgaaattaacaacaatgaaagatcgaactttttttggcattttttgcgatttaaatttgatttttgacaattttattgcacatcaacattatttaatgtgcaagaaaaatttacgcatttttcccctgaacatttcggcgacgggatcgaaagtttaaaattaactttttttttcagtatatcatacatatactgtacccaaagcaaagtagtttttgaaaatttttcaggcaaatg

SEQ ID NO: 107972 - DNA, 304 bp, Heterodera glycines
ttttcttttcggcctcccattttcgaaatgcccacgcggcccttcgccattccctcgcgggaaatttctcgtccccaacagattcggatgatctcagcttttttgacattgaaccgattgttggggcagtggtcggagtgcagcagcgctatcagctcaatttgggaatgcaacgagggaatttcaggcaatttgaggggcaaaaaagcattgaatatttgaaatttaataattaataatgaatgattaaaaaggtataagtttattatttggataaattgccaattcatttacttcaaggatg

SEQ ID NO: 107973 - DNA, 179 bp, Heterodera glycines
ggtggtggcacaaaggtcaagctaaaagcctttgtcgggcgaaaagccctgacaaatctctttaagactgcgataatgacctctcagagaattcttagggacctattaatacatgaaaattctatatttgggctgttattaagataaatttttgcgtgtgcaggacctaattattaatg

SEQ ID NO: 107974 - DNA, 1003 bp, Heterodera glycines
tccctcaaattttctcgcaactgtaaacattatgggacgcgtttaagaaaaactaagtaattttaattaatttttaggtaaaatttttaataataaagatatattagtgtttgaccccccaaactttgtcaagttctatttttccagggttgccgctcatcccgaaaccggacattttctcgtcccgaattccgacccgactttttttttgttattattcgccatttctccctgccctcctctttattaaagcattggaaataattcgatcaaacggaacaaaataatttacgcttttaccgcttgtgctgaaaaatcgatgcaaagtacgcactcaaattgagcaccaatccctccgcccattctcataaattctccgtccttttccccaccactctcttcttctttatattggtgaagattggtggtttgaaatttttaaatttcatttttcttaagaattatttctattttcaattaatttataattcgtttcattaaatatttatttaatttatttgattcgtcaaatgcttctcgtttccctttcttttcatataaatgactcataatgcgaaatgtgaacgttcaaaagaatttaatgacaaaaccaatttgtaaatacatttattcattcttttaaaatatttatataattttttttcattttgctaaaatatcaattcaacaaacttcaaatttttaaaatttaaaccattagaataataactatgacatttctaactttgtatctttatgcattttttgaaaaacctgagctcagatccgtccgtgatcagaataaatactttttacccttgaaaaacaaaaagaaatgttttttgcttttacactagaaaccaaattaccagcacttttaacacctaaaaacagattcctatgaattatttttgtcgctttttgttattttttgaattatttctcgctcttatattttggttttatttttctattagctttttaaattttaatttcaataatg

SEQ ID NO: 107975 - DNA, 1003 bp, Heterodera glycines
aaaaacatattttgtgcttttggcgaataaaaacatattttgggcttttggtagtttttggcacatattttggcgatttttgaaattttttgaattttttttacaaaagttctttttttttgcaatcaaattcttggcaaaatgttcccaaaaatgttcaattttttaattaatttttgacgcttttcaactaaaaggtggccgctcatttcgtcactgatcgtttcgttactgttcagttcgtcactgagaattttttttttaaagtttggcacattgcttaaaaaacaacaaaaaattctttaataaacaattgttagccaaaaaataaataaaattgttaaaagttttaaatgccttgattgtgagatttgaaaggaatctcttctctgaaataaacgagattagtttagcttctcatctttaattttaacttccaaatgtgtttatttctgaaattcgaggcccccgcaccaggggtgggcgaaactgcgagcttcgaaagcttcggttttttttttggaccgaacttcgtgcttcgaaaaaaattgggctttgcctttggcttcgagtgctaagccgagcttcgcccatctctgcccgcactagtgctgcttgagacagaaaatttcccgagactctcgagcgaggaatacaatatacttttaaaatccattgtaatgtttaagcctattgaattgtttttggcccggattaaaatgtaaaatggtcaaaatggggactcctaagcttttagaacggtcaaacccgtaaaatattcttaaaacaaattgataggtctaagtgttttcgatttgccagaaaatttcaaaaaattataaaaccacaaagaaacaaaactgcgtaaaaacgccgacttttccctccccgaattgctatgcaaatatttttagtataaaaatgcacttttttcttttcctcctcctcattccattctctcattattttccctctattttccggtcattctgttccgcaaatg

SEQ ID NO: 107976 - DNA, 1003 bp, Heterodera glycines
ggtggtcaatgtcttttcaaggacgtcctaaatttggaggacaccaaaaaataccaaaacaacctaagctaataataatgtgtggagaggggggaaaaagtgaagttttttggcacaaaaaatattccgctgggatccaattagcagatatttttattgtgccttaatttgcgcgccaaaaaaatcacttattgatagagaccggcgggaacgggagtcccgtgggagtttacgggagtcccgctcccgactcccgtacttttttgtcgggcgggatttttacgggagcgtgatttttacgggattcccgctcccgctcccggaaatttgacccaaaaaacgggagtaaaaatgcactggtaagaattgagttttttggtaaaataataattttttgttcggatgagcctatttgaattattatggcgatctgtccattcaaattccacgccatttttgttgttgtcacttgtccataaatagacgatcatttcctccctcctggtcttttccctcattcattttattttgttatattcctccgaccaaattgtcttcgctctttatttattgttcgtcaataaacatttatttattgattgtcttccttaaaccctcggaccgaacaattggcgcagtcacaaaaatttggactttgctcacatcttcgggattaaaagcaaaagccgagacggcacaacaaattcaccgaaaagccgggattggctgtgaattttgattttaaagctgagttggcaaaattcttcaacaaagcagtcaaagaaactgctcagtcgtcaaaagcctggtcggcaaattcttcaatttaagcagtcaaagaaactgctcttctaaagccgggacggctcgacatttcttctaaagccgagtcggcacgccaaattcgtcaaaagccgggttggctaaatattaaattgacacctattggtgcaatactacaacgtttattgatttcgggtcgaaacaataatcgtctacaatg

SEQ ID NO: 107977 - DNA, 745 bp, Heterodera glycines
aaaatttgaacaaaatcgttgaattataaaattttgtccaaaaatttggacctcagaaaattatcgatttttctgataccagctgaaaatgttggtaccggtgccggtttttgcagtgtcggtcagtaccggccggtaccgatgaaagcgaaatttaccgatacctttctactctcatttaaataattgaaattttaaaattattaaggggattcatttttctaaattttctatttttcatttaattttctcctgacttactaaaagcacggaaaaagaagcaaatttgtataatttttaaaccactaaaatattcatttattcattcattaatttttgattatatcacaatttattcaaatatttgttatgcaattatttcttatttcaatgtaatcatttccaaataaacctttatacgaaatgtgaaagaaaatcccataaaatattttgaaagatatcaaataaattttgggaaatataaaatgagaaaatttccacaaaaataaatcacatataaaaacacaaacattctttaaaaaatgcgtttttattattcttgcatttttgtggttgttcttttgatggcattcgtcgacaaaggaattttggaaaaagttttaaattaaagaataaatattaaaaaataaaacaaaaaacattatatttgcgataaataaattttacaaataaaaattcaatttaaatggtgaataaaagaaatttgctgttcagagtctcaatg

SEQ ID NO: 107978 - DNA, 294 bp, Heterodera glycines
aagtgataaaaagagccgggttttcacgcatttatttttaatgagtatttaatttcgattaattcgaattttattttctgctttaattatttaaatttaacaattaattgttttttcagcaaccatgtacaaaattgaaccttagctttctttttttagttttttggtttttaatggaaaattaataaatattttattagacgccacctggtcaacaaaaaatgcgtcgtagaatagaaatgaacaaacccatcactgctgttcagcatcgtggtggtggtggtggcggccatg

SEQ ID NO: 107979 - DNA, 378 bp, Heterodera glycines
ggtgagaagtaacataggatattggagttaaccaaaacttatcaagttaaagcttgatgataataaggacttatcctttggaatcgtgattaaaggacctgctctttcgtgagatttgtggttcgcattgtatatcgatgagttcattgatcaataatgataactctgcactcaatgcccttagggcagatgggatatgtgagccctggctgattgattgcagcggcttcactgtggcgataaggaatatacaccatttttatttcacactatttcaatgtatttgataaatatttgatttacgtgtggcttatcggtagtaattcctaaatattttgccacatgcacacatcatctcctcatttttgttttcagatg

SEQ ID NO: 107980 - DNA, 819 bp, Heterodera glycines
ttttgttcactcttctaaaaacatggaaaaattatttaaatttaaatataaattattttattttaattttattttatttacaatagaataattaattcaattaattgtttttttactaattttgtcatattattgaaatgatttaacatttttaaaattcgttttctgtcgatcactatgtgaaaaaaatgaaatggatagatagaagatgattcagcagaatttgatgaataatcaccgcaaaaatgcaatgaattaaaaattgaaaattaattaaatttaaaaaataaaaaaaagtaaaattttttactttttccatcaattttactattgcttcttcataattttccaatataattttaaatctttgccttgcaaattttaaattttgaagatgtataacagtgcggcatattgacaaaatttgggcgggggcggagatttgacggattaatttggcggttttttgaatttattagggtcattaattcataatatagtaaattgctgcaagaattatttacacattttcattaattattccttaaatttattggtcatgtgagttcattaatttttcaaacttatggaatataaatttaccatttctttaaaaatttaaataattatttataagattttaaaacaatatttggctttagttttgagaaataacagataaatcacgaaactggctcagaactatagacaatattatagttctttaattatgccttcccccccccccccaaaaaaaaagacccaaatttcccactcgagactctcgaccagtcattactagtaattatagcaaatatg

SEQ ID NO: 107981 - DNA, 62 bp, Heterodera glycines
  unsure (1)..(62): unsure at all n locations
ctctgattcataaaaaaatgctttcgatttgcttcaantgaaaaaaatcatttttgtagatg

SEQ ID NO: 107982 - DNA, 128 bp, Heterodera glycines
agttcctttcccttctcttttcggccctctaattttggctaatttagagcgtttcttcgactctttcgtcctccgtcgatgtctttttcagcaatggtttgatggtcctcggctccttggtgctcatg

SEQ ID NO: 107983 - DNA, 187 bp, Heterodera glycines
taatggtttttcacgaaaaattttttccacccccctagggtttttttttgtgaaaatttcgcggtttcaagccattttaggattttcagatcactatgaaggagtgatctgatcaatttgttgcaaattactttttcgatcagtacaaaaaactaagcttaaatgaattttttcagattttttaatg

SEQ ID NO: 107984 - DNA, 149 bp, Heterodera glycines
actgagaaaaatttgaaattaaaaaatttcgcggatttctccaaaattaaatttttttttgttggtctagcatatatttcagtcaaaaaatttttaatttttaaattgatcagtacaaatcttaaaaaaaaataaatacaggaagcatg

SEQ ID NO: 107985 - DNA, 80 bp, Heterodera glycines
ctctattatgttcaatgtacatatttctctttttttcggctgttttttaattttcaattattacaataaaattagaaatg

SEQ ID NO: 107986 - DNA, 61 bp, Heterodera glycines
ggcaattaaaaacaaataaataaaattaaacagtttttcacttttgtattattacagtatg

SEQ ID NO: 107987 - DNA, 190 bp, Heterodera glycines
tgccatttgatctgatcaacgaatttactcatgaacaattgacgcttaaaagaactttcaataacagtcgttttttgttggtccgttgtccaattgcgcgagacgcgagcaaatggacaaaatgggaagaggaagtgattcactggcaaatttataaccaatggaatcgaattgacatttatttatgatg

SEQ ID NO: 107988 - DNA, 300 bp, Heterodera glycines
tatttttcaacattggcaagcgaattgcgcctgaaatggcacaaccccacaaaccctcagctgggatagttttgcgcgttgcgcttccgcctcggcttcgctggcacgtcgtgcctgctcaatggcctcctgctcggagagacgcgcccgttccgcgatcaacatttgcgtctcctcggcacttctgatcacattctgccaaattaagggggggggggagaaagcctttaaatttggctcctaaatttttaaattttagtgctcgatcacctgcatggcgctcaactgttccgacagatg

SEQ ID NO: 107989 - DNA, 92 bp, Heterodera glycines
agtaaattgtatttcgaaaaataaaatataaaaaataattaaaacataatttggttcgggtgttcaattaggaaattaattaggatgaaatg

SEQ ID NO: 107990 - DNA, 56 bp, Heterodera glycines
cgtgaaaaaggcaacaaacgcctcaattccaattgttttacttaagcgaaacgatg

SEQ ID NO: 107991 - DNA, 110 bp, Heterodera glycines
ggtgaacgtaataaagaaaccaaccagcattgacttgtgcaatccgactcgttaaaataaaatgatctttaaaataattgcataaatttatagggacagtatatataatg

SEQ ID NO: 107992 - DNA, 460 bp, Heterodera glycines
atcagaatggcattgagagagagaatagaggtagagagagagggagagagagagagggaggagagagagaatagaggtagagagagagggagagagagagagggaggagagagagaggagagagagagagggaggagagagagaggagagagagagagggaggagaaagaggggagagagagagagaggaacaacctaattatctgatcagccaatgtagtaatgtttcacaaataccccactagcccaatgattaattttccatttatcagttaccattatcaatttatattatctcattgatcagtcaaccccagtgatcagtttttctattgatcattggatcagttacccttcgataagtaacccctttgatcagtgtcccattgatcgtcattgatcagttaccccattgatcagttaactctgcgctccgtttttccaggactaccacagcatg

SEQ ID NO: 107993 - DNA, 134 bp, Heterodera glycines
ttttcccttcttcggttttttgtgtccctctgtatttgcacacacacacacacacacacacacacacatatatatataaatatgtagataaaaaatttcttcctctattctactaaaccctcacccccaaaatg

SEQ ID NO: 107994 - DNA, 213 bp, Heterodera glycines
  unsure (1)..(213): unsure at all n locations
ctcaatcagcacagaataaaattaaactttcggatattgcattaaatggctggcataattntggaatatattaagaaagcttcccaggcgaaattccatttcaccggataacattccttacattttattaaaaaattgtgctgagccaattacaaaaatattagctgacatatttcgacttgctttggattccggtcaaattccggaaatatg

SEQ ID NO: 107995 - DNA, 292 bp, Heterodera glycines
tatgcaacaaaatattacgactatcaggtgggcggaggagggacaggctaacaaagaagaagcccggcttttgatcaaaattggaattgttcaccacagattgccgttgtttttgccattttactcggcggtcttttactcctcgcgttggtagtcacagccatttattacatttgtgtggtcaatgtgagtgtaccaatttggcctcaataagtcaaaggttaagatgcggggcaaaaagggcggcattacgcgcgttccttccggcagaagtacagtaaggacgaggatg

SEQ ID NO: 107996 - DNA, 538 bp, Heterodera glycines
  unsure (1)..(538): unsure at all n locations
aggcacaaaatgtcatcataaaatgacctaaataggtttagaatcacattttaacatttaannaattaatttttgctagttttaggagtacattttctaaaaaagtttttttatttcagaagaaatttctataaatttgcaaaaattctcagaatacgtatgtaaaaaaatgaaaaatttgccgaaatttttgattttttttaaggaattttaaaaattcccgtaaaaaatcctcaaaatatgtaccaaatatgtataaaatcccgaaatatgtaaataaaagtcccgatttttgtacgcaaacacagaaaagaaagtgttttccctactatttagagcatggggaatcaaggaaaaaaaatatgtatttacattaaattgacatccctagtgattttcgttaaaaaagattgttttccgctttgtttctcattatataaaaataaagtttccaacgcaattacctaattattctgctatatatttgtgtgacatcattcgaaattcaacagcaaattgtgctaattgccaaaaaatg

SEQ ID NO: 107997 - DNA, 76 bp, Heterodera glycines
ttcttttttgggctctgccgacggaccctttcctttccctttggttttctctgccaactcaaccgcttcatcaatg

SEQ ID NO: 107998 - DNA, 351 bp, Heterodera glycines
catttctctgtcgctatttggaagtgaataaacgaacttttatggactggacaatacacaaatgctcaaattggagccactctttaacaaaaagtcaacaaaaataggaaaataaacaaaggaaaaatttaaaaggaaaaaggtagagtagagcgctttggcgaatacaaattgtcacccgacattcaccgccacccaaggacgtggactgatggagggataaaaagggatcggattttgaaagtgccgtttttggacaaattttcacgtgacaaatttctttttaatttccgtaatgctgtgaaaaaattgcccaatgtgccccaacatatcaaagtccgaagggatatg

SEQ ID NO: 107999 - DNA, 592 bp, Heterodera glycines
gatgagggcagactctttttaaggggggagatgttgggaagggtactgatttgtcccgcttaattattatttaattcctttctttctcttcccctcccactctctctctgttgcctcctccataaatacccccgtccctttgaccatcgttcattccctcattttatttgtttgtgtccaccatttccctcaatcgatatttgcccccactttctcttatttaattgtgtcttctccaaattggaataaataaatatttattcattggacaagtgcaaaggcacaacaaattggcgacgcccgtggcagatttcgacatatgaatttctgcaaaagaaattgcgtctgtttttttggttttttgcattgcttttagcatcaacaattttcgccaaacttaatctgagtgtacttcagccagtcggcatttgacattgccaattgttcgtcatcgctactgattagcttttagcaatcagtagaagttagcgctgctgataatttgtctaggcgacatttattagctcatccacgcgcacccactcagtttgtatctaggcgctgcaaacaagagtggtgaacgacaaaaatg

SEQ ID NO: 108000 - DNA, 54 bp, Heterodera glycines
agaactgcttatgaagtgattagaaatgtgaatccgtttgctgaagcatatatg

SEQ ID NO: 108001 - DNA, 415 bp, Heterodera glycines
aagaatatttttgaattaaaacttttgcaggctaacaaatctctccttagttttaaaattgtgtgaataaatattttagcctattaaattttgggattatttttctagatgaaattgaagaataaaattgacaaatttttggagagatttgtccgtattaaatttttatttattttaaaaaaatttttaagcatgcggacccgaacaaaactgcgccgtgtttttacaaattcacaaattttgtaaaagattggctttcttgtgttaatgcgaaattggtcaaacaattaagttaatttttaatattttttaaattttaatgctttaatttttagttgtttgcccacaaaattatatgttaaaataacatcgaatgatttcttggaaatattcgtaaaaagtgtcggcgaaaatg

SEQ ID NO: 108002 - DNA, 794 bp, Heterodera glycines
  unsure (1)..(794): unsure at all n locations
ccttgcaaaatatggtgcgaatctgatcagtttaattaaaaatagttaagcgtaaattgtatggcatgtttaaaaagaatcaggttcgaggaagtattggtaagccaaaaaacatttcaaacatttcaaaatctataaacaatttaaaaatgagaattcatgtgagattttctggaaataagcttaatagggcctagttaagctgtaaaaaaaatgtggggcgatttgaaagagaatagaaagaacccggttcgatgaagtgctggtatagccaaaacacatgcaaacatctaaaaatgtattataaatttaaaaatgagaattcacgcgagattttcaagaaataagctcaataggtcctagttaagctgtaaaaataattcgcaacgcattgaaagagaatagaaagacactggttagaacaagtttcagcaagacaaaaaaaatccacccatttacacatatattcagaaaataaaacactaaacttttaacaactaataacaatttttaaacaaacagccccccccccctgccncacgcccttgcccagcaggtgtctgtgggatttccgaataaaatttggttgatggaaaagtgtttatttcccgagtgccaagttatgacgtgccaaagtttttagttaccattgcttattttcccctgttcccggtttccacacattctttttatcagaaaatcaaaaattctttccagtactcttcaaagtaaacagatagtgttcaggattagtttaaaacccgatctatttaagaagcaatcagattgagatg

SEQ ID NO: 108003 - DNA, 1003 bp, Heterodera glycines
aaaattggcacttaaaaacttgaaagtacttaaacataaaatttttcatatatttcagaccaagggaatctcagaaaaaaaattgaaaaaagcaaaaaaatatgagcccaaccaacctatcaatagcaaaattgcacaacgaagtgaaaatatattcaaaaaaatttttgcattgaaatgaaatgcccaaaaatttaaaaaaatatttttttccttttctccgctggtttccaaaaaaaacaatcttttgtttaccaacttagtttattgttatgtatgtattgctggtgccagatagtttttccttatttccgccactttggataatttatcgacaaaaattcttataactttgctaataataaccatataattgcattcttacttttattcaatagcttaaagtttatttatattttcaaaaaatttcatttcataatattttaaaaaattttataaagaaaaaaaaatttttttgaacattttttgtcaaatcattttgaaaaatgactgttaaactacaccaagttattttaaattatttatttctgtaaaaaaggaacacttaaattaagtttcgttccttaggtctttcgtaaaaacttattttattcgataatttattttaaataataatctatttatttttttaaaaaatcaataccatgccttccaacaaaaacgaatttccttcgagcgaaaacaactttaaatatgtaatttaaatattttatttaaatttaataaatgtgatttttcaaatctattattaatttcaatttgattcaaagctttagttgcgtccgtacgaatggctttgtgttccaaaaaatgccacactcgcgctgatcaaaaaaaactacaaaacacttgccattgccacacacccggacaaaaacaatcaatgcagcggcaaattgtttacggtttgggttactgtacaatttaatttaatattttagcaagatatataaagaaaattatattcagctcattagcaatg

SEQ ID NO: 108004 - DNA, 425 bp, Heterodera glycines
ataaatatttcaataagaataggagcaatcttgttttatgcacattcattcattatcattttatacaaactgtatacatattgacgtgcatattcatattcatattctcactaaattttacgccttttattttgtaataaaattttattaaaaaaatatatataatacatatatatattaatgtttatacaaaaggaaattattaattttactttaaaatttaaaagccaatttttatgagttccaacaacgtctagcaaaatttttttaaaagactcaaaaagcttcagaaaaaattccaaaaagtcaacgcctcttacatattatgattttatttccgaaaaatataaatttattaaaataatttttatttaaaagtaaatttaaataaatattcattaagtaagtgtgtgttaaaatccatg

SEQ ID NO: 108005 - DNA, 487 bp, Heterodera glycines
ataatttacataatttttatttaatatttgttaaactgagaatattgtataaacaataaaatagagatgccgaaaaaagaattaaaaataaatttatgaaaattttttaccagtattatgattatttacttgcaaatcatttgcgtactaaatttatattagaaatgaatataaattttcaaatttaattgttagtagaaactgcaactttctttgcaccataactttggtgaatgataaaataattagagaaatctgaccagaaataacacataaaaaaacaattcaatatcacagtcattcaatttattcgataagttaaaagaccaatattaattaatacaaattaaatacataaaacaatatattatagtctataaactcaaactaataaattataatctcacataatatacatagttgactcttctgtagtccttaagatcgcaaaaaaacaacaaattttctttcctaattaatcgacatg

SEQ ID NO: 108006 - DNA, 189 bp, Heterodera glycines
tcccttttttcatgtatgtttttgattgaaaaaaaatatacatttaatcattttatttaattaaatttttaaaattagcaaaattctgcaaaaattttggaaataatattttaaaatacaaaaaccgccaaaatcataaaggataattaaaatttaattcgttgaaatcaaatcgacagtctccaaatg

SEQ ID NO: 108007 - DNA, 727 bp, Heterodera glycines
agaagttgaggctggtcaaatgcagaataaatttcgaaagaatattccaacaatgtcaaaatgtggcactttgaaattttaaattatggaaattaaaaaaaacatggctctgaggggggggggggggaaggggaagtgtcggtttgtcacgggagaagggggaggaaaggcgttggaaaatgtttgtcggtcatacggcgacccattggccgggaaatgccattcttttgcttctttcaaaggctgcttgtgatccggggcaacaaaagtcttcgcgagctgcacaaagcctccttctcagccatcggaaatgagcagtcgctttccattcaaattgcggacaatgccatcgaacggattcgctcctttgctttcaagtgccattcctcttttatgtacaatttcgacataaatttgtatcataaatgctcaaaatctgcgcgaactgtcaattgaagagcgctgcttcgaattggaaggctgtgccctcggggctatttcgcgtttggactttgtcactttgcacggggtaaggcacggctttttcctttcccttcaatttgatttggtgccctgcttaatcaattattgttaagcttcttccatttgattttcctccttccccccttttcggtgtgttctttggaaccgttcgccttccaaaacagcacattgatccatcagctgaacatcgccgcctcttcgctgaacaaattgccacggaatg

SEQ ID NO: 108008 - DNA, 202 bp, Heterodera glycines
  unsure (1)..(202): unsure at all n locations
ttttcagtatcaaaaatagtttaagacccatttttaaatgctaaaaaataaattgaataggtttcaaaccaatattcggctatttaatagcttaaaaattaganaattttctgggtccaattcatttttcttaaaaaaattggaacaaaaatgccaaaagcagttaaaactatggcattttctgtgaactggtaaaactatg

SEQ ID NO: 108009 - DNA, 287 bp, Heterodera glycines
tctcatcaattatcaaattttatcgatttagatttaaaatctcttatttttaatatatggaaaccattttcgctaaaaaaatcggccaatcggcagatcaattggtacttatttagtttaggaggtacttttaatatacatttttaacaaaaaaaaatttttgttttaataagtgatgaaagtctagtttttgcaaagggttaataaattttgaatattaaagtcttttaaaatatccatgcttaaaaattatataaaatgaatacatttataggcatctgaaaatg

SEQ ID NO: 108010 - DNA, 297 bp, Heterodera glycines
atcattattggcaatttatgttatctgattcaaaaatcagatcgttaccatcaggattttttcgcatttctactaaaatctgtgatatttgttcccgaaaagaaacattagaaataacgaaaactaattaagcttctgtaaaacacaagaaaagaacaattataatagatacattgtcagatggccacttaaacaagaaaaaccggaaattccaacaaattttggtttatgttttggtcgattaaaaggagaacttaaacaattactaaacgagattttacaaaaccaataaaaatg

SEQ ID NO: 108011 - DNA, 227 bp, Heterodera glycines
acagatctccccccccccccccccccctcctttagagccatcccactccaataaatcctcccaccctcagagaagggtagaaaaatagagtcccccgggactataatagaatgacatattataggagcagaattttgcgtatttttgacgggaaggaagaatacatgatattaaaattctttaaaaaaatttagtttttttttcagaaattaaaaggatcaaaaatg

SEQ ID NO: 108012 - DNA, 212 bp, Heterodera glycines
gggccaaaatgaaaaaataaaaaagggaaatggggaaaaagcggaaatttgcgaaactgaaaaatgcgaaatgaaaaaaaagcgaaatgggaaaacgcaaaatatgggaaaagcgaaatgcgaaatttttttttaaaaattctaccaatgcttttgaggttgtgatgcaaaaaaaaatcttccggttcgatctttttctcagataaaaaatg

SEQ ID NO: 108013 - DNA, 105 bp, Heterodera glycines
attaacattcgctcattttttaaattttacttattccaaatcctattattttttaatagttaaccaatttgatgtacattctgatttggacatttttcagaaatg

SEQ ID NO: 108014 - DNA, 473 bp, Heterodera glycines
ttattaattaaaaattcaaaaatttattactttatttatatttacctcaataattgcaaattttttgaatccccaacagtttaacaattcaacaacaacaagaaaacattcatatcatcctttcgaattaaatatttttcataatctgttcatgaaacaatgcttaatctgtaggccactcggctagtccaagcgaaatctgaaaattatgtgtgtttttaatgtttcattttctcggcagtgcctcgttctcatttaaaaattagaaattagaaaaaggaatgaagctgatttataaaataacaaattgaatttattttaaatttgagaaaattgctgaaaaatatcgaatgctgatcgagtgcttaggctctcgagtcttaaataatgaaaaaatttggggttttttgagattcatattgtcccgaagtcaggtcttatatctctaggtcgactcttagtgtttgaatatg

SEQ ID NO: 108015 - DNA, 298 bp, Heterodera glycines
  unsure (1)..(298): unsure at all n locations
aaatctgaactgaaaaccttgtttactcacaatacctcacttggcagaggnactaacaattaatcgattgcttctcctaagcaaactaatcaaaaatgaagagaaagaaaaacctacacatatacctatgtacattgcgccaatttaaaaaaacggttagggttaggtttaagttcgaacttttcgacaatttattcgccattgctttgtgtacctctgcattaatatccattaacaaatctaatgtgtataatctttcatcctttttttagctggcttcgcaaattaggacctcatg

SEQ ID NO: 108016 - DNA, 555 bp, Heterodera glycines
  unsure (1)..(555): unsure at all n locations
ctccaatttccattttgtgtccaatttacncgggagccggcggggactacagaaaattaaaattgaattatgaaaaattcatttcaataatttcagcgaggcatggaagtttttgacactttttactttatgccccccaccccccgaaaaaccaaagggggacaatattttcaaaaactttagtccataattggttttgatgacgttgattaagattctgatatttaattccgaatgcttttcccaatttgaaaaaaaacaaccaaaattcacataaattttagtttttcactttttttgagttttggttagggatttgtcaaaattagtatcagctttatgattagcgcccccgaaaacccctataaaaatttttttcgtggagtctaaagtaaaagcatcgtgggttttaaaattaaaatgtgccgaattttttttaaaaaaaatattaattcatttttcttactttttaaaatatgttttcaatttttactttgcattttttgaaaggaatgtttggagaatgcaattcgtctccattttgtgcccgaaatg

SEQ ID NO: 108017 - DNA, 686 bp, Heterodera glycines
tccctcaaattgttggcacgaatttgtaaaatgctaaaattagtaaataagtcgtatgacaaaatccaaatttcttaaaatcatttaaatcaaaaattttcaagaatttctgattgtacctttattttttcatacaaattaataaaaaaaacggagttatagaaaaattttaactaatctttgggcctatacatcaattttaaaacgaaaaaagccaattcaatcgccaaaatccaatgaaagagaagtatcaaagaatcaaagatcaaaaaaagttcttttgaaatttgaaaacaaaatgccataaaaattgccaaaaaaattttgaaattttatttttattcgaactcgaagtaaaaggtaaaaacgcaccgaaccaaccctaacttaaaacaataaaactggcaatctttcggaattgcggtcccgaaaaaaattttttttttaaatttgtaacactttttctaggcttaaaaatacgctaatcactgaactcggattttgaaaaatctgacatccatttttgaccaattcgaatccttaactcaaacaacaaaatagaatttcgactttttgattcaagttttagaacagcgctaaattttgaaaattatcagtttttaaattaaaatttttttttcattattccccctcaaaaaaaaaaatccgaaaattcagtggtcatg

SEQ ID NO: 108018 - DNA, 1003 bp, Heterodera glycines
acaattgcgccgcggaaatttgcgccgcgccatatgggatacgagacttgaattaatcattataatttctatgagatagaagctgacatgatatcaagattagaatcaacattttagagtgataacatgaagagatgcgaagaggacatagaatacagatgttggggaaatgctcttattttcaactttgtagcaaatagtaatttcgctcaatttccatttgcgtgtcttgaaatgttcgtccacgtaaatgtcaaagcagcggttgatcaatgcaatttcggggccaaattgggaaggcgtaagaaaatcaaacaccaaaagccaacaatcggcgcagataaagctgaaaaattgaagaaatatttaaaattttttgttgaatttttacatttcttttttgttggggcgtcgtcgttttttgacatggccaaaaaataaccaaagagtgatggcacaatcgaccaacagcagaaaagtgcagcaacaaaatgagaaaaatttagggagaacgaatgaaatgaggaggaggaaacgaaaaaagggaccacataaaagcaagcaaataaataaattaattgtctcttatgtatgtcatgggaatttttttttgggggggggggggggggaaccactttaactactaccaaattctttagacaatctttcaattatcctaaaccaattggccaacaaaaaaaatcgagaaaaataaatgagtatgtatattatagaaggaatgaattaacaagcatttctgagagaaaataagcacaacaattgagatcgatcatttctcaaatacaataatattcatttccatacacttaatcagacgacatctttgttgcttctatccgcttcttcttttcttccatcactttttcttctgctgctcaccgcactaaaaaaagaaatgcgtatttttgtttaaggtatagtgagtaaacatacgcggctggagcggtccttctggcgttcaacgtaatccgattttgccatg

SEQ ID NO: 108019 - DNA, 69 bp, Heterodera glycines
tgtacgttttgcatatttgttcacttaaccctttacttctcattttttagtctattcgttgtgccaatg

SEQ ID NO: 108020 - DNA, 326 bp, Heterodera glycines
tccacccaacaatttttaattggttttaaatttaattattttattacttttaattcttaatttctttttagcgaaaagcatttaattagtgatctttcttcaattcatcaccaacaaaaaaaaagggacatcagcagcgaacagtcaaacatcagacggaattgctttggtggacattcaacagacccaccagcagcatcgtcagtccttcggcacttttttggcttcaagcaacggcacagtgcttcggcggactaaaattgtgaaggaagtccgactgagggccgacaatttgaataggtatttcggttggttcgaatttaatg

SEQ ID NO: 108021 - DNA, 1003 bp, Heterodera glycines
attgaaaaattacaagtttgagaattaaaaaaatttcttattttttttccttcagtgttcttcttctaaatcgccgtcgggaaaaaactttattttttttttgtaaatttttaaattttcagttgccattaaaattttttatttgggtagaaaatgtgcgcagggcggaagaaatgtatttaaaaatgtaaaaaaatatttatttaattcaactaaaattcaaaaagattggaagaggggtaattgaagcttgcttgcttgtttcccaaaaaataaaaataaaataaaattccattttctaattatttaaatttggaaacgcacttcagcaaggccaaagttggccgtgcccgcctcctccagcccgtacttgtccagcgtggcgcgcacaacctgctccgcggtgtcggtggcgttcaccaacagagtcacatagggccgatgcgggaacagttcgactccgtaaattttcaaactcccacctgttcagcagggtaaacaaattaattcaattaaaaatgggtaattaaaattaaaaaaaaaattaatcagtgcccaactacaataattaattattgtaatttacaaatccgttaaagattttaatatatttttaaaatcctttctaacattaaaaatttttgaaaaagtataaaaaaaatttaaaaccatttttttgaatagttaaagcaaaacagcgaaaagaacttgaactcacaaataaaccaaaactcactatttgtatttcaaaaaattttattgttagaaaaaaaaatttacaagaaaattcaagaaaaaaaaacttagtaattcataataaaatttaaaaaatcgctaggaaattgtttaaattttttttcttgaaattttcttatatttaaatgtttttattttactttctctctctattactctctccccctcctctatctctattactctctctctccccctttcctctcactctctctattactctctcttccactgaccgctgttcatg

SEQ ID NO: 108022 - DNA, 101 bp, Heterodera glycines
ttcccccgtaggctttgcgtgttgcgccttggtcatcctccgcgtacgtcgtccgcgcctgctgggccctgtttctgctgtacgaatgctacaagaccatg

SEQ ID NO: 108023 - DNA, 666 bp, Heterodera glycines
tttttcgagtttttgcgacttttttcgagattttttttactttttgaggcaaaatttgaattttagcgaataaaatttctatcgataaaaaggcaatgaaacctggagaattttttcttaattgttggaagaatctcttttttatgcctattttaggacctatttataaaataagtgcctaaaaatacgatcaaaatgttattctataaattattaaaaattggatttttttaactttcgcctaatttttcaggacttttttgcatttttacgtgtttttttggattttttgtgactttttggctattttttcaggacttttttcaatttttcgtgacttttttgccttttttatgactttttggcgattttttatgacttttttagtagactttttgaagatttttagtgacttaaatttccagccctagtgatgaaggaaggcttatatatttgtatttctggcaatttcttttttctctttttttattctgatcaattagcgtggctgtcacaaggtcttttaatttggcaattgcgcacttcacttacaaccattcacgctttgtatgcgtgccaatgccttaacacacgtgtgccttttggcattttaaaatgccattttggggtggactttagtacttcttattatatcagcttttgatg

SEQ ID NO: 108024 - DNA, 199 bp, Heterodera glycines
ttaattaattaaaattgaaatcccatttttaaaaggggtaggaactgtttttgatggagaacggctggagaaaagtgagaaaagttgcgtttgaagctgcctttctgttagccaaacgtatgaaaaatttcaccagaggaaaattttttattcaaaaaataaaattgaaaataaaattgaaattttaaacaaattgatg

SEQ ID NO: 108025 - DNA, 339 bp, Heterodera glycines
ttttttaaaaatttttgggcattttaatttccaccaagatttttcaggtggattttccttcagcaagatgaccgctaatgatcaccaggagatgaaagtgccaaagagaaatttgctttttttcatggcaaaaaaaattggtccaccgcaacgttcatttaattgccatcggagagcaaatacattcgttccaaagatttgatccattcaaagattgggtccgtttcaaagattaggagtttacggtagtcgaaaggaaatggaaaattatttggacattttttggcaatgaaccgtcctcttccgtgacggcaccgctaattggttccatcaaaaatg

SEQ ID NO: 108026 - DNA, 1003 bp, Heterodera glycines
actatttcttttgtctttttctttctcttaactatttcttttgtctttttctttctcttaactatttcttttgtctttttctttctcttaactatttcttttgtctttttctttctcttaactatttctttttcttttgacaacttttttacttccaattaggtcatttacatgctttgtgtttgcacttttgacctgtttaactgacctccctcctccacattccttccttatcattagggatcggatttttagtggcaaaaaatcccaaaataattaactaaatagtgagaaaaaaatccaaaatagtggcaaaaatagtggcgaaaaagttccaaatttaggggtgtaattttttaaatagctatttttaattttaaaacaatttaaaattaaggaaaaagattttattcactgattgcagttacaaaatattttcttagaaaatattgaacaagaaaaaaaaatttgggggaagaatttttgtgaaatttttccaattcttaggggtatatttttgaaaatttttaggtcgattcttaggggtgtatttttgaaaattttttaggtcgattctattttttgggaaattttccaaaaaatgccaaaatagtggcaaaaataatgacgaaacgccaaactagtggcaaaaaattattttagtggctaacttccgaaatagttttttttagtggcgaagctccaaatagtgattcctagtgatgaatagtggcactaaaaacgaaaaatttcgaaaaagaatgtgtttttcgtgcatttctcgtcgagttaaagccgcagaaaaaatagttaaaaaactaagaatccgatccctactggtgatgccgatgcaaatttacataatttaatattttctattgtttctttggaattttataaatttttagtttccgtggacctttaggttaaatttaaattatcattataaaaaatactaaaataaatcaatttaaaaattaatttagaatataatattctaatg

SEQ ID NO: 108027 - DNA, 151 bp, Heterodera glycines
ttgttgttgatgaaattttgcaagactgatttgattgtgcgagaaaatcttggcttaaatagttttaaaaagtgggcgtggcctaattttccggggagtataaaagcccccggcaatttgtcagctatgtctcatttgttctgctacaatg

SEQ ID NO: 108028 - DNA, 66 bp, Heterodera glycines
gccaattcttttttttgctgtagggcagaagcactcgacaatatagaaaaaaaatattcaaaaatg

SEQ ID NO: 108029 - DNA, 628 bp, Heterodera glycines
agcattttaacaatcttaagggaacacgttgtcttggtgctgtcctacaaagtgtctggagtcagtgcgctttttgctgactttccccaaatctgttccaacataaagcttttgctgtgtttcctgcgtaaatatattgatgagcaattcccggacgaagagttggaataagaaattaagggaaaaaatttttttacttaaatattaccggaaaatattgctttgtgtcccgtcatttgttgattttgcatattaatatgtctattttatgctttctgtagcacaaaagtaaagattaattgggacttattttatgatgcgaattgctttaaattactgttaaaatctttttttgttaataaattaattaatcatcaaaagatcacattaaactaatagaacattttggaaaatataatgcttcacaactttatgagaactcaaaaatagattcttttttgattccatttttcatttattggtattatttgattgctcgaatcgacaacaattgctaccctaattttaggcatagaaatacgaattcgccagggcaccaccgaccaactgccttccggtcgctgcgtttgtcacctcgtacggtcgacttcatctttacgactacatg

SEQ ID NO: 108030 - DNA, 220 bp, Heterodera glycines
ttattttgggctcgaaaccaactttaatggattttcgagggtgctgattacgaatcttaactcgaatttacccaattccgaaccccggaccctaattcaaacaaaaagttgaaacttttttccaagaattaaatttttgcttgtagtaaaagcttctaattcatttagcaactattttttgatgtaaaacaatactttaattgttaattggataaaaatg

SEQ ID NO: 108031 - DNA, 119 bp, Heterodera glycines
tctgaaaaattaggtaaatgtttaaatttatttgggagtcgaacaaaaaaaaaactcactaaaaaaagggcaatagctttgccggcaagcgcaccacaaacgacgtccacgttgtgatg

SEQ ID NO: 108032 - DNA, 369 bp, Heterodera glycines
ggcaaaaaaccaagggcatagcttagccagacacttggcttcgggaggggaggctaatccccgcccgagattgttctttggccttatattttttagactcgattttttaaaaattttttttgtatggtaggatacagtagatctagatccgaaatgcgcctgcctggaaaattttggaattttgccgattttttaactgattttcaccaaaattgcgttttttatgttaagttttaaattataatgaaaactcgcaacaaaactttgtatttttcaaaaattatttattttcattaaaaattttcattttttagtttccggaggggggggggaagggaattcgcaaaaatttaattggattcattcatg

SEQ ID NO: 108033 - DNA, 83 bp, Heterodera glycines
tcacaaccgtaaacggtggggagtgcaatggcaatgtcaacggggccgaaacggtgccaacattgttgactgccactgaaatg

SEQ ID NO: 108034 - DNA, 271 bp, Heterodera glycines
atctaagttttagattctaaagccctttcttacattcacgaaccaattatcaaaacgtgacgaatcgatttcatcagttattcctgtctacaaatgctttcaaaattatctccgtgttaatggcgaagaaaatgagcccattctgcgtttaaaaaatgttataaaagatggattagaatcccgtatgcgagaacaccaatctaaaatgtaaattttggattttttttgttgtcatatttgctaattataatgcttaagctttttgcgcatg

SEQ ID NO: 108035 - DNA, 586 bp, Heterodera glycines
aaataatgcgcataaaatatgcaccaaaaatcgtgaaatcccttcataaaaagtgaaaaatatgcacataaaattttccaattcgagggtgtaatttctcaaaatttcttcaaatttgttaaacataaagtaaaatcttcaaaaatggctaaatgtggtattaaaaatcattttaggagaaaaaaacacgatacagcttaaaatttactcattttagcgaaaaatcaacctgaaaagcaaaattttgcttatttttgacataaattaaccattttttgagaaaatttatttattcaatatttttcgtgaaaattttgctaaaaaattatttttttggaaaattttccggtttttgaggtcaaaaaggccaatttgtctgttgggggccgatctattgaggttttttggaaaaacgccaaaatatgcacataaaatatgcacgaaatgccaaaatatgcacataaatcgcgaaatatgcacaaatatgcaaaatatgcatatggaaatccatcctagaagcttcaagccatgctaaaaacatgtttttcatgcgtttcaggcctcccacagtccaggaaaaaatatg

SEQ ID NO: 108036 - DNA, 202 bp, Heterodera glycines
tcttgattaacacgccgcgtcacgttgacacttcatggacacaaagcacacgaataatttatttcccaattatgaagcagacacggaatctaaggccacatagaagtacaataaataaaaaataaataaactaatttaagattcaacctttgcttcatagttataacatgcaaaataagcctttttctcagcacggtaaatg

SEQ ID NO: 108037 - DNA, 328 bp, Heterodera glycines
tctaaacggaataattaattagtgaattataccaattatatgtagtcaactagctattacacggagtaatttctggttaattagcttgcaaattggttaattaatgagctattacatattttaagaaaagtaattattattagttaattaggtgtaaaaaaatgatgcatctgcaattatttaattagaccaattatataatcaattaataattagatggattatatttgttttagcggttacacctacatctaattgggttaattaattaatcagctattacaaaaattaattaattataattacaaataaattagacgtaaaaatg

SEQ ID NO: 108038 - DNA, 176 bp, Heterodera glycines
aacctttgcaagtgcaccgacgcacttttcacaactttacgtcattttggcgcggtacttttttgtcaattttgttttacattcgtttttcaccaaatttcagtcgtggtgactgggtgtttccggtccttcactgcctgctgacgtgcaagtcgtagtccacgtacgaaaagatg

SEQ ID NO: 108039 - DNA, 110 bp, Heterodera glycines
  unsure (1)..(110): unsure at all n locations
taattatttatagataaagaattcnatagtcattacatttacatattatatgcattattattaacaaagacaactttacatctcgaatattattcccttcctgagaaatg

SEQ ID NO: 108040 - DNA, 1003 bp, Heterodera glycines
tggaattgagaaaagacaagaattggtggcccgttttacctaattctttgttattttcatatatattttgtctctcaaatactctttttattagattttgactaattttggttaaaagtgattttttaaataatatcacatgtctctattttagggaaattaattacagttcataaaaaaaattttttttttaaattttgagttggccctaaaaaatcaaaattgatcattgagaaaaattattttataactgtttttaattggttttttgttagtttagcctaaattatttatcatacaaaaattttttggttggattttgactacttttgctaaaatggattttttatatacttatcattaggttaaaaattttattttggtatcagatgaaagagcacacttcaatcaataagaaacttatttttgtttatttttatctcacaattttccgtgtcaaaaggctcatggtaaatattgcaaccatgggtatgatggtggtagcttttctaaccaccaactcccgtcaaatgaccacgaactaccttcttattctacgggttaaaaagagggtcatggtcatggttaaatgaccaccaacttcatggtcatttgcccaaagttcgtggtagctcttattctgcgggttttaccaccaacttcgtggtcatttaaccataaccacgttcttattctacgggcccagacggcgaacgaaaaggcagccaaaatgaggttttcggattgctttccttttcctgagtcacacattcatttcggtgtacagacatttcgccaactgacatctcgccaacatttatttcgccaacttaaccaaaatctgacatttcgccaactgacatttcgccaagtagtcaaaaaagtaatgaaaaaaagtaaaaagacgaaagaattgcatcaatcaaagcttaagtattcctttcatttttataagttcttttctaaccaaacaaaaaggtaattcagattttagtaagaaatg

SEQ ID NO: 108041 - DNA, 344 bp, Heterodera glycines
tgtgagtcgtgaggaaaataactttccttttgtcgtatttcagataactttcagccacttttgcttctcggacccgcagaggtgtgttaaaatctaaactaaacaaattaatgttccgcatggctacggccgcttaaattacgacacaacggctacggccacctaaaaatctcaaaattgtggaaggcgtggcgatttctgatgaatttaagttcagatctaaaacaaataaaattctgatggactccgtcgccgtgccttttcttttggacaacgtcccgtctttcaagtttttctccaggagatttgtcctttccaatcacttcgtccacactttcaacatg

SEQ ID NO: 108042 - DNA, 299 bp, Heterodera glycines
tctggagtgacaatcattgaaatggggtttaaaaatgctgattttgggccagaattagtggaaaattggattgggagaagatcaaaacaagtttgaagctcagttgccttaaattggtagctagagctgtttattggtacgcagggccatattttgattgagtcaattgttaattgtttggcaaaaaggtagggatttgagaaaatactgcgtgctagagcagttggatttgagaggagggcagaagaggtccagtgtttattttcatcaataaagttacatagctgggtgagggaatg

SEQ ID NO: 108043 - DNA, 406 bp, Heterodera glycines
aaccatgactattccttttattaggtcgtttcaaaaaatataaattctcgcacttttcttgacataattggtgtaattctatggcctaataggtcggtattttgatcacataatttgaaaattcatttcttcaaattttattaattttttggaactttactaaagtactattttaagccaaacttaatttaaattatatttatgtaggacattattaaaaagaacgacccaataaatgacaaactcatttccagtccaatcgcatttacctttactttatgttttgtttagcgagtctttgttggtgtggcgtggactgtttgtgttcagcaaacaaggcttctttaactgtacatgcacagctgtgagcggcggtcttgccgtgttcaaggcgagccgtgagatg

SEQ ID NO: 108044 - DNA, 64 bp, Heterodera glycines
ggtcaaaaaaataaacaaaaaaactctgtctaaattatttaacaaaaaaaagtatcgggaaatg

SEQ ID NO: 108045 - DNA, 90 bp, Heterodera glycines
tttttatctgcaagtttcgttcatttcatacaaaaactttgttcataattaggtaataattaacagttcagttaaaatttaactctaatg

SEQ ID NO: 108046 - DNA, 383 bp, Heterodera glycines
aaaacattaagaattaattttaaaacaaataattgacaattacacctttttgttgcgctattttttttagcgattttgggcaatcttcaagaaaattaaggatttttaaggtccggtttaattattattgttgagttttttttgtggatcgactcatttgtcagcacggatgaaaaggaaggaataaaggccaatgaaaggggaagtcatcgctgaaggcaatgggcggggataagcaattacaataggaataaatgcagaagaatgggagaaaaattgtagagaaaatagtaggcaaaggaaatgatgaaatgagagagaaaacgtatgagaaaaacaaaatagtagaatattatggatgaaaaaataagataaaggtgatg

SEQ ID NO: 108047 - DNA, 579 bp, Heterodera glycines
tgccaaaaaacctatagttttccaggtgcgccatcaaggtacgaatgggtggtgcaaattcaccccctagctattcccgggaggcaatgcaaattcaattaggttacataaaaaaatttacattttatatttcctcattaatatttccactttccaaattattctttttgcaaaaatatataaaaaatttttttgcaaaatttattcaacacatgttctttgtataatccataataataaattatgtaattatgtaaccatctcatcatcatcaccatttttgccagcttacaaaacaatcgaaataaatggaaataatttgtccattttatttttatttgataatttacattttatttctcataatcgctcgaattgtagttttaaatttggttagcttttgaattttttaataaatactcatgttttttcgaaatgcttaatgcttaagtgtaaattttacttctttatcaaaatcatgcctcgaattatacgcattacttttgtttgttttttgaataacatgtaatattttaattttttttttaattttggcattcatttttcattataaaaatg

SEQ ID NO: 108048 - DNA, 867 bp, Heterodera glycines
  unsure (1)..(867): unsure at all n locations
aaaaacattgaggagataaaatatcttttcatttattctttttttcacgataaataacatttattttctttttacatttttaggaaaaaaatttatttcgcgaatttttataatttttatttatcttaaaaattattttaaaaaatagatttctattagagcccggatagaacatgatcttgtcatgatttgcattcactcaactttttgcttcgctcctaatccaaggccttgtcttcatatttgttttttaatccctatattgtatagccttacatatttttgatttttcttaagataattaagattaaaaaaaggtaacataggccaaaagaatcattggaacttgacacgggaccgccttttgcgttgaagtacagcagacagatgcattttatgaagcaatattggaacagcctaagaacgcaaactaaatacacgcctaagaatcgatcccaacaattttcagaaaatatacccctatgaaataaaaaatgtcaataagtttgatagtttttgagtaacgacccggcaccataattatattcataaaatttcctatttttggtaggtttaatggaatatgataagaaaatttgcccatttttccttgaaaaatcgcaatntaatatttntaaggaattttcttaaatgccaataaaccgaaatttattttaatatataatttgtgttcttttctcctatttatttaggcttttgaagaattttttgtcaaaaaacataaacgattttttatttaactatttttgtacaacagtttttgtagatatttttacatatttcgtaatttttttttttttttgcttttttttcatacatatataattaatatttccagccctaatg

SEQ ID NO: 108049 - DNA, 332 bp, Heterodera glycines
atttgtaaaacgattatttcgtgggtccatttcccccgcggggagattgattttgcgattttaaattaaaaaataatatttaaaaatttttggggtttttttggtaaaataagggcaatgtattgaaaataaaattttgcacaaaaactcatattttgaaaatttaaattgataaaaaaaatttaaaacaaaaagccggaaaatgggtccccgatcattaagccaaatagcattacaaattcctcttaatttttttacatttattttttaggaaagtattattttagtaaattttccaaaataataattttgaagaaacgccgccggcaatg

SEQ ID NO: 108050 - DNA, 206 bp, Heterodera glycines
tccattcccatttgatcagttcgccggtcatgtgcactcctaaaaaatttatttgttttaattgaaattattaaataaataattataaaactgaattttatgaaatgaaaagcattaaattagtcaactctatgaatagggtttgaattacaaaaaatcctgttttacccaaattttaattgttggtcctaataatctttaaaatg

SEQ ID NO: 108051 - DNA, 507 bp, Heterodera glycines
tcacttcttatttccttttcattattatttgttgtgtgtgaaaataaagtgtttacaaagacacaacaaaatggcgcagtcagcctaggtttttaatatcatcaaaaagcaattggcagcaagtcgaatattctgtaattctaattttattcgaacactcatttcgcccttccttttcccgtaacacatccttactgatcgttaagtcgacaagtagaccgcttacgtaaacagttaaggagaaggctttcttgaaatcgcaagccgtaaaaagcctctgtgatcactcttggaagtaaagtcggaattgggaacacacaagtcaaagcgaccgctgtgtgcagctcaaattcgcaacttcccaattcaagggcttgtctttttcctattcacatatcaatcaccgtcatccttatcaccgaacttgcctgccaattaaccacaaatcaaatttaaatctctgacggccaaatcactctcatttaatttcaaattctctctgtcatg

SEQ ID NO: 108052 - DNA, 646 bp, Heterodera glycines
tttttgttctgattattttatttttctaaattaaagacaaacattttatttttattagaggaaaagaaatgcaaaattttcatcatcccttaactttaaaataggatagaaattcattaaatccttatagaacattcgatgcaaaatttttttgtctatcgatttggaaaatttaaagaaaatctgtaaggcgaaaaaaaagttctatagagcgaagtgaatgttgtttttttacatgattaaaaccggagagatagtacgccaaagtgagagaaattacaaagaaaaagaaaacgacgagatagtactaggcttttctctgcacagtggagttgacccatagtgatgctggacaatgaattaatcgattacattaattgtccactgaattttctaaaagacgcaaccttcaattatatttcaccggccattgatggcattgaacttttatgatttaatgaattatttctagcaaattcaaggggtagggcccagcggcgccgtaagcgcgacccgagaaattttttgagattttattcgattcgtggcagaacctttttctttaatcaaaaatggcaatttgtctcatttaaaattttcttgtttttcagtaaaaaattaatttttcttttacaatttttacatg

SEQ ID NO: 108053 - DNA, 221 bp, Heterodera glycines
gggtgcatttttcgtttttattgcatttttgttaataatcaattttcaaattgcatcaaattttcaaaattttccacgcggaccccccccccattttctctgtccacgtcccacccctgtgaggtgtagatattcttcaattttaccaatcctagctctgtttatgaacagtctgtatctttgttaggttcattttttagttctacaatattgtcttaatg

SEQ ID NO: 108054 - DNA, 922 bp, Heterodera glycines
actttttggaatcaaacacactttcctgtttaaattttagatagttttgcggttaagcattaacggcaaaagcaataaataaatgggtttaactgttaataaataatagagttgcatattgtttttgtatatttgagccaattaagaaaataaaaaacggataagtgggaattggtgtttattgtaacaaaaaagaattgatagaataagttagaagtttgtatatccgtacaaaaaatgattaaaggaaaacaacaataaatgcagttttttggggatttgaagaaaataattaagccttctgaatggaaaacgaaaaaatggaacaaataacagaaaatgaccaagaaatgaaaaaaagactgaaaaattcaaaaaggtaaattaggcatttcagaatgattgtgccgattaaaaaatttgaatgatggcatttttatttttaattctcatttcgggccaaatacaaaatgacaaaagtattgttgcgcgggttttgaaaaggaagggccgtttcagtccaaaaattattcgaatatttaaattaattgatttaattagtagggctggcaaaaatatgtacaaaaagtggtaaaatatgtacataaatatgtaaaaaaaatcctgaaatatgtaagaaaaataccaaaatatgtaaaaaaaaattttaatggtaatttttggaaaaaaaattcttagtaaagggtgaaataggcacaaaatgccataaaaatgacctaaataggcttagaatcacatttttgtatatttaaatattaatttttggtatctcctttgttgaaaaaaaccaatttttaggggtacatattcaaaaaattttatttttttcacaagaaatttttataaattttcaaaatttctcaaaaaaatttagaaaaaatgctaaaaagtccaaaatatg

SEQ ID NO: 108055 - DNA, 102 bp, Heterodera glycines
aaaaatccaggtccaggcctggatccagggctcgaggagcctggatttttcctggacccggattttcctggatttttgtctaggaaatccaggtccaacatg

SEQ ID NO: 108056 - DNA, 612 bp, Heterodera glycines
accaattgccttcgccggccaccctacagtatcctgcggcactcattgtgaaccgtgacccccatcacaaaggcggctcccattggtgtgccatttacgccagggacttggacgcgccagtgatttattttgatagccttgcccttcccataccaccaagtatttcatcatcctttttaaataaatttcccaaaggtttacacaaaaacattgaagcctaccagtccccattgacatcaacatgtgccccccattgtattgtgtttgtttaccacatgtcccacggaaaatcattcgataaatttatacatattctcaaaacttgttcaaaccctgacatgtattcattaataatgttaaataaaatgttgaacagttaaattatattttcaattttaattttttcaaaattgtgtcttccacctactaattatgcattattctacctaaaagttacattttccaacgcttaattattttcgtaatttattttccattcattaattatgcatgcaataaaataaaaaggggcggagcttatccatttgagttggaacaccggtataaaagccgctcgaatttcttcattcagacataaaaaaatctgaaatg

SEQ ID NO: 108057 - DNA, 583 bp, Heterodera glycines
atgtatatgttatgaaatacataattgccttagcatttactctagaacatatttcttataatggcctttttacgaaacgccctggcacttttacgaaacgcccaaaatggcctttttacgaaacgccctggcacttttacgaaactacaaaaatggcccttttacgaaacgccctggcacttttacgaaacgcccaaagtggcactttttacgaaacgacctagcaccactttttgctagtattcatgttgcaacttttttataagttgttcaatcgcagagaaataccttatcaaaagcttccaaaggtgtaggtagagctttcgaatgatgccaaccaaatatataaaatttggccaactgaaaaaaaagttatgatgttttaaacaagtctgggacggaactgaccccctaccgcctgctgctgctggtgatcaaatgtctggccctcaaatataaagcaaaaataaaaaataaataaaataaaataaaaaaatgattcgcgaaagcaaaaaaaaaaattagattgcttttcttcttacagcctctaaatcttatattttaagatgatgaacgaaaaatg

SEQ ID NO: 108058 - DNA, 493 bp, Heterodera glycines
ttcagaattttttttagttgataaaaactttctaacaatttttttaataggtattccggtttgaaatttaaaggaatttcccgagtctgagcattgaattatttttgaaatacccaaacacgcgtaagtcgatcattcagaattaacgccgtaagtggttgaccgaatttcaaaaaacacataaaactttctcatttttgaaattcgaattcgaaatttctatcaagaatcactccgagagaccaaggaatttacaccgagagttcgattcgaatcaaaaaactcgaataactcaatactgtagtaccatatattttgtaccgaataattaagatcttacaatttcgtgtgatcgacgacatcgacgctctcttcgtcctgtaccgctgataggtcccaccgccgttggagcagcaactgctactgcttgtgctgcccgtgcccgtgccgttgccgttatgagtgccgttgttttgttgttgtgccaacaatg

SEQ ID NO: 108059 - DNA, 473 bp, Heterodera glycines
gctgcatgaatttgttgtggtgaaagcagtttgtacgcggcgcgtacacattctttaggaatgcgacgtgaacacgttggcgtcttattggggtggggggtttacatttataggtaaatgtgggtttaggctaccgtttgcaaaacatcgcacaacggttgaggcgccggggcatcatcgagcgggacaatttggagtgccggaggcgcaaattgatgctgctgctgctggtgttgcagatacggttggaaagtgaactgtagcggaggaagtaccaaaggcattgtgaatggtgggaagacgggcagtggtggcatgcgcatttgcaaagtgctgatcgcctgttggacggcagctgaaagcatcggcgacggttgttggtgctgtgttgccgggacgcaatgtgtcaattgttggtattgctggtgctgctcctcctcgacatgttgctgctgctgctcctcctcgacatg

SEQ ID NO: 108060 - DNA, 195 bp, Heterodera glycines
ggtacaaaagggatcaaagtgatacaaaagtgattagaagaggtgcaacagtgattagaagaggtacaacagagattgaagaggtacaaatttgataagaggtacaaaagtgataaaagaggtacaaccgtgattaaagaggtacaactcgtgattaaaagaggtacaacagtgatcagaagaggtgcaacaatg

SEQ ID NO: 108061 - DNA, 109 bp, Heterodera glycines
ttctataattttgaggtctgtattttttgggcaattttgctcaatgtgccagcgcgcttgcgccgcatcgagcgccttcgtccgcgtcgtccgcctgtttccaacaatg

SEQ ID NO: 108062 - DNA, 143 bp, Heterodera glycines
taacaacttaaaaaagcaaaagacaattcaattctctgatcaattgtttatagtaattgtccacattttcaactaaaattccgtcgttgccatggcaatccgaagcgaattattatttttaagttgtttatttttaattgatg

SEQ ID NO: 108063 - DNA, 330 bp, Heterodera glycines
atttacctaaaaatgttattcaaaacttggattttttaaagaaattggtaaaaacaaagtcttttaaaaagagacaacaaatatttaaagaagcgactagtgagcaaattggattattaattgaaattagttataatatattaaaggggtactttccgctcacgaagagacaaaaatatagacttttaccatacgcaaattttgtaagaaaattagcaaaagttagaactgagacgggtgcaaagaaagtttttcaacaaaacggtggtggttttttcgttaatttgactcctttattattaccagtacttattgccgcgctaaaatatg

SEQ ID NO: 108064 - DNA, 565 bp, Heterodera glycines
acattaatttttataaaataaaaaaaggctctctattatattaagatggtcgctgatcaagaccgtgaaacgccaaccatttttattttaaactcttcaaatcactttgaagtgatacttgaaccaactcgaatttgaatgctaattataaaatcttatatcgatcacacaatcatgtatttgtaagagtaaactatgcttatgaatattatttctctcttaaaaatgtaatttgattgggaaatattaaataataacgaaattataattatggccagcaatataattaatagattaaaatagttatattattaattaattaaaatattattcggtactgaaatgacccgcctcttctgatcaccactcatttgcctttttgtcacttcgcccacatttgcctttttgtcacttcgcccacatttgcctttttgtcacttcgcccacatttgcctttttgtcacttcgactcaccacgaaaatgacctaattcatcagtgatcaaatgcattttatgaagaaaaacctctcaatttccggtaaataaaaaaattgcataaaaatg

SEQ ID NO: 108065 - DNA, 1003 bp, Heterodera glycines
ttggagattaattgagtgctaatgatatttaaatttaatcaacccaactgaaacaaaagcaaataaacgaaggacaatgaataaattattaatttttatttaaatttaaaaataataattgtgaatttaaatatagagtttttggacaacaaaatgattaaaattacttttgacgaataaaagaaattacaaactgatgaaatgggaaagggcgaaaaatgcgaacggaatgaatgattgattcgttttcgttctgttccgactaaatcaaacgcttcccgtcaatcttgttttaaaaaaattagaagaattgatagttattcggccatttgttttcattaaaaattgctcgacaatttgacgaaatgtgattttcggggtcgctgatcacgaatataataaccatttcgaccttctaatcccggacccgaattcaatttattatagaactcggtaatactatagatggtggaccccattttttgcaaaaaatttttgttctaaaaagtcgtgaaatgtatatttgggtttcctgggtcggggaactcgaatccagcattctttgaccaatttcgaatcccatttgaacaaaaagtagaaaattcaaaattcattgttatgttcgtatctatacatattgaccattttatgatgttgcaatgctttttgattaaatttagcttattttgatcaattagaaaccagagtgagaactttgaattgaaaattttgttcgactttttgttcgaattcgggtcagggattcgaaattggtcaaaatgaatgttgtattcgggttctccgaccctgaaaacccacataaacatgtttgcgactttttagaacaaaaagaaattttttcaaaaaagagggcccaccatctaaagtattgcccccggctcccctgacgtgtcatttgcgatttcacataacgagcataaatgaacgaataatttcggtttactcagcagtttcaaaaaatttccagatgagctgataaatg

SEQ ID NO: 108066 - DNA, 165 bp, Heterodera glycines
aaccaaaggggagcaattggaagcgcaaaatcatttttggcgaagatcgtcaaccaaagtttcagtttttagttcttttactattacgttttcgttttagagttcactgaaaatttggggtcgactcgcattgaacgtgggagagagttggcgaacacggaaatg

SEQ ID NO: 108067 - DNA, 218 bp, Heterodera glycines
cagacttttggaaaatatatttgcaatttatcctcctttttgagaagtgagttagaaatgataaacttcacgattcaaaccagttttcggtgctctaattaaccgcgataaaaacattcgaatcaattaaatagcttctgagataataaggtttatcataaaatttcaattaaaaataaaccctcaattattggtatgaacgatactttccaaacatg

SEQ ID NO: 108068 - DNA, 527 bp, Heterodera glycines
catcagcacgctttaacatccccttttatagatttaacacaaaatacaaactgggcaaaaaattcattccctttgctgggagggtaacaaaattgtggaatcaactcgataaagaactaataaaaacaaattctttaaatcaatttaaaataaaacttaaaagttcactagggtaatctgtaagaccgggaaagttagaatgtaacaaatttctaagtgatttggtatttcgacctcattgactttgacctcaatttatttattatttattttcacatattttgtctttttttaattcctgtgatcatccatatattttgtcacttactctacgacatttatctgatagtcgtcagagtaagtggttctcgcccttctgatgacttttttattttttatgaataaacaaaataaatttaaaaaaagcaattagaataaaacatttttactcgcaatttgatcacaaaaagtttgatctttttaaagagattgacagtatctattagcctacaaaattacgaaaaatg

SEQ ID NO: 108069 - DNA, 384 bp, Heterodera glycines
acctatgattcccttcccccagactcattccaaaatcttttaatgtctgataatggtccccacccttcatttaacacacttacattctctgaccaagtccaacaacccgttactgcctcaccatctcaaatcaaagaacagctcgtgtgctctggctcagctgataagcaaccaaatctcacggatgctttaaaatccgaaccaaagcctgtttcccccactcctattgtcacaaattgggaaccacacccgcgcagctcaaatttttcaatagctccctttctaactcgttttaattttatcttgtgtatcattactctttctctaagtgcttctttggtatcatcctctcacagtcaatcatccttaaaagtcctccctatg

SEQ ID NO: 108070 - DNA, 275 bp, Heterodera glycines
ttttcgaattattagatatctccgacagcacacactgattttcatcccccgaattaccgaaattttttcccataaggagggctacgaatatatattttttaatatataggtaatatgtataataattacaataatattttaaatattttattatattttagaatcaatatttgtattgcaaaaaagtgaatctttttgagagtgcaaccgcatgattatgacaatttttcgattttataaggaataatgcgtcattacactgaaaattgagcatg

SEQ ID NO: 108071 - DNA, 289 bp, Heterodera glycines
agtgcattagcaaatcaccaactgagttaagtggggatgcttttggaaaaataatttttagagaatttttacaagccttaaatggggagcgagcggataagcaaaaaacaaacttaaaaagtcgaattagccatcaaaagccattactcatagcaggtgtcattaacaagaaaaaaatgaataaattagtctctcagggcatggggaaaataaaaataaaaaaaattaagggaagtaaaacaattcaaaaaagaaaaataatccaaaatcaaatttcaggtttataatg

SEQ ID NO: 108072 - DNA, 153 bp, Heterodera glycines
tatgctaaaagtgcgttttaattttatttattcgtaaaatttggaaattttggcgaaattaaccataaaatgtaaattaaaaccctaattaattacaatttggtggccttcttctgccaaatatttggccaagtttaaaccgaatccaaaatg

SEQ ID NO: 108073 - DNA, 526 bp, Heterodera glycines
aatcatttaattcgcttaattttcacgtcaatccacattagattttcatactgtagtgatctttttagtttttttttctttgttattgatatgcaatatttctcgcattgcattaattagaataaaatcattagttttaagacattcccagtgaaaacggctcttttaacactaaatttcatagatgacaataaataaataaattactttaactcattaaagtaaatacaaataattcgcttcccgaaccccgaaaaatcttcatgggagtgtctacacatccatgatgtgcatacttatcatataaaatgcatatattaattgcatttttttttaccaatatccacgccattgaccccaacgaaataaatgaataattaacattaattaaaattaaatgtttattgaaaattcaaaaaacccggtgctgcctatcggcatcgccgcaccacaaacttaccttttattaaaaagttgcttaaaaaagcaaaaattgatctttttggtgaaaatctgttacctaatg

SEQ ID NO: 108074 - DNA, 931 bp, Heterodera glycines
caaaatggaggaaaagactcaaatggggggaattatcattttcagtttacgcaccatttttgttggagtttagaccaagaaataattgtaattttagaataatttaaggggtgtttctgaaaggataaattttggaaataaattttattttttatttatttttggcttggggcagaatgatgtgtaattggcagaataaacgagcagagagcagcaaacagcggtggttaaaagggaaaatatgaaaacaaacaaacggacaaacaaacaaaacgagagaatgaaattttgcgggacgacgggggaaagtaaaggaattattgcatttatacatagtggttgagaaatactttcagctcggcgtatataaccacacaaatatctaatgaaagaagttttatctttgtttttctgtttgcaatatatgtacctaattaacaatgagtcaccgctttttgtttttgttgccacataaaaaacgatcaaaaatttatttgagaataataaaaaaggacaaaacgcaaaatgggacatattttgagcgctaatcaaaaacacaaaattagataccaaatttattcagtttagttgggaatgaagcgagttatgtctgatcaaaataaaaaatacaaaaaaggtatttaccagtgtaaattttgaattagcgcgcaaaaattacgccaattacgcttttggcgttatgtgcaattttgtctaacattgggcttgacccatagtgagatagttgtctttggtaaaaacctatgtaaataaatgaaattttttggcagtaatagtctttttgagagatttcaaaagagaggcacgcccataaaaaatatacctgatcaaatatgtgttaatataacacaaattgttcttccgtttccgaaataattctgtttagctgttaataaaagcatagaaaatg

SEQ ID NO: 108075 - DNA, 67 bp, Heterodera glycines
tttttaattacatttagatttaaaactctatatataacttttaattctgttaatttaaaaaaaaatg

SEQ ID NO: 108076 - DNA, 266 bp, Heterodera glycines
tatgagttttgcctttgtattttaatcagtttccccatcatttatacattgttctaatacgtaaacatatttaattcatagctttaggatagtttcaaaatcaacatagtatatgcaattaattcacatttgtttggactgccggcgaagaaatcgcacccagtatgtcctggacggtgaactcctccaattgtgttgattcgccgcccgactggagcggtcgtcgcagtagcagccgtgtgggggaacatcaactgctgaaaatg

SEQ ID NO: 108077 - DNA, 181 bp, Heterodera glycines
tgcgcgccgcaaatgtaacgccgcaaatgtcggcgccgcacggccaatcgggcagctctaccatttagctaccgaggcaccccaccctttctttttatatgtcttcttataaaccccccactttccgtattttaaccacccagccagcttcattcttacattaataatcatttagaatatg

SEQ ID NO: 108078 - DNA, 55 bp, Heterodera glycines
gctgacgaagatcgaagcagagaatagtcaaatgaaaacgaaaattgagaaaatg

SEQ ID NO: 108079 - DNA, 558 bp, Heterodera glycines
gttttttaatgcttacaattaatgcaccaattgtttcatcaaaatttttttttcaaaattgctcaaatatcaacaaaaaaaaaactgagttagatggtaccataatcattcgaattcggtcttttgaaactgaaaataaaaaatttaataggcaatttttgtaacaaatagcactcaaatttccaaaaaattttcccggcggcgcctatcggcaccgccggacctccattttccactatttttacaagttttttgccttaaaacggccaaaattgggtcattttttacccagcagtggaaaaaaagttattggttaaatagcaaaaaaaaagtcttcaggtcgggtcccccccccccccccgaaaaatgtttctagatacgcccctgcgtcaaatgatgaaaaatttggcctataatcaccaaaagttgccattgtatttttttaaattctactttcaaaccaacttttaggatacattctctacactcattaccatgttcaagtcgttggtccagcaattgtcttcttcttcgccgcccccctcatccgacacaatg

SEQ ID NO: 108080 - DNA, 318 bp, Heterodera glycines
tcggtttgaaacgttacggcgaaagcataaccctcggacgccaagcaaaccgagaagacttgcggcaacgttcaagccataaaaagcctctgaacgcactgttgtaaggaaagacacatttgggaaagtacaagtcactgcgaccgctgtgctcacctcattacaacttccacatcaacaaaggtcgtttattgattttattgactgtgcgtggcgaactctcccaatatttgctggcgataaacattcactctcatttactcattttcattcacacaaacattggtccgactgaaaagcacttaactgatcaaaatg

SEQ ID NO: 108081 - DNA, 1003 bp, Heterodera glycines
ctttttgccttgtcagtcataagcctcatcatctatcaatttcgctcaatactttggttaaagcttacgttaacagaaaggcgtagtaagacgaatggacagcacgcaaattaccaaaattttaatgtcgtccgagaaaacgggtccgaggttccttggatgcttcccatgcgatcaattacctgacccaatgttcataaaattcccgtcatcgttgattgttaacttagacccccaccaattttccggctcgcattggattgcaatgtttgtttatggattaaataagaaagcaatttattttgatagtctagcgctaccgataaatgcattaattgttagctcttttctcaattcctttcccggagtaatgtttaaccaaaaagccgttcagtcattttcatccaattcatgtgcacatttttgtatttgttttgtttattttatatcttctgggtttactttcgaacagtttcttcaaaaatttgataatttacataatcccgaattatatgttaaatattttattcgcaatttcccaataaaattgtaaagaaattgcatttattttcattgtgtacttaggtctctcaaaaacgaaagcaatgaaaggtaaagtaaacacaatgtaccgtctagtgtcaggcaccaatgaatgaccactgaaccttgcccttcttcaacgacccgtcggacgctgattggctgagagcatattccgcgcctttatttatatgacatttcctccgcagaagagaggggagagtcgtgattggttgaaaggttaatcccctcctcagtgagcagtcaaccaaatgagtaaatatgaccgacaaaaatcattccttcttcggcaaacggaaggaattttcttgagagaaaaacattaaaaaaaactgcttagaaaattgataaaaatttaaaataaagtgtaaaaattgattaccatagtcttaaatacagaaaaaaaagaaattttgttcatttaaatttaaagaaaatg

SEQ ID NO: 108082 - DNA, 371 bp, Heterodera glycines
ggtaaggaaagaattccgaaaaggtgccaatttccccattgaaaaaggtgctattggcatggatgcccaagctgcttccccgacgatgcggcaattgtgggcggaggagaaacagccggtgccctcagggcccgtgatgccaagcgaacccgggacattgcgcgggagttcgaggtggaaatcatctgggagtgccacctgaacgcaatgctggaggacaacccagccatgaaggcgtacttcgacaactgcccggactccggaccaatttggccgagtcctgcgccatgtcgaaagcgctggaggggagttcaaattcggcaactacagcttggacgggatgatggagcgccctgatgaggacaaaaatg

SEQ ID NO: 108083 - DNA, 564 bp, Heterodera glycines
ttcctccgtgccatttccttcaataccgtaattcaactatttgcataatttaaggttttttttgtattctatacttacttaatgacgtaaactttgatacaccaaaaaaaggtgcgagtaaatttttcaacattaattgtcaaataatcaaccaaaaaattttaattgctctgtcattgtccaaaatatttgtaaaaaaagacaaaaattttgcataaacgaggcaaggctcaaaagaaaaatgcttaatgaggtagaaaatattcagacatatttttttgtgatttaatttgagtacttaccttttgtgtgtttttcttaccgaaaagtattttcatataccaatgaataatttccaaattaagtcaaaagcacagatatatttatatacaatggcaaatggaaaagcaacaaaaataaattacaaaaactgattttctaatataaattattcttcttttttctgccttcaaacgaattcatttaaatctttttaaatttaataaattattataatttttatcaaaaacaataaaaattttatttatttattttttgataatg

SEQ ID NO: 108084 - DNA, 663 bp, Heterodera glycines
aaatttagaaaatcacgcctaaattttattaaattaaattttcattttgttattatagatataaaaacatcaaatttacaaataacaatttaaatgtccaatttctggggcttaaataattcagttcaaaaaagtctgaactcggtactttcagcaaaaacatcgctttggtatgtcctgttataatgtgcaaaaattggttctattggactttaggcgtccaatcagtgactatcccttttcttaagccataactttttttttacttgatcaaagccaacattcttaatatgattttttcgtaataatatttgctcaatttgtatttaataatttccgatactttaagctttagtttgataccaagaatgtaagccgaaaatatgtttaacgagaatccaactttaaatatgttagagtcaatttttacatttatataaaaaaccgtactaaaataacccgggaaattggatatcatttgcagctaatttttatgtaaatacttttgtaacattctgtagaaaaaaattgaccaattcagaatcggttaccttttataccagagacatattggaaaatcaatttccgacattttcggagcttggaattcaggttctcgattagcgcaattttttgagccgtaaaaatttgccgatactaatg

SEQ ID NO: 108085 - DNA, 356 bp, Heterodera glycines
taattggaaaaacaaatcctaagaaatgaaaaatttatctccaaaatttatttatttatttcttgacaagaatttattttaaaatttttttagctcaatactgatttgacctaatttttttacttttttgaataaattttgtcttttacacccctaaattcggaactttttggcacctattttgggggttttttagaacctaaaacttacctattttggcagtttttagcacctataaatatcatccctagtgacaacgtttttctttgtcagttaaacagcaaatctggcatcataaagaaagcgattataaattttagataattgtttggccacgatttatgtttccaattatg

SEQ ID NO: 108086 - DNA, 1003 bp, Heterodera glycines
ttatctgtttttgtaattcaaaataaaaattctatttaaaatcgaacgagtttgaaggctaaaattaatacaagtaaaaattcttcatttattttatttaaatatttatagaaaattaaataaaaattaatataataaaaatgatttctgccaaaattaatacagaaaaaaaaattcttttttatattgaccttaaaatgaagaaattgaagattgtaattcattcagcaaattatttataagaaaaaacataaatacaatataaaacaaataaaataataatataatttataaaattattttttatataaaacccagacaatcctaagaaaaatactttcgcttattcaccaaaatcgcattatcagagcacatttcatcaaccaaattggatgtcaaaaaagggaaacaatggtagggataaagcggaagacgggttttgctaaatccgtgtcgcccccgcaggctaattgggatgtctttttggctggttttgtgctcattgtttattgtttggcccgtgtgacccgctgatgaagaaacagtaaagtggccgtatttaatgggagtttcactaaagcattttgcaaccccaaaaatttggcttaattgttttagctagtttatcatcttttgtgtaatttaattccattcttcaaatgttttccaatttttgtattttaaattaaataaataaatttttgtattttaattcaaatttctcccatatttttttttattttaataaaactttttccaatatttcagtccaatttactaaaaacaaaatgtttgccattcggccatttccgttgcacaacaattgcatgttgctgaactgcttgatcttcatgctgatgacagtgatggtgctgctgcccatctctgacgctttcctgttcggtggtggcggtggctgctgctgcccgccgccatgtccgcctccgccggtgcgttgcgcaccgctttgcccaccgccatcatgctgtgagcaaccgcaatg

SEQ ID NO: 108087 - DNA, 707 bp, Heterodera glycines
  unsure (1)..(707): unsure at all n locations
cttcaaaagcanttatttggatactataaaaaaatataagaaatttttttttgtacatttttatttattaaaaataaagttttttctttaaaaaattttgagctttttttacgtaggtttaggcccattttcattttttttaaacctgggtttgaatccataaaataagagttttcaacaaaagccttataatttttttaaaagaggccgacatgtggaagaattgaacctgagaaagaagtaacagaatcaaaaagtcgggtccgggtaccgagtccgggtcttgaaaaagccgggtatccgggtctggacccggttgggtatccggacccgcgtaaccttattttatgcgaatatttttgggtttatgttcattacactttgccaaactgttattaaaattcgaaataatcataaattcaaaaatattggggggtcgttgtggtaccctaggtcaaaaacgggaaccaaaatataaaaaatttatcttccaaaatttgacatatttgatagctgtattagatataatataatttaattatattaatatatgtaattgatgcatcatattatgatataaatgactaaatgtggttaataattgatcgaataatctagccatatgaaaaaatgaataattacaaaattcatttataaaatattattgttataaatcttttcattttatttttacaaaaaaaataatg

SEQ ID NO: 108088 - DNA, 360 bp, Heterodera glycines
atcagacttttaagagagggaggtgttgtgtgggcaatcatggacctattatttatatttgtatgcattcctttttcctcttccaaacattgtactctgtacccaatcaataatgccctccacagaccaagtgcataaatacccttcgcttctcctctccctcgtctcttctcccattcattattcaaactcattcctcttccgacttctctcatcacttcttattcccttttcatttattatttgttgtgtgtgaaaataaagtttttacaaagacacaacaaaacacatcccctcccgacagtaaattctttaaactaaatttaacgattttaaatatgtacaattaattattagatg

SEQ ID NO: 108089 - DNA, 499 bp, Heterodera glycines
ttccgaggccccaaaaattttcagaaatcggaattccgtgccatccctgctacatacatacatagtttcctttttttcggtgctgttggtcgtaactcaaaaacatgggcgtggtgtactcaaaaaatcacaaatcagaatattttttgatataactttgctcgaaagcaaccaaatttttagttcttttgcatggatagccccaagtgtcttcgacggcattccgtcctgcaaaaattttgaatttcaatcccgctgcgggattgcacatgtgaaatttccgtactctaatattaaccagttaattactccttttatttatgtgttttcccaaaaggaattatcccccccccctccctccacctctacacatcatttaatttctacaaatatttgtcttttctatgataacacaacaatccccttttacattctaccaattaaattagattattaatatttattgtttaattgttattttaatatttatcaaaacatg

SEQ ID NO: 108090 - DNA, 190 bp, Heterodera glycines
tatgttgtactcatagatctgaaaggtaccaagaaatggtggattttagttgccctagtttttttatgggtactgtatgttaatttttaaggtcggatacatcttttaacgcctaattctgtatacccgcggtgtgtttgcgttgttcataaactttgtaaaattatatgtactcaattttccagtcatg

SEQ ID NO: 108091 - DNA, 708 bp, Heterodera glycines
ttcataatcctataatacaatcgtactacctagcgggggatgcgccgaaggcgctgaccccgctagttgtgcaaaaaggcctttatcagtgtaatttttgaattagcgcgctaaaataacgccaatttagctatttggcgtttcgagcattgttcaaacattgggcttgacctatagtgctgatttatcatcatttgctaatttcaagggatttgctaatttcaagagatcaacgtgatgattttttttggatactaattttttgagaaatttgctgatttttgaaaaaaaaatcctcaataatgctcatttttatgtattttaccaaaaatttaacaaaattcgttgaaaatttcaaataaaaatttcctggcggagcctgtcgctactgcttggctacaatattttattttttcataaaaaattgacacaaaatcgcaaaaacttttcatttttaaagtctgttaatgctaattttttgtcggcaaaatgctgattttgaaaattttaggttgggagccctggtttaaaagattttttggtggccccaagcgtaaaagtgccgaatttaccaacatttaaaattaattacctgtgcaaaaaactgaacatttggtactcattttctttttagaagcaattcaattttctttttttaaatacctcaaaatttcgtctgcaataatccgaaggcttttttcgtcgatg

SEQ ID NO: 108092 - DNA, 309 bp, Heterodera glycines
gtttgtcctacttactgctattttgtgaccccgaaccccacacaatttgttcgaaagtcggaaattttgggagcagaacccaaaagtgagcaaaaatgtcgggatatttgcggacaaaaatcgcaatagagctaaaggctcttgaaaaggcgaaaactgcaaccgaattgtatgctgagccggacaaaactctgacctcattggaaaatgaaattctcctggaaagcgcggcagagagaataaagtcagatgtggaggcagtgaatgccaaaatcgagcaaatttggataaccgcaagcaaatggcatg

SEQ ID NO: 108093 - DNA, 636 bp, Heterodera glycines
cctaattaatgaaaaaaagggattattaatttatataaataatgatggtttttttctcctccatcattttgccgttatttaatttcccatgcctaaccttaactcatattgaaataaaatattttttttctcatttttaacttttttatgttttaaattacatccaaaaatgtttttcgtgtcattcaataaatttcataaacataaaaatttaactcgatatcattcgattgcttttaaaggtttgaaaagtcatcgctgtccaattaatttcttttctcaaatattatttttaaataaataataattagagaccgggtttttagtttttaaactattttttttttgcggcttagttgtggcgagagaaacccaaaaatagcattttctccgaatagttttcgatttagagcgactttttagcaattattttcaactattttggcctttttcgaatttttagcaactatttttctgagttttaaaaaataaactttctgagtcgattatttttatggggggtagaaaaacccacaattacctgcttttaattagttgatcgttaaaaaaaaaaagttttattaaacgaaatgtattaccataattgtttttattagagtaaatttggtttaaatg

SEQ ID NO: 108094 - DNA, 485 bp, Heterodera glycines
agttatgcgctgataatttaatagcagatagctgattaaagtggctctactcgaaatttcctaatatccgagattaagagacgaaaaatgatctcttttttcttggcacgatgtcgtgacgtgattctcgagcaccctagatgtccaattgaaacccactgatcattctttcccccggcgggtcatttaaattttgcatctgatcagttttctgcccaggctctctcattgggtcttttgatcagtcatcactttctttggtcactcccctccacgaccgataattagctagtttctcactagcaaaatattttaatcaattatgttttgatcttttaaaacttgtcgcttggcctttataccaattcctaaaatctgatcaaaggacgtgccacgcttgaaagtgttgccgccggtgttggcattcccaaatttggtgcgtgccgagttcacctatgcgcaccattgttgcttcttcaaatatg

SEQ ID NO: 108095 - DNA, 375 bp, Heterodera glycines
tttattgggttgaattgcatataagatacatttccaaattcttagctgaaaaactcattcgattgtcggcaaatttaaatttattcaatatttttcgtgaaaattttgctaaaaaattatttttttgcatttttccaaaaaacctctattagaacggccccagcagctaaattggcctttttgaacccaaaaaaccggaaaattttccaaaaaaatcattttttcgccaaatttctcgagaatattgaataaatttaaattttcataaaaaaataataaatttatgtcaaaaataagcaaaaaagcgaaaatttcgcttttgtgggtgattttgatctaaaaattaataaatttcattttttttcttctaaaatg

SEQ ID NO: 108096 - DNA, 157 bp, Heterodera glycines
taggcaaagggccaagtgccaacggtggctaacaacgacacctcagatgccgtcgcccttttggtgccatcagccgatgctccacccccacgcgccgcctccccccttttactattccgccgccactttgccccatccgccgccgcctccgccgatg

SEQ ID NO: 108097 - DNA, 493 bp, Heterodera glycines
atggacaaaccgattctttttgatggaggaggtgttaggacgggtcatatttaaattgtatttggcattctgtcccctttgccacgtcatcattttgaccccattccaattgtccttaaatatcctcccatttctctcccctcgttgttcatcaccactcattcattttttttgtcatttcccttcacttgaccccaatcaatattatttgtgtgccttgtcctatttaatttggaataaatatttattatttattctctcggactcatcggcataacattggcgacgcccgtcgacgactttacaattgttttgtcttcaaattgtgcggcttttccgctgtttttgttgtgtgattgttcaacaacattcgccactcaatcattttgttgtttgatttttttttttcaacaacaaattttcgtcgactcaatttgaattttgtttgtgaacaaaatttcttcaacttcaattttgttttctcaaacaaatg

SEQ ID NO: 108098 - DNA, 146 bp, Heterodera glycines
ttaaagggcaggtcagcagtaatatagctagtcgaaacatagcaaccggagttaaccattttttaattaattcgagcatccaagtaaatatgtaatagtttcgtttattccgaattccgttatttttcgcgtcccggatcccgatg

SEQ ID NO: 108099 - DNA, 102 bp, Heterodera glycines
  unsure (1)..(102): unsure at all n locations
cgtatgatgaccgacgaannacaccatttcaatgttggttccctccaggagactgggtctgttgcgataaccattcggaatgtcgagtcaataatccgaatg

SEQ ID NO: 108100 - DNA, 67 bp, Heterodera glycines
tttttttttaaattaacagaattaaaagttatatatagagttttaaatctaaatgtaattaaaaatg

SEQ ID NO: 108101 - DNA, 148 bp, Heterodera glycines
agatgaacatcgactcgtccaccagcgaggagggcgtccgtcactgatggagtcgggccggtaccactacgcctcgttctcgttggccgccgtgctgttccagcgccagtgcagcggactgttcagccacgacccggtgcccgaaatg

SEQ ID NO: 108102 - DNA, 53 bp, Heterodera glycines
cgctcgcccgccacttccatccgcgacatttggaagcggtgcttcttttcatg

SEQ ID NO: 108103 - DNA, 318 bp, Heterodera glycines
gaaatagggagaaatggaaaaaatgaaatggatttacatatgtaatgtaataatttggtcatgattcgctacatatttttggtggcatttatttgctttagaatggcattataaaaatattttattcactgcaataaatacaataaggaagtatttagtatttattatcgatattaaccaaatgcaattcaatttattcaaattaattgaaaaatatttaattttcattttatgaaataaatattttttaaaaaatttttaataaaaaatctgaatttcttttttttatagcaaaatcaaagatttattgttaaaatg

SEQ ID NO: 108104 - DNA, 66 bp, Heterodera glycines
accatcgacgacacatacttcgatgaccgcactttggagtcgatttggcacaacatttggcccatg

SEQ ID NO: 108105 - DNA, 673 bp, Heterodera glycines
  unsure (1)..(673): unsure at all n locations
attannggctgggccaaaatcaccaagaacgaacaaattggttgcattatgctaattggccaaataagccataaatttaaaagatgcttgcttatgtaacacaattcgccggttttcagccagggttagaaagtgccatatttatgtatatgtatgacttttcccagtggcaccacttgactcaaagcttcttaaaaattttcaaacaaaaaatttgtacatatttggaccaaccagtaaaatgagtttaaatcttcaaaaatttcagtcgtcgcctttttatctcaagagttagcctattatttttcatgaattaaaattcgaactcacagattgaatacatcattttaatttaccaattagaaaatgaaaatgagaaaattataaaatagttaatttttggcaaaatttttatctacaaaaaattcgctgaaagccaattcatgtgttggttggcaatgatttataacggagccaaaaagggaaaattcgaaaaaagcgatgagtgatgtttgataaatgatattattattgtataatagtaatattaataaagaaagtttcaatgaattataatgagtgattagcttttatcattgaatgttcccttcgcccaaattaactcattccaattgtcaaattgatacgcttttgtgttaatttgcctgaaatg

SEQ ID NO: 108106 - DNA, 604 bp, Heterodera glycines
atcgccatgtatatatgatttgcttgtcatgctcggatatttgctgctctgattgtacatattgtattactgtgcctaacaacattaatactcgataaataaactgcttgtccacgtgtctacaaaattcccgtttggttttaaaaacacatactcgtaagattctgtcgaaaaataaccaacttttgcatcaaactaaaatttttagataatatcaactgacattatgccataagtttcaaaattaagaatatttaaaaaaaatctgaacaccaaaatcagtctcaggtttcgaccctccaaatcagaacgtttctgagaaatcagaacaatccaatccctggtttatttagagacaaagcgagttttatgactttttgaattaaataaatctgacttggcgtttgacacttgtctgagtatgttttattttaatttaatttgtttgtcaaaaaacatccattaatcatggtctaaattctgaatggtggccaagtttgtagggggtcaatggtttcggagttggaatttccataaaaaacaaataactcattttttcccagatcaggaaaacgacattcattttccttccacctgaaaaatg

SEQ ID NO: 108107 - DNA, 428 bp, Heterodera glycines
atgacgcagtaatggcacttatttgttcggcatcattgtctctctcttttgttgaagaccaagccttgaaaaatttattgtcaattttagctccaatgtacaaaataaggtctaaaacaaaaatggtctttaaatctttaaaattttagaagtcgtcggcattttacaagtgatgtcctgaggaatttgtatgtgaatgtgaagctcgcgtaaaagaggacattcggaaaacagacttcatttctcttacaatcgatggctggagttctcacgaaggaaaacattcgttattaagtgtcacagttcattacattggcagtaatatggaaccgacttttcgcgtgatggaagccaattaaggttcggttaaggggtttttacttaaaaattttgcagacatttagggcagtcatactggcgaaaaaatg

SEQ ID NO: 108108 - DNA, 375 bp, Heterodera glycines
tttattagcccctcttactgttgaattgagtttaatttttttttggaaaatgtgccaaataaattattaaaaaattatattttcccccctggcagattaatggagactggcatataaaaagagtatatacggtatataaaaatgctaaacactgccggaccaccctgttctgaaaaagcgtgccacaaaaatgatatgaaaagcaaatttaaatatctatttttttcgcaattctcaaaatctgcgtgtgatcctacaaatttaaatgcatttacaatttaaagtgcttttcatttatttaatatactttattaaaaatttattacattttaattatagctctttcaattttgtttttatttgacttcaaaaatg

SEQ ID NO: 108109 - DNA, 1003 bp, Heterodera glycines
attggtgtcttctttaataatgcctttttaacatttgtaagtatctattccatccgttgttgacattcttggttatcagcactaaaaatcttgcaatgataaagtgattacaaatcatttatctttttttgtttactttactaatatccaaaataaaataaaaacacagaacaaaagaaataattattttattttatttgctaaatcatgtaaaaaataataattttttttaaattggatgtggaaaaacctgcagcttaaaacccaaagaaagaataatgggatacgaccagcagaagcggggggcaggggcttaacaaaacaaagcgccccttctgactttgactgatcagcggggcagtgattagtcattaaaaaacaacaaaaagtgtgccccgggcatattaatttcgatgcgcagcagcaggataattaccattgtgttattgtcgtttgggggcgactcgccgccctcgggcgataaaaatggaaatggggaggcgcactgatcagcaaaagaaaataatgggcaaaaaaaatgccgaaattgccgtcgccgccaaacccaccaaaaacttgactttgctgccgattagcagcagaagcgaaattcgtataaaagagtcggagaaaacatgggaacacattataacgtgctctgttctcacaaagctataagtttctgataaatttcgctgatcaaacgactaaatcagtgatcacaacagttgttttttggggggaggaggacgctaaaaaaagcgaacccatcacactaattaattaatttactaacacatagacgtgttttgagtcttcatttgtgtaagataaacaaatttatctaattaatttttttaattttccgagtcagtcggttttgccatatttcaggctcaaatgtatttttcagtgactaatgcctaaaaattgtgataaaaattacgccctttaagaataatttccccctgaccttttaagcatttgctttgcttttaaaatg

SEQ ID NO: 108110 - DNA, 243 bp, Heterodera glycines
taattctgcacatcatcaagccaaatcaaggcatatttgcaaaatcttgaagccaaatcaaggcataattctgcaagcctaattttggcacttcaaaagcctgggcggctttcatcggacatcgacaaaaactgatcacctgggtggtgtaagttccgctgggtgcggtttctcatcaacaaaaactgatcacctggggggtgtaaagttccgctgggtgcggtttaatcaacaatcaaaatg

SEQ ID NO: 108111 - DNA, 591 bp, Heterodera glycines
ttaccgggatagagtcattaatttcatagaatatagataatagatatttatttaattattttgcattaatttattaatatggtgcaattttaatttaaataagactttcccatatggtacttattgaaaatgttgtaaaaggcataatacatgattttaaaatttggtgtttatttatgctttttctagaatttactatcaacgaagttatataataaattgattttcttttttatatctaaaacaattttatctttgaattttttccatagaatttaacttttaatttttcttataaaattttaataacatttattttttgctataattcttgtttttaatcgtataattctcgctcgactcattggagttcataatttcttttttttcaaaagcttcattcttcttttttatatttctcttgcaaagccaaattatgtataagtagtcatttatgttttagtaagaaaactactaagcattaattaatggttgttcaactagactactggagtaatagtttaattcaatataggtaattacaaataaataaatttttaaaaaataatatattaaatttatagatatatg

SEQ ID NO: 108112 - DNA, 1003 bp, Heterodera glycines
tgatgatgccggccgtgcatatattatgcaggcaaagaacaaaatgagagaagagaataaaagagagggagaggcagacagtggaaaataagagagagtgtgagagggagagagaataaatgaaagagagaggcagagataaatgagagagagagaggcagacagtggaaaataagagagagtgtgagagggagagagatggagagtgcgaaagggaggggaagagatgagacagcagacaggcagagaaaattggggaggagtgggtcggagagagatggagagtgtgaaagagaggggaagagatgagaatagcagacagacagagaaaattgggggagcgaaaatgccgataagcgaatgagggggggggggggggcgtccaccctttgccatagcaaggggaaatgttgcaaataataaccaaaaacatttaggttaaggggaggggggcataaagtcagcaaattatacgaaaaatgggggggggggtatcccaaaaacttgtcaatttgttgatccagcaacattatgatgttgttgatgggcaaagaaaaggacagcaaattatgataaaaagttgaaaatagatcaaaacgggtagagggggggggggggaggagaattggatcacttcacattattttgccattcagtggtttcccttcatctgcagtgaatgtgaaccggggctggtatgctaccatcccggtaactaccgtaaacccatcctctgtttacattccagtattaacaacctaaccgagtttttgagggagggcaagactgaaacgacatgtccaaccgagacaacagcaacggtcagcagccctatcatctgtcctccgcctccactaacgacaactcacagcattctactgttgttcatcacttctctgcttcttttggtctttttcgcgcaggtccaccccccccccccctcccccgtctaatcattaattattttttaaatttttttttcaatttacaggctttcaaaatg

SEQ ID NO: 108113 - DNA, 395 bp, Heterodera glycines
cccccccccccccccccccaatacccagagaatacattttaagattttttatgataaatttttgtaagtgctgccccccccacacctctttggtttttaaatgattttcaaaaaatgccaataaaacttgggcattttggccacccatccagcaaaaattcaaaattttttaccaacataaacatttaagattttctaaaaaaaaataattgattcagctagaatataaataatgcttatttgaagatcgacatttaaaaattcgatctaacctaatagagtatactaattagggctgtgaaatgcgggaatggggcttcttagtcctaaacatttttttaacttattacggttataccgtatatacatttttttaccgtactcaggcacaaatg

SEQ ID NO: 108114 - DNA, 106 bp, Heterodera glycines
tattttatggccatatttcgcgattttatatccatataattacactccctagtcatagatatttgaattattgtcatgtcaatttttgtatttcaggtttaatatg

SEQ ID NO: 108115 - DNA, 1003 bp, Heterodera glycines
ggaagggtgaggagaaagacagagaaaggaaaaaataagacaaagagagaaagagagagagaaaaataagaaagaaagaccaaagaataagtcgcagcaccaaaggaacagctaaaaaggagcatttcctttgggttgggtcacttcgccacggctaactcaccacggccaattcggtacggcgagtttgcgagtttggctgagataaagccgcaacgaaaattcgcgccgagttggcctcggcgagttgggcggttccctttcctttcgtaacgccgcggggcgccccttttaaggcgacggacgcaaaaggaaaggataaaaagagaaaaaaaacaaaggaaaaatattgtattaaacagcgacataatttaacaattgcgagattcattaattatatatcttaataaaatgagaaattttaaaattgattaaagttttcgaattcgaccggagaaccaaaaaaataataataaaataaattaaagaaatttttttaaattaacaaactcttttattagacttttctcagaaattgaatctcgaataaaataaatatcttttgcacttctaatctgtgagtcaccaaagaacacttaacaaatatcctaatttgcttcaccttaatttaacatattgtaaaaaatatatatttaataaaaccaatttattattgcatttataatcaaaagaaaagtaaaaagaaaatattttcaaatattttcaatattatttatttatttttattattttatattaatgtgaagtgtatgatatgagcatgatcagtagtctatgttcatggttctaagtaaataaaaaaaataccaaataaaaatttaaagaattcggaatgtgtaaacattaaactctttcttgggctcgaatcgaaattctcaggaattttcgatctctatcaccattattactaacaaataagtgttttcacggagaagtccaatgaaaatcgcaaattaacttcgcatagttttggtgaaaaatg

SEQ ID NO: 108116 - DNA, 107 bp, Heterodera glycines
atccgacaaaagtgaacgaaaaacggaaaaaagcggtggaggagagcaagagcttccaagcgataagcaagctgagtgccgacatattcaaccaggacttgtacatg

SEQ ID NO: 108117 - DNA, 72 bp, Heterodera glycines; identical to SEQ ID NO: 98808

SEQ ID NO: 108118 - DNA, 318 bp, Heterodera glycines
acaaaattttgagcagatcaaaattgtaacaattaaaatatttattaattgtatggaattaattttattaaatattttgtttcattcaaattcttgtgtcataaatatgacaaacctatttgcccaggaaaaatgattgatttcattcaatgatattaaccttttgagtcggcggataagccgcataaccgctattgtacgttttttggatctcctagcgcacccatacgccctaacagatggtcatgctgtcttataaaaaggcaacggaaaatgccggccacctttttcctgtgccccatttttcgtccaaaaatg

SEQ ID NO: 108119 - DNA, 907 bp, Heterodera glycines
ttttgatcagccgaaagctgcagatcaaaaacaacaaaaaaatgatttgagcaatgagcagagagagagagagagagagagagagaatcagcagggggaggggggggggattgaaatgagagggaaaaaagtttggaatttctgactttttcgcctcgtcaaaaatgccccaggcaattgccccctttttgtcctatgaatggcaaataaggataaatttggataagaaatggtaattacttaaccaattaatgcaaattgaccggcagaaaatttgacagagttgcgaatgacttaacggaaatcctatgggacattgaatggaatggcggtgccattcgatgggacgtgggaagggaatggcagtgccaatgtgtgcaaattgtgtgggcaaaatgaaactagggaagtgcgagaaattgctttatcgagaatcaagactgagagaataatgccgagaatcgcaattgaggaaggacaaaaattcgagctgagataaaaatattttatatttaagcatacataaaatagaaaaaataaataattttttgaaacaatttttttgtataaaagcgtttggcaaaaaaagacgggaatttactggggtttccactttcccgccacgggaatccagactggcttctactctacattattaacagttattcggtctgatttttaaaatagagaaataccgtatgaaaaacattacgacaaatttaaattcttccatacaaactcacagaactggcattgattttcctcttttccaattaatagtcccttaggcacatagtcacataactaactcatagaaatcaaattttctttttttatagaacagacatttttgttattccttgaatactcatcattttaaaaaagagttaccaatttcaccacaatg

SEQ ID NO: 108120 - DNA, 148 bp, Heterodera glycines
ggggatttgtatctgattttctaaatcctttttcttcatcccccacccccattcagaattgtgaagaggccataaatgattactggcagcgatatcgagaaggcaaagagtacagagagcggaagaaagagaaaaagaggaaaagatg

SEQ ID NO: 108121 - DNA, 300 bp, Heterodera glycines
  unsure (1)..(300): unsure at all n locations
cattgaaattnttgcaaaaaaaaaaaaataataagatttttcgatgaaaaatttttctattaattttctttaaagaaatcacataaaatttttcagcaaagttattacaatttgccggaaatgacaatacaaaacagaacttataaaaaagaccacacagatataaattcacttaatctatttttaaatttggattttacattcctaaattaaaatatttttttttcagttcaatttgaattcaaaatttgaatttcctcatcccagtgctctctaattcgtccctctccctaattaatg

SEQ ID NO: 108122 - DNA, 299 bp, Heterodera glycines
cagcaatattgacttcaaacatattttaaaactgataaatcacacgtatcagtgcgctgtatttttaagattgtcaaaagtactaattgcgtttctcttattgctttcgtgtgagatttttcttgatgaaattagggaatagaatggtcagcaatcaatttcagacgctttttgcaggtttaacgtataaataatgcttttccagcgattgaatataatcacaagcaatttcaattattgccaatgaagctttgcaagaaaaatgatgttgacttctatgcgagggtttattaaccatg

SEQ ID NO: 108123 - DNA, 111 bp, Heterodera glycines
tgtgagcagattttctgcgaagccgtaaaatgggcgcccggcctaaccaacagtcacttgctcgaatttattcgctccaccgattcggctacggacaaaagtttgcggatg

SEQ ID NO: 108124 - DNA, 144 bp, Heterodera glycines
  unsure (1)..(144): unsure at all n locations
attaatgtataattgtaattaaaataaatttaaatttttaaaagaaatntagtctgaaaaaggcgaataatgaggcgtgcaatattgtcgttttgcatcattgtttcaatgtttgctatttcggcagtttgttgtacaacaatg

SEQ ID NO: 108125 - DNA, 1003 bp, Heterodera glycines
cgcagaaggcgaattgcttacacttgaagtggcggttgatcatcctaattattttgacaacaattaccggactttttctaaagatacaggtggtgatcagctgtttttcggatatgacaaaaataatgcatgtttggtaagaaaaaataacaatagccaatggacaatcagtttgcaaagctataataaactgattctctcttctcctgtaactattcaaagtattcgaccaattgaaccgacggcgtgttttgagtataacggaaagagctatgtgttctttgaggaccgtgaggcggacgagatgcacatttattgtggtcatcagcaaaaaattgtcaggggcttttttgcgaacgccaacagaccaatatttgactatatgacagaacgtttgtacatttctgatagacatgagagtcagatcagtgaaattgatctaagctatcttgagcggttgtggacaaataaaaatcaaacaaattatgcgattataaaagtcaattttgtatgtctgttacccagggataaaaccgatttcgcaattctagacaacaatatatacttgattcgatcagaccttcgcatttataaatatagaattgttgaccgtcaagttgaactaaagtttgtggtcaatagtagtagcgcgaaattcaactttttattatttaaagaataccgcgacgacgccaataataataatatacttcaagcaggctctcaaacgcctcagttaaaattattgttaggggttgcttatacctttgacgtactattgatcataatttgtgcatttgccgtgaaacagatccgccgagcgagcagcagaagtaacacatcttccgaaaatcttggcatgttcgacctagtggaattggcagcgcttaaaaataattccaaagaacttgtgtacacgcccacaacagtagtcaaagagaggagtatttaaggtaactattctggccatcagcgctcatttcgtacactaaaccactatatg

SEQ ID NO: 108126 - DNA, 107 bp, Heterodera glycines
tgcgcagttggtccatccggttgccgaaagggaagtgggttaacattcccacgccaggctagggaaatgacggttcgcaagagctgttttgcgcggtaacgcaaatg

SEQ ID NO: 108127 - DNA, 301 bp, Heterodera glycines
atatattttcaagtgggagaaggaaaggattgctgaacttttaaaaaaacaaaagcagttgaagatgaacagccaagttacggtttgaattaaaaaaattaaattaattttattaaaaaatggattttaatagaaaggctctggagattttgttaaaaatccaccggcgacgggaagtccaataaaaaaagttgtaagtaaatttaaacttggcatttttatggtttcgaattttttattattaaatattcctctaattatgcttatatcattttttctaattatcaaaaggatgtaaatg

SEQ ID NO: 108128 - DNA, 522 bp, Heterodera glycines
ttcctggcttctccttgctctaaatagcaggaaaaacactttattttttgtgtttgcgaacaaaaaccgggacttttatttacatatttcggggttttcttacatatttgtacatattttggatttttttcatatatattttcatttttttactattttagtattttttacggaaatttttggaaatcctcaaaaaaaatccaaaatttcggcaaatatttttgtacatattttcatttttttttacatattttgaaaatttataaagaaaaaataagtttgaaaatgttgcctaaaaataccaaaaaaagtaatttttatgtcattttgtggctatttcatattttacggggattttctttcccaaaaaataccattaaaaaaattttatttacatatttggggttttttgtacatattttgggatttttcttacatatttatgtacatatttggaccactttttgtacatattttttgcagccctagttattaggtatataattttgcaacaaaaaaatg

SEQ ID NO: 108129 - DNA, 171 bp, Heterodera glycines
tttgaaaacaattaaataggtgtattaaaaaaaaaattggagaatattgaactatgagaagcttaaacaatatttcaacttcgacaaaagaccgaaacgccttaagtttttagatattttaaatcctttttttctttttatttgattaaaattaatttttttttaaaaatg

SEQ ID NO: 108130 - DNA, 376 bp, Heterodera glycines
cccgagctgtactcgtgaaattcccaagccatggacgaatttctgatggaacacagccaagcgcacgggaagagggacactggcgttggaattgaaaaagtgtcggaatttgctgaagagtctgtagggcgttaccgattcagtgataccgtattcatcaaaggattggcatggaaaattaaagcagaaataagggaaggcactgctgctgatgagaagaaatatttgggatttttcttatggtatgagcgaacaaaacacggtacaacaatttaaataataatttaaaaaattaaaattaatcatttttttaacaatgatagaaaacccattggactgcgttttttcggcaacatttcgaattgtgtcggaaatg

SEQ ID NO: 108131 - DNA, 442 bp, Heterodera glycines
tttcctgaaatttgcgttcctaaattatgtgagtttttgcgacccaagccaaaattggtgggatcccttcgggattttcccggttatcttgatcctggtctcgcccaatattccttgagttttctgattttttggaaaatttatgcttttattttagtttaagaagcctaaatgctcagttttttcacaaatttcagcattttaaaattaatcaccaaagaaaaccatcgtaaggccttttaaaaattttatcaaaaaatattatcgacgaaagcttctgtcacccgctaattgaaagtttcaaacattgctcctccttcttaaattacaataatttgttgataataaatgtttattttaatacatttttgaaaattgactaaatttttaaatattttatttattaacaccaaaatccagttgaggttaaattatattgatg

SEQ ID NO: 108132 - DNA, 209 bp, Heterodera glycines
tttttgttcgaattcgggtccggggttcttaattggccaaaatggataccggattcgtggtcaatgccccccaaaagccaaggaacttgtttttatgacaatagaattttactgacgcattttccactgacgcattttccgggcgccgggcaagctgctcttccattaaatcattcagttcaaatgcgataactacgtaagcaaatatg

SEQ ID NO: 108133 - DNA, 559 bp, Heterodera glycines
aattttcacttatttattttgtacaacttttcttctctttcttcccaatttcctctcccatcctaaccaaactttactgtaaacccaagccaagccaatttgtgtccatcccagctcactctcgactccaccccttttctcttttgctatttaaactgaattcattccttgcattattaccctttttttctactcactttgactcattcccattttacttacctttctcacttttgctaaataaactttcattaacaaacttaaagtcttgcttttgattgggaaataagtcgggaacacaacatcttttggtgccacgacccgggaccaaaaaaaagttcccttttcccaaatttctgagcaaggccgagtgccgaattgctgtcgagggttggtcgaagctgtgtgctcccaaccgaagagactaattgcggagggctagtcgaagctgtgtgctcctagctgatcaaacggataattatttgagttagtcgatctgtgtgatcctaaccgggctgtgtgccaatttcaaaaaaaaaagtggaaaaacagtaaaatg

SEQ ID NO: 108134 - DNA, 72 bp, Heterodera glycines
agtccgaccgaaactgatggcatttgtaaatgtttttcttgaagatatgtcggcgaatcggaggcgaacatg

SEQ ID NO: 108135 - DNA, 142 bp, Heterodera glycines
agcatctataatctacccctattcatttccatcattcgctattgatgaggatgatatcattagcattaaacttgttaacccgaactatagattcctagacgacaaaaaatttgtgcatatagaactaaaggttccaagcatg

SEQ ID NO: 108136 - DNA, 60 bp, Heterodera glycines
ttttagtgtgaaaaactttggagaattattttcaaaattcttgcccgtattaagagcatg

SEQ ID NO: 108137 - DNA, 785 bp, Heterodera glycines
gttcaaccagacctccaactatttcttcaaataaaattaaaaactactaaactacctagttcaaactttcttaaaaattttccacaaaaattttttctccaacccctatgtatataaaaaaaaaccaattccctttgttggaggtctgactttctactttctgcttctccactcaaaatttcaattgtcttttaccactgcttgccatttcacctcatttccaccaaaagtgtaagtggcacatgcccttcttttggttatttttatttttgaataaataaaataaataattaaaaaagaaaaaaggtatttatttacccgtgtgaattttgaattagctcgcaaaaaattacgccatttataattttggcgaaatgagttttgtctaacactgggcttgacccatagtgtagtgagtaatggaccaaccaatagtgccaactgacaatttgtaatcgcgtgtacttacatttatttattttttttgtagcgaattcgaaaaataaaatgccaaatatgagctctgatttttcaagaaccttcattttgtctaagatattcatcaagtaacataaaaaaataaatttgcagccaagcggactcgaacccaaggcccccatctcatataaatgctttttgaaattttccaattttttttacatcggcgtgaccgcaattctacacctttgccaaatttcaaaaattaattatttaatcaagctaatttgttctttttttttgccttcgagtttttccatttgccaatgcattggcattttttgatg

SEQ ID NO: 108138 - DNA, 128 bp, Heterodera glycines
tgttgcactggcgagtctcattttgcatgcatagctcgccagctccgtgaaaccagtttgaaaaaaatttaaaaaaataattaaaaataataattaaaataacggatcccctatagatataattaatg

SEQ ID NO: 108139 - DNA, 685 bp, Heterodera glycines
aatttgaccccaaaatggcaaaaatgttgtcattttttgcgtaagaccggtacaaatttcgagcttttttcccggtttagtttatttggaggatcaagattaccataaacgagtgatctgatcaagttaatgcaaaagactttttaatcagcataaaaagaagatatattatggtattatttttgttgaaattaaaaaattccatttatccccctggggataaatggagactgggggattatttttcaacctcctcagaaaggggggggataattggagactacgggattaatagagactgggcgataattagagaatatatcgtatgtttattagtaaattgctccgaaaattaaaaaaatattaaattgggactaatccgggaaaatcccgaatttccgaccagagtcgagattcagctttacgcatttgacaagggaatcattccaaacagttagaaaataagaatttaaattaggcaccatcggatggagcgaagctgattcctattgtaaatttttaaagtttttcccataaccgaaaacccagggtgattttatgaggcctcgaaaacgggattttttgactgctgataaaaaatctctgtattatatgcttaaatgatttcctaaaatgagtgctgtttttaaccaaattagatactattttaactaaaacagaaatg

SEQ ID NO: 108140 - DNA, 1003 bp, Heterodera glycines
gacagttgcggcgctcagtcaaagcgacacttgcggcgcagacatttgcggcgtgacacttgcggcgccgacacttgcggcgacgacacttgcggcgccgacacttccggcgcccagtcaaaaggacacttgcggcgccgacacttgcggcgcccagtcaaaaggacatttgcggcggcgcaaaattcaacgaccccaaaattatttcaacaatttatttccattaaaaacattgataatgactctctcagtcccattcttcaaagcctttcatccctaggcgatattgcaacgcatgaatgtgattaattatatcagcttgctttttgttttccttatggtcaaaatcgatgactaatcgtcggatcgcttcatcatttcttaaatatttttttaagcgtggcctttcagcaattccacgagttgggtcaatttcataaggtctcagacggttttgttggtgttcttcctcatttttgatggcgataatgaaccttattgaaattattttattacagtacccatttatactttgaaaatgctgggtggggcgaagtgaaacgttttctgaagctgttatgccacctaagaaattaattgcaatatcgcctagggatgaaaggctttgaagaatgggactgagagagtcattatcaatgtttttaatggaaataaattgttgaaatatttttggggtcgttgaattttgcgccgccgcaaatgtccttttgactgggcgccgcaagtgtcggcgccgcaagtgtccttttgactgggcgccgcaagtgtcggcgccgcaagtgtcgcgccgcaagtgtcggcgccgcaaatgtcctcgccgcaagtgtctgcgccgcaagtgtcgctttgactgggcgccgcaaatgtctgcgccgcaagtgtcagcgccgcaaatgtcagcgccgcaaatgtcggccaatcggacgaatcggagggaaaggggcagacaaagcggatcgacgatgaatttgtacagaagatg

SEQ ID NO: 108141 - DNA, 395 bp, Heterodera glycines
tcattagcgtacggatttttaggttttaaccattttgccctttttccaaaattcatagcaaacatggaataaaaacgaaaaataaactctacgaatcgaaatcaaaaaaatttaaaaaaatataccctaaaaattgaccaaaatttcaaaaatattcccctaagaaatgaaaaattttcctcaaaaatttatctcaaaaatttgtttttatttgtcttcttgacaagttgcaattttagcacctaaaagccctagctctaattacaatatgttaagcatgggctgcacccttgatccatgtgtgggtcataccgttgtccatcgcactgtactccatcacgccgctgttcgccgaaacatttgactcgttggtgatcaagcgggccctcgccatg

SEQ ID NO: 108142 - DNA, 306 bp, Heterodera glycines
tttcccaatgggggattattcgaaaaaaaaacatttgaggagttttttttctctttcaagtagaaacgaaaaaattaatcaaataacaaaaaaaatgaattaaaaaacaaaacagatttctttcttaaataggttttatttttatttattttttaaagattttttggaaaaaacttttgcaacaacaattattttaatatttaaagccggtttagaaccttttttgttttttaaaatatttattatatttttattttaaacttaaaaaatagcatttaattttagaattcctttttcccttctatg

SEQ ID NO: 108143 - DNA, 537 bp, Heterodera glycines
taatagaagaatttaaaaatgtgaacggacgcgatgaatgagagaaaattttgcaatgctcgcctttatatagacaagcaaaaaaatttcgaaattaagggaaaaaaagttgtataaaagggcgacatttcctcacttttcctcacaattcacttcatcgccctcatattatattatattattattattatcatcgtccatcgtctacaacacttcatcacacacgaagcggacgtgcccggcgcaacaacttcaatggaggattactgtttcgacgcaacggcagcagcagcggcggagcagtctcggcgtcaatcgggagcggcatcggaccttgtgcaaggagacggcctgtcaaccggcttcctggacgcgatcatcacgaaggtcaaccgctcgcctcctcagcgcttcacggatgaggtagaaaaatttttgagtttttcaaaaattaattttccccccttttttccccaacagatcagtgacgatgaaatccgccagctctgcaaagcggccacggacgtcttccgaatg

SEQ ID NO: 108144 - DNA, 287 bp, Heterodera glycines
tgctgatctttcccctacttagggaaagattcggcaacaaatgcataagttttatctgcattcttaatgggatgtgtgagcgatcaatttctgcactcaatgacctttgtgcgaaattggacatgtttgattcgcagcggcatcactgtggcaaacaaggaagatgcaccttaatttttcacatttcaatgtttttgataaatatttgattaatgtggtttattggttgttttccccaaatattttgccgcatgtacacatcattgcttcatttttgttttcagatg

SEQ ID NO: 108145 - DNA, 861 bp, Heterodera glycines
ttattcttccaattgcatacaaaaaacaattctttaccaattatgattaaattacttttttactcgatcaaaaagactaaaatcggaatccatgacaaattgaacctttggcatgccattaaaattttgcattaagctttgaataaaattatgcaaatcaaccaatcagtcagttgaaaatcacacactcgaatatgccaaaaagtttttgaatgccgaaaacgaaaattcgacttcgcatgactaaataggcgcgtatattaacattgcaatgacatctgtcgggtggcaaatgtgtttgaagatgttttaatttagatgttttaatttcctcgaatttattttttttttttttttttttttttttttttttaacaaaaacatccaatatttttctactgacgaatatttgcaaatttccattgattattgttattaatatatgtaaaataaaggtttttaccttttacatttatgaaaaattttactttgcgaaattcataattattatttttttgaattttaaacgatgaaaaactttcttggccttttatttatcattaatggcattgatggaattgatgaggatttttttgaagacttgtggaaaaatctaaaaccatcgacatcaaaaaacaccaaaaaagaaaaattcggaggaattaaggaagaaacatttcaaaatgtcaataaaatgataaagtccgaaaagtgcagtgaaaacgaaatggaaaacaacgccaaaattatcgcaaaaaatttaaaatgaacatttggaggaaaaaaatgttaatttaaaaacaaaaatcaaagagccaaaaattgaattggaccaattggaagaagtatcatttggaaatg

SEQ ID NO: 108146 - DNA, 1003 bp, Heterodera glycines
ggaattccatccctggcaccaactacactattaccaatttttgaattactgtttcctcggatgtccattatcccatcccctgttcttcacgtgtacccgagtatataaagtcgaccaaatcccctcagcccattcaattacatcaactgaaaggagcagacagtgttttgttcaaatttccgaagaaggaattgatggcaatacatggcgatacgacgaatttcattaaatccgcctgacacgctacatgacttcaattgaggtatttatgtcacttggggtgtaccgctgtacagcagggatggcattccgaggccccaaaactttttggaactcggaattccgggggtccaaaatttttcggaaatcggaattccgaggcccacaaatttttcggaagtcggaaatcggaattccgaccccaaaaacgtcggaaatcggaattcggaagtcggaaatttttcaaaaaacataaaacataataaaaattttctaaatattttaataggctaaattttaaattcttaaccaagtaaaaggtgactcaaaaaattttttggatctatttaaaagcatattttcatggtcaaatgtttatctacaccccaaaaaaatcaatattttgtaggcccaaaattctgaaaaaattcctgctaagctaacttttgatgatgatcaaaaaagtgttttacaccaatttgatcagatcactccttcatggtgatctgaaacctcaaaaatggcaaaaattccttcgaattcatgattagcagaccgtaagggatcgattggtatctatttggtcgcaattccatgcgtttttggctttggacggttcagtcccaaagccatttggccatttcagtcccgggtctgtaacgacaaagggtaaccctggattatgtgcattaaatagaattgttttgaattttatattaatacatgtaggtatgcaaataatgttttttggaaaatatcggtcatatggcccgaagcccaaatg

SEQ ID NO: 108147 - DNA, 484 bp, Heterodera glycines
tgtccggaatcccgttaaaagtctcaacaccctccccgattaaccctaaaatactatcattcatctcaccataacaataaagaattttcttaggcggtggttcaattagaatcttatgatgttttaaaaaccgtaatagccaacgggtcttaccactcccggtagcccccgagagaattagagtgaacggaccgcgaaacatttttaatgcctcttatttatttgatctatttatattttcatagggaacatatttcgcgcatttggggcatatccagaaattatcaaaaaatgatgtaccgaaatgcgactgtgctttttacacctgctacaaatctcgtaatgacagggacagtaatgacaacacttaattttatgtgggcagttcatttttcaatttaattttattttgggttgctatttatagaaggggtatataaagggagtgaaaggaccatttgattggtacattgtatcaaaaatg

SEQ ID NO: 108148 - DNA, 187 bp, Heterodera glycines
tttcctttgttgcgtatatggtgttggttctccccccccccccccatcctgctatttgccttttcgttttaattttgcgcagcaatcatttattgatttgatattttttggaaattttacccgttttaaatgcttacaaatattttatttaaaatgccgaaacaattaaaattttatttagaatatg

SEQ ID NO: 108149 - DNA, 645 bp, Heterodera glycines
  unsure (1)..(645): unsure at all n locations
tgcaggtctacagggctatnagggaagctattcccgaaggattcggtctccccataaatctgggcgcatcggctcggggggactgccccgaaaacaaaaaaatcgattttttcaagtgtccgtttggggtactcaaacaattatggggagcaaaaatccaacgcagaattaaagtacaggctatagggaagctattcccgaaggattcggtctccccataaatctgggcgcatcggttcagggggactgccccgaaaacccaaaaaaaaatttttttggataaaaattatttaaatgaactgactagataatatttaaaataggttattactcttcctttcagtatccctgcaaagtttggtgcgcttctgatcagtttctgaaaaaaaagttaagcctaaactttttggcctgtttaaaaaggaattaaaaattttattcatctccctttttgatagaaaaagcatcagagtgcctaaactaacctgtaaataaagttttgtgtgtttcagagcactttctgaaaaaatacttatgaattaattttgcaaaaaataaataattaatgaaaaagtcagaatttcgaaaaattttaaaaacaacaagcgttggcattttttcaggttaagttagtcctttacaatg

SEQ ID NO: 108150 - DNA, 371 bp, Heterodera glycines
ttttattttcattttacccccttggacaattctgaaacggccatgatggtggcggaatttacaaacggcattgagttaatgtgccaaaaaacctttcgcatatatgggtggctcggtggttttatcgttcgaaagttcttgatgaggagaagcttattctgagcattttaatgttgaaactataaattcataggcgccgtttcaaagccggacccacagacaacttacaatttgcaatgttcaggaattaattaaaaacacaatgaattttgtccagtacctttggctaatatccagggcccagcttaatccaaatccaaattgtctccgatttgtttaaatttgataggcagttgcttcttgccccgatg

SEQ ID NO: 108151 - DNA, 74 bp, Heterodera glycines
gataaaacaagttttttttttattgattaacgtaaataatcgtgtatttgtaggtgaaaagcaggaaaaagatg

SEQ ID NO: 108152 - DNA, 152 bp, Heterodera glycines
taatagagaacacttagggctttcggttgataccaacaatattagatttggttgacaaagaaaaaagttatagtccaaaaactgagctggcgccgaaacggtcggcgccgaaacgcagtggaccctcatttggaataccaatcgccaaaatg

SEQ ID NO: 108153 - DNA, 57 bp, Heterodera glycines
tggccgactttgaggtggtgattggttgttgttaattgcttttgtttcgacagtatg

SEQ ID NO: 108154 - DNA, 75 bp, Heterodera glycines
taataagatttatcataaaatttcaattaaaaatccatcctcgattattggtatgaacgatactttccaaacatg

SEQ ID NO: 108155 - DNA, 333 bp, Heterodera glycines
  unsure (1)..(333): unsure at all n locations
aaaatccaatcgctcatttccccactgaataatntaataataaaaaattttattgttttttaattttattttgncatagttttcaaatgcttttntaagcatgaaataaagcaatgattttattacaaaaatgaatgatgttttattttgaggcaatcccataataaaattattttggcaataaattttttgcccaattttggacaaacgataattttgtccatccatataaatatttaaaaatttcaaatttttgtcatttaaagatttttagtttatccaattttcaattcattccccattaaaaataagactaattaaggtcctattatg

SEQ ID NO: 108156 - DNA, 135 bp, Heterodera glycines
tcccgaaaaagcgataaattgaccagttttgtaagaaatttttcaaatctaactgggagctacagactttttttaatactgattttaattccttttattcagaaatgatgcacagcaacaacacattggcaaatg

SEQ ID NO: 108157 - DNA, 1003 bp, Heterodera glycines
tttaatctataccccaaaaaattcaaaatttattacaacaagacattattattttgtaagatttgtacctccaaatcggaacattctttaaaaaaatcggacccctgggttaatgcaattagtaatttcaacaagtttttttttctatattctatttaaaaaattaaattggttaatcatagaaaaaccattaattttgaagtcaaatattgagcattttttaaggtcctaaaaataaggcaagatcgagaccgagaatttaaaaattttagcgattttcttcaataattgaatgtgaatgagtatatatttttctgtttttatgtgatttcattttcatgttaaatacatgttttaatttgtctatattttacggatgagtgatgagtgacgattccaataggcgccgcccgccggatttagttttcgccaatttgaatctaagtttagtatcatattttttccgctcgcattttcttgaaatgcaaaactttctctcggtgtcgcattttccggctcccgaaacagaaaccaaaaaggccgaacaatttttagacgagaccaaggacctcgagctaagtatcaattaagttctattttggaatttttaaatcctatttttgttagagcgaagatgacctaattttcattaattcaaaatctttccttaaagacacactatattctaaatatgtttaaatttgtacgttttttacaaaaaattttagaattttcaattttagaattttttttctttattggccatttatcgactatttctttaaacacatgcgattttgacaatgccattatgatgatgatgacttacgttaacaaaaagaataatttaaacaaaaagattgcatttatgtaatttatgcaaaatgtcatcataattggattttctcaattctttacacattcactttattagttttttataaaaattatttttactaatattaatcctaattttgttttatatttaggcaaattctaaatg

SEQ ID NO: 108158 - DNA, 61 bp, Heterodera glycines
tggggggggggagggaaaggcgcacttccgacaattttttatagcggcttcaccaaatatg

SEQ ID NO: 108159 - DNA, 113 bp, Heterodera glycines
ctgtactttattctgcgttggattttgctccccataaatgtttgagtaccccaaacggacacttgaaaaaatcgatttttttgtttcataaatatttttttcagaaagtcatg

SEQ ID NO: 108160 - DNA, 867 bp, Heterodera glycines
  unsure (1)..(867): unsure at all n locations
ccccccnccacccatcccccgcaaaaaattgtcccataaataaatttatttatagggggggggaggtatttatttacataatgtattatagtaggcattctttttctctaaagctacacaaaattgtattagtggatggcatttgctatgaaaaaaaaacaaattagtgccattttgggtatgttttttggcgaaaaatgcgtcatttttttgtatcaaaaactaccaaaatgtcattcaataggttcgaaatgttattttaatttggaagcaatttttaaaaaattagctgtaaacaaaaattttaaaaaaaaaagaattatttttcaatgatttgaattttacagtttttttttggggtttttcaaaaaccaaattggcgcattgttttccgctaccggcggcacatttaattactaattattttttgtacgcgttacgcgcacattttatatgtatgagatattccatattatatccggatatgcaattatttaataaataataaagtataaatcgaaaacaaaaattttaacaaaatatccgccgccaagatactataattttaaatacaccaataaattcatttatgtttgttttttattgcataacatccgcatatttgctatcatccggacttccgtgttaacatccggcccttttaattaattgattatctccgatatacaattagtttatatataagcatggaaaagtttcaccaagaaatactgacaacaatatacatagttttattcaaagcattgctacaaaaaagaccatataaatacatatttaattattttatttttttattatgaaatatattttcaactatcccaattttattttatatttttttgtatg

SEQ ID NO: 108161 - DNA, 695 bp, Heterodera glycines
actgaataagccaaatgccaaactgatacgattgctgtaatgtatcacaagcgtcaaaaaagtaaatgtcgcaggaaaataattggcaattttattttagttttttgtaattgccacaaaggaaagggagggaaagggaatgagttgggacgcgaggaatggccaaatgttgtgaaaaaagctaaagcaaacattgaccgaagtttctttttttgtgaataattgaagccaacaagcactattaatgaataaagaatttctccgttatatttgcttttcattaaaaaaatccctttttattttccgttttcacaacttttttttcatttagtttttctgaattgggttaattttttgagttaatttctgagttgacacctttttataaaaatttattattatctaattaacataaatatcactctcttttgaaatatgaatcaattttaagcaaaaataagtaattataatctaaagcctttttatttaagtattattctaatcattttaattaaatcaatagaccccgatatcctgctttaattgcgctcaataccggaccacaatgcccggacctgtctactccggttgtgccggattttcccaaaaatgccggaccgtatgccaacacttgaactgatttaattaatttgcgctaattatataacatccataaatttattagatttcaaatg

SEQ ID NO: 108162 - DNA, 269 bp, Heterodera glycines
tgcaggtcaaaaatttctccttcttcaccattccctactcttttttccatccagacccccattcttaccagggcaaatttttaccggctgtatcggtactagacaaaccggtaccgatactttgatttttgaaaaaaccggtaccggtaccaaaaaaaccggtaattaccggtcggtaccggtaccggtaccgctcaaccctactttttgtcgcaaaattcgcaattaaaatattaaaagaattaccgtattattcccttcaagaaatg

SEQ ID NO: 108163 - DNA, 774 bp, Heterodera glycines
cgcaatgttttctttgcgtatgcccaggctctccttttcgactgggagtgagaaaaacaaatttatttttataattagggttgtaaattatatggactaaaaaacgcgaaatatggacattaaatatggactaaaaaagcccaaaatatggactaaaaaggccaaaaatggaccaaaatatggataaaaaatgccaaaatatatgttgtaaacccccaaaaatcccaaaaaaggtgtgcatatttaatatttgcttaaataaacctaaaaagtacaataaacaaccaaaaaatggggtttaaaacttaaaaatgcatattttttattgttgttcgttgtatcaaaaacacctccaagtttgccaaatttcgaaaaaattctcattaaaaaaaaagaaatgttcgcaaaaaaatgacgaaaatatttattgaaaatgccaaaatgacgacgaaaactcaaatttttcgtgttttgtggggtgtaatttttaaaaatttccaaaaagttgatctttaggggtgtatttttcgtttttttttcatttttcttgtgaaaatttccaaaaaatggccaaaatatggactaaaaacccaaaaatggcgaaatatggatttattcccgaaaacccccaaaatatggatttatatggactaaaaaccttcaccaaatcaaaaaattttaacgcagaaatgctatttttaagcccctttcttcatagtatatgcgcagaaaaaatatgttaatccatataatttacaacccttattaataatg

SEQ ID NO: 108164 - DNA, 878 bp, Heterodera glycines
gaaatgaaaaaaataaagtaacttgagcaacggaagaggggaaaattgggaatgagaagcgggtgggagggatggtcaacactcacaaatcagcacactcatccaataatatattgaaaaaccagctccattttatattttcaacattttgagcaaatctgaggaatcggttgattggtaaaagagaatttcaatcagaagcctaaatatgtaagaaaatttggcgctacaaaaagtgattctttttgaaaaaattttttcaaatacttttccatcaattttagtgttttatgttttttttatttttttttaaaagatggttaaaatgttttagatattctttcattgatttcactaatctccgattcggcttccaactgtagatgaagtaaatatgaggtgaattttcgaaaaaagatgcgtttcaagcaaaatgtgagaaattaattattttttattaatatatttttaagtggcactctcgtaattgtaaataaatatttgaaaattttttcaaaaagttcaaaaagaaccactttaaagcgccataatttttatgatttgcataatatttaagattggtccctccgaaaatattggaaatgccatttaaacagtaagaacggaagtcggaagtgccaagcgatcatcaacatttttggttgccaatttctccctattagctgacactttttcaattcatttcccttttttcccttttcatgctttcaatgtgaaattgaaaatgctctgttttaagcgtccatcgttaagtgtttgccgccccttcgcccgcacttttggcgatgcgaccgacgattgacccattttttacattcgcacatccatttgcagtttcaggagatcagcagcaaatg

SEQ ID NO: 108165 - DNA, 622 bp, Heterodera glycines
tagctacgaatttctccttaagaataatacttatgcactgagctttgcctttgaaaatatgggtgtttcatgtaatttcttaaagttaaatggaaatctgccaagacttatttgaaaaactgagtgcagccaacgcgagacaatttaacggcatctgccgaaacagagatcatctgcggatccaattcgcaaattcgcttcactcgaccgatcggatagccgaacgtgcgggaccgacatatgaaggcacaacacactcaaaactgggaaacttaaattgtagctgattgtgagctttagcttaatacaaaaaacaaaaaaataaaattaaaacattatgccagctttttgaaagttttatttttttaaattttatgtttaaattttcttctggttttaaattgaccaactaagaaaaaaaaagcggattctaacctacgcccatttcccttcactgtcgtatcagcaaatccaatggtgatttttgcggtgtttttcgcccaacctttcttttttgtttgtttatctttcgttagtaagttcgtattttttagttacaattgggtttccatccatttgagtttcttattgcgtctctttttcttactagccgtaagcaatg

SEQ ID NO: 108166 - DNA, 57 bp, Heterodera glycines
aactgtttttcccaagaaaattaaatcaaatattttcagatttaatttcatttaatg

SEQ ID NO: 108167 - DNA, 212 bp, Heterodera glycines
tctcacccgccgatgcagctagccggtgccagaagcagattctgagccattttcaaagataaccgcattttagcgatcacacatattttgaccgatcggttcttttggcacattgccaaaatatggaaattcaatttggtattttgttgccattttaaaattgttcgaattttgccgaataaataaatgcatttttacagactaaaaacatg

SEQ ID NO: 108168 - DNA, 76 bp, Heterodera glycines
actgtaaatgcaaaatttaatttattttggcaaataaattcactgttatattaatttgtgcgttttctttcagatg

SEQ ID NO: 108169 - DNA, 819 bp, Heterodera glycines
actctctttccaaggacaggtatactgatttacaaggacataacgaacaaattttaagaaacccaaggacattaaaaaattggttaaaatttattcaaatggtttatattttcaccagaatagattttttcaaagatttttttccgctaatttttttcatcatttcatgccataagttaattttaaaaaataggtagaaaatttcaaaaaattgtagtatttcgaatgtttttttctaatgctcatttccaaggacatccttggcatccaaggacaaatacgctccctgttttaatggcataaaaagaatgaaaaatagagaaacattttagaaattgttaatttatgcttttgaaatgtttaaagcaaacttattttaatgctctgtgattgaaaaatgatcgtgatatttgcataaattatagaaaatctttttttattattattattagtttagctggattaataaaaacctaactgttgtgatgacataaatattaataaaataatttcaaataaaagattcttcaataattcaataatcaatgggccattgagggttttgggtggattacacagaattgaaatgataaattggcaaatcaattgaattcacgagctttttagggtttgcatttcccactgaacaaataattaatgaaaaaattgaattacgagaaaagataataataaatttaaaaaaaacaaaagaattaatcaataattatgaacaagtgtttaaattagtgaagaagttataccggggtaatagaaaaagtttacagaaaattgcaaaaaaaaaaaaaaattgaaaaaatg

SEQ ID NO: 108170 - DNA, 115 bp, Heterodera glycines
cgtaattccatgatactgtatttattactactataacccctgaggggagaaaatatgatttttaattttttttttaatatgaattctcaattttttagccaaaaatgtgctgatg

SEQ ID NO: 108171 - DNA, 335 bp, Heterodera glycines
gatggcaccatttggcccagagaattggaaatcattggtgccaaacgtttgatggtccaatacaaaggaaatcgcttaagaggtaattgtcacaaattaacaaaaaaattattaaagaaatttaataattaaaattaaaatcactttaaatacgattattttaattgaaaggaagtcgctcaatgttcacaaaactctgtctgcattctgagcacaaattcgtccatttcttacatcgaaatgaaaatcatcagtatgaaaatgtaaataaatcttagaaaaataaaaattatattttaaatttataatttataataatttttaggtgcgcaatg

SEQ ID NO: 108172 - DNA, 175 bp, Heterodera glycines
cggggacctctagagtcctcagcggagcggagagtcggcctttgtttatgtgtctcaacggcgaaaacatagtgcaacaagacgtaagtatataatttatttacaagagaatcaacatttgttcaattaggtgggcaatgatcggagttttgtggcgaatgatggccaatttatg

SEQ ID NO: 108173 - DNA, 726 bp, Heterodera glycines
attgatcattgatcggcactcacctccaattgtgatcggacaaaaatgatattaattgtatatgtacatatatatcaacactcggacaataaagtataatgtgtgtttttttacttggcatggattttctgaattttgggcaggacaacgtccaattcggcgcacctttgttttatggttttcatgccgcaatcgaaaaaatgacttgccatgataaaatcatatgacaattctgatgtcagattcgtggtaatactggagaattggtgtcccggcgaaaaataaatttaaaaattttagtttaaaaatctggttccttgtgtacttttgatcataattttgttcaaacattaacgaaattttataaaattttgcaggctaatagagaactcatagggttatcgaataacctcaagaatttaaaaaaataattaatttataattaaattttttaattagaaacaaaataattttggtcatctaaaattctaattaaaactttcttagaaccaacagaattaagtgtcttgatattattcgatagccctaagtgttttctactagatttccatttgatagttttttttatataaaatgccctttttgaatgtttttatataacgggtcaccaccgacaaaatacagtatacgggcgaaataggcataaagtagataacatatttgctgtgaaaaaatgaagaaaaaaaaaattatttaggccgaatg

SEQ ID NO: 108174 - DNA, 372 bp, Heterodera glycines
ttgaggggaggaggccaaaggaagcggagagaggaggcaacaatcggaaatattctgtccataatatttaagtattcactgtctggaaaagtggccaatggtcagaaagttttttggattgttcaaataaatttcactggctaaggccgtcccttcaatggccactgcgactaaaatcacacactttttgcgctttgttgttttttcgatttctttaattttattgagccttttttcatttgcttataaacaacaaataaatgcaatggttgtcatttcacttaacggtaaaagttgccattgctttccttttttatttgttttcgttttcctttacggttcctatcaaaaaaggtcgcttttatgatgatg

SEQ ID NO: 108175 - DNA, 1003 bp, Heterodera glycines
aaaaaacgataaagttaaataataaaaattgtgatatttttatttaaaacatgaaattccttaaatgtttcataattttaattagagaccgagatttccaaaaatgccgggccgggctggtagaagtaaccgggttccgggcccggcctctcaaaacccggtcaacccgggttttcaaattgccgggcccgggaccgggttccgggtcggtaaaatttttaattttcacatatatttcaactccaaaattaacaaaaaaagctcgggcaatcgttaaatttctgctctatttcacttcaggcgtcaataaatcgacatcttcaattataacttcaaatttttcaacaaaaaaaatcttaaattttctataagagaaaaaccaagaagtaaattttagaaaactttcctcgcgctctgaatttttgtaataaataatgttttgcatcagggttggcataggtaccaaattttcgaaatcggaaattttttggtatttttttagtatttgcttgaaaaattattcaatgatgttcatcaaaattttttttcattttacattgttttagaacattttcgaaaagggactattacagcggcgctttttccaaaagccttttggggaataagggggtccggcggtgccgataggcgccgccgaggggaaatttttaaatttttaatgcgatttgttgacagattttgcccaaaaaggactaattttagcgattttgagcaaatttttcacgaaaattaatgattttttagggtctggtttattgacgttttttaaataggccaatttcccaaataagactcattatctttaaattaaaaagaaaaaagaagtaaattctcatttctataaagtagaattgttcgaatgaaaaaatttaaccagaaaattgacaaaaaacatttataaacattatgccaaagagattttcgaatggaaaaagaacaaattttggctaaatcataacccggtaaaacccggtcaaaaatg

SEQ ID NO: 108176 - DNA, 120 bp, Heterodera glycines
ggtgagtgatttttcccaattgatatttaacccggtaaacaaccatttttcagcgctcaccgggaggcgaatcgaatacgcgccgcgtcgctcgggtaaaggaaggaaggggaaggaatg

SEQ ID NO: 108177 - DNA, 1003 bp, Heterodera glycines
tattattttaacaatttaattttaattaaatttattttttaatttatttattattattattattatttatatttttgtgtggtattagagagagcaagagaaaagagagagtgagagagaagagagaatgaaagagagagaaagaaaaaagagagagagtgagagagagagaaaagagagagataagagagagaaagaaaagaaagatagtgagagagagataagagagagagagagaaagaaaagaaagaaagaaagagagtgagagagagaaagaaaagagagagagagaaagaaaagagagagagaaaagagagatataagagagagaaagaaaaaagaaagagagtgagagagagagtgagataagagagaatgagagagagagaaaaaaagagagagaaaagagagatataagagagagaaagaaaaaagagagagagtgagagagagagataagagagagagtgagagagagaaagaaaaaagagagagagagaaaagagagatataagagagagagaaagaaaaaagaaagagagtaagagagagagagagagataagagagagagtgagagagagaaagaaaagaaagatagtgagagagacagaagagatagagagagaatgaatgttagcttttttattcaattattttttaaattataaaaaattttttttaaatttatttattttaatttataatttattttattttaatttaatttattttttattaatcaataaaaacccttcaataggtttaggttcactcccgcacccatccaataggttttggtttaaaccaataggttttagttttgggattgtttatttatttttatttttattatttatttttaatttaatttaattatttaaatttattattaatcaataaaaacccttcaataggctttggtttaaaccaataggctttggtttggaacggtggttttccaacccccaaaatcgcccggagtaactactgatttacaaatg

SEQ ID NO: 108178 - DNA, 432 bp, Heterodera glycines
agaagatggttcgcatttcacgagcaaatgtggcccgaacataacggaccacactgtcgtgctcccattccagcatcccgaaataagcacgacatgccaagtcatgtgcttggctgggagaaccaaattctccttggtgggacaactccattacatcccactccgacaacagtcagaattcggagcccgagtctccgaaagcctcgaagaggccagcaactcaggctgggctgacttcagtttcgactggaactccacttttcatgctctgtttggccttaaaacaggcctaattttcttcattgtcttgatgatcggcattcattggaagaggctccctatgaccaagaggggcccaacaggggatccccgtctcgacggttcttcgaggccattggcctccgaagaggcaatccgaatgttggcgaaatg

SEQ ID NO: 108179 - DNA, 114 bp, Heterodera glycines
aaaacgaaatcgctttgataatggttaaacgacggtagtttatttaaacaaatttcactaaggaaaataccgaaggagacgcgtcccgtgtgaagagcgaacccgcgaaatatg

SEQ ID NO: 108180 - DNA, 304 bp, Heterodera glycines
  unsure (1)..(304): unsure at all n locations
tgatcaattccgatttcctaatctaaattngaacaaaaaatcataattttaaaaattcaaaatttcgatttttattcgagttcgggttagggattagaaattagtcaaaatacatgtcagattcgtgattagcgacctttaaaaccccggataaaaaattatcatggttttttatcttaaaaaaattttgcaaaacaaaagggtccccccttttgtttcaaaaactgtcactttcaatatagtgccgaaaaatttattgttattttcttttgtacccatttcgtacctacatttgacgaaaatg

SEQ ID NO: 108181 - DNA, 153 bp, Heterodera glycines
ggtagagaagtgtcattagacaagctcccaagccatccgctggagagcttctttgcccgtcggattcgtgaggcccaactcatcatcattgatgagatcaccatgcttcacaacacggtgattgaggtcatcgaccgagtgtgcaaagagatg

SEQ ID NO: 108182 - DNA, 702 bp, Heterodera glycines
ttgggacaaaacttaattactttggcaaagtgccctcctccaacccaaaaaaaattcaagtaatagtttcaagtttttaaaaagaattgttaggaagtgctgaattaaattttgatttcacaaatccaacatctgccactttctgggtcatttttcagaccgattgcctttgggaagtttcaaaatttaaattatttctggcgaaatgccctcatccaacccaaccaagtaattagtctcaagtttttaagaaagaatttatcagaagtgcggatttaaattttttttttaagcagattttacaaatttaacatctgccaccttcagcagggggtggtcatttatcacaccagccttatagagatttttaaaattgaaattttgtttggcgaaatgcactcctcccataaaaaacattccaactgtgcgcaacaaatgctcaacaatggaaaaaggagacatcaccatagcagatgaatgggaatgaataaatgaatgaatttgtgtgtcgaaagcatatgtttgtgccccgcattttatgggtctgttgtgtgttatgtttacttttgtatttggcgcgtgaataaatttttttttcgggacggggacaaaaattgcgggggaaaaataaatttttgcgggggtggaaagcaatgtgaaaagtcaagaatttatttcctctttttttttgcgagaataatg

SEQ ID NO: 108183 - DNA, 1003 bp, Heterodera glycines
cttcattccatcaaaaagtgccattctcttcattccacaaaaaagtgccattctgtcttccatcgtttgcgcgtccttttctatcgattacctatttttgtatttttctgctgtgctcagacgaataaattttggcttctctcctttcttccatggaaaaatagcacatcaaaacattttgaagaaaaaaataaaataaaaattattttcactttttaaaatttaagttttttattaatattctcgaaaaatttcctagaaacttatttatgaaattttcggtcgccgtatataattactcacacccttaaagcatacacaaccattaaaattatgacataaatatttaaaataaatcctacattgccattaatctggtttttaacttgttattttatacaataattttatgcttgtgttgagcgtatacattttttttcggtcgcattaattaagtttattgtacgcgattctgccatatcttctaaataaaagggcaaaatggcaccaactttttccaaacaacattcattcacggcactgggctccttcattacatattgcggcacaaggagaagcgcacggattgcaatgaaagcacgcaaatatccaagaaaaatgtattattatttttaaaatgatgacaatgttaataggtttaataccaaatggccaattgatagtgttctgggcagattattaaaaaaatacgatatatttgacccgttatcttttacacagagctctgttatactatctgccaccgtataaggataccgtattagctgaactttcaagtgacaccaaacaattgaaaaaatcatttccttaaatttgatgctgataataaaaaaataaataaattggaaaattttcgaaaaatatcttagctaggggtaaatgttttttttttaaataagtattttctaccgaagtcttttgaatggtgagtttaagaaattccgatttggcttttagctatgtttgcagtgacatttggatg

SEQ ID NO: 108184 - DNA, 133 bp, Heterodera glycines
ccttccgattgtgaaacggtggtgaaagcgctgacaggactaccgtgttaaaacaacatacaaagacagaaatggatacaccaaaagctttgcttttggtggaattacagcacaaggagctgcaataactatg

SEQ ID NO: 108185 - DNA, 1003 bp, Heterodera glycines
ttgacaactttgaaacaggattttaaaactttaaatcaatttttcgcactgtccttccgtctgtccgttacaattaattaactagttgttcgaattaattatttactaaatgaggaagtaatttttgtgcttttaatcatttttacgatcattttggagtttgtaatcacaacacagaaattattattcattattaaacatttaataatggcaagggcaaaggcttctcccccattttcttccgccaaagtcaaagtgattccccccgccgcccatcgtttggcaataaaagggcaaatggaagagaatgggaggggggggggagggggaggagaagcactaaaacattattagaggtgtttttaaagagacaaaacaatgtttacggacagaataccaacagaaagaaacagcgaaagcgcacacaaaatgcattttatccgatcaaaatcagcttactgattgataatgaagttgcatttgaatacacattttaaccaatgaataacccaatcgatggcacgtcgtttaatggcgaaaaaatacagtatttaatttatggcttatagacttgggcccggcttcctaaagggtcgatctctttgaaagcttcaaaaaagttaaatcattaaaaaagttgtttatacatttttttaattttcaaaaatttaaaaatttttcgcaacaatttcaacctcaccattttcgccatttgtacgagttcttatgacacaatttcttttggggtttttcgccactaaaaatccgggcataattatgaaaaataaaaatgtaattaaaaaattgccgttcagattattgttaattgattattgcttttgccttccaaatgcttagaaagcttttttatctcataatggtggcactcaccggaacagttcagtcaaaacttcaaaataaattaaattttgattattagggggacgggggctttttcaatcatttttaaaattcgataaatggccaggtgcagcagacaatg

SEQ ID NO: 108186 - DNA, 546 bp, Heterodera glycines
aaataggagttaagcagacgctttcacattatgtaatttatgtgcaaaattgggagggcagaggacctttaccgctccgttaatttatgctatgagaatagtaattgtaaaaaatgccttcagcgcgccctttgttcattttttaaaattttgaggtgtaggcacaaaaccgaaaagtacctttaataattcccaactgatttaagtctgtcggcacttttgaaaccttttgcatatttgtgcatatttttgcatttcaggcatattttattagcatagttggatattaaaaaaatcttctcttaaacggctacttttaatatttagttttttttagagatttttagcttaaatttaatgagaagagttttgagatattttacactgaacttgataaatttatgtgcattcttttcaatttttggttgattttatgcgtataatttgcgattttatatggataaaattgcccacccttcatatgagaaacaataattattagtaatcacgaactctctggcatcattattatttttttgattaatg

SEQ ID NO: 108187 - DNA, 756 bp, Heterodera glycines
gctgcaaaagcaaatttcaatcatacatatacaaggggtgtctcgagacacccccccccccccccctcgttcgtcgtagggggggggggtcgtcgcggagtgtggtcgtaacgaagagggaaaatttccttagcgaaacatacaaaattcaaaaaaattttcccggcggcgcctacgcaaagaaaaagagtgtggctgaatagaaaaaaaagaataaatataatataaagatgtgagaaaacgcggatgcttatatggagagagaaagcgtaggtggagcaattttagcagagcgacaaacaacaaaaaagagtgactaatactaagcacagaaatcacatcacaggaatataaaaaatcacaattattcaaaattatccaaattaactcaattaaatttctcttcctcaatttccttccatttctctctctctctctctctttttccctcatttcttctttttctccactttcttagtcgctttggcgacagcccttgggctgagacaccccttgtacatgtatgaatggcacacaattaatcggaaacagtcctaattggttctaattaagcacacccttctgccggaccaagccctcgaattggccaaggccgcttctcaagtgacgacagcgaacgcaaatcgcaatcagcgaacggcacaacaacagctgcaagcacccactcaaaatggtggggacacttcctcctcttccacgtcttccgttgtcagtgagcgaaggacatcacaaatg

SEQ ID NO: 108188 - DNA, 306 bp, Heterodera glycines
atcattgttttttcagttgatattacctttctgagctttttaattctgaaaaagaggtaatactgaatgcttgctacaaatgtaaactgcttatttcttgaaaaccttaataaaaaatatatttttaacgaataattaaattctttgttgaaaaataggttttaattatctttcaggcgaattgtaaccagctgactaatccagcagaagccatagaaaagtgatcagaatttaaaaagggaccgaatcacgcaattctgtcattttttggcatattgatacaaattggcatttgcagctcaaatg

SEQ ID NO: 108189 - DNA, 157 bp, Heterodera glycines
agtaatattattttatcttattttttaaataaattgtactaaagcttgatatttttcgtattagatttaataaaattattgaattttattaataagtaattcttttaatttaattagtctattttaattagaaaatcaaattaaggtttacaaaatg

SEQ ID NO: 108190 - DNA, 278 bp, Heterodera glycines
  unsure (1)..(278): unsure at all n locations
cacacaatataattttcaggttttcacttnttttcccacttccgttaagtaagaaaatcttttattaaagaaattaattgcgataatttttttctctgaattacaaaatcttaaattttttaaatgattaaaattaattaatgaaataaagaagaaatttttttatgaataatataaaatgttgtaaaataactgaattactcaaccaaaattttcaaataaatataaatattttaagcagacaaattttcataaaacttatttttacatcaataatg

SEQ ID NO: 108191 - DNA, 234 bp, Heterodera glycines
ttttctaagaaaaaataggagttttgggggcgcagcggtgccgataggcgccgccggggaaaaaattggaaattttgatcatttataaacagtttttcactgaaaattagccaatttataggtaaaattttgaaaaattttatgggaatttaatccaattcttaggggtgtaaaagtcgcatttcgcgccaaaaagcgaaatgcgaaaagcgaaatgcgaaacgccaaaaaatg

SEQ ID NO: 108192 - DNA, 888 bp, Heterodera glycines
ggtcagttttgagatggcaattttttaaaatttaaaaaaaaaaaaaattaattttaatgccaaaaaatcatgaaaattttaaaatagtgtcggtgaaaacaaatttttcattagtttgcgaacttaattgcaaaaaaataaattaattatttgtttgacaacttaaaaatttctcttctaccgaaaaaacgatttttaattttttatgttttttgtcacaaaacctcgaaaatttctttaccaaagtgacttttctgaaattttttttaaaaggtcggtcttagggggtgcaattttttttactcttattcaattttttatttaataaaattttacaaactttgaaaatactaaaaaaacaaattaaaaaagcataaaatatttttttcaatgtttaaaaaaattaaacgcaaaaatgtatttatttttgagcttatttcttaaaaatagagcaaaaaaaaaacaaacaaacaaaattttgacttaatattgaaaaccaatttttctgcttttaattttggaagggaaatttctgtgttttttgattattttttaatattaatcaaaaaagaaaaatttaaattccataaaatatcacaatgaataattgtatttgtgttttttgtattcaaaatcatcgcacccttaaatatcatatcgtttcctattttaccgtatccttttttgctgaaatactgtattattgccgaactttccaaaatcggtgcaaaccaaattttcactgacaaatgagtttaattgcaaaagtatttgaaaaccaatttttctgctattaatttttagaagggaatttttatgttttcaaaatcattttaatatttggatgataatttaatcaaggcacttttatggagtgccgtgtaaatg

SEQ ID NO: 108193 - DNA, 733 bp, Heterodera glycines
  unsure (1)..(733): unsure at all n locations
agtgacccccagggaaaagggagggggaaattcattaaaattaaaaaaaaaaaaatttcttgacggtgcctaatggggcacagtcggatgggacggaccatcatttgatcatattttttgaaaatttgactccataaaatggaaaatgggttactttttaacttttttttttttggcttaaaagcggctaccaaatttcttattcttctcccaggggtttaaaatttcgaaaaataatacttgaaaaacagtttttggcatgatgagtaaaaaaaaaaaagtctccggatttccccgacaaaatttctttaacgaaaatggttaaatttttaaacagtatgccatttttttaatgaatttcgttgaaaatctcaaaaatttaatttttccatgttgccgcctattggcacagttggaccacaaaaatattttttttattnaannnaaatntnnaaaatggnnnnatttattaaagtnaaaatnagtnnagaaatggganttaattnntaaaaatgtggnnaattttntaagaaaatttggaaaaaaaaatttttggggaatnaaattttgttnaaaagttagnaattttttttntttttgtttaaagtngntttggnnnanaattattttttttnattttttntgtttttgnagngttaagntgggnntgttttgtggnannncggnggttnngttgtngngaaatgtgnnannaaaaattgggnttganatg

SEQ ID NO: 108194 - DNA, 908 bp, Heterodera glycines
  unsure (1)..(908): unsure at all n locations
agtagagctcggcctgtacttggatccaggcctgtatttttcctggatccaggtacaggtacaggcaaattttcggcaacatgtatttttcctgtacctgtattttcctgtacttttgtccagaaaatacaggtacaggccaattgggaaatacaggtacaggtacatgtaggcttttttcaaaatataccgagctctagatcagagttttgaaaaattccgcagtattttcaaatatgtaaatatataacgccaaaacttaatgtggaaaattatatttgaaaaattctgcgtttttcgtaaatttatcgggatttttataaatgtaattcctgtcctagttaggtttttgatttttttataaatacagctgggaatgggacctcaggcccccataagtttttttatttttcgctttagggcaaaattcacaaatgtttaatctgtaatttcgattttaactttgaaagagcgagagagagagagagagagaggaaaaagcgagagaaagaggaaaaagagaaaaagagagagagtgtagagggacagagaaaagaaaaaaggaaaatttgaagagagacgggaagaggaggagagaaagagagagtggaaggaacatttaatcgattacttttgctgcatgaaatgaatgttttgtgagttccgttagttcagttcatgtgactaaatttatccgaattatttgggctanaccacaatggtaaatcactgaagaatggatgagaaagccccaattaggattgtttttactaattattaaactaacaaactcagagagtctttgctttgtttaattattctttttagaagttatatttaaacaaagaaacggttaagctaccagcagtaataatacctactaagtcagttgttttctgtcaccaatg

SEQ ID NO: 108195 - DNA, 89 bp, Heterodera glycines
actgaattctcagagtccttgtaccaatcgtgaaattcttggatcaaaaacattctgccgttgtcgattccaatgtagaaaatggaatg

SEQ ID NO: 108196 - DNA, 975 bp, Heterodera glycines
aaaaaatcagagaacatttgaagcgaagaatggggagggggctttaaaggagggaaaagaaagtgttttatccgctaaattaaaatttccatattttctcaatagtataaattgcccttatttcctcctaactcaaatttgctatgattctttattttcccattttaattaagccgaattgttgcactttccgccgtttgcatcggatgcgcaaaatttcatcgcactaatggcctcatcactgactccaaacccactaattacggtatattaaataacttagcccaaatatctgagtcaaaagatatttcttgttgaaagggcgtacttgaaaactagaaaatcacataaccctaaacaatgggagcctatttcaaagggtttaaggacataactttaaagaattcacgcggaagcttctgttctggtaagttgttgttccaactatgtccttgaaaataagacccaccccaattttctgggaattaaagtacatgttttcaagtacttatagcacccatgcagggctgcacgaaatttcgtgtcgttttcgtttcatcctacattttcggcactttttgagttcgttttcgattttaaaaattccatttttcgtctcgtgtttcgttttcgagttttaaaatttaaaattttcgtttcgttttcgtcagacggaattttgacgaaaaagacgaaaatatttacacccttaagaatgacttttttagtaaaaaaaataagtgatttcattgaactgttgtagtttagtcgtgcacacttcagatttttgttgtttttttatatgggttcgtcccatatgcccgcactctcgagctatcaaatttttttatatctggaatttttgtaattttttttgtcagcttgccccaacccattttgagtgtcatggaattgtaaaattgtttaattaatgaaaagcacaaacataatttaaaggaatcaacagttttaatg

SEQ ID NO: 108197 - DNA, 571 bp, Heterodera glycines
aaaaccctttttttaattcaaaaaatttttaagaaatttcaagaaagaaaaaattaggaaatttttttagcgatttttttcaaagtttaatgatgaatttttaaaaaaattgcaaaataaaaaagtttcaaaatttttgaaaaaactttcatttattttttttcttgaaatttttttggtaaaaattttttaaagaattttgcttgaaaatttctgtttgaaaatttttttagaagcattcgacggcgagattttgtagcgacttcgggcggcgagattttgtcccgccccataaaatagcataactaaaactccaaaaattattaatttataattttcataattatgttaaacatttaagcgaatcttctgagcttgatcttgacgccagttttgtgctagaaaatgcgcgtttaaagctgatcaaatcccatgatcagaaacaatttgagaagttgatgcacagacggcaatcattggcgataaccgtttccacgaaaaaagtaaaataatcttttatttttccatttaaatatttattattattattattataatttagctaaaaatg

SEQ ID NO: 108198 - DNA, 1003 bp, Heterodera glycines
tggaaaaatgcgccgtaaaaattcttaaaaatctgattttttgatcccgagtgcactgaacactgaaatttacgatttgttaatttcctcaccaaaatttttaaagatgatcatgggaggtgaaaaatataatatttaatacatttttgatcgaataaattgtaaaaataacgatctgaagcaattttgcaaaatgttctgattttcgaccccaaaatctgattttttggacccgatgttctgattttgaaaatttttcgatccgaaccctgtgtgcaaatcgatcagatagatggacaagtgcttgggaagcagggctggctggccgtaactggattttcaattatggaaatccgtaattacggcgaatttctcaattatggcttccgtaatccgcagggctcccaagtgtgcttatttctaagatttgtgcttatttcagcattacgtgcttattttgggatttgaaaataaaaaaatgcaaaattttaatgaatgttttgaattatcgttttttattgaagcgaatatttgaattactaattcgattttgaaaaaattcaaatttatttcgttttattgagtgaaaatacccaaaatttcagagaaaatctgtaaaaaacagtcaaaatttctatttttcctccggcggcgcttttcggctccgcgggtccccaaaacatttgttttcttaaaaattggctcaaaatctcaaaaattggtcattttctggcggaactctgttaacaaattgggcgctacttaaaaagagtattcttttgaaaatttcacttttttttggtcaacatttttttttgttttgtttgttttgatacagaatttgtttttttaacagatggtacgaatgacaaaaaaaacaacaaaaaaagtgaaagattttgaattttatcaaaaaaccaaaggggggaggggacccttttgttttcaaaattttttgaaataaaaaatcgtgaatatacttttattgttgagtcatgttatg

SEQ ID NO: 108199 - DNA, 924 bp, Heterodera glycines
tgatcatttcttcaaattacttatatttcatccaaataaataaaattattaattgttaatttttcataatgcattttgaagttttggggtgtccagatcacaatgaagaagagatcagaaattgatgtaaaagactttttaatcagtgtaaaaaagaaggcagaccatattttctttaaaaattaaacattatgccaaattaataaaattcaatgaaaaaaaaattccgttttgttcttcagattttgattttcaagatggacagtgaccgagtttaggcgggaaattttgccattttatcaaggacagatcaggctattaaaataaaataaaccattttttttcaagccaaatttgagatttttcaatttgtcaaaaaacgacacataattgtgcaccgaccaattaacattttaaaatgtatttatttgacaggataatgaatttacggccaaaagcagtcaattttgacgatgtgtggtcaaagctacgtgaaactctcgaggcgatcatttctctcaagccaattgagcgtattacctgggaccataattttaggtggatcatttagttttttttcttctattttcacgccttttagcgatatatactttgtttgtgtgagcgttcccgaggcccaatctcgacgactttatacggcggtcaaaaactcgttagaactacacactatttcaatccgagaggttttgccctctgatttgtcatttcatctttaccacattagtctttgctccgtttgtccggtgaccaattgctcagtgcgtacaacagcgaatgggaaaaatttcacaaaggcgccatttatttgcataatctttacgggtaagaaagcgaaaatcatctaaaaaatatataaatttccccttaagttatctgaacaaacaattggtcaaggaaaaaatg

SEQ ID NO: 108200 - DNA, 156 bp, Heterodera glycines
ttggcatttattatttttaagagcgcatcccatcacatgccattcaggtgcttattcatccattcattggcattttgtctcacttccccccaggggatggtctctctgcgctccttggatctgtccaacaatgccatcgactcggtcggcaaaatg

SEQ ID NO: 108201 - DNA, 401 bp, Heterodera glycines
  unsure (1)..(401): unsure at all n locations
tgaaaaatgtagtanccctatgaaattaattgtaaagaatatttatttcgatcagtttcgaggatttatctttgataagtgcatgaactttaccgacaaagtgccgaagcaccagcggcacttgtgttgtacgtgccgtgccgcccaccttcattcaaacatatttttgtaaattttttttgtgttttactgtatttagtattagcccaccaatcgttagctcaattttaaaggaaaaaacatttttaaaaaatctctgctgctgtcgatggggaggaaagagtgctgctgtgcaaatattgggcctaaatgatcgcggaggagaaaaaggggtctttgtcttcccattttccttggcagcctttgcgcaaaatttggccaaattctaccgccatgtgatg

SEQ ID NO: 108202 - DNA, 192 bp, Heterodera glycines
atctgatccgcttttccgttacgcatatttcagtcccatccctttaaacagatcttcaaatggcgcgttttcatcgatggtcctccggaaacaccatagtgagtgggcggcggcggcagaggaaaagtgcaaatcaatcaaattaattgtttccccattaatccctcctctccccttttttagcgcgggatg

SEQ ID NO: 108203 - DNA, 198 bp, Heterodera glycines
  unsure (1)..(198): unsure at all n locations
ttttgacccaaanttcaggtcataatccttattatttctgatccgcaattgattgggcacataaatgagncctagatggactggtattgtgtctcgttgggacgcggataggtgttaactttttcgaaaatttttttaaattaatttaattttttcgattatttttaaataaattattttttatttttttggtatatg

SEQ ID NO: 108204 - DNA, 1003 bp, Heterodera glycines
aaagaatcaacaaaagcatttcaaagagaaaatgatggcataaaatccgtttcctattggcgagatcgatcatttctcaaaaataattaattcatttccacgcaattagacgacattttcacaaataaatcattcattccgctgatccacttatttgtttttccaaaaaatgccgaaagttatttatgtccatattttgcgatttttggtccatattttatggccatatttcgcgattttatatccatatttttggcagccctagtgggtcggggtcacttcgccgcggccaactcgccgcggccatctcgccgcgagaaactcgccgcgtggccaactcgccgcggcgctatctcgccgccgcccaactcgccgcggccaactcgccgcgccttgttttttggctatctcgccgccagatttttttcattgaaaggttacctcattattttgatataaaattaaaaaatgcattaatttatttcataagaatcattaaaataacaaacactggtccataacacaatttgattcttttcgactttattcgaattcaggctggtgttataaataggttgaaatggagtgctcagtagagaccggaaatttcaaatttgcggatcccgctgcgggattggaactcaaaattctttgcgggacgggatcccgcgggattaatcccgcatttaaaaaaaatgtgggattgcggactgggatcccgaaaaatcccgcgcgggatcccgtcccgcgccggtctctagtgctcagcgcctcaaaatacccaaagaaacttgttaaagaattcccagaaaaaaaaaattcgggaccaatgaccgacatgattgctctttaaaactttgctgaaatataacacattgaatacaattaactgttaaagaatttttgcttttaatgcatttttttaacgaaaaatctggcggcgatttgggtatataatgaggtcaaaaagactttttcattcataatacatatcgcaaaaatg

SEQ ID NO: 108205 - DNA, 307 bp, Heterodera glycines
acctcctcagaaaaggggggataattagagactggccgtttagtgtagagggattatttttcaaaacacctcgtagactgtgggataattggagactgcgggattaatagagactgggctataattagagcatatacggtaatttgtaaaaaacgtaaaactattttatccttcttttgtaaaaaaacctaaattttgcatttaacttttataaatgtttatattaattttgattatatgaaattaaaaaattaattaattaaattatttataaaatcaggccgaatttctgacacatttgccaatg

SEQ ID NO: 108206 - DNA, 159 bp, Heterodera glycines
  unsure (1)..(159): unsure at all n locations
aaaatgtgaaaattgcgaaagccatataaggtcctagccagtgttaatggtaatcagtattataatattgtggtgtttntaatttttaagcaagatgatcaattattntacaaaaatccagtgaaaaataattttaactaatttaaatntaacagcatg

SEQ ID NO: 108207 - DNA, 81 bp, Heterodera glycines
ttattatttttaagtttacaataactctaatcccaaatattatcaatcaaaaaattttagtgtgctgttctcgcggccatg

SEQ ID NO: 108208 - DNA, 54 bp, Heterodera glycines
aacaacgccggaggcaccacaggtgggagagggggcggggtgctttttaaaatg

SEQ ID NO: 108209 - DNA, 66 bp, Heterodera glycines
ttgacccgcttgacacgttgtttttaaatttttatttcttgaaaatccatttgtagcagtaaaatg

SEQ ID NO: 108210 - DNA, 594 bp, Heterodera glycines
ataaagatagacaacggaaggaaaggcgagagaacgcaaagagtgttgccccaggagagaaaaagcgagaacagagaagcaaagacaaggagtgtgcacgttagaagaagaggaaagtgagacagtttagcagacacttcacaaaaccccttgggggaccacgaaaagcgaccgaatcattgtgaaacgacgaacgcaacgcaacgcaaggcatagagacaataaaaaggagagagagagagagtgaagagagagaaaaagagagcaaaggagagagagagaaggagagagagagagtgaagagagagagtgaagagagcataggagagagagagaaggagagagagagagaggagagagtgagagcgaaaaaaaaaggcagacaaagcagaagagataaagcaaacgcaaatgagagaaaagaaaaacggccattccttctgctgctattgttagtgccgggacgaagcgagccaaaccaagttcaaagtgccaatgcgacgacggcggtttttgttcaatgctaatcagctattgctcactaattaccccaaataacaaaactatgcttctcccaacaatggcccccaaatg

SEQ ID NO: 108211 - DNA, 932 bp, Heterodera glycines
ttttgctaaaaaaaagagaagctaatatgaatataatatattaaaataaagttgatggagagaaaaaatcaattaatgtaagaatatttctgttgagaaaggacgaattgatttcgaaattttataaaaagaaaaaaaaaattttttttagattacaaaaaagcatttaaattttatatccatttagtaattagagttttgagtaaatatttgaagtaaattaaggatttaggcccggagacggtgaaagatgccaccagggaaaaatttaccaaaacataagcgctaatagtctataaaatttcatagattttatacttcaaaatttttgcaaaaatatgcgtgttttcaagtttgaaaaaattcggtttttttaagtttttaaaatttgcatgctgtatcatttatggggtccactgcgtttcggcgcgctcgtttcggcgccagcatgtttttccactatagcttttttctttgtcatccaaatccaacattgttgatatcattcgaaagctaacatgtttagaagctttttctaagctattgattcgccgttagacaattaccaaaaaagttatacatgaaaattgcaaaaagtcgaaatttttgaagtttttttattaataagagttttctaagtttgaaaatcttttcgcttttggttaaggctaataaagcatttcgaatgataccaagattgttagatttggatgccaaagaaaaaagctatatctgacaatacaaaataataagaaaatcagcttttacaatcttgtaaaatttgaaatcgaaattttcggtctatttttaatgcctctttgaggatatatgcatatttattgcgtatttttctaccctttctgcttattcagttccaattttagttttaatataaaaaaggcatggatttgatattttcagacattcgtatg

SEQ ID NO: 108212 - DNA, 131 bp, Heterodera glycines
tcgttcataaaactgcatttggtcggcattcatcagtgccaatgatgccaaataatggtactaccactttgccccacattttaatttttttttgattttggcatattgtccttttaggcattgtgccaatg

SEQ ID NO: 108213 - DNA, 600 bp, Heterodera glycines
aagttcttcgtaaagagcgaaataggcacaaaatgccataaaaatgacctaaaacagaaatgtttttcctactatttagaacattggagaatcgaggaaaatacaatatgtattacataaaatttgcgcctctactaattataaatttttcgtcatttaatttaattttcttttgctccacaacaatgaaaatttaaaatacaatatattaatttttttcttcaaactgtctaattcaatacatcactttggatttttttttgcctaatgttagccatttttttgtgatgacaactgattgatgaatcacccaccaacgatactgctcagaataattaattgcaattacttttgattaataaaagatcacattaaatttcccaaaaaataaaatatgaaatttttgtaatataaattaattaataaaaataatattttaaaaggtcattgaatgcaaatgtaaagttgtgacacatttgtcaccttcccccgctccccaaatatcaaatgcattttcacaaactttttgattctattaattattaaaataaaatgctttttactggtacaaaaatattttttagagtatcaatgaaaatg

SEQ ID NO: 108214 - DNA, 653 bp, Heterodera glycines
aggaaaagccaaaagaacggagtcattcggcgatggacgggtgaggacggaatgaatggacaaataaggggtttaccattttgtagttgtgacacgaatcggacagtctcaacgcttgtcctaccgcctgtttcgcccacccgcaccgttattttgtccggcagcagtttcgacaccgtccgattgaatttctccaagtaagaaacagtcgtctcaataatttatttggctgcttttgaagttgaacatcatatatctccatgaacattcaattcgatttccttagaactgaaagtgattcgattggtcctcacaatcagcaacattcgtccgtttgcgctgcccctcccttttccccctcgccggatgctcttcccctctttcctccgccttcttcctcccgccttttgcctccctcttccaccgcttctgtctcttcgcccgtttcttcacggattcctgtcaatgtttcgtcgctcactgcgcgttcagcgcgtcaccgccaattcagtacccttcaaaaaagtgacatcgaagccattcagcaacaacagaagaagcaatcgctgcgaccggtgctgtcatcgtcaaagtcaacggcggggcacaggcacaaaattatgcaaaacagcgaacggaaagtcggcgcaatg

SEQ ID NO: 108215 - DNA, 1003 bp, Heterodera glycines
  unsure (1)..(1003): unsure at all n locations
ccgcgccgcgcagcgccgcgggaaggtcatcaatcatccacctgtcaccaaagtgacaggtggaggaaattcaatttaacttttgcaaattttaatcttttgtttcaaaaccttttagcgttttattttctcaatcctgaaattttttttatgatgattttttgatcctgaaattaaaaattctttttgaaaattagccaaaatcgtgaggtttttttcatttccactcactccctgccgatgcgccgcgatgccgagtcgcgcgcaaaaaaaaaaatcgataacggaatttggaagaagtgcaaattaattgatattggcagcaaataattttgattatgaattggacaataaaattactatttaaatccaatttaaaagtaaaatcaaagaatgaataaataaattaaaaaactttttcaaaagtaggtcacctgtcaactaaaaattgattgatgggttttttatttttcttcccttatttctcaatctgcacgtgactttttgttcaaattatttcgcaatatctcccctaaattaggtcaactgtcaataaaatgtgattgattggtttcttatttaaatgtctccattatttttgggtccaactatttcgcaatatggcccgtaattttgcaaacctgtcaaaaaaaaatgattgatgactttcgaaataaggaatatccaaacgatttttgcacggtttttgaataaaatgagacagctgtctaccgaaatgattgatgaccccctaaattaaggcaaccccagacagtcatgtgactagacccctcccctctcgcccaatccgtacacccgggccaaatcgcaaatcattcaactaaatagttggatttcattaaactctcttcacgctctaattttatttctctccgctctatttttatttgcattaattaaatcttctattanattcccgtctttttcttttcaaatctctgctctctttaattcttctgtttcaatttcttgttttaaaatg

SEQ ID NO: 108216 - DNA, 1003 bp, Heterodera glycines
  unsure (1)..(1003): unsure at all n locations
atcatcaattgttggcattattttttgccccggatgaaaatgtttcacaatgtgcaaatttattatttaaaatatttttaaaatacatacattaaaaatgacgttcatcaattattctcactcttttttgtccaattgtctttcttatttttatccatttcattaatccattcgctttcctttgaatatcccattttaatgtattattttttcttctccaattattattatattaattattgtttacggtttaaaataataaaaattgttcctttttatttaaatttgcgatataattattttttatttaattttttataatttactttttaatttatcccatcccttcgctgtcaaagaaaagatctgaagactgaatcgactgactgatttgatcagtcatagccacccgaattggttgaatcaatttcagcattttgaatcgaagaaataaatcaaaaattgttttcaacttgcgcatcccccgggggaatatctttccggatcccgagcactgctaagatcatcgagataagccttttcttccaacccgctgcccatctgtcacattttgtccttaagcagaccaaaaaaaaaattaagcacaaaactttatttattttgattttgttagttttttaaaattatttttannactaattttttaaagcttaaatcttctntttaattatttgccttttaattaatttcttttttaattaattggcaattaattaatcggaaagattgaaacaaatatgaaaattgaattttaaacaaattctttatttacctataactaaattaattagaattccaattgaatttcgaatttttccccccaaattttatttaattagcataaagcaattagcaaaatcaatcagaaaaattgaagaaaatatgagaattgaattaaaagaatttttttttaattttactaaaaaattaatgaatttaattcccattaaatttttaaatttaccgcacaattttaaaaatg

SEQ ID NO: 108217 - DNA, 126 bp, Heterodera glycines
ctttgttttccttcgcgcatttacatcatttgtttgattggtttttgcatatttgagaagcacaataattatggccttatttccccttgaggcgaaggaaaaaaaacacatttctttcacaaaatg

SEQ ID NO: 108218 - DNA, 130 bp, Heterodera glycines
tttggttataactctttgtaaatttttttctagattttaaaaaattaaataagataggatttgataggatatgtaatgcatcgcgtaataccaatttttattaatttaactaaatttaagctaagttatg

SEQ ID NO: 108219 - DNA, 292 bp, Heterodera glycines
ttttttttaatcttttgaaaaaattgttatggaaatattaattctctcgtgttggggaacgggagaagttcgttttccccgcccaaatttttttttcattttcgaatttataacggaaccactcgaactgtaactcgaaaaacgtatataaatttggtattttggttccattgttcgaaattttacaagaaaataaaacgaaaaaatttttctcgctttttttcaaaattttatgatgaatcactaaatttttatcaaaaaattgccgtagtgcacccggggaaaacaaatg

SEQ ID NO: 108220 - DNA, 971 bp, Heterodera glycines
ttggcacacttttctccacttttgatcaaaaataatgatacaatctgtttttttctgttaatggaatttgtatttaactcgcattgtttttttccttcattatgacgaataatagatataatttttgtacatctttaggtattcttgaaatttaaggtactcaacaaattaaaatttagtaggggaaaaggccactgaaattgtggtgaaatcagctaattttaaataaagtatttttcgttaaaatctcctaaaaaaacaaaaaggtttgtgcatatatcttcttgatctaaaggagggtcattcttcagtaaaattcagatttattgcataaaaattagagtgccacgggaccgggaattttgggcaaacccgggaccgggaccttttcggtttgaaaaaccgggaatttttagctgggaaaaccgggaaaaaacctggactagtcccggtcaaaaccgggaccttggtactcagttgtccgcttccaggtcccgtggcactctaataaaaatacaaaagacaatttacgcggaaatttaaaattggaatttttattatttttcaatttgaatatttagtgtacggtagattttgtgcgagatgatagtcatccactactatgcttcatttcattcctctctctgtctcattccgacatttttcacttccactaccaattcagtaaatcccaaacatttttcaatttctcttgtgagatttaatatttgggagttacttagttttttatataaaaatgtatgaaaatacagtcgtttaagctgggtcaaaagcaccaaattttatgcaaatttagggttactattatttatgccaactaactcatccaaagacaatctcatccaccttaagctcgtttatagaaccatttgatatgcatcaacaaacaatttgaatttaaaaagttccaattttcagcccttgattgttgtaccaaataacttttcatg

SEQ ID NO: 108221 - DNA, 91 bp, Heterodera glycines; identical to SEQ ID NO: 102829

SEQ ID NO: 108222 - DNA, 139 bp, Heterodera glycines
ggacgtccttggcatccaaggacgaatgacactcctggcataaacactacaatttctatttcccttacattttttcataaaactcatgaagaattttattcaattttagcgccatcattaaattcggagtttcaaaatg

SEQ ID NO: 108223 - DNA, 326 bp, Heterodera glycines
tttcgtcggggcaaattgttaagacaatttccggcactttttcaattttgcgatggcttcgttgttttggtggttttttgaggcggtcccaatacttcaaaagaatggcacaacaaatcataaacattggcacagcgacgtttttgtcgttcgtattcgacgccttcttaaaaccaaattttcaacttttttggctcgaactttttttaaacttaacaatttttttttagaattttgcaggctaatagagcatctgaagggctcttgaatgataccaacaacattggatttggttggcaaagaaaaaagttatagccaaaaacatg

SEQ ID NO: 108224 - DNA, 706 bp, Heterodera glycines
tgtctaaaatatggaattttttcaaaaagaaaccggaatgaaatttttaacactactttggcttgtgaaatttaaacaaaactgtattcaactatttttgcttgtaaacaaaaaagttataaaaaataaattaattaatttgaaatttgtggcaaataaagccaaagtaccattatttctaaatatactcgggacaaaacggaattttgccttttctcaccgtatctcttttcttacatttacaaattttcgagactttaacactcgtttggtaccaaaaattatgttttggcaattaagaaaagagttaggcaaggaactaagtggtcattatgtttagaggattttgcttttcttgggtgccacccccccccccttgaacaattctaattagcccaaaaatgggtcgatgtgtggcaaagaatatcagagttcctttagtcttttgtgttttgatgaaacaagtttaaccggacggcaccgtgttttgtgaattgaataattaaatttatttgtttaattttatcgattactgtgagtttttcgtgcaacgcccacactgagcttttttgtggaacgacctagcaccttgcaaaactacgatgacaaacttgaatcagattttttgtaacttttggatagagaatctttaggactattaagtgatacgaagaatgctctgaagttttgaactcacttttcaatg

SEQ ID NO: 108225 - DNA, 501 bp, Heterodera glycines
ttaacctagtagcggtcagtcattaagcgctcaaattatcacaagcgtgcgctcaaatggcccctgcgggcgctcatgtggtacgcgcgagtgctcaaatgacccggcgtcgcttccctcccgacagctgacgccctttcccttctccattaggctttggttttgcgaattatttatttttatttttaatttaatttattttttattaattaataaaaacccttcaataggtttaggttcacccccgcacccatctaataggctttggttcactcccacacccattcaataggttttggttaaccaataggctttggtttggaacggtggttttccaagggccaaaaagggggtagtaactactaattttattgtctttttcaactgcataaaataaagaattttttcttaaaatcaatttttttaccatcactattttgtttaaattctaaatttataatattcattaaattaaattaatttttatattatagaaaaatg

SEQ ID NO: 108226 - DNA, 62 bp, Heterodera glycines
tttgatacacaaattttttttattaaaaattttttttttaatttcaacaaaacacaatcatg

SEQ ID NO: 108227 - DNA, 74 bp, Heterodera glycines
aaattttaatgcatttcataatagagaccccaaaaatccattcctaggtgagcgtggttgcgcgacgaggaatg

SEQ ID NO: 108228 - DNA, 245 bp, Heterodera glycines
gctagttgcccaaagtttttgataaatcttgaatttgaagcaataagcagatttaggtatatgaaaaaagctacacagaaaaagagaaaaataaaagctgtttttttaaataaatagtacgccaaatgcgttttaaattaatatttcactttttcctttttttgtttaaaaattttaacgaataataattttacattcaaattcgttgaagtttcattctcgttgttgtacgtaatcttgtaatg

SEQ ID NO: 108229 - DNA, 197 bp, Heterodera glycines
tttcgatagaattttttgaaaattttgcaaatgaatcctgattttgggtaggtgaaggttgggaagcgaaaaatgggcggagcttcgaactgtcgaaaagtgggcggagcctagtcgaatgaaaacatataaaatcggcacgcttttgaacttccacacgatttcgcaaatcattcttaattttaccaacaaaaatg

SEQ ID NO: 108230 - DNA, 318 bp, Heterodera glycines
aaaaaaaacacttacgattcccgccccctcctatgcagcgccgacgagaaagtgagaagtcattgtgtccgttgttgggcgcactgaagtcgttcgttcgttgattgggtgttgtgtcagcagcaaatgtgcaaatggacaaaaattctccccttttatatgcattttctgttgcactttttttcagtgggaaatttgaatataaaaaggcgtgaaattgagagaaatttcattctcgtcacattcttaattctattctctgcactattacatctaattgctgctgctcatcgactccatcgacaacgacacgcgatg

SEQ ID NO: 108231 - DNA, 1003 bp, Heterodera glycines
cccgaaaactctaaataaaataggaatttaggcattataaaagtcatcgtagacaccgcaaatcaagcggaaaatgcgtttttcgtgcttatctgtgcgtatcaagtgcgctgaaattttaggcatttgccaaaaaacgaatccctagtgatattaaatgaaaaatttgtgagcgaaattaagaaaattttgaaaaccaccaaaatataaatatattgtaattggattattggaagtatcaattcaaggttaaaagttcaaatctttgtattactttatcgcgtttcgtttttcaatacattctgattcattgaagcattttcaaccgacacgacacattcaattaaatgatgaaaataataaagaattaacaaaatttatttttcaacatttttttgttaaaaatttaaaaataaaattattttctgcatttattattgatagaataattgctggaaatgatgttactttgcaccgttatgatgccaagaacgcgaccattattttgatgttgttagctccagtaaattggacaccaatagaaaattggaccctaatcgatataaaataaaaataaaattttggcatagactaaaagataagcattatcttaaatgtctgttttttcattttttaaaagacgaatttggtatacaaaattcctgtggtttccattgtcaaattttctggtgtctatttattttaactttttatagaatttaattagagtgtcaataaatttttccttaaccagattatatttcttttaatttgtataaattatttttttttaaatttattttacaacatttacgaatgaaaagggaaatttaaattattttattttatttttaatcaattattaatcattaaaaatacgttgcaattggtatggcatttctcgtaataaaagattttttcatatattccatttataatataagacataaaagctgaaaatcaaaactaatttgtttaatgaatttttttgattcaaaaaatg

SEQ ID NO: 108232 - DNA, 193 bp, Heterodera glycines
tttataggaaatagaagcttgtgtaatattttacgagattcttgaatatcaataaatatttcaagaaaactgaaaattttgcaatttttatttatttcatgacaaggacacaaattttttatgttttttggattttaaaatacataaaaatttaaaataattttatatatttttaaataaaaaaaaaattatg

SEQ ID NO: 108233 - DNA, 72 bp, Heterodera glycines
tcttggaattaaaagaaatttgcaaaaaataaattatgtaaatcattttgcaggcaaaaccccaaaaaaatg

SEQ ID NO: 108234 - DNA, 279 bp, Heterodera glycines
ttgattattgttccttgctaaaagtagaagaacaatttaattatatgattaagtcgaagtggggataaaatggggtcaaattgggtgtcaacatctctatataaataaagaggaagatgcattaacgtatgcataaaaatgtttattgcgccattcactctaattttgtcgggggccactggtagtggcaaaacgcaatggttgatgaaattgttgagaaattacagggaactaatagacccgccgcctgcaaaaattctgtactgctactcggagatg

SEQ ID NO: 108235 - DNA, 1003 bp, Heterodera glycines
gagttcaaaaagtcattcttcaattttttgagtcactttacttccattcttttttagccttccaaattcagaaccaaacgacaaatatatcatctaagagttcattattatatttattttgatcagtagggctggcaaaaatatgcacatgcatatttttttcctggactgtgggaggcctgaaacgcacgaaaaccatgtttttagcttgttttgaagcttctaggatgactttccatatgcatattttgcatatttgtgcatatttcgcgatttatgtgcatatttgtgcatatttgtgcatattttggcatttcgtgcatattttatgtgcatattttggcgtttttccaaaaaacctctaatagatcggcccccaacagacaaattggcctttttgacctcaaaaaccggaaaattttccaaaaaaataattttttagcaaaattttcacgaaaaatattgaataaataaattttctcaaaaaatggttaatttatgtcaaaaataagcaaaattttgcttttcaggttgatttttcgctaaaatgagtaaattttaagctgtatcgtgtttttttctcctaaaatgatttttaataccacatttagccatttttgaagattttactttatgtttaacaaatttgaagaaattttgagaaattacaccctcaattggaaaattttatgtgcatatttttcactttttatgtgcatatttttgccaaccctaatgatcagcgaactctaaaaccccggataacaaataatcatgtttttttatcataaaaagggtccccccttttgtttttgataaaattcaaaatcggccactttccgtatagcgccgatatttttttctctgcactctctatttattgacacatctcgttttttgaaacggtgtgtaatgttgtgcaaccctttccacaatgctaatgtataaaataaccgggtacttttctagtttacggggtacttttcacatacattttcagatg

SEQ ID NO: 108236 - DNA, 57 bp, Heterodera glycines
gaatttataatttcggaccagtcctttgcaataccaccccccgagtactttgaaatg

SEQ ID NO: 108237 - DNA, 1003 bp, Heterodera glycines
attaatacatggttgaaggtcttacctaatatttcaggatatttttgtaagacaattgtcaaacaaataaacaaaattggaattccttaattgtgttttctgtttaaatttaaatggctttttttggaatttcaaagcttgcgtaatttaacatgcaaaagtcaaaactacgaaatgcataaacatttgttcttcttaagctacatatattgccctcaaaaaacacttttcttttattttttaaatgaataaacatttttattttttcgcttttttatgtatgtacaatttagcgtttacattgcaaatgcccggttaaatgagtacacctaattaggtaaaaatgaaaagaaaatcatattatgtatgtataaaagtataatttttaattctatatacatgaatgaaatgaaattctggaggaatacttaactttttttttttaattttgatattattttacgctatttattgttttaaattctatataaaataaatttgcgattattagtcaatcgcatgcgacaaaaagttgtcgcaaaagccaactcagaaaaaaggttttagacgaatcaaatacatttaagatttaaacctatgaattcagtaaataaaattggtctgaacttcaaaaaaaaaaaaactggtttttggtttctaatttttgatggcattgaaaattgcattgaattcgttagatttacacgaaaacttaatccaaaagtattgataaaaaaggactatcatttgaatagtttactaatgcgtatgattggctcttattccgttcagatcccacatttttttacatttttttcattttcaaataaaaaacactaaattaagagattttcggggtagctgatcacgaaacctacaacccatttctatccccggaccaggactcgaacaaaaaatcgattttggataaatgtgaattttggtgaaaatgaatgttggctttttgttagcattgggtccgggttagaaattgttcaaaatg

SEQ ID NO: 108238 - DNA, 176 bp, Heterodera glycines
cgtttggggttggcattggaacggaacccatttttaaattagtttttaaccattttttaacttttctatgctttccctccccctcccccctttagccgactgtcccctcaccctcaacccgtgcgctgacgaggagccgttgttggatcccgaggggcgaccgcagcggtgcaatg

SEQ ID NO: 108239 - DNA, 354 bp, Heterodera glycines
agttggaatagcaattgccaaatcgtctgagaataaagctaattcccagtggaatagctgcacacccaggaggtggcattctcaattactggtgttaatccgagttggataacagccagacgtcaatcgccgaatttggagaatttctacattcaattgttaatccgagacggataacaattgcgaatcactgttaattcgagttgaataacagtgaccgtccatcatcaatttcattgttaatccggttcggataacaattgacaatcactgttaatcccagttggataacagttgaccatccatcatctttaatttgatcctagtttggacaaattataaaacgcaacaatg

SEQ ID NO: 108240 - DNA, 135 bp, Heterodera glycines
ccttaagattaattcaaattatttgattaaataattttgttctctttacttttgcggggtcgaatttgaattgtggcccaaaatttgtctcaataaaatcgccagaatcattcaaagaaatgaacggaaacaatg

SEQ ID NO: 108241 - DNA, 349 bp, Heterodera glycines
  unsure (1)..(349): unsure at all n locations
cccttaaaataaactagaaaaaaaaagtatttttgctgaaatttcgttttttacttggtgatatcccctcccaagacttacctcttccanaatttcaaaaaaaaatttcactaatttttgaaaaatccantaaaaatacnaatttttaatgaaagtctgctaaaaatggccgaaatgaagacccaaatttattcgagactcctgagaccgagagttgacccccgaagccattgctaatttctatagaaaaataaataatgattaaataatttcataggaattgttcaatgccataaaacgcatgttggacattgaaaatgaacgggcaaagaaaatgcagcaaaaaatg

SEQ ID NO: 108242 - DNA, 948 bp, Heterodera glycines
tttcttgaatccgtttgaatgtccgccccaaagacgatccatcgtattgcagtatatgcggcaaaaatgtaaacaattacctttagattacctggggattttacgtttcaatgccaaaaattatcacattttcttcggaggacatttcttgaaacaattcccagcgcaccgtgtgattggaaaagagatcagctattgtgggcgaaaagttgaattaatagcttaacaatagagtgcggcgggatcaggactaccgtgggattttacgggagtacaactccctgctcccgctattgtaggaagagcagacaaacgaacacaaagaacaattaatgctctatttttgtgcgcgactcatcacaaaattaatcgtagaattagagactccataccaaagttacagtcaaaaagatacagtaagaacatccacagtatacagtagtgtatctgtgcagatgattaaagagaagcagcattaacattttagtccttttattagtttgggaatgttttttcattaaacgtgcaaaaaaaaagatatattcaggtcaggtttttaaaataaaaaaacactcgcggtctctgttcgaacaccccttttccaaaatccaaaagttttggttttaaatattgccatttttgtcctttttttcttggacctccgatggcattctggtaaatgacacacaatttagtgaattttgaatattaattgtcatttaattaaggtcatcgacatagcttcaacgagaaaatggatgctcagttggtttagcacagtgttggctcaaatgtcgcaagaattttatgcgatcgttggagcgtcaagaattgatcaagaagagatggtaaaatacgtatactgtataacagtgaccagaaaaataaaaattatttaatcattgcaaaataaaaattcattttattttacatcaggaaaagcgaatg

SEQ ID NO: 108243 - DNA, 462 bp, Heterodera glycines
tggaaacccacaggtgttcaaagcattcaaatattcaacaagtttctattattttcgtgaacagcaacatttttcggcgctaaaatttcatttttggccattttacaccaattttctgatataatgaaatttcataaaatctctttatttttctaaaatctctttacattgtgaatttattttatttttattgaaaatatgtttattattttcgaatgagctccagtaaaactaataaattttatttaatcattaatttaccaattggcaattattttgtcattaagataaaattattattattatttctttgaaattaaacaggatttccttattttattaagtaaaataatgatttattcagttttttaatcagaaaaaaatcatttaaatgcctcaaaaaatgaattgccatttaattgaagaaaaataaaataaaatcatttcgagacgacaaaaatg

SEQ ID NO: 108244 - DNA, 280 bp, Heterodera glycines
atagcgtagaaacagcttataaaaatgtctagctttcgaatgatcccacgtttacttgctttggatgacaaagaaaaaagttatagaaagttatagtggaaaaatatgctggggcccaaccgtgccggcccaactgaggtagaccgctaaatttctagatatgtttggtttcaaagacaagagctagaggaaaaaccctcacataaacttggatgtgtttagagctttaaaatactattacataataataattattattatattttaaaaattcacaatg

SEQ ID NO: 108245 - DNA, 256 bp, Heterodera glycines
caggacggtcgcttcgcgcttaaaagtcgaatgccttttagtttaaattttttttataataaaatactcgttttattaattaaaaacaacgtcgaaaattaataattgaatatttgtttaatttgaaatgaaattaatttttttgcaaattcaaaaaataaataatgaaaatttttaattaaaaaaaattaatttaaataatttacaacaaaactattttaatttattaaatgcagtgaaaattacccaaaaaatg

SEQ ID NO: 108246 - DNA, 90 bp, Heterodera glycines
ggttagcgtaaacgaccggtacacaatgtgccttacaattaattatcactgcatctttaggtgattttgcctgtgccggctttcaacatg

SEQ ID NO: 108247 - DNA, 1003 bp, Heterodera glycines
gcccatcaccccagcagatgttttcatttccctgccaatgggtgccattaaaacattttaaattcaattttattagccaatatttttccccctttcacaatgtgagttatccattcggcattctccccgttttattggcatcagttaaaccaaattgagtataatgccaagattttgccccaatggctcattggcattttgccgtcccccctccttcctttttttgattgtcttttggccgtttccatagtcacccgctccctcccccccccccggtgccaataatactaataaaacgatgaatttctgtctttgcttttggcctatcgataggccaaagaaagaccaggccatacaagtaaataaaatattaacatttattaggttcacaatttacaaaaggtattttgaaattaattcaattaactaaaccataaaaataacatttttatttctatatttaacattaatttacacccaaattaaaatgcttaattcggaagccaaaattaatggtcattttgaaattggaatcattccaaaaacggacataaaaattgaaatctcatttgacggagacaaatttgtcaccattcgatcataagacgaacgcattaatgatcaaataggaaatttacagcaataatgcgtttattttagtaatttgcttagaggaatttattttttgcttattgacggcaaaaattcctatgcctctttttccctaaaaaataggtaattagtaagtaattaggtaaataattcaccaccggcggattttgaaaacttaagttaataattagaagagatttttaaccaaaaatgacttttcaaaaattgtgcggagaaagtgtgtttttggtgcaccaaatgacattcgtagaaaaacaaatacaaaaccttccatgataattacttaaaatagttcattagaattgtaatttccgctaaataattttccccaagtttccattagaaaaaaataattatacggtagaaaatg

SEQ ID NO: 108248 - DNA, 728 bp, Heterodera glycines
ataagttattttctttaaatatgaaaattaaaaaagaaaaaagcttacaacaccttcgattcccaggacgtctccgttccaagtactaagaaggcccaacgttgcttcacttgccagatcggacgggatggcgtgttttcaacgtggtatggtcgtaagcgaaagcgctccatttgaaagcaattaaatagtcaatttttaatgcatttattctctttggttaacttatcattaaccaaaacaaggattgttaaagaatttagaattcacttaaataaggtaaaaataaaagaaaaattcgatagtttttttcgaaatgaaagagcaaaaattcggaattttgaattcttttttaactaatttcccaactgcaaatcggctgaaattaaaaatgatttatataaattttgaaatcatcgcaaattctctttaaaagcacatataaagcctttccctaggaacaatttaattgttttgattagaaaaacctcgaaaagcaaaatttcttaagaaaaattggttttagtggtgattttaagaaagtcatccacccatcatttttagtggttaaagtcatctttttggttaaagtcatcttttgaggctccaatattaaattttattgtattccgttaagaaatttaaaaattcatttcggcacaaatgccaaaaaaggcaaaatggggatacaaaagtcatactaatggttttaaaccaacctaaaaatg

SEQ ID NO: 108249 - DNA, 107 bp, Heterodera glycines
tagttcttccgaaatgaataatttctccacggagtgctctttagcggtatttaacgaattaaacctaacaatttttttattattagagcgcaagaaatagtcaaatg

SEQ ID NO: 108250 - DNA, 989 bp, Heterodera glycines
  unsure (1)..(989): unsure at all n locations
atattttaatatanagcggacaaccatttaaaccgatggctccaaaatcaaaattacgaaaaaattttcccaatcccctagggattttttcggaactcgaacagccacacaaatggacgaccgaattcagcgactttctgcttaaatgtctcgtcaaaaaagtggacgaacggtggggcgcttcacaattgctaatggtcagtctttggaatgggaaaaggaaagagccaggaaataaacagtttaatattttacctattgtaaacagtcataggaaggaaaatgttgtagcaccatcagatttttccgggtgcactacgttccccccccccccccggccacttatttgactctcgacactcatttctctttcgacttcaccactcatttctctctcgatttcatatgcttgatcagatttcataaacctgatgaaatgtaagcatctttgaattcaaaaccgatttaaaattattttccaaatttaggtgcgttaacattaaacatattttggtggtaatactatactattgtatatgaaaactgttttcggtcaagtacaaagattaccagttgatcagatttttattgctttaaattttcaaaaattttggttctcaaaaatagaagtgccaattaatatgtagcattgattgacttactttttcatgtcctttggcttgtatgttccctttttgaacagttccaacgccaacttaaaaaatcgataattgcgttgttttctattcattgtatttcttttattgagtctatttacattataataataccagctttttcttatcttgtttaatttttattttgcattttttgtttttacacccccccccccccaataaaaagaaagaaaccgaaaatttcagacatatattaattaacaaagcctgatgcgaggaaataacatgtaaatcagcgactccaacttttttttgttgcttttctcagcattacacaccatcccgaaaatg

SEQ ID NO: 108251 - DNA, 176 bp, Heterodera glycines
ttttgttggaaattttttgatttttttttgcaaatgaatcgtgattttggacggatgaactttacgaactgaaaagtgggcggagcctaaccgattgaaaagtataaaattggcccgtttttgaaattccaccccatttggcgaatcattctaaatttttctcgacaaaaaaaatg

SEQ ID NO: 108252 - DNA, 136 bp, Heterodera glycines
  unsure (1)..(136): unsure at all n locations
taccaatttcccaaatgtgccacctggcttgatcacaaaagtgccgtgccatcgaaattattaccattttttgccaggtgtgggcccgtaaccagggcggcctgcacgccccgcncggattcactgatcttcgatg

SEQ ID NO: 108253 - DNA, 770 bp, Heterodera glycines
tgtaccagcgtcacagccatgcgaaagacttcacttggattttgcttttacacatatactcatcgctaaataaaccgattgttgaattaatcggagctttcaattggggaatccgcgctttgggccaatgcccctggcattggcccagggcccaacggattcacgcgcgcacccattttatggtggaccttgtggggaattaaattaaacttcccaaagcggcgcttttctttttatctcccccttcattactaattaattaaatttaattaaaaattattcaatttcccattgcaattataccatttattctcccatcacatttctgatttaattttgcaattttttacttccccccccccaatttctattttttcgcattaaaaattacattttttttgtttgattttcctatatatttttcttttcattttaattagtaccaaaaaataaacttcttttattaatcactcccaccatttttttttgcctcctatttatcattactaaaatacttaaccaataaccaaaattgatagtaataattaatgaaaaactttgaataataaatatttgaataaatttgtttattaaattaacaaataaaatatcttaacaagtgatgtgttaaggccgtgccaacgattaacccgaaattacattgaggagacaatacgactggacaaaacactaacacggcgctgacattgatcacagaccccaaatgaggcaaatagcaagtctcggcggacacggaccacagccaaatg

SEQ ID NO: 108254 - DNA, 161 bp, Heterodera glycines
ggtgattggcattataaaataattgagaattctcctgtttgaggaagaggaagatttgtcagaaattgtccaattggtcggcaaagcatcgcttgccgaggccgacaaaatcactttggaggtggccaaactgatcaaggacgatttccttcagcaaaatg

SEQ ID NO: 108255 - DNA, 80 bp, Heterodera glycines
  unsure (1)..(80): unsure at all n locations
cctattctantgaccacattctgaaaaaaatcccagaaatacgaggaaagatatgcttggtcacaataaaataaaaaatg

SEQ ID NO: 108256 - DNA, 113 bp, Heterodera glycines
actttaaaatatttaataaaattaactgggtagagggaaaacttgtcaactatcgtattttttggtttaataataaatttttttaagcaattttttacagctgggagtttatg

SEQ ID NO: 108257 - DNA, 97 bp, Heterodera glycines
tttgttgggagattgccgcaagttggtcactaagagcggtgtacgggtagtcagtggtggatttttttgatgcgttgtctgagagaggagaaagatg

SEQ ID NO: 108258 - DNA, 814 bp, Heterodera glycines
attggcatggaaaagtgatcagttcgagcagaaaatgtgcaatttcgaaattacacaataaaaaactgatgaaaaattggggtataaagaataaaaaacatttgcgtagctcaatttttaacagaaatttaaattatgtaattgggaatgaatttcaaagggaattcccccaatcaatgccaaatctgaagaaggaaaaagcacatttaagccttaatacgcccaatgctttaatattttgccaatgagaaggaaaagcaatcgatgaacacaaaattgaaacaaaacaaagcaaaggaaatgaaatgatacaaattgaaaagatcgatatttatgcccaatccattcaaaattagacttacataatttatattatattttttaatataataaatattactattttttacttttatttttattttaaataaaataattaattaattattaattaaacatttctctatttattttaatcgaatattaagatcatcctttcgtcatttaatgtcaatctataattgaaaatgtatcattgtctatttttccttattttatttgccttttccccattttcgtcagcgtttcccggagaaaaactgataaaaagcatgcaaaattaaaacaagtaattaaaaaactggcaaatgattattaattatctaataatatatgtttaattatggggattataataataatataatgcttaatattaatgatgtaattagcaatgcctttttttgtttgttcagcgcttaatcggtggtacaattagtttcgcttcaattttcacaatcagagcggcggaatg

SEQ ID NO: 108259 - DNA, 460 bp, Heterodera glycines
ggtgggaaaattgaaaaaaagctccaattttatttaaatatattttaatttttgcttcggatttcatccgaattttttattggtttaattttcctattataattttaatatagtgactaaagaacaaatttaatttcaataaagtagtttagaatttctcaatgaattcaagaatagttttcgtttcttttcttaaaatctgatcacggcaaaatgatttttagcggcaaggacaaacaaaaccattggaattggcatcaaaaaccaaatttatgcggatgacaaaaatggcatttcaccaccgcagcaacagcaacaggaaagacaattaaaccaatgggcgtggaagtccgacgacaattcatttccctttgatcgtgccgcggttgctctttctgctgctgaggagaacagcacgagcagaacgagaacaagcatcccagaaggaacgacgacgatg

SEQ ID NO: 108260 - DNA, 146 bp, Heterodera glycines
ggtaaataataaatttgaaataaataattaacggaccgaaattttgcatactttgaaaaggcgaaaaaattttaacggaccataagcttttacaattttgaacagttacaaattttaaatgaacatatttaattagctgaccaatg

SEQ ID NO: 108261 - DNA, 379 bp, Heterodera glycines
atggacagtaccatcagcaggtggcactgtttgcctgtccaatcccaaaattgcttctctttaccaatctgccgttgcgggggccgagtgttgcgagggagagagtcattgctaatgaatgattggcttggcagctactgtataatgccgaaatgcattctaatgtatttaaattttttttttctcgcggcattttctattcattgttaaccttaaatcggtcagtttttaataaaattggtactttgataaacattactaaactatatgtacttcccttgttttttaccacattgcctttttgaaaaaaaacatatatcttcaatacttattaatttaattattcgtccattttaattaacctataaagaaataaatg

SEQ ID NO: 108262 - DNA, 111 bp, Heterodera glycines
ttggattacacgaaaaaaccacaaatcccatgtttactaattttgttgtgtttttgacaatttcaatatttttgttaattttatatttgcaatatttccaattttttgatg

SEQ ID NO: 108263 - DNA, 232 bp, Heterodera glycines
aagaaattatttaataggactgaaatttttaaataaaaaacaaggaaaatttcgtgagaggtcaaaaaatacaacaaatcaaaaaatggagaacagagaatgatattataaatttacaagattcggacagagacctctataatataacaaattgaatattcccgtatttaaattgcgatattttgcatcggtccgtggcctttcaaaatgtgcacgccgaagtcaaccaatg

SEQ ID NO: 108264 - DNA, 739 bp, Heterodera glycines
tcacatcactttttttcggagcgctttttcaaaaaactttttgggaaagaaggggtccggcggtgctgataggcgccgcctggggaaattttaaaaatttgggtgcaatttgttaacagattttcaacaaaaaaaggttggtttttgcgattattaagctcaattggtaggattttcatttaaaaaatgataaaatatgtatcaatttaaaaaaaactatgaggaatcatattttctctataggaaacccacgagtatacaaaaacaaaattcaaaataatttactttctgtagagggattgaaccaggggaaagaagaagggaaagtcaaggagactagccattaggccatttgcacacttgggcagtgttatttttaaagaatatattaattattattttttatttttccctttgactcctattttcttcactaatttttcactcagaccccccattcttaccaatgcttgtttttcccggttcccggttgccctaccgggaccgggacctgagcttttcaaaaccccgggaccgggacctcggatgaccgggaattcccggcccggtcccggtcccgtggcactctagtttgaccttgaaaaatgaattttatttgtcttacaatggatcgaaaaaagatttaaattcttcaaaaatgtcgtgaacacaaatttttggatacaatgacagcgaaaacgaagggaattctgagcaccacgaataaaacgccaaaatg

SEQ ID NO: 108265 - DNA, 251 bp, Heterodera glycines
aagcatttgacaggtcagcgcgaagatgtgcccagaggacatcgcttcttcattcaacgcatctcaaaagacccggaaatgatgaaactgcttcaaaaaataccacaaaggggggaaggccggcggcgcagcacagtgaagaaaatgggaaagaaaaaattagtgcttgtcaatatgatgaattcatcgtctataaaaaccccaggattacaccgaacggaaccaaaacgcaaatttaaacctgaattatg

SEQ ID NO: 108266 - DNA, 238 bp, Heterodera glycines
ttctccacatttgatcgattttagttttctccaccgcatgtctcaatattttttcactcaccattccttcgtcgtcatccctcctcagtgcataattctacacatatttaatttattagcttcgtattttaagctttttaattttgtataatccttcggaaatgacattattttatttttaatttatttttatttaatcattgcatttcctttctaaaatcagattttggatgtcatg

SEQ ID NO: 108267 - DNA, 925 bp, Heterodera glycines
gtgtatttaattgtaatttgcttaagaaaaaacacattttccggatgtatttttaattgtaatttaatcattagaaaattcgcattttacgtatgtgttaatgtaatttgctcatgagaaaacacattttccggatgtatttttattgtaatttaatcattggaaaattcgcatgttacgtatgtgttaatttgcgaatttttttagatattttcagcaaattctttaggtattcgattgtcgggagccggcgaaatgataaggaatgagattttttggaatttttatgcaaaaacacttttgatattccaatgtttaatattttagcaaatattttggcatttttgggggttttagcacatatttcagcatttttataacaaattttattacatatttcaggatttttagcaaataaaaaacccagctctacttatatgcaatttcatacttacagttcagcatgttcccttgtcagtgagacaagtcgaattcatgccttgtgaaaagaaatttttgccttgtgaaaagaaatttttttttttggaaaacgggggcggggttctatctattgagggcgttgtaacttctcatcagcaaccatagagaaacacgaaaagacatctcaacgaattttgaacttaaattcccttttccatagcaggaaaatggagtgcaacgtctcaacagacagacgaacccaaatgaaggtagcgaaccaaaaatggaagtgtgttgaaactacaaaatattcagccttttatacccttttgagactcataaagctatttttgcaaatttgtagtttttgcgggaaatgtatgtataaaagggcgtgcgtttttccttttcaagtaattgtccttaagatttgacacaatttgcatttcatttcttcctaatttttgttctacatcgaatcatg

SEQ ID NO: 108268 - DNA, 61 bp, Heterodera glycines
attgttcatttaaaaatgatttaaaacaattaaatttaagacttgttgcatcattcctatg

SEQ ID NO: 108269 - DNA, 283 bp, Heterodera glycines
tgtgaaccgatctagggctccaacattttaaagaacaattggcagtgaatgcattttcaatttaatctaatcattagtgaacggattcttaagtttttgcttattttttctgagcatggacggtaaaaaacgaaaaaaattgccaaaaaataattggcgtaaaacaaaacgccaacacactcaaattgaaaaacaaattatattttcatctgatatttgttattaatgattaaataattcataaactaacagatagaatcaaaaaataacagatgaatcgatg

SEQ ID NO: 108270 - DNA, 663 bp, Heterodera glycines
aatcgtctttttattatatatcaatgactgcattagggcacttccggtttccattatatttacaatgtaatgtgtcagcttctcaatgaagtgaaaccaagtgcatgtcgggcgacgcaaagaccctaaagaaaataaggacctgcccttcttgggattgtggttcgaggacctgccttttgaggattgtgggccacaacggtttacaatgatgatttccttattgttaccggccaacatccggcgcgaagctggtcccgcactttgccaagaccagtggactggtgagaggtaacataggatatcggagttaaccaaaacttatcaagtaaaaccttggtgacaataaagacctcaatttgggaatggtggttcaaggacctgctctttcttgagattgtggttcacaatggttatcgattagttccttaaccaataatgataactctctgcactcagtgcccttagggcagatgggatgataggtgagccctggctgatagatttcaacagcggcttcatttgtggcaagcgaagaaacgacaccatttttcacattattacttcatttgcataaatatttgattttgtgtgcactcattggttaatttccttcatatttttgttacacccaattttcacactgattttgtatttaagatg

SEQ ID NO: 108271 - DNA, 952 bp, Heterodera glycines
  unsure (1)..(952): unsure at all n locations
aaaatgaccagcccaccggtatataaatagataaatacccgtatttcccatccattctttttttactgtgcccctttttctcattttttacctattacattttaaaaacgtccaaaaaatttggaaaaggagtgcggtgagcgggacaccattaaggcttgggctactgtacatattttgctgaaaatctatatgtaaataccgcattaaaataccgtatttgctctaattatcccncaatctccattaatcccccagtctaggaggggtttgaaaaataatcccccagtctccatttatcccccagggggataaatagaatttggtcgtaacatttttaggggatgcataataacggaaaagtacctccaatttgtgaaaattttggcctaggaattccgttttttgttaatttgaataaattaggtataatatttcttctgtagcaattggtgaaaattagcagcaattcgccgcgttcatgtgtgaaaatcaatcaaatttttaattccttatatcattcgatagttctagatgttttctattagcctacagaatttcaaaaagtttcgttaagtttcaagaaagttatgagctaaaatgttgtaaaaaacttggttttttgagcttctcaagttataacttttttgaaacttaacgaaactttttgaaattttataggctaataaaaaacggtttggcctttttatgtcaaaatgtttccgcgccttccgtttttatcaatgatttttcgcctcccattggccattggcaacaatttaagacgaacaaaattcaaaaattgttggataaaatgtgattttcgttaaaatttttggttttccgcttttctcattatataaaaataaaacttccaacgcaattaattcttctgctatttgtgtgacatcattcggaactcgtccaaattgtgctaattgcctcaaaaatg

SEQ ID NO: 108272 - DNA, 268 bp, Heterodera glycines
ttttatcgctttatcagtaaaatattcccttttgttcaatgttcgaatgcatttaactgataaaatgaaaaatggccaataaaattttgtcataaatcgcagcaaaccatagtttgcgttcataacattttgaaacgagttggaacaaagacaaaaatttttcctgctttcatttatttgcaaattatcattttggaaaatttttaataaatttaatttgctgatttcaggatttgttaagaagctgcaactgttgcccaaagggatg

SEQ ID NO: 108273 - DNA, 191 bp, Heterodera glycines
tttcaataaatttatgacgcgtaaatgggaatgaagtgtgaccagggatggcacggaattccaatttcctttttggagtcggaattccgttcccgaaattttttgaagcctcggatttatttcccaaagttagacgttggaatttccatcactgctaaaccatggtctcaaaaaccgttttttcccccatg

SEQ ID NO: 108274 - DNA, 81 bp, Heterodera glycines
ggtcggttttttcggggaggtggaagaattgtaagtaatcttattttgctccattttcagacttggtgctgctttttcatg

SEQ ID NO: 108275 - DNA, 1003 bp, Heterodera glycines
atcgaaactatccagactaaacaaattcacaatgttggaccgatcgacaaaaaattgttgtttaccccttacaaaacaaatgtaaaattttcattatttttcccacttcctcttcccattgttgcacacggaaatttgttggcccttccgccgtcgtctccgccatttctcatctttgtccaaatttggccatgtcgtcgttaattgcggtgatgtcatcaaaaaagaaaaaatttatggtacaagcaaatttaatgggggtctttgtccgtccgttcaactcaaatctaaattctccgatcttaacaaagcaaaaaataaatcgcattggtttagtaatacggaaataaaaaaaattttggttttccaaaaattggttaaatccaatcctcgctttttgctttatgtattttcaaacagcacaaagccattccattttaatcgattatctatgtacaattttcacatcatttgtaatgcgagaagcgagtgaatgaaacgaaaaatatgcaaacatcgatgagtaaacgaatgggaatttttttttcaaacaaaaactaaaaaattcagtgaaaatcggatgccgtttatttaaatgctaattttatttttggtatgaaatttttgcgagaaagtttaagggttcacaaaagatgaacaaattcgttgcatttgtccttattttgaggaaaatcttggttttcgttgcgacgagagaaaaaactgtcggcacatatttaaaccaattaagaaaaaaaaaacctgtgacatggggaagcaaatatgccagaaaaacttgagacacctatgaacatattgcacaaaaggcagccgggggaagacatttatctcctcaagaaattctgaaaacaaaatttagccagatatgcttggtaaattaaaaaaaaaaaattcagtgaaaatttacgagggtacagaaaacaaagaagaaaaaaattgaagggattggattgttgtgcaattcatcttaacaaaaataatg

SEQ ID NO: 108276 - DNA, 380 bp, Heterodera glycines
tgttccttaacaaatggcggcataaatttaaaattaaattatttaaaatttggaaaatgcaaagtgaaaaccgatttttttcgtttttattttcataatattcaatgcattgttcattattttctcgaaattttcatttttagtcattatttttgtaaatatttaaaccatttttcgaaaatatttatttaaatgttttggcattttataaatcctttctcgaattatgaatttcatcagatatacgctaaaaatgacgttaattaaatatttatagattaattaaattcaaatttctctaaaaaccccaaaggtttccctcgaaggcaaaaaatgtccacttggcaacaccaaatacaatttttctcattagttaaatg

SEQ ID NO: 108277 - DNA, 265 bp, Heterodera glycines
ttattagctaggattatttattttaataaattaaatatattagaataaaggattgaataaagtgatcttgttcaccgtttttatacagattgatgtttgtttaacccagaaaaacaaaaccaagattgttataaatagttgatgcacacttatatttttcagttttattcttcacttcgttaattctgctctttttctccctaaatttacatcttttcttcattaatttttacaatattttagcttttgaatttgattaattatg

SEQ ID NO: 108278 - DNA, 673 bp, Heterodera glycines
cctgaaatatgtaataaaatatgtgctaaaaaatgctgaaatatgtgctataagccaaaaaaatgccaaaatatgtgctcaaaattggaaaaatcaatggtatttttgcataaaaattccaaaaaactcattctttatcattttcgcccgcacaattgcaaataaaaaacatttgggggtaaaattagtccttttttgataaattgtttttaaagataatttttccatcagttgagtaagttccagcaagaaacttcgatatccagtaacgaattaatgaagaattcgattttcggtacacgaaataaataaagaaaattttgaaagagcctataaaaatggcaagaaagttgatttttaggggtgcatttttgaattttttgtgtttttcttagatatttttttcaaaatgacaaaatatgtgcaaaatatgtgccaaaccccgaaatatgtgcgatatgtttttatgtgcgaaaacgccaaaatatgtgtttttataagtcgctctaaatcaaaaattgttcggagaaaatgctatttttgggcttctctcgccataactaagccgcaaaaaaaatatgttaaaacataaaaatcccagccctaatgattagggaaaataatgttgttaaatttagaattacagcttcatttaaccatgtttcagaaaatg

SEQ ID NO: 108279 - DNA, 363 bp, Heterodera glycines
  unsure (1)..(363): unsure at all n locations
ataccataccataccataccataccataccataccatgcgctaccttaccatgctatgagctaccataccatgcgctaccatactctaccatgcgcttaccataccatgcgataccatatcatatcataccatgcgcttccataccataccatgcgctaccataccatgcgcttaccataccatgcgataccataccatgcgctaccataccataccatgcgctaccataccataccataccatgcgctaccatacccccccccnccccccatttttttgtttcaaaattaaatttatttgtcattttttatccattactctgctcatcgatataaattattatgtttttaggtccagaaatg

SEQ ID NO: 108280 - DNA, 99 bp, Heterodera glycines
aaaaatttcaatagattttataaataagattttttaaattcaggcccgtattgcgcgccgcatgtcgacaggtcgcagggcattgagcggcccgaaatg

SEQ ID NO: 108281 - DNA, 99 bp, Heterodera glycines
gaatcaactcatttacgtgcctcattccgggtttttaatctggagattttttaagcttttcttatttttagacttttctgaaatcaacacttacctatg

SEQ ID NO: 108282 - DNA, 775 bp, Heterodera glycines
ggtaagcctttgtcccttctgaataaataaattcgaatgattattttattggtagtcttctttaattcggtctcatccataaaatttgattttaattttataacggttgttcaacttataattatgtaatagtaatagtcatctcgtaactctttgaggccactcgaataaacaaaagtttagatttgttatattacgacaatttgtttcttttgaccaccaccagcaaatcaatctttttgccaaaaaatgcaacgaacatttttgtactcagacacatccgacattttacgacttcgccacttttacgcctccatcggcaacaacagcagaaacggttgacattcattctaaaattgtccaccaccgaaccaaacaaaaatgagttcactcctcagaatcctttttccttaaatcgaccattgaccatttgttgtccgagttggagcggacgcgcaaacacagctacgaattggccggacggaacagaaaactcgagcgagaaaacgagtgagtacagggcacagcacacagacccgggctggccaatgacatttttggccaaaattggtcaatttttggctttctaatttcaataattctcgtgaaattcgcgtccaccggtgcgcggtaaacagagaaatgcaaattttaagtaaattggtaaagaaaagtggaacttataaacaaaccctgtttatgggcctggtccgaccacctatcacatggcatattttgagcatttgaaatactcaaaaactttagcgttttgatg

SEQ ID NO: 108283 - DNA, 790 bp, Heterodera glycines
tcaccgggtccggtgttcaccaatcgctgtcgccaactgatcgctgcacacaccagtcgaggaccaattgacgccgttggatcaggtcaagcacagccaactggccaattagccggttatttaaccggctatccctcgcgtgtcaattagtcgattgtttaatcggctaacaatctggtcttaacatcctatctcccaacggcccattcattcacagttgcgcaggcaaccgccgcttaagtcccattccaagcggtttgcgttagtggcgacctgtccccacagggacgaccgcagctatcagttactaaccctaaaccccaaaacctattgtacggtccgatacgtccaatcatagaattttaattttttctttttgtttgcacatccttttcggtcagttttgaacctattttttttgtgaaccaatttgacttcacacatttattctgattaattttgatcagtcctgatcaagtatttgtctattgatattaaattttgattacgcatttaatatttatttttgttgagttgctgtcagttttgaacttactaatttaattttttttggggagagcgttgcttagtcagttttgactaaacaatttcaattttttgaagtttaattagtgcatttacaatttgttattcaacattttattgtttaattcatatcattaaccaagggcttccgaattatcaagttgatacatttttacgaatcaaatcgtgactatttagtcaaatcaaataaaatctgaattaaacttaaaaagggatcataatg

SEQ ID NO: 108284 - DNA, 127 bp, Heterodera glycines
agcaaacggcactcagccaaaggcggcttcgtcatcatttgccacccaatcggcgatcaaaaaggacaattatcaggcccacgagttggtgctgaaccgtcccaaggccgaggtggacaaatggatg

SEQ ID NO: 108285 - DNA, 220 bp, Heterodera glycines
tcctcaacgacgggtgaatgcacccggggcaccggaagtcggggacgtcgtgcttgtagaagacaaattccacccccgcaacttatgggccatggggcgaatcgaggcgctcagaggttcagacggtcacacccgcagcgtgctgatcagaatggcaaatggaaggatttgggggagacccgtaagcagaatttgccccctggagagaagtacagaaatg

SEQ ID NO: 108286 - DNA, 218 bp, Heterodera glycines
gattgggtgatatatgccaatcaggttgtgctgagacaagacattgaccaaattcgaaaaaatttttaattttccaaccaaatcacttcaaattacccataattattacacaaaggtacaaaaatttttccggtcagtaaaaaattaatcatccaaattttttaataaaaaataaagggaatgttaaatgctgcctaataaacattaggtcactaatg

SEQ ID NO: 108287 - DNA, 78 bp, Heterodera glycines
tctagagtcataggacatggtagactactgaaagagggaatacagttcttttgaggagatacagtggatgcgctaatg

SEQ ID NO: 108288 - DNA, 290 bp, Heterodera glycines
  unsure (1)..(290): unsure at all n locations
tgtataattcaaatttattaaattttctcatttttttntaattttcactttccacaaaaagtttgattggttttttttgtaagaagaattcaaaacttttgtacttttcncagcaattaagattacttgaaattttttacaaagattcttacaattagtaaaatgcgaatcgaattatcaaaagcgcttaaattttttgatttttacattaaattttaatccctctaattacgggtaaagaggtttcaagaaagttcatttttaaattgttcattcttgtaggtagaatg

SEQ ID NO: 108289 - DNA, 892 bp, Heterodera glycines
atgtttattattaaaccaaaaatttattttttattttagtcctgattatgtttttccatcgcagctttcatcagattctgacgaaaattaattcgtatgtcttagaattttgctctaatttatttatgcaaaaatattatcacgcattttgtttaaggaatctgtagtgactgcattgtttgtgtatgtgtttgggccgtggtaaagtggaactccacttcagctgttcttcgcattactctcattataacatttgttttaaaatgaatgtgttcggaccgtggtaagtggaactccacttcagcggttcgacacatatttggataagaatatattttgcaaaaaacaaccattttcattctaatttttaaatgtaataaaaaaacattattagaacaaaaatatgtttaatattgtttaacaagcaaaaacaattaaatgtttaattaattggtttggacctaaacaacaaaaagtcagtatgacccgcgaactgtaagggcggtctgtgctgttatgcttggacggggcttttgtcaacaagaaataggcagcacagattcaaactcacatatttattttcttgctcttgcagttctaagctcaaaaatgtatgtgcacatattgaattaatttgtgcatatgcagttttgaccgggtccccgtcctggcgtttttcgtaagtccagcgacgacggggtgcttcttaaatatgaatgcttaagtgcaaaatcatatttaatgagtataaagatataaatttgtgtattataatttatctataatatatttaaatataatactatttcaattttttatttgttaactaccataatcatataactcaaaatacaaaatttttatagcttttttatttgtcaaatcaaaaatg

SEQ ID NO: 108290 - DNA, 347 bp, Heterodera glycines
tactgtatgtataccgtagcggagcctaaagtccgaataccactattggtcctcctctcccccggtctcgtctctctcggcaagttgatgtctcagaaacgactctcgagaagggtacacttcattcccccgccctttggaccgagacccaaaaaagccgagactgagattctcgagcaagctgcacaccccacctctttgatgtaaatgttctccaacggcatgccgatggcttgtctttgttgttgcgcagcgtccaatgccgtcaacgttggcgttgcggttgttgccccgccggcggtgcaaaaatgatgctgattttgcgacgatggtgacggcggcgaatg

SEQ ID NO: 108291 - DNA, 302 bp, Heterodera glycines
gggggtctactgcgtttcggcgccgcgcgtttcggcgccagcccagtttttggactataacttttttctatgtcaaccaaatcaaaaattattggtatcattcgaaagcccttcagattctctattatcttgcataattccaaaaaatttcatcaattttgaacaaatttatggccataaaagttggaaaatctggttttttaagttgttctggccataatttttttgaacctttacataatttttcaaaattttgtaggctaatataggacatttacagctttcgaatgataccaacaatg

SEQ ID NO: 108292 - DNA, 196 bp, Heterodera glycines
taccatgcgcttaccataccatgcgctaccataccataccatgcgctaccataccataccataccatgcgctaccataccataccatgacgctaccatacccccccatttttttgtttcaaaattaaatttatttgtcattttttatccattactctgctcatcgatataaattatgtttttcaggtccagaaatg

SEQ ID NO: 108293 - DNA, 258 bp, Heterodera glycines
ggtgagagggctgctggactttgtattgtttacgttttacgatgaaatttaaaaatccgaagggtccatccgtgcactccgtgcaaagacgacagaatcaccggaggggtggtcggatgcatgcgcgaaatcgactgctattgtcagttgaaaaaagagcaaaaagtatttggccacagcaaacgttttgttcagtgaactgtccgcccggttccgtttactgtccgacgaccgattcgtgtcaaatgtgtgcccatg

SEQ ID NO: 108294 - DNA, 1003 bp, Heterodera glycines
tgctaatttggttagttatgtttttttttttgtatttttgcgttgcccttttgacgaaatgacctagcaagggatttcgtggaagatgaataggacgcgcagaagaaatagcacaaaatttgcttattttcccttggaatactgtagttttattttcgaactttcattctccatggaaaaaagttgtagagacttgtgatctttcttttgcttttctgctcgttctatccgtcctattcatttccacgtgaatgtttttccgtatttactccgttttcaattttccgatcgaattataaatattatcttttttgatgagcataaaaaaagttatgatgtatgaatttttcaaatgtacatgtcttcaaagtattgagttgataatttcgtaacgccgaatttgggaacttcttgggaaaaattcataaaatttcttctatcctttctgttttttaaatgtaatcttaatctaagataatttgcttgttaggggccatggtaagtaagtaaaacgacaaaaaaaattgagttcgtaatttattaatagagacaggcttttgaggcatataattttgtaattattgtacccttttttgcctttttcaccttttccttgcctatttttaaaatgttccaaatttggtcatttttggggcaaaataaatgcgccgtaaaaaatggtttgaaaaaaaaagatctttttatggcttactgcccattttattttataaatcaaaattccacaaattttgaaaaaacgcccgccggccaaaattttggaccgggcctggtacgcccggtaaaacggctttttttgaacgggcggcccggtcccggccaattgtctaagccggtattttaaaaatccggtctctaatgatgataaacaattagataaataaatatagcactttttttttgcatgcgcggccttattttgctcaccattatacatactatgtgaatttagatttgtgttaaattcctttttttcttaacaatg

SEQ ID NO: 108295 - DNA, 216 bp, Heterodera glycines
attaattaaacaacagttttgtcagattatgtcggaggaagtcagaaaaatatacaacaattaataataacatcaacaaatcggaaaccaatttgttttccaacgagacaagaaaaagagaacaaatttgtataaatactgcccatgttaataacagaaaaacatccaaattaacacggcacagtaataaaacattaaagactctgaaaaaatatg

SEQ ID NO: 108296 - DNA, 693 bp, Heterodera glycines
tgacaaattttgtttttatttccataaattttcattttttaaaaattcaataattgcaattaaattcagactgacctaaatataaaagaaataatttaaattttcttaaaaatgaattttcttttttataataaattcttcatttgttaagtaaattattgatgtaattattaaattatattataaataatatttaatttctctctactgattgctcgttttgtcaatatccacccgtatccggatatatccatagataccaacagaaacaaatataaaaaaactaattaaatttcaattaaacaatttctgagtttaagtgatcaggagaattggaatttaactttatccagatcttttcataaaatattttaatggaacaaaaaacatttgaagaaatatttggagaaaaatgggaagaaaaagaagaagaaaatttggaagaaaaaaagaaatgaacagcgaaagagagaaattattcacaaattcaacaaaataaaagaaaaaattaaacaaaaagagaaaaaatattcagcaaaagaaaggaataaaattgagggaaaaatagcgaaaaaattgggcacaaatcgccaatatatttataaatggataaaaatattcggcctttataaatttaacaaatcaaaaacggatgaacaaaaaattgaaattgttcaacaatttatagcaatg

SEQ ID NO: 108297 - DNA, 86 bp, Heterodera glycines
atttttgaaaattttaaatcaaatttaatggattattttaatcaatataataatttgcatttttctgtgctcagactgtcgaaatg

SEQ ID NO: 108298 - DNA, 296 bp, Heterodera glycines
ggtgctaatgctaggccagaaatttttacttattcggcacaaattttacgatattggatttcctaaagcatataattgctggtcgagaattaaattctcgagaacgatacttcaaccttaaaaaaactcatggcccgatgaggtcaattagtgccactaattgatattggagaacttagatttgcttggtgccgagaacagtctcttggaatcatttaatctctgctcctaatgttctaaacaggtgtctgatttgatgatgtgcacacttgtacaacaattgtccacaaaagatg

SEQ ID NO: 108299 - DNA, 683 bp, Heterodera glycines
  unsure (1)..(683): unsure at all n locations
ggatatcattaccnaatagtttgtttttttttttttcaaatgataaatgtcgacgagtagagaaaaacttcgaatagcaatttttatatcttccgagggattaatggcaactcgtacaaaaattatttttacaaaataaagcctaagcctatgtacgagtagactttgtatggtttccattatgtacaaattgtcatgactctcatttccagagcgataattcaatctttcggagtaattttctatacatagattttcgagagtttctaaaatagaataaagcattcattgaactcgatattttttatcgtacaatttattttcccttttcatacaatttatttttcgttttatttttgttattttgtaataattgaatcattcatcttccaaacacagaaaaatttattgccaggaaaataattatgcataaatttactgatttgggtgtcaatcagcgttttttttgctcacatcagtgatgaaaccgcattacattctcattaaacacaagagatatgcatcgaaaacagaattgtacatcccttcccaaccattcatttcatttcattttggacaaccaatttatttggttaataataaataaaaataaataaaaacgatttaaaaataaaataaattttcatatgtttttagataatccaagaaccaaccttaaaatg

SEQ ID NO: 108300 - DNA, 251 bp, Heterodera glycines
actgaaattttcaataaattaaaaaatagttttaaaaatttgaaagggatttattgaaatttcaggttgatcaagcattattatacataaagtattttcggaaaattatttattaaatttttaaatctttagaaatttttcaattttgaatttttttaaaaaacccaggagggaaatttcagaaataaataaattacttcaataattttgattttttaaattcaatataattaattcaacccctaaaaatg

SEQ ID NO: 108301 - DNA, 413 bp, Heterodera glycines
  unsure (1)..(413): unsure at all n locations
gtaactttttacgnggtccatccattgcatttgttatttaaaaatttgtggacttatttttccgaatggaatggcgccgtcatttgtccttcattgtctttgctatatataatacttaggattgctttttttcatcccattctgtaatttgtaattcaaactcctttctgtattttatggatattaaacacaaatctctgatcaatcgatttcaaatattactcaaacttgcggtccaatgttttagagtaaaagtgcgtctggggacctctgaacttggaccgctgtgtatacaattgatgataaaatttgatttattggttcattgtctagtaaatatatgcataggatgttcaaatacaacctaataatttttgtgaacattgcatcgaacatttttaaagtattcaatg

SEQ ID NO: 108302 - DNA, 1003 bp, Heterodera glycines
aaaaaaagcatttaaatttttttattaatgatttttagggagcaaaacacgtaaaaactaaccaaaaactaaattttgctgatttatggataattcaatattttataatgtttttcaataaggaaatttttaaacctaaaattttttatcaagaaataaaatgaattttggcgcacaatttttgtgaaaatttttcaattcataaaggtatattctctgaatttttttagatcatttcttagcggtttatttttctcaattttaaattattttcaaattaaaaaacagctatttaaaaaattacaccccctaaatttggaactttttcgccactatttttgccactattttggcattttttgtcactatttagttaattatttggggattttttatcactaaaaatccgggccctagtaatcaccaatataaaatgcattctccaatttgtcttttcacttcttaccattttcttaattcagcaagtaattgcaattattttccgttaatgggcaaaaacaaaactcgtcacttttcagggccattaataaatgaaaaatttacaacaatattttttattttctttttttatttttgccttcggttttctcttattgattctgcgcaacagtttcaaattcatcacaattaaacagtccaatttattattattattattattgttctgttcaaattgcagcagaagtgatacaatcctttagaaaatgaatggttttattgtctaaaaaatgcagaaatattttaaatttattaattttttgatgaataatttaaataaaaataaaaaagattaaaaaccttttgggtttaggactaaaaaatgcacggtaaaggatattttttaacaaattttaaatttatcttaaatattttttaacaaaaaaatatcttaacagtttttttttatattacgacaaaataaattattatttttattaactttaacaattttttcccatttatttttctccctttagaaatg

SEQ ID NO: 108303 - DNA, 433 bp, Heterodera glycines
  unsure (1)..(433): unsure at all n locations
ttcaaatanaggggattgaaaaataaaattaaaatctggctttctagcaattttgaaatatttttatttcgctaaaactaattggttttaaattacttttttatgttacttttttgctatttttccatttgtgccatccctctttccctccaattgttcccattgtgtcgtcctctatttttccccttcggggggtttaattacccaagtttgagcctaatgataaattggattatttctgcgcactgctccttgggtctttatttcaacaacttgctctgaatactctgatatcctctcgccccgacccccaacaaaaaaccatttagtaataggtaaaatctttcctaaactgttaagcttttaaatgatataatatgcgaaaaaaatatatttatttttacaattttagcaaaaaaaattctctaaaatg

SEQ ID NO: 108304 - DNA, 1003 bp, Heterodera glycines
ttatttaataaattaaattaatgaaaattttcaaacaaattttcttcaattatttcaaacaattaatcatttttggactaaatcatcgaatattaatagaaattcagatttgattttcacatcacttttttcggagcgctttttcaaaaaacttttgggaaagaaggggtccggcggtgccgataggcgccgccgggggaaattttaaaaatttgggtgcaaattgttaaaaattttcaacaaaaaaatgttggtttttgcgattattaagctcaattggtaggattttcatttaaaaaatgataaaatatgtatcaatttaaaaaaaactatgagtaatcatattttctttataggaaacccacgagtatacaaaaaaaaaattgaaaataatctaatttctgtagagggattgaaccaggggaaagaagaagggaaagtcaaggagactagccattaggccatttgcacacttgggcagtgttacttttaaagaatatattaattattattttttatttttccctttgactccaattttcttcactaatttttcactcagacccccattcttaccagtgcttgtttttcccggttcccggttgccctaccgggaccgggacctgagcttttcaaaacccgggacctcggatgaccgggaattcccggcccggtcccgtggcactctaatttttacatctgggcaaagcatgaccgcattttggagttcgttttgcgcaacatttggccaatgctcgaaaaaaacatttgtggcatggaattgcccttcggatttttgcaccgtttgcgtaaatttgcccctttttgaaactatgttcgttggatcagatactaaaaaaaaattcttaggataaagaaattttgctgaaagaaggggggagggagggtaccatccgaaacatatctgagtgtttttttaaaattttctatttaaaaaattctctacctttttaaaaattcattttggtttccagcagttatg

SEQ ID NO: 108305 - DNA, 1003 bp, Heterodera glycines
acagattgccttatggtgatcttggtgagatatcacacaatttttcccatacaactggtcatttcgtgacttttcttaaagatttaaggcatcttccctgctcattaatgattttaagcagtgcttctctgccaactatctgtctgcaatttgctgcccaatgtggtctcccacataagaaacaattcggcattgtccctgtttccctcatatttcttcggtcattttcttggaccgaaaatactctttttacatcgccgactctgttataattatttggtctgaaaccatttcctttgaatcgattattgcttttttgtatttcttcaaatctcttttgagcaaataaattagggtttaagcttaagcttctcgtacagcgcagtgcttcttctcttaatgatattacttcgcttaggcactctctccatctcgaaaccttccatttgaatcccgattctttttccttttttaaaatttctaagattatggtccttgttaaattatatttttcactgccagtaacaaaaattcaccgccttcttccttcatgtttttccaaattatgtattcgtctactactacatatgaattctccatagcaagcattgagagaaattccataatactcttttgatgaagagacaaataaaactatatggattagaaaaaattccggcaccgtaaaaatgttataatttattatcttggatgcttggaatgtactaatttttcgccactatttgcgataatttcgctttttaattaataaatttgggattttttgcgcttaaaatttgcatccgattgattatgattactctcaaataaggattaaataaaatttttgtgatttgtagtttgtttttattaaaaaaaatccaatttattaatatgaaaatcatttcacgaataataaatgcccattcattcataaaattaaatcatattggattttattaaagaaatcatacaacattttgagaatattttgaagaaaatg

SEQ ID NO: 108306 - DNA, 314 bp, Heterodera glycines
agggtcagcagggcggctttttggaaaactatgtgcgacgtggccaaaactaaatcaatgatcaaatttcatctaccaaatttctctcatcattttgccaacagcactcaaagttcaaagcatttgtccgcattcggcaatgttttaagcctaaatcataaataacatttttgtattagatcacggtgatcgagacactgaaaattgggaaaattttagaaaaaaattcataggggcttagaaaatttttttgaaaaaaatcattaagactaccaaaaagaacacaaaaaagctaccgaattgtcttatgaatg

SEQ ID NO: 108307 - DNA, 441 bp, Heterodera glycines
tttttgaatttgcagtctccaacaattttttgattgttttaaaaatatgtattaaatcaacttgagtcccatcttctatctgcgcaatttcaatcaccatgaacttcgcaaaaactttaaaacaaaaaagcattaatacttccaattttataattcgttattcattttagctcatttctcaagtattgaaaaggataattaatgtccgcaataataatacgtttacaaaatttgccccttagtgcaaaagctcatgatatcagagacttctttggggatttgaaaatccctaagggatcagtcaacattgtcgggggttcgaatggcgatgccttcataggatttcagactgacgaagacgctaggctggctatgctgctggacggacgtttactgcaccaatcaaaaattcggctgatgctttcttcgaggagagaaatg

SEQ ID NO: 108308 - DNA, 235 bp, Heterodera glycines
  unsure (1)..(235): unsure at all n locations
tctttggccttaaaaatagcacgcgagacacaatcgccgcctcattcataatacctaattatgcatatccatttcatttntcgtagggttcgactggaatgaacccttgccaaagccaaccgttaaacgaatttgcgtatttacacacagtcagaattagtagaatacaattttaaatctcaataaaacatgtaatttacaaattgaggttaagtgtgcggtatttattgaaatg

SEQ ID NO: 108309 - DNA, 392 bp, Heterodera glycines
tagtgggcttgttcactttgccaattgggtgattagtgctaattatccgcgacggattgtcttcgattgtgtcactccgtccgtccttctcatcgcccctctctctttctctctgttctcattctcagctcgtgttgttctctttcttctgtgcaatcaatccctaattatgtacttagggtgtaacataagtttccgcacaactttttttaaagaatttttttatgaatataaatttaaaaaaccacaatcatgatccgaaatatctgacattattattgagaatgagtttgctatttatcgggcaagggataaatcccattagaaaagtatttaaggagttagagttgataatgtaaaaatggtcattttcgaggtatgtatttttgatg

SEQ ID NO: 108310 - DNA, 106 bp, Heterodera glycines
ggtgtccttattaaaggacaagtatgggaaaaatgaaaatttaatcagagatttacataatcaattggcccggctttcaaattcgatatctcttggagacgacatg

SEQ ID NO: 108311 - DNA, 1003 bp, Heterodera glycines
aatgatcggaataaaccccctcggttctcttttgatcttcgaaaattaattagtgcgggaaataaaggactatgaaaaaccgtgaaataatggttttaaattagtaatttttttgcaataatttttaatcacgaaatattaaaaatatttatattgggataaatgttttttaattcggtaataaatttttttcaaatcattctatatccgttttttcatgtgatgaattaacaattaaaaaggatagtttgctgggactattcctcccactaagcagtattttgtcctatggtatttttattgcggaaataaaggactatgaaaatgcacgattaaattaataaataaattcttttcaaatctatcccatattggaattcatacatctgatgaattcacaattaaaaggcttgtattttgggactccttccattaatcaataaacctcacacccaataccgaaaaattataatatgaataaatgaaaaatattttttaatgcacatgtaattaagaatcgaaaaaataaatttttttgcgggaaatgaagggcaattttattctcgtttaatttttattaataagtatttttcccgatttatatcatgaaaattataataaatattttcatttcgggaaaattgctctgttgtcaaagggttttaaaaaatatcagagaatttcgccctcatctaaagctatcagttatatctatttgttgttgttaaaaaataattaaaaccattaactaataatatatgattaaaaatagttaaaataaaaatctgatagggtatggcgggtaatacgctgcccccctcaaaatgaccccaacaaatcccgaggggtggggtacccaccaaaaaatcgttggcccacctgcttacgtgtggtcggaatggtgcaacacttttttttgaaaagcggcacgtatgtaagaagtgacccaaaggtcgatgcgcacgccaccccattcccgcccccaccaaccccctgccccatg

SEQ ID NO: 108312 - DNA, 51 bp, Heterodera glycines
cgagagttccatgtaaaaaagcgcaaatgaaacttatttttcaaagtgatg

SEQ ID NO: 108313 - DNA, 209 bp, Heterodera glycines
ttgttcgagtgagtgttgtgtgtcaccaaagttggggcttgaacaaaagagcactaccgatccgcttctttccaagcgccgcctttttaaatgtgtgcagcagcagcgcggaagaagcgccgcttccgcgaattttcttccctcttgctttccttgtagcggtaatagcaacagcagcggcattactgcttttgcgtttggtcaatatg

SEQ ID NO: 108314 - DNA, 225 bp, Heterodera glycines
atactgttcggcaaaacattttcaaaccccctttaattaaagttaatcaggcccaaaaattattttttccaaatttatgttgaatattacagtatgcgacattccggattttggtcatattcggaagtctttaagtttaataaaatattgaaaataaaaaataatagtcttaagtagtaattaaattaatttttttttttattaggtgttgggtttgacagtatg

SEQ ID NO: 108315 - DNA, 408 bp, Heterodera glycines
tgctcccttcactctttccccgcccccgggacatcgaatccgattttgataattttaaaatcgagaaattcagtgacaaataatcattacaaacacttttccattttttcgctcatcgtcaggcggaatcgcgaagcagagacatcgttcatcgaagaaggagaaattgcatttgacgatcaatcgtgctcaaattgttcacaaacgaagagattgaaaaagtccgcaaatttttgcatgaacaattccaatccgacaaaatcaggtgccccggggcaaaaaacaacaccgaaaatggcacctcttttcgatatgaaaatagttttttaaaaaccattcaattttagaggtattctgcagggctctggcggtcagttgcgcgtcaaattcaaaacattgcaaccgatg

SEQ ID NO: 108316 - DNA, 657 bp, Heterodera glycines
gttgtgcgcagcgacaacgcggagattcgcccgggcagatcatcatatccttcagctccacgtacaggacttcgctcctaaattgaaaaaatgtttttatctaggatttcggattgctccattcgcttaccagttgattgtccctgcttccgtcctcggataacatgtggagtacagttccagtccggcgatcaaatcaagcgttccttcgacgaacaccggcaaatcgggatgatcgtcgttgaaaatgtgtacacaaccaagaacacaaagaggattcgggtaatattcacccggggcgctcaaaatctcttctttaaaatgtgtatacaattgttcaacgctgccaagtccaaaggattcttgaaaatgctttatcgctctttgcatgaaatagttagcagcagcaaatacgcaatataattatttttggctgtcataaaatgacagtaaatttatgcaagtgtggtatggaaaattcaaaaaaaaagtgagcatttaaatagtggcacatgatcttagctggtgggcggtccttggtgctatagtggttggattgtatacagcagacgcgtcataggctccgcccccattgttgttgttttgcaacgaaagtgaatggaaaagatcgtattcatttagttccatcgcgtcatg

SEQ ID NO: 108317 - DNA, 257 bp, Heterodera glycines
ttttcggcggcgcctatctgcaccgccgggctcctttattccccccaaaaatttttggaaaatgcacgccacaaaaaaccagtttagaaaaagcaaaaaaagggtcgtcaaacgatgttcatactccttcacaaattggcgctgtgatcacccctctccccccagactcgttagcaaaaatttcggttaaaattggcttttttcgttaaaaattttttgttgatcactcactacccgatcggggtccccggactatg

SEQ ID NO: 108318 - DNA, 54 bp, Heterodera glycines
caaaatgagcaaaatgataactctacagcagttgatcaaatgggtgaagaaatg

SEQ ID NO: 108319 - DNA, 232 bp, Heterodera glycines
agaatgaccattggaaactcgaaatgtcattaataaccgctaattgaactgaaaagacagataatattcgagactatagactgtatagaagaaatttctctgatcatacattgccgtttaaactgccggtcaaaaaaggcatttattgggacaacagagagggaaatggaaaactgctcatagcgcattgatgaggataattagttttaaatattttacagtacccgagatg

SEQ ID NO: 108320 - DNA, 560 bp, Heterodera glycines
aactagcgggtgcgtgaaccgtcggatctgggcttgggataaagcgcttcgcgcttcttgagcttcgctacctaggctgtgaagcgattcaaattgatcgaattggttggagtgatttttttgaatttttaaaaaattattaggggtttttagtccacatcgaggctcaagacgggcgcttcgcgcccgttttttagcttgttaggccgcttcgcggcctcagtcgggctcttcgcgcccgtttttcaaattttgttgggcttggacgggcgcttcgcgcacgttgtttaattttgtagaggccaaacgggcgcttcgcgcccgtatttaaatgttgttgagctcagacgaggtacaaaaattgttggaagatgtgttagaagaggtacaacagtgatcagaagagttacaacagtgattagaagaggtaaaacagtgactaaaagaggtaaacagtgattagaagaggtacaacagtgattagaagaggtacaacagtgatcagaagaggtataactgtgattaaaagaggtacaactgtgattaggagaggtacaatg

SEQ ID NO: 108321 - DNA, 1003 bp, Heterodera glycines
atgattacgagttgttaattattgggtaatattaattaagaagcaattaatcattaaatggtgagaaattaataacatttttttgtcaaaatgattttacggaggaattttatggcatgggtgagaaataatattaatgatttatgacaaattaccaataatggtgagtagcggtgtagtgggctaattgtctcattgaccaactgtcatttttaattatcttccttgaaacggtttggtgtaagtttaactaactatcagctcctaacatccaattattaaatttgggaaatttatgaattaattattttttattgggatgattttacataggaagtttatcgtttgggtgagactcttcaaacttatgtgattaattatgacaaattaccaagaatggtttctagtatatgcttgtgaataatgagtcctcgacaaccataaggtctaattagtgtcagtttgtaacgacatgatatatgattcacaactaatcactatctatataccattgtttttagatgagaaggtgtagtaattgatgaatttaatgatgaagcattgaacatattataagtgggaagtatgaaaaaatcaaagaattttaattaatagtgacagttgttaaatcaatttttgggtaatttaattaagaaccaattaatcattaaaatgcgagaaaattattaacaaagttttgatcgagatgttttacatttgtgttttggtatggtcgaatcccatgctaaaatactccaattgctaatagggtatgacatctgcattaattataattataaccaattattctttaatttttacaaactgaatatttctggggaaagaagggttatgatggaacttaaattatatgccacatttttgctgtaattcaatgaagcagaatacttgaagctgagacaaaggaaatgatgaacactaaatgagtatgataattgttgacagattaacttagttatggtattgatggctaggaaatatg

SEQ ID NO: 108322 - DNA, 145 bp, Heterodera glycines
aaaattcgccccttagacgaaataaaacaattaaaaatttatcaaagtttggggacgggtaaatttagctgagggttaaaaatttaaaatttcttgagaggaaaaatcaggcatgaattgtgttcttttccatttgtttcagatg

SEQ ID NO: 108323 - DNA, 298 bp, Heterodera glycines
ctgtttgaaggacggcgcgctttatgtgtgcacaatgccagcaaaaggaggcgaatcggaggcggaagtgcaggcggatgaggagcaggaacagtgccaattcagagcgaattcgcacgaagtgagaagcaaaaaaggaaagggggggggggcaaagggacaacaactaatgagtgatcggaaaaagtgatcaggtaggggggaagctttccacgtgttggcactgtgaggcatggcttatctcggccaattcaaattatccgtccaaaacctttcgcttttccctcatcagacaatg

SEQ ID NO: 108324 - DNA, 321 bp, Heterodera glycines
ttaggattgctttcctaaaaatgggcacgagatgttgtttcgaaacagtatcttttttgtccttttttcaaaacactcaaataatcgtcattttttctgcaaatctacaaaaatttaagtatttgaatctaatttaaaagttcccggacgtgcctttagccataacaaaccctttgttcttaaaatttgtttaaaaaagcttgaattggatgttgccagtcctatcttttctgcaaatcatattaatttcttttttaagaagaacataaacaagaaattaaagaattggaagcaaaacaagacacattaaaaagaaaaatg

SEQ ID NO: 108325 - DNA, 55 bp, Heterodera glycines
tgaacgatctgaacgtgaaattggccaggctgaagttgcataaattcgccgcatg

SEQ ID NO: 108326 - DNA, 67 bp, Heterodera glycines
tttttccaatatttaattggtgtttcagacggtaaatcaagtggtcatctctgactatgctcaaatg

SEQ ID NO: 108327 - DNA, 224 bp, Heterodera glycines
cgttctaagatttttttcttgaaaaatttctaagttagcaaaattttttttaaaactttcacggagggaaacggcggggggggggggggaaatgaagtgcaccccccaaatccaatacgtcctaaacatatctcttaattgttttgtttaaggtatttgccaaacttcgtgccaccctttttgccacttttgccaaatgccaaggccattgttccattgcaatg

SEQ ID NO: 108328 - DNA, 179 bp, Heterodera glycines
actgaaattttggggaaatgaataaaaaatgacggatttaaagatgcacagcaccaccttgaacaagttgttcacaaagtcgttccatttgccttccttccatttgttcagcttcagtgacaccggtccgtgcccttcctcgcgctgcgtgtgaacccacgtgtacaattcacggcatg

SEQ ID NO: 108329 - DNA, 665 bp, Heterodera glycines
cggaaaatggaaattcaatccgaattaattacgcctctctagacagaatcgatcgattgttttgcttaattttctgaccaccatttcagtacgtgttcttcaaagatgtgaagcttgtccaccattaccatcgtactgattaacaaacagcagcagaagattagtgctgtggatgagcaaaagcaaaacaaaaaaaagaattattttaattttttaattttagcgcatttattcaaaatattgtttgctaatgaatgaaaagacactaataaattaggattcattagagtttattaatgttcaagtgtgtttcgattaaaattggggctcagttggataaattcacatttttggagttgggttcaaatccaatagaaaaataaataaattttaattaatgcataatataactaattaatacagaaaacattttttggactaaaaaaatgtattatagtctttctttagtgaaaataagcaaaaatcagtcaattttaaaggttagggaattaattgaaagttaacaaagctggaaatgggaactttggccaaaatttcgatttttgaagcactataactttttgatttcttcctatgggaacgtaatattaaaaattcacaatagaagtcgatcctgctctatccaatggtatataacacatatg

SEQ ID NO: 108330 - DNA, 85 bp, Heterodera glycines
ttttgttctacatatacatatgtacaataacaataataaaaataataatttattattattattttaattgattttttgtggaatg

SEQ ID NO: 108331 - DNA, 1003 bp, Heterodera glycines
cctgtgatttgtgccgtaaaattgcagaaattgagtcccaagattaagtgttgaagaatttttgagattgagtcccaagattaagtaacgaagaattttttgagattgagtcccgtgattggaatgccggagaagaattgagtcccagtgattgggatgcatatgaattaggtcacagtgattggaatgtcgtataattgagtacaggtgattggactgccggagaattgagtcccagattaaatacagggaatgagtcccagttattagaatgctggagaattgagtccttgtgatttgtgccgtaaaattgcagaaattgagtcccaagattaagtgttgaagaatttttgagattgagtcccgtgattggaatgccggaaaagaatttagttccagtgactgggataccgaagaatccgtgagatgagtcccacgatggaagggataattgagtcccaataattgggattccgaagaagtggggagaatgagtcccagttattagaatgccgaagaattgagtccctgtgattttgtgccgtaaattgccgaaattgagtcccaagattaagtgcgaaggtttttagaatgagtcccagtcattgggatgccggaaaagaattgagtcccaatgataactaaattccaataagtaattttaggaaataactatagtaatgatagagcacaaattcaatatcgttcaaaaaattcagagtcgtctctaaaggtttaaaatcgatgagaaaactacgtttaggttaggcgcatgcttgcaatttttaataagcaagtccttttctaatttcaacagggactgaatagtccgataaaaatttaaaaatgcatttttttgggacaatttctttcaattctgaatgtctaaaacgattttgagttttggaccaattattaatgtttcattaggtttttctttgttacctattgtgccacaaataggctgctttatctatttttctttttaaatttagacaatatg

SEQ ID NO: 108332 - DNA, 74 bp, Heterodera glycines
ggtcgcacggcatttaaaagcttaccaatcgctttccttttccttttagcgttgactttttgcgcattcgaatg

SEQ ID NO: 108333 - DNA, 67 bp, Heterodera glycines
ggcagaaaatggagccctgactcttctaattgttttaacacatgcattttttgtagcatcacaaatg

SEQ ID NO: 108334 - DNA, 533 bp, Heterodera glycines
attaaagagaaaagagcctaggtttttctatgatatcgaattttttggcttaagtggctatttcaatcccgtggctttaactgggggttaaaaaataaagcccccggcggggctttattttagaagtacggtaacttccaagtacggtaatttctaatttcgccggtttttaaaaaatagcagtatgccaagaaagagatttaagatttaattaccagtatgtaacgataaaattacacaattaggtagatgggatcaaaatttttttacttacacaactcaattcctgttgaataaatttttaaatcaaactagcgaagcaaacagatacggtttggctttttgtatgcatattacttcgtatgaacattgacctgcctttgtttggatctgatacacgccctgatgatttctgattacttattagtcttgcaattaacaccttttgactatcgctttccaaatcggtgtttattaatggtaaacattcagtccattcgtttaaaaatttctgtccgactctctctgaaatg

SEQ ID NO: 108335 - DNA, 1003 bp, Heterodera glycines
tttgggtattcattagtgcattaattaacgttcctttggcataaataaaatctttttcaccccattcctttttgagaaaatcgaatttttgcgaaaaaaaaatttttttggtgcaatacttttgcgtttgaccgtgagtgtataagatggtttttcaggtttgaggcaagactttttttgcactcatttttgggttctttgatctttcagcgataaaatttaatattcccaatttttgcctctttgaggcatgacttttttgggtcactgtaattgttcacttattttggcgagattttccattcactcccgccttttctttattaccgttcctcgtttccggaaatttctagcgcaaatattagcaaaaaatttatactgaatcttcgcctttattttttaattattgaacaaaaaaattatttttcccattgaaaggttcgtccttttaaattaacgcattcatagtattgattaataaatggattttgtgcaagctaacaaaagttaaagagcattgcatttgcttacacattaaatttattataggaatgggatcataatctattgacgaaaaacaattactcaaaaatgttatttgtattgtaattcggttgaaacttttcaggaaaaaaaatactaaatatcgggagaaaaatttatgcccttttttcaaaatagcgtctcggcgatcgtgattaataatataattattttttaaaaaataatttttggttgcatgtttcaattctatccatccaaatgattattgtcaaattttatttcatgcgtttaagccgattttgaagattgactttcgactttttgttcgaatccaggttcggggttaaaattaggtcgaaatggatgtcggaatcgaaaaccccttaaacaattttactctattttccaaaaaggtggccataccatcgggactattaccgaatattcatttgactttaagtgcgttctttgaaggattaaatacctaattctcttaatg

SEQ ID NO: 108336 - DNA, 367 bp, Heterodera glycines
cctaaaaacgtgtgcttttcctgtacctctaattaaaaatggtaatttgaattttttttaaattttttaaaagcctattcaaagtgttttggattcaacgaacaaaattttgttgtttccgaccaaagagtatcaagagtatcacgtaatttgatgaattttattttaattttattcattcattcatcgaattggggatggatttttttttacaaaaacttatgcacctaatttgcctttaattagtaatttgcaagtattaattactaattaatgtgcgcaaacctttctatttaaaggcaaatgatagtgtttaattggaaatcattcgaatatttttttagcagcaaatttcacactgaaaatg

SEQ ID NO: 108337 - DNA, 512 bp, Heterodera glycines
acaccaccagctgaatttgtgcgaagaaagctaaccggtttcaacgcaattaattactttttgcttaattagccttacatttgctgcttaagtccgggtaagggtattcgccccgggcggtttcaatctgacaaaatgtaaacagcagaaaatcaattgatcaagcaacacaaatgatgaataaaatgaccagagaaatgccaagactccacacgtcggtccgaatgtcgtacccgtcttgactcgctgttaagcgttctggctaaaaccaaagcatgttaattatctggtaattagtagttaattgtgttaatttgccactagtaatagccaatttatagagacagatttcccaccgacatatacggtctgcagccaatgtccttcgttttagcaattgagtccttaaataaaaattcgttttcgcgccgcaatgtgttcaaaatgcctcaaggtatcctgagattccaaaatcgcacagttttatttgaccacgaatgttcaacaaaatg

SEQ ID NO: 108338 - DNA, 530 bp, Heterodera glycines
  unsure (1)..(530): unsure at all n locations
aaaatgaatttttattnttaaaacctacttttaaaaattatgataaaatataaaattaaaataccggctgttaatgcaaaaaanttgcggcttttttcttgtgttttaatttgtgaaaacacaatttcagaacggagttctgatttttttgaaaatcgaaagtttccagaattctggaaaatttttcatctttaatttataaaaactagagtccggtaaaaaattttttccgggaacgggaaaacgaaaaacaacggggcgggattcccgtgttttcccgcgggaatctcgttcccgccggactctaataaaaaccaaataaaaaattttattcttcctgtaccaagggtacccgcattagcaagatgccaataaggatattatccatgcaaattttctaattttatttttgttcgagttcgggtcagcggttcgaaattgggaaaaatgggtgctgtattcgtgatcagcgaccctaaaaaccccttaaaacttattttataaaacacatttataggcatttaaaaatg

SEQ ID NO: 108339 - DNA, 105 bp, Heterodera glycines
tgtcttcttccaccctctccgtcgggtactgtcaactttttgcacacgccgccgcctcctccgccccctcggcctgcaattcatcagcctcatacttctccaatg

SEQ ID NO: 108340 - DNA, 126 bp, Heterodera glycines
  unsure (1)..(126): unsure at all n locations
caaagcgaagcggagacggaaaggtggcacggaaaaggattgggaaatttgttttgaaantagaaaaataaataaaattaaaatgcaaaaaataaaaaataaattttaagaattcgcttggcaatg

SEQ ID NO: 108341 - DNA, 664 bp, Heterodera glycines
tattttcccacacgattcgagaatcgtatataagaaatttgttgtattcttgactacagtccagcaggagttattagtatagaaaaaatgaaagtgattcattttttaataaaaataatcatacgaatctttattattaccacttactcaattctaaattttgtatatgcaaattgtatattaatagtaattcatatgtacaataaatcaagtagaaaatcaattaaaaagaactgccgaaaccaatcactgtcgaaaacagctggtacggttttatcgaacttaactctttttataattagaaaaatcgcactaaattttacagatatactccccggtacagaactaacttatcctgaaaatatttcaacgcatattgattgtaaaaatttgttcgaaattctgagtttccaatatttttttgcaacattaattcataaaatattttttgaaaaagtgctctgaaacgcaccaaattttaattgaattttcattaaaacatttttcactcgatctttaggggtgtgtttttcccgaaacttcgggtaagttacccgaagccgaagctcgaagttcgaagccccaaaaacgcgaagttttcgaagcacgaagctcgaagtttcgcccacccctggttgggattgatagagcggtgccgtgaatg

SEQ ID NO: 108342 - DNA, 1003 bp, Heterodera glycines
acatttcgaagtgtttggggtaaaattgtctttttttgataaatcatttctataaattgaaagttccagcagagaacttcgaaatccaatgacgaattaatgaattcgagatttcattagtttctacaatcgaagaaaaaattttttaatttgaaaattatgttaataattaggaaaaaagtcgatttttagggggtgtatttttcaattttcttgtatttttattgcaatttttctcaaaaatgccaaaatatgtgcaaaatatgtgccaaaccccaaaatatgtgctaacatattttatgtgccaaaacgccaaaatatgtgtttttatgtgtttataagtcgctctaaatcaaaaattgttcggagataatgctatttttgggcttctctcgccataactaagccgcaaaaaaagtatgttaaaacataaaaatcctagccctaataatcatgcataccaattgtcattcatttttaaatagaattttcccatttcgaattattgatgcaaaaacatatttttggactcagaagttcttaagtggaggagaaaattcaaggaacaaccaaactatagaggtaaataattttaaataagttttctaataaataaaattgagaaaaattttatatttattttttcattcaaataatttttttgtttatttaaaagtttaatttttcttctttaatattaatgttatggccaaaaaatattataaaaaaatgatttaccttttttaaaacgctacaaaatattctttatttctaaaaataaacggaaagaaaaaatatataaattaaaatacaaaaaataaaacaacaatattgttgttgtttttttttaattttatttttttggttgttctcctaatagcctatttaattaaatctattattaaacaatgcttatgctttataaaacttcaaatttattctccgtttgtctaattacacattgacacaatacgaaatttcgaatttcttgagggtaattatg

SEQ ID NO: 108343 - DNA, 94 bp, Heterodera glycines
aagctggtgagttaacggaagggaatttaacatttatccaactaattaagcgtgaggaggaacgacgggagcaagcggaggaagacaacgaatg

SEQ ID NO: 108344 - DNA, 173 bp, Heterodera glycines
tcgggatcggggtttgccggggtcgggaaatgccccctttcgaggcttgcaaaatgtcggggtcgggaaatgtcattcctctgggttgaaaaatgtcggggtcgggaaatgtcagttctcggggttgaaaaatgtcggggtcgggaaatgtcagttctcggggttgaaaaatg

SEQ ID NO: 108345 - DNA, 370 bp, Heterodera glycines
  unsure (1)..(370): unsure at all n locations
cgacaggtcaaatgggtagtagtgatagagacaanttancattggtgatgaaaaaaatgaggtcaatgggcagttgtgatatgagttgaaatttaatntaaagaagcggaaaagtcgacctccagcaaagggaaattggtttttataacaatttgagtaaaaaattttttgtgggaaatttttaagaaatttgtagtagaaataaatggaaaaatgaaatgaatttcaataaaattaaaatgaaaataatgcaaagaagtttttatgtgagaaaaagaaaaaaaaacattgacgatttgatgaatttaaaagtttatatggccaaggcaaacagaaagaatttgtgaaggaattgggcatttctgaaatg

SEQ ID NO: 108346 - DNA, 79 bp, Heterodera glycines
attactttttctcggccacatcgtatcttcaaatggcatacgccccgacccagcgcgctcagaggcaattcagaaaatg

SEQ ID NO: 108347 - DNA, 314 bp, Heterodera glycines
ggagcagatgttggaggacgaggaaagagagaaggcggcggggggtgccgaaggtgaacagatcgccaaaggtgggcactatgatcactcagcagcaggcagaggtataattagtgttaatgcgcgattggaaaacgtcaaaagggtcgatcagagggggagtggggagggacggggattgccaaactgatcagcaaaattgcccaattacctaattacaaaatgcaacagatgctaactcaactgtctgtggcactgtgcattcgcaatttgttgaggcatttcaccagacaattgtcgccactgaaacaatg

SEQ ID NO: 108348 - DNA, 1003 bp, Heterodera glycines
atctctggacaaaaaagtgacttaggactccgccactttaagcagattaatttacccgctcaaacccaaagtcatttttacaaaatgtcatcatcatctcccgaaaaaattttggctcaacctccgtctccgaaaaagtgcaaagttgatcatcgagctatgtgaaaattttcaaaggcaaatacatgttagcaatttatctctgtgatgatgactggcggaatcagttccacaacaaagagaaagttcgccgaatgggcaatgatcgtgtggccctaagtttcgaaatgtgcgaaagttgtgcgcgtgtgaattgcaacggaacggacatattggctccgtcaaagaaacgtaaacttttaacccatcaagcctaatgagatcatgatataattattttattattattattatgtattttacaatcgaaccaataaaaaaataatctaattcaatttgcgcaatggtggcaggggaggggggggggggggtacccatctgtcggcagcaaattccgcatcagttgttgttgttgtgttgttattgttcggcatatcctcacacactctgccctcatccttttccttccttatttttgcattttatctcccaccctcttcacggttaataaaaatgagtgcaaattccgcatcggttgaaagtgaaattgcgtcactataaaaaaattattggcgcacagtccgtaaaattgatgcagatgcgtcaccattttgtgaactaccgcttcagacttgagaaacttgaggcttgggccggtgaagtaaggtattcaatgttttttgtgatcacagtttttaactagggtaaagacaaaatgtttgttcgttcacaacacgcaacaaacgattttctgtggacgacgagccagcaacatcggccgcaacttccggtaatggtagtgtaatattactgggaacagtgcgctttttcagatgggatggcaatggaaagcttcaaaaaagattttttggaagccaaaatg

SEQ ID NO: 108349 - DNA, 436 bp, Heterodera glycines
ctccccaattcttctttccttttgtgaatttttccaattattctcaactatccacatatcattgatccatctccttttttttcgcccatccatccgcacaccccccaccctaccctctacacaaacagtctccgtaccagtcacccccttcgactgtgttgtgcacgacttcttccagccgcccccctcccaatataatcgatcgtacacttcacataacgaagttccgaaaatatctttctttgctctttctttttcgtttttcagttatcattttaataaataatacaatttatttcatttatgtaaaatttggtcaatttcaataaaaattcagattttttcttacaatagaaattttttgcctttttttcccctattttttacaattttattccgttttgcacaccggatcattttgaaacaaaatataatg

SEQ ID NO: 108350 - DNA, 1003 bp, Heterodera glycines
ataaaacaagcaaatttcttctttataaattcgtaaatttctgtcgcattattagtttttccgtaattatttcatgcactttgtaaattccttcttatgtaaatgtgaatttcggaggctggggtgaaatttgaatattaaacccgggccttacttactaattttcgggcccctggaagccctacaaagcgctttgaaatcgattgaagttcggaaaaaaaaattttcgatccaatttaggagtccggagaccggataaagctggtaaaatagacgtttctttttgttagaagtatttggtcatttattatttttacattatcttggcaaaaagggagaaaacatgacaaaccgtaatctaatgccaaggggtgagtttgaggaaaataaaatttgaagaatttgttgacaaaaacgagaattaaaatattttcaagatttatttttttccggaaattatgcgtattaaatcgtttattgtaggaatatcaaatttgaattatatttaaaatttgtgatatttaaattatttgaagttttattatttagtcaaattaatgcacaaaatgatgattaatgaaaaatgactgtttcttcagtcgttccattatttgctgtaaatgcgcgcttatgagatcataaattgcgtatgcccccgaggaaaagcattcgggtgattggtctagtggtatgattctcgctttgggtgcgagaggtcctgggttcaattcccagatcaccccaaaatttttaggtaaattttcaaaaaattgaacatctaataaggaaaaaaaaaattattttctcactatccattaattatttttgttcctcaattttgttaaattttttgcacgtcgtgttcagcgtataaaattaccattaaaatatttaaattttcagcggggggggggacaaaaagtaaaagtaccgtttatttaattttcttttattttaaaacgaagaattcataaatatttttaaaaattttagtccaaaaatg

SEQ ID NO: 108351 - DNA, 106 bp, Heterodera glycines
taatttaaagcagtcagatttatgggaatattttgaatcggcgggattggccgggaattctattttgctcggagatagtggctatcccttaaaaaaatggctaatg

SEQ ID NO: 108352 - DNA, 185 bp, Heterodera glycines
agttcagcgtcagcattttcccaaaaaatgggactgagtcggcgtcgccttcgctcgccaaccctttgtcggtgtgcagtggcagtcgccgttcgaccagcgccgactcggagcgctcacttcgactagaaatcgcggaaagcagcggaggcggcacaagcggagcggaatcgccgctggcgatg

SEQ ID NO: 108353 - DNA, 363 bp, Heterodera glycines
ctaaacgaacgatcagaaagaggaaagaaagaacgaaagaaagtgatcaattggcggaaacggcggaacgtacaaaaaacgtcctcaaaacaaaaataaataaataattcgccaattattgcagcggaatttcccattaaaattcagtgaaagtaaaattatgaggcaataaaaaggggatgggatgaacaaaacaataaaacaaaataaaaatatgaaaataaacaaacggacgaataaaatgccaattttgtgggggattaataaaagcgaccgattagagaattatggcaaatgttttgggactgactgagccattggcctaaaagtgacagagattcggatcagagtctcgtcaaaatg

SEQ ID NO: 108354 - DNA, 62 bp, Heterodera glycines
  unsure (1)..(62): unsure at all n locations
agtaataaattnaattatatntaatattgtgccaaatttgccaatttgaagccaaaccaatg

SEQ ID NO: 108355 - DNA, 1003 bp, Heterodera glycines
cattaaaggcttgttcattctctttttactatacaaaacatttttttcattcaaacaaatatcaaaaatcaaatcagatttttttcgtatgtattataatcaaaaaagtaccaatagctttttaagaaacaaacaattttcatatcaaaccaattctaattcagttttctaatcaaacaattctccaaaatcatttacataatcaaaacataaccattcatatcaaaaaataaatcaatttaacataaataaataagaaataaaaaatttgacagcacaaaaaagtgggaattttcatttttaatagaatgcttttttgcaacgcagaaaacaaaaaccaaatatttcttttttttcaaattcatttttaacgcaaaactcaaacaaaacgccacacaaattcaaacacggacacatacatacatacatacatacaaacactcaactttattatataggatatgaatgaaatttatgaagaaattaattcaaaagctttaaataaatttttaccaaatttcttataaaattttctaaaatccacaaaaattcttaaaacaaaaattattggcccctaaaaagctgtacaaagtgtatggcctcatatttttttttgttgtttaaattggccaaaatatttaaaattaaaacggatggttggggggactcatatgccaaagacccatttgtaaggaacacagttttcatcatcacttcactatcctctgattgttgtgaggtgatgattgatttttggaggaaaaaactttacggagagaaaggctttttggaagttttaatacattgtaaattgactctgattgaccttcagttttttggacttttccttcgcaaagaaattttcttacagaataaattatacaatacatattattcctctaacaataattattaataataataataaataatttataaaattaagcaaattttacaaaataataactaacgaatttgcgagtttcttcaaaaattcatgatg

SEQ ID NO: 108356 - DNA, 70 bp, Heterodera glycines
ttttagccgtttttttttgccaaaaattactattttttgctcattttggtctccatttttcaaaaatatg

SEQ ID NO: 108357 - DNA, 1003 bp, Heterodera glycines
tcagaatcaagagtcaattctaataattttttaaaggtgtttaaggagctagacattaacgttttatcaagggcattccaggccttgactgatctgttaacaaaagatttggaagattttttagattgtaatttaacatttaaccggaaaaaagacttatttcgagtatttaggttagttcttttaaacagagaatttgggtccaaatgtgtaaaaccatgtaaaattttgtaagtagttaggaggtcaaaaatttttcttcgtttttcaagagtagctaatttaaaaaattggagccgttggtcataggtagggcccggatttttatgtgctaaaaatcctgaaatatgtaataaaatatgtgctaaaaaatgctgaaatatgtgctaaaaacccccaaaaatgccaaaatatgtgctaaaatatgtgttaaaaattgaaaaaataagtgtgtttttgcataaaaattcccaaaaatctcattctttatcatttttagcccatacaacgcaaatcaaatacatttcgaagtgtttggggtaaaattgtctttttttgataaatcatttctataaattgaaagttccagcagagaacttcgaaatccaatgacgaattaatgaattcgagatttcattagtttctacaatcgaagaaaaattttttaatttgaaaattatgttaataattaggaaaaaagtcgatttttaggggtgtatttttcaattttcttgtatttttattgcaatttttctcaaaaatgccaaaatatgtgcaaaatatgtgccaaaccccaaaatatgtgctaacatattttatgtgacaaaacgccaaaatatgtgtttttatgtttttataagtcgctctaaatcaaaaattgttcggagataatgctatttttgggcttctctcgccataactaagccgcaaaaaaaaaatgtaaaaacataaaaatccggtctctatatattattatttaattaattttggttttaaaacaatg

SEQ ID NO: 108358 - DNA, 107 bp, Heterodera glycines
aggattactttatggtggaaaaacaattgagagaacgtcgtgttggaatacaaaatttctcttcgatggttttgtttgaccggaaagcgaagcagcgacaaaaaatg

SEQ ID NO: 108359 - DNA, 111 bp, Heterodera glycines
atatatacatatatatatttatagtattttacacttaatgcgcttgtggcaaaaatcatcataattgctaattcatagtttacccctcgtacccagttacgtaaaaaaatg

SEQ ID NO: 108360 - DNA, 166 bp, Heterodera glycines
tgtcagtgttttggtcccggtcccgctctactctattttttcactaatggtactcaaattttactataaaagttccctggtttcttcttcccctcctcattccgttcattcgctcattcatttttaaccgaaattttccccgctcatttttgttgctgcaaaaatg

SEQ ID NO: 108361 - DNA, 272 bp, Heterodera glycines
tttttggcatttccttcgccccgccctccctttgatttgctttgcttacaatcggtcgtaagctgcgcgttgtcggctttgaactgtccgttcgtcccttcgattctctgccaatttctgtctgagatgacgagtgccgaaaatgacttttgaggagggaaactgaaaacagaaggaaagtgatcagacgaaaaaaagggacggaccgtacgaatgccaacgaacgcgcgattggaagagggaaaagcggaatcgaagccgtagaagggatg

SEQ ID NO: 108362 - DNA, 934 bp, Heterodera glycines
gcacggaaagggaagcacaaccgaaagaaagacagaacaaagccttttctaattggctaattaataataccacgaaatgtcacaataaataaaataaatgtgtcataataaaattaacaatttgagcaaattaaatggttaatgagaagagaaaagggactgattgactgctgctggacggggatgggcccggggatgggtcagtgacaattggacaatgattaaattgataaaacttaaatattagtgacgtattgtccattgacagattgtctgctgggcatcataaactcacgtagtccatttgtcaatataaaaattcaggaattagataatcgggaatttattggaatttaattgttccattttttaaataatttttttgtgctatgaaaaatctatgcaattaaaacgggaccagagcgtttgggcccccgtttttgggcccccgcgtttgggcccccgtttttgggccccgggggtcgtttgggcccccgttttttgggccccggggtcgtttgggccccaacccaaaaatcgaaaaatgtgcttttttaaaaattaagattctaaaaactaagcctgagggatccctcgccacttggcataagttaggtttaattaacattcgctcattttttacaattttacttattccaaatcctattattttttaatagttaaccaatttgatgtacattctgatttggacatttttcagaaatggctaacccaattgcaaccaaaaaacaaaaagtaaaattgtcttacgaaggccacctttacaccttcgctaaaatgagttctgatgggatgacaaaattttggagatgcgagttcaaaaacagcaccgacaaatgcaacggccgaatctggacggacctccacgaccaattcattcgcctcgcaactccgcacacatgtccagcagatg

SEQ ID NO: 108363 - DNA, 224 bp, Heterodera glycines
acacctttttttatcagaaggaatttcttatttattctccctttctttggcaaataactttgtattttcacatgcataacatacagtattctaaccaataaatgataatttatttattttcacaacgaattcttttatttattgattattcatattttggcttacttatctaacttacacattttccgtatttctgtttaacattgagtatttttgtttgaatg

SEQ ID NO: 108364 - DNA, 1003 bp, Heterodera glycines
tttttttgcaattaaatgagcaaatagccaccaaaaaatgtagtggttgcttaaaatcgcagtcatttggatgatttaacccgttttttaaaattgtctcttcttttttgtgttaattgcataatttagtattaattcctaaaaatttgattgattttctttgtttatcatttcaaattagataggtttgcatttaaattttgactattatgtaggtaaagtcgtaaattgaaacagtgggtaccggttgcgcattagttaatccatcgatttttatacataacatttaatggtaatggatgaacataaatgtacacgagttaagggggaggggggagatttgccgacaaaaaagttaaacatattaacattcaaaattttttgttgtcatacatattttacgttggtattcaataattgatttataatgacatcatcactaaaaattaaaatattttgtcttccgattccattttccacaatgcttttcgctttgaatattataattaatgcttattaaaattaggtatgcttctgctgtatgcaagcacactcattcattcatatgtttgcgcacctttcattcaaagatttcccaaaaaacagcgaccaaagtgttcaggggagaagggaaggggcaggtggggtgcatggaggcaagaaatgtaaaaaatgcattaatatttattattttcttatgtaattaactctgcttttctttgtattgcatagaaaaatggctcttaattaaatgaaatatataaaaatataaaattgcatttttgtttttctgtaataataataaattaggtattttaaattgctttcatctccattatcatatcacatatcatttacacattttgacttatttcatgtgtctcttaagacttaggcttgattgtttattgcttcactcccacatacacatattttttttctcatattcaacggccttgggcttttgctttccaattggtacagtcagtgtcaaacagaaatg

SEQ ID NO: 108365 - DNA, 736 bp, Heterodera glycines
  unsure (1)..(736): unsure at all n locations
ttaatgataaaaaatccacgattaagataaaaaatgtttgtttctcccaattttttgtccttttttacggtgaatccgaaggagagtaaagcgtaaggggaactaaataaattaaaaatttgtaaaaatttgtctttaggataataaatgctgtttatttactgatgcattttttttgattgaaatttcaaagtaaaaaatgccggagaaatccttgccaaacaaaattggatgggtagctaagacaatgcgaaatccgcctaaattaaaaaaatgtattgtaaatttagatttaattaccttcatttccgttatggcaatggacccttaactcagtgatttgaatctcattattacaagctttggcatccccaagattttgtcggaagtttaaaagcgctttaaacaaaccaagaatgggagccggcgcaaaaaaagtcaggaacaaaagaaacttcaaaaaaatcatacgtaataaacaaaaatggagattaggattttgacgatataattttagcgcgngcttattgggttttcaatatttatttagaaaatcaaataaatagtgtttttagcttgctttgaaaataattgggttttcgcttttgaccgaaaaaataattgctttaaggtatttcgagaatttgaaccgattttttgacaaattttgtaatttccgaattttgtttttttaagatttgcgatttcaagaatcaaacagaaatatttggaaatg

SEQ ID NO: 108366 - DNA, 110 bp, Heterodera glycines
ttttcggtgtttcatataaataatgacaatttgagaattttaattagaaaaattgaaataataaaacgtaataaaaaaatgcacttttacagaaaaaaacagagaaaatg

SEQ ID NO: 108367 - DNA, 87 bp, Heterodera glycines
tcaggcaccaattttcatattttttccctttttaaataatttcaaatttactctaaaaatgtgtagacatcgttgctgtgccacatg

SEQ ID NO: 108368 - DNA, 197 bp, Heterodera glycines
  unsure (1)..(197): unsure at all n locations
cctgcannggtcttgtaaaaatttaaattttgaaaggcatttttgtgggctttaagtatattcgaggctgtggggatcgaattctgcgacatggctttaaccaaacggccgcccaaatctaccggctaaaccaggtgttgtttatgtggaaatggaaacttgtcaggaaaatttaaaaaaaaacaggtggacaaatg

SEQ ID NO: 108369 - DNA, 678 bp, Heterodera glycines
tcactatccaagcaaagagaatttcaaattctgcaagttgagaaaaactttctttttaaacaaacatactatatatagataatatggttggacggatccggacccaagtaacaattttcgtgctggggggtcatagggaggggggggggacgacaaacttacgaacggggtcctgccagaatcgacgagtttttttttccgatttttgcgattttgagcattttttaatgaaaattaagtttttgtggttctgcgatgctgataggcgttgccagggaaattttttaagaatttaaagaaatttgtttaaaaaaaagttgaattttcagtaatttttcttttgttcacttcgtttcagattcaatttctaacgatttaagtaaaaatgaaaacatgaaaatgagttaattttaattattattgcatcatttgattttttttaaatcctcatgaataattaattgattaactgtctccattaattgattaacaggccagtgtttacctaatttttatctaatgtaatggggagtttttttattgtcttctcgcccatttagcctgtttcctttccacttcatgtcgtgcgtgctttaccactttggtcatatttcttctcgaccactgctcattcgaaccagcagataagcaacaattccgtgtctctctctctctatg

SEQ ID NO: 108370 - DNA, 156 bp, Heterodera glycines
ggtcgttttgctgtttgttgtctcattggcactcatattactcaattcagtcccgttccaagcgttgtcctaccaaaggatgaaaacaaatcctttgggtctgaaggattgccaaaggttcagtcggagcaacgggcggcggacaatttagaaatg

SEQ ID NO: 108371 - DNA, 1003 bp, Heterodera glycines
atagaaatttttcaaaattggaatatcatgcccaaaaaatcagattttcaaaaatgagaacatttaacaacatagccttaaataatttttttacaatttaataaattaatatcaatttttgtattttcgcctcagatgatcatttttaataattttgagaaacggaatcaaaaaatcagatttttaaaattttttttgctgcaaattttttcaaaaactttaggggaaccggggggggggaggtcggcaaaatgcctaaaaaatttgccaaaatttctaaaaaaattcatttttttgggggtttacttttaagaaatttccaaaaagtcgatccttaggggtgtattttttcactttttttccattttcatgtgaaaatttgctaaaaatggccgaaatatggacttattcccgaaacccccaaaatatggatttatatggactaaaaaccttcaccaaatcaaaaaattttaacgtaaaaatgatatttttgatcccctttcttcatagcatatgcgcagaaaaaatatgtttattcaatataatttataaccctactacatatttacggaaaaaagcaaaaaaacatatacaaggtgacattttgatggaaaatgcgtcagtgaatcaggatttattcaaaaacgagtactttagtattattacctgaaagcataagcgttgattggtatgtaagcaagcttacaacaatccattagagtataatttcatgttattagtgaacctttaaaaacttaattgaaaaaattagaacgaaatttttctacattctgaccttttgtaatacaatacttaatgaaacagtactttattttagaaatactgtattactgatgcattttctactgacgctttttacacttacgctttttccgggaaccttttaaatcagttccccgataaaagctgaaaaataatttaatgaaataacctataacaatgagagtataaattttttaaaaatttctcaaaggttgagatg

SEQ ID NO: 108372 - DNA, 75 bp, Heterodera glycines
gaagaggaacagaaagtggaagaggaagtggaagacgaacagaaagtggaagaagaagtggaagaggaacagatg

SEQ ID NO: 108373 - DNA, 57 bp, Heterodera glycines
atatttatttttaaatctatatttgcctttttctttcggatttccagggactgcatg

SEQ ID NO: 108374 - DNA, 411 bp, Heterodera glycines
taatatgaaaaatgatcgattccgggttcggggttcagaatttgtcaaaaataaggtcggattcgtgctcagtaccctaaaaaaaaacgggaccagtaaactgcaggattgcctttaatggtaccgaaaaagtgccggtggtgtaaaaaaacggatgaaattttgcgcattaatttcactattttactcggagcggattatatataactccgttcatagttttacaaaccggacccattaggtaccattcgatagcattaagtgtaaattttgtaattaaatagagaaaccattgggctatggaatgacatcaaattcatctaattcggacaaatacggggggtcttttgaataaaaaatgaaccccatttttcaataaatttttgtttattaaatttcattttttcgatg

SEQ ID NO: 108375 - DNA, 58 bp, Heterodera glycines
atttctaaaacggttataccaacccccagatttttgaatccggttttcagaaaaaatg

SEQ ID NO: 108376 - DNA, 895 bp, Heterodera glycines
attgccaattaagaaacaaatttaaaaaattttaaatttgatattcaaatatttttctttttctaattgttaagaagagaatttgtattacaataccaaatgtatgaaaagcatattgttttcttgtttttaaagcttctatggcatagttttttgtgcttttttattgatcaaattaaaattttcttttagtataaatattttcataaaatgctatgaaataatgggtgaattttttgagtatcaattttcataaatttgaaattgaccggaaaatgctgtatggccaatgagcaaaaaaaaaggtcaaaaccaggaaagtgtgccgactccctcaaaaaaattcggcaatcggaaattgtgacgactgaaaaaatttcggccggaattccgagtcccaaaatgtcgtaaatcagcattccggcaaatctcgagttattttctggcaacagggcctagtctaattaatcatttcgtcagcaggtgttatgccgatggttgcaccaacatggcatggcggtagtgtgcagttgtggcccaacaactcaaattggccaacaaacgaacattttcgattttggcataagcaacgaagacatgcgacgcttgaatagcttgtacaacagaaatgtcattgcgcggccatatcagtaaattaaattaaaaaataattacttaatttcattttaaatcacaaattaatggaagaattattggtaaaatttttcgatttaaaatttcattaatttgcatccaatagcaaccgatcttttttgtggcctttaatgaatgaataatgctttaagaattttgagtgtattataagtcaacaatgaacacaatgcttaagcccatttatttatgagtattttacaaaaaaaaatatttaaatatg

SEQ ID NO: 108377 - DNA, 269 bp, Heterodera glycines
tgtatttccggccttcaccaactgatggtggtgcccaattagaggtaaacggcttaatatacgacaactcgcatgtcgtgccgtataatccttatattctgctacgttaccgagtacaccataatgtactgtttgcatatggtaacaaagcaaatattaaatacgcactcaagtacccttttaaagggccaggacattgttatgtcgagtgcaaagaagagtccggcaataaaatcaaaattgacgagccggctcaatatgccaagatg

SEQ ID NO: 108378 - DNA, 497 bp, Heterodera glycines
tattcgatgaaattgattaactaaaaaagttttatttttgttgattttaaccaaatatttgaatttttatatttttgtttggcgccgaaacgcgggcgccgaaacgagctggcgccgaaacgcgagcgccgaaacgcggcgccgaaacgcgagcgccgaaacgcgggcgccgaaacgcgtgggtccccttggggcaagcccgggtccactgcgtttgggcgcgctcgttgggcgccagcatgtttttccacgaaagctttctataacttttttcaatgtcatccaaatccaacatttttgatacattcgaaagcttaacatgtttagaagctttttctaagctactgcttcacgattagacaattaccaaaacaatccttttcaaactttgcatatctatagagaaaaaaattctgcaccgtttaatgctgattttattattaattatgctaacatttaaaaaattagattattttttctttttaataggatttatg

SEQ ID NO: 108379 - DNA, 175 bp, Heterodera glycines
aggagacttgcttaatgctttgtacataaccccctctgcgtttaaaaaaaaaacaaaaaaaaattaaattaaaaaaaaaaatatgtattttacattacccatttattttagtgtatcacttagtccaaatgcatgagtttagaaaaagttgaaaacaaaaatttgtcttctaatg

SEQ ID NO: 108380 - DNA, 142 bp, Heterodera glycines
ttttcgtccctaaaactcaaataaattattaaaaacattcaaaaattttttaaaaatatataaataattaaaatctttaaggatttttttcattttacttattttaagaaattcacaaaatcatttcttacaatctcaaatg

SEQ ID NO: 108381 - DNA, 947 bp, Heterodera glycines
attttgtcctaaatataaataaattattcaagcttaaatcatattaatcatatatttaatttcaaatatttcataatttttttttcgagtgtttctccagaatccaggtcttcgatcccaacaaccaatttgaatgatttgcataataattaaatgagggcatattaagatttaattcgaaatttcagaggcagctatcaaataattgaataattaatttagaaaaattttctcatattttcttcagacttttaccaagaaatctcgtttccatgagctaaatagttttattctgaatataaataagttattcaagcttaaatcatatttttcgagggtttcttcagagtcccatttctcgatccaaacaatcaatttgaatgatttgcataataattaaatgagggcatattaacttttaatcattgttcacactagcttatcaaattatttttgttcatcctttatttctttgttacttaagtgtccattttcactggtactagttgtcccagtgctctgatggcctcgtcttgactccatcccaaatttttagacttagctcgtcaagagctttcgaatgataccaaatttgtttggaaatttttaatttaaatgggtttttggctgatttttggtgcaatttttcgtgatttaaaccggctcaaaaaccggttttttgatttttccgcacctcgggaatattttttacgatgattagaggtcataagagattgattggaacacgttttgggcgtttttttaacggggccacttctaaggtacaccctggggcgcttattctgcactagaatctattaatttttttaaataataaaatggatgttaaaaatcgcaaacgaatggaaaaataacaaaatggaaatggataattgaaatataattaattattaaactacctatgtatgaattgtaggaaataaatg

SEQ ID NO: 108382 - DNA, 290 bp, Heterodera glycines
  unsure (1)..(290): unsure at all n locations
gatgagcaaacggagtgcgtcccacgaggggaaacgatgaacggagcgcaaatnttgtccgttgtttgtttttttaccactatttttgaacctcttatttattcgaccatttttgaatctctctatttttgtttttgaatggataaaaacgggttgcatcgtaccaaatgcgctttcgatcacagattgttgcaaaatgcaatttaaacgatgtataaatgtttgtgaaggagaggcatcattgcgtgttgttttgccattgacactttcagcaaacaaacaaaaaaatg

SEQ ID NO: 108383 - DNA, 555 bp, Heterodera glycines
tatttgcacaatttctaaccaccagtttaatatgtgataaagaaatgccaaaaaaaaaattattatttttacattctttagccataataattattagaggacaaattaattggaaattaaattgaatatcgtatattttttaatcatttaaaataacattgaataatatccgtaaaaataggcaaaagaaattttttttacaaattttaatagttccatcatcgccattgcccaaaaaggaacaaacaaagccattggtaagtatttggaatttagaaattttaaaataaatttttaatatttaaaattaaaattaaaaaataaataaataataaaaaaatgtagtttaaacattttgggtttttgtttacgaaaccccaaaatatgaattttttgacccaaaaaacttcattcaaattatataaaccttcatattttaattccgactcggtttaacaaagttttttttttaataagtttccatagattctgccaaaaacgcctccagcatcagtgccaacgacacgtcgcactactgtggtgccatcgcaaatg

SEQ ID NO: 108384 - DNA, 475 bp, Heterodera glycines
  unsure (1)..(475): unsure at all n locations
atccgcgccggcccaaatacgatttcgtaccgatcagggcggaaagtgtcaatttaaaaggggaggtgttgggacgacattttaaatgttattcttttggcattttatttatgtccatttcagtccctcacacaattgtttatccgccattgacccagtcaattcattctgtccgcactcatcttctcctccgcattgtttttttttataatttaggtgttttttttgaacgaaagtattattgaaaatatttttaataatataaaactcctggcaattgtaccacgatgcatgtttatcttgttccaatctgcgcaatttatatttgcttcatttaattntaacttgttaatgtttttttacaaagttatcttaattgtggttttataaatttttaaattccaatgttcgaatttttattttttttttcaaataggctgtaataatttatataatatttttaaattttgagatg

SEQ ID NO: 108385 - DNA, 225 bp, Heterodera glycines
aaaacctacaaaagagaattaaccaatttcaaaattttttctggtttagaaaatataatattataaaaattattgaaaaggcatttatatttttccaactgctgaaacgcaaccaattaaatataaaacgaacataattcaattgaaaaagcacaattattcgaaataaattttaaaatttttattgtagaaatttattaagactaaaataaattatttagaatg

SEQ ID NO: 108386 - DNA, 531 bp, Heterodera glycines
  unsure (1)..(531): unsure at all n locations
aaaaaaaactatttcggaagttggccactaaaataattttttgccactattttggcatttttgaaaactttcnncaaaattgcaataaaaacgaaaaataaacncctaagaatcgacctaaaaaattcaaaaaatacacccctaagaaacgaactaaaaattttcaaaattacacccctaagaattggaaaaatttcgcaaaaattcttcccccaatttttttttcctgttcaatatttgctacgaaaatattttgtaactgcaatcagtgaataaaatctttttccttaattttaaattattttcaaattaaaaacagctatttaaaaaattacacccctaaatttggaactttttcgccactatttttaccactattttggcattttttggtcactatttagttaattattttgagattttttatcactaaaaatcccatccctagccataattacttttcaattagcctctgttgaaagtgccattgtggaagtgcccgacgttgagccaacggcgttcagagtgatg

SEQ ID NO: 108387 - DNA, 171 bp, Heterodera glycines
atttttcggaatttccactggagagagcgaaaagtgaaagttcattggaatcggacgacgaggaggaaggggaggagggggaatttggtgaggaggaagaagagggggaaggtgaacaggaggaggaagaggaacatagagaaggcatttaagaggggaaagggagagatg

SEQ ID NO: 108388 - DNA, 154 bp, Heterodera glycines
tgtcaatatcccatatatagtaactatcgggcgcgtggcacaatgcgacccagtcccaattcactgggccataactttatcatttctaactgaaatccctcccaccataaaaattggcactttcataaaattaaaatttctctaatgacaaatg

SEQ ID NO: 108389 - DNA, 87 bp, Heterodera glycines
atggggctttaaattgtgatcggaagaagccaatttttggaaaacgaacatacagtaattttttgtaaattttagctgatcccaatg

SEQ ID NO: 108390 - DNA, 1003 bp, Heterodera glycines
ttaataaacaaccaattaatcacaggcacaaaactcaaagagtatcatacaatgatgctgtggaaatccatgatttaattacaaagatacaacattaaataaataaatattaaataaatccaaatattattaaattaaataaagatagtaaaataagaattataatttagaacttaataaacctcttttaaaagaatcgcagcaaataaacaaaagaattgagtgtttaaaggtatcaaagcaacaaattattcaaaatatactcctatgaaatgaaaaaaaattttctcaaaaatttactttcttggcaaaaatttttaattttaaaaatttttttaggtaactattttgggttttttggtcttaaaaatcccagtcctactcatttgcaactgcaaatagtgaataaaaattattattttttaatttttggctgaaaattatgtcactattcgtcactattttggactttttgtcactatttcttcactattttgggatttttactcactattttagttaactatttcgggatttcgggattttttgctgccctaatcatgagtcattctgctcatttggtccctaatatcgggtcccaaaatttcaagtctcccaggtatcgtgtgccatgtgtgaaaatctgttcataagtctgagtttcaaatttttattatgccgtcgagttttctgatcgaagccgaaaaaagaaagatggtgaaattttggcaaaagtttcaagaatttttaacaattcacataacattagtttatttgtatccaaataaaaaaaaattcgggttaatgcaactttttagcacttaaaaacaaaatgctgcattttctaaatttttcttttaaaaattggtttaaatagtatttttattttttaatcttatttaaaattaaattttttatcttcacttaagtgtttaagtttttatacgctttatattaaataataattattttattttgcagacaaactatttattcatttatg

SEQ ID NO: 108391 - DNA, 285 bp, Heterodera glycines
tccctgatcggcattgccattttcgagttttcagatcaccatgaaagagtgttctgatgaacatggtgtaattgacttttttttgataagcttcaaaacttaagctaaaatgaacaattatttcaaactttttggggcgactttttggatataatgaagttttcaaagttgaaaggatttttgaaaattgggaattaaattttcggaagatttttgtaattgtggatttaaatgttttcgagttttcaggacttgtccaattgtaccaaaacggatgatcatatg

SEQ ID NO: 108392 - DNA, 117 bp, Heterodera glycines
accgagataaaaacatccgaatcaattaaatagcttctgagataataaggtttatcataaaatttcatttaaaaataaaccctcaattattggtatgaacgatactttccaaacatg

SEQ ID NO: 108393 - DNA, 142 bp, Heterodera glycines
tatacgatactcattgaattgtattattagtttactaaagttcaaaaattttatttattttttctaaaaagttcaaaccaaaaactgtaaaaattgtcatagcttttgaaaaacttaataaaattttttgaaatttagcatg

SEQ ID NO: 108394 - DNA, 1003 bp, Heterodera glycines
attccgattttagtctaattcttcaattttgggactatcttaaattggactagaaaatgaattgtggatgccattattttttatccgaaactattccagtcagagccttaattgcatggaaattaaattaacataaataggttattttacaagcagctcaattcattaatcgatataatttgtgaagaatttgaaatttaaaaccaaacttttttgctgaaaggctaccaaatatattaaggacaaacaaaattcaagctgagaaacttgaatctcttttagctacccaaaaatggaccatttcaagcgtttaatttggtagttcaatggctttgagtgaatgaggcttaatgcaattgaatgttatttttttacaggcaataataattattttttagttcttttttgtgaggcaatttaattcatatcagcaaaagcctagacatttaaggaacgtcgctccttcgggaattctttcatgttgaatggcgaaattgaaaatttatgtgccaaagagccttaagaatccaaactaaggcagaaaatgttttgttaaacgggcgatttaaaattttgaaatttaatcgccaaaaaaaaagccttataagagaaaaaaaatccgcttttgatgttttttgtttggacataatattggagacattttgctgagctttaccctgcgtgcacgcactaaaacagactgctccggaagttattaggccactcaaattattaaaaaaaaatattttatatgcttccaaatttaaacagaaaattaaaaccgctcacggccaattttttttttcaattttttacattgaggaactttcagaccgccctaacattgttatgatcagcagaagtacaatttttttttgtgatgatccattttttgcataaggcaaaatttagttgaaaaaaggccaaaaattctgattctgctctctcggctctctgaataaaaaaaaatattcacggcttttgtgccttttgtcaaaatatg

SEQ ID NO: 108395 - DNA, 365 bp, Heterodera glycines
ggtaattaatggagcagcaggtcgtccgtcccctcccctcccccccccgtcccccctcccgccaattttcaaagagaaattttcaaacagaaagttttccaaaaaaaatttaggaaatattttcattaaggtttcaagaaaagaaaatttgtaaattttccagtttgaaaaaataattgttagtaaaaaaattcaatattaaattttcgaagattttttttgaaaaatttcggtaagaaaatgttttttggggccgagggggtaaatgacgagaggaatgaaatgcatctggtaatttggtgcttttaatttatgtaattataatatttttaaatacatactaaatttacagggcggtgaaaatg

SEQ ID NO: 108396 - DNA, 690 bp, Heterodera glycines
ccgctttcagaatcgatcccctttaaaagagattagaaaaaatgataaatttgaaggaaacccaacaattaattgctttatttatggaaattgcaccattacctatcattttttcattattaaatttatataatttttattgtccaaatttttatatttggttaaaacgaaaaaaaaaggtgaaatcttccgttttattatataagaatattcgattattaatgatattaaatgaagatttcttaatcataaaaatgtaaaaaaattttaaaattacctaaattacaaatatatttttatatccatgaaaatatttcgtattccctttgccaacatttcttcaaagcatttaaaatcaattttcttgtcaataaaataaaaaaaataaaaattatttttatctgtgcacattattataccttacacatattgttagaaatgaaaatttgctctcaaatttcgcaacttcttctcattttgtttgtattgtcaggtcaattttttttattacaaattattataatgaaaaaacaattgaaatttttcgatttaatttttttaatttaattttaaattttcgttaaagtcccatcatacaatgcgaagaaaccagatgctgctgcttccgtaagccaaccactgatcagctacggccaattaattttggtcggaaagaccggcgtgaaaatg

SEQ ID NO: 108397 - DNA, 1003 bp, Heterodera glycines
  unsure (1)..(1003): unsure at all n locations
ctaattaaatgtttcattttaattttcttcattatttttgattttgtaagaaaacaaaaaacaatcaaattattgttagtgtccaattgcttctgttgaacagcgtcgtcttggcatgaaaatcagagttcgaaagtttaaaattaataccgaaaaatgccccggatcaaaagtttatggtttttaaaaaaaatagaaaaattattttaattgataatttcgtaataataataataataatttttttttacaaatttaatatgtaattatttcataaaatcagtaattgagacaatcaaagattttttacaaacgccacaaagaatatgaaaaaaattcttaaaagtttttttatcatgtattatgatttattttaattaaaattaaagaaataattataaataaaaataaagtgcaattgattgaatgtataaaatgtggttatgaatttattattctcttaataattattttggcaaatatagaaaaataaataagataattaaacattatattatggctaaaaaaaaattaattatcaattaaataattaattagattattaaaataattttccgtactgaaatgacccccccccccttccgatcatctgactgtttcggcggtgcaaactctggaattttagtcaggttaacaaattttatccaaaaatgaactagttttggctattacccaaaaaaanttgatcattttttctgatcacttttgaaattgcaattttataccgactttaaacgttcgcaattcgtcatttcttcctctttttttttgctctttaagctgttcctttttctctttttttgcggtgtttacgaaaacattccccgccattagaaaaaaaggaataaataaataaacacaaaactaaggcactcattcattcggcattcattgaaaagcacagcagcccaaaggaaattcctctctctttttatattttaaagttttcagtttaattttgccaaatttctcagcagcaatg

SEQ ID NO: 108398 - DNA, 765 bp, Heterodera glycines
caacaaaattatatgaatcatttctattagagagatacctttaattggtcatttctaatcactaaatgatataaatcaacaatattttcataaatattttattaaagctcaaatgatttttttatttattgatattgcttgacattaaaaccaaatatttcggtgaaaattatatattttgtgtatttatctttaaaataaagttaaaaaattaaacgaaataaaaatcccaaccaatttatgaccacatttaagcaatgaaagaacgctgcggaagaacaagaacagatgggtggaaatgttcgtcgtccgccacaccaaagaaaaagcggaaaaaacaaaacgaaataaaataaaaaattatcaaattcgaaagaaatgaataaaaacaaaaataaataatgaatgcttttgtgtttttgtaaaagatcagtagaaagagaggaagttaattaaatgagcgattagcggcgctttcactgatcagaagaagcaacggaagggaaaagcatcggatcgattggacaaatggttttgttttgccagcaacagaaagaaaagaggcaataaaacatcttcgaattgctttcatttttaaaattcattatccaagctgagatcaaaggattattcaacaaaaattacaaaaaaaaacaataaaaaaaacaatttgaaatgtgtagctttttgactttatatacaaaaggtcgcgttctttggaagatttgtgagtgagtcttttcatttatcggcttgacaaagatg

SEQ ID NO: 108399 - DNA, 606 bp, Heterodera glycines
cagaagttatcatattcgcgatcagcgaccttggaaacctcaaattacgaattttcgaatttttctgagggggggggcagcataacccggaagtaccatacgtagaaaaagcccgaaatatgtaaaaaaatatgtagataatcacaattgtcatctatcacattctacgcatttgacctcatttcatcatctccaaatgtcaatcgtcttgtattacttttaccaattttttaaaatctaacgtgtaagtggtcaccccttcgttagatattttatttcttttttctttttctgaataaagatttttctgacatccctattaattattaattggtaaaataatttttaccttttcattctttgttgtttaaaaaataataattctttgttcacagaatgggaaagttccttaatccccttctgctatttggaatgagtgaattgattaattaattatcatgcgaaaatcaaatttaattacatttattctttttgacgggcgaaatttaaatattaatttattcattaattgtaataattttggatattttcagttcgtatattttttaaattctgtttgattaccaattcaaacaaaaaaaaatg

SEQ ID NO: 108400 - DNA, 156 bp, Heterodera glycines
aattattattctataaataatgtatatgcaaataataataatatgtcggggattgaaatggacaattaaatgctaataggtcggggaataggggcgggggcgactgatcggtcctttgtcatttattaatttggtcattaaccaatattaattatg

SEQ ID NO: 108401 - DNA, 417 bp, Heterodera glycines
aattataaataaatacataaatattattacataatgttaaaatgaataacaccaacacaacgaaaccggccatacaaattttgaattccccagaagagcctaatgaaactcttttgcatgtactgcttttttctcattatcttcttgcatttcctgtgtttttgcttttttggttcgttttaattaggtggcttaaaagtcacgggcacctctcgcccagcgaggccgagacagtaatggaagagatgaaaaatatacctcgacaaccaccaatatttttcgcaacaaaatgatgcaaaggttagagaaaacagacaatgaactcgctcttcattatgacaaaatcgataatgacgcatgctggcggtgcattctcaaaactactcattcttttcatcattcattttacaaaaaatg

SEQ ID NO: 108402 - DNA, 115 bp, Heterodera glycines
  unsure (1)..(115): unsure at all n locations
aggaattcgtggtgatcatgcccacaatgnaacggtgcacaaatgccggattctaaatttgccacaaaagcattgcgcaattattngagatttcacgcattaagagttttnaatg

SEQ ID NO: 108403 - DNA, 208 bp, Heterodera glycines
  unsure (1)..(208): unsure at all n locations
gctgctggtagaagtgttggttctggacgccgtcttgccggtgcgactacaaactctcgttntcgtttcttcagagaggatttgtttcgggggttagctattctatctagttaaccatcacaagcctgacctaaattaggatgttcctgccggacaatggaagcatgacaagtttgcagagctctatggaggtggcaagaagcgcatg

SEQ ID NO: 108404 - DNA, 154 bp, Heterodera glycines
aaaccatttgaactgacactaacaatgaaaatacctataaatcggcactaattaatttttgctgtttctagcggacaaaagtgtcatttacaccctttggggctgtatgcagaacaatgacaaagcatcgtgcgacaatgaagccaaagagatg

SEQ ID NO: 108405 - DNA, 338 bp, Heterodera glycines
aaagcctttggcatcgattatagacaaaatcatcggtttttaattttaaatgccattttaatttcaagatattcaaaaataggaatgattgaaagcgaaaaatgttattaattaaaaaactaattacggcctaatgttgttgctttaacgtttgttttcgtttttctgttcgagtgcgttatttttatttcggtttcaaaaaaattaatttagctaatgttcctcgggttcattttgatgaaaagctttcaaaagaattaaaaaataaatttaacaaaattattcatttaaaaatttatttatttaagtgaaaccaattttataatgtaatattgatg

SEQ ID NO: 108406 - DNA, 1003 bp, Heterodera glycines
ggaatgtttttctatccatgactactgtaatgacaaacttttattttattttaattttttgttaaattttaaataaattttgtatggttaaatttttttgtgttttttttacgattttaatgccttctatgtttgaccttttcttcctaaaaaattccattaaaatgtaataaataaaatatttaataatcatttaaatgaccaaaattaagttttattttcatgaactatttttaaaatagaattgttttttcaattattttcccgactattttctatcatccttcccttctgatcagtccttctttctattctgatcaatttaatttggtttaatttctctctctctcttctggtcatcctttccttctgttcactctttatttcctttctgatcagtttggtttggttttgtctctgatcactttctcttctctttttgttttcacttctccaatcgcttcataagtcattttttgtcttcgccactttcgcctccctttgtttatttttcttctgttctcatcactgtttattgtttttgcccacttatccctaagcatccgtttccctcaaaatcgcttccccttttcctctttcctaagatttattttgttttccgatttaaccgtcaaaattaatttaaattttttatttttcacttatttttattttgtattaattaagactaattgttctgcttatttacgtcatcgtcaactcaagaagaagcccttacttaataattaatactcattcattgtcatttgtccgtccttttttagaatgtctcacaaataccgtacctcttcctttcctctctatttgactaccgtttcttctcttctaagttttgttctcatttaactgttgtttgccttgaagcagttgaatctgatcattcggtttgtgtggaagtgatttgtcctttggaagaaaagggcacggcactccgactttttgagaaggccgaattgaaggaaggagaaaagtgcgagcgatg

SEQ ID NO: 108407 - DNA, 814 bp, Heterodera glycines
  unsure (1)..(814): unsure at all n locations
ccgtaaataagtccgattcataatggtaaaaaaaaacaaaaacaaagattccttcaaattagttttgtttntaatgtatttttaactttttatttaattaattaatttattatttgtttgttgttatatcgatacaaaatgcaataaaaataaaaataataataataataatactattgtattttattcaaatttatttttattttataatttaaattgtttcttttttgctttttaattttttacttatttattacattttttgtcttcttcaatgcatatatttttctcattaacttttctattctttttaaaattcacggcacttcgtccatttgcgttacgatagggatggattaggaagaatatttgataattttattgttttttgttaattaatatgactatattatgcaatatattctgcttatgctaaatattttcaaatattgtaaattttaatattaatttatttatcaatttaagttttattttgtttaataaaaaataattgaatatttttgttttattatttccatgatttcccgaaggaacttttaccaatctattgcggttttttccatgaatgtctattgagtttcaattaataattttgtaatttattaaacatttgaaatttattttagtaaagaacaaaaactgataatattcaaatcttaaaaccatttctaagtttggcacttcctttgctgatatttattattaaaaaataaattgtcagcaaattgttttccatttttggatctttattctttaagtatctttttatgtatcttcagatctttttaaaatg

SEQ ID NO: 108408 - DNA, 546 bp, Heterodera glycines
ccactttttggtctgcgggtcgctccggcgtttgtcattttccgagccaatcgctaattacccaaaagaatggtaaaatgccccgcggtcattttaagcttgctttttgatcgcagtgttcatggatgtggaggtgcctctacacgtttatgtgaacgaaagtgtgaatgttcacattgcggtctctgctgccaatttgacccaaaatcgccccgtacgatgccaaattcatttaccctccacaaatcccccccccctttttgaagttatccgtttgttttcacggcctttctccaaaagtttgtggtgatgttggccgcgagggtaaataattaattacttaattatttacaatttatccctttattatttattgcctttttgtatctttaaggcacttttggcgaaactgacttcactcgcgtggttttgacccccgagaacccagtccaactgaaaaatttgtaattcataacaaatttctgtgttttccgatcatccactcaaatcttttccagttttgtccgttttctgcgtcacggaatg

SEQ ID NO: 108409 - DNA, 562 bp, Heterodera glycines
  unsure (1)..(562): unsure at all n locations
ttggcattttttgatcactatntagttaattattntgggattttttatcactaaaaatcccatctctaattatatgcgaatattttaaataatatttttttaattaaaaaataattttatttttatttttaaaagaattattaatacgtttaatttgatcacttgcacttttcctactttgtcatattacttggccaaggcacaattcgaataggaaaaccaaatatctttaagcgttttcattcgaaatcttcgtatgtatggttgcaaattatataaatttaatgtccattagttgaaaatttcaacgaggcttagaactgacaccgttttttatgcaaatccaaattatgcgctgaattgacacgaaatcccacaaaatcaaaaaaaaaaattacatttatgaagagacatttaaaacttcttcttcggccaataaatatgcatctttaaaaggcataggcactcatttttcagttaaaattttagaatgatatttatgaacccttaggaggcgaaagccacaaattctgacgggacgtatcgtgtgatcgagaagatg

SEQ ID NO: 108410 - DNA, 1003 bp, Heterodera glycines
gacgagaagtttgtcgccgtcaactggccatgctctctaattttcgttgtttgtcctcctcaataaattcaccatcgcctggctggacgcaactaaaaaattcaaatataaaaacgaacaaaaacaaaaaagcatacttgttggactttttttttgtgtgctcatactaaattgagaaattttttagacaattactgttaaatattaccactaatctgtccggcgatcccaagcccatttcatggaaataaacacatttgtgttcaagtcttttcgtcgagctcccaccggcaagcagctcagggtacgtcttaattgctttttttattgatcatattggaaaataacgaacctaaatgcccgtattgtcggtattaacttttgaggcatctcattgactctgacttccattttattttttcattattgtttgttttaacctgtgatctcactcgatatttattcacttactctgagactactttactgtgatcagtcatcagagtaagtggtctccgcccttctgatggcaatttttctttatcgataaataaacacagcggcccaattttgggctcccagtacaattatgcttattttttatttagtaatcagaacgccaaaactttgcaaaacttaaaattttccggagattttcccttgcaaaaaaagaagagccgatctcgagttaaaaactagacagctaaaaaataaactgtgattcgatagagtgggtcaaaatactggcctatgcaaaatttcaagaagattggtcaataggaaaaaatttttttcaaggacaaagttttttctttttctctcattttgacgcactatttccatgtctctaacatataaaataacacatggttcatttttttgtcaataaacaatttttttaaacttttgactaattaagaaatattcttcagaattttcccttcaaaaatgtttttcactttttgaaaataaaattttttctcagatttcgggttctccgatg

SEQ ID NO: 108411 - DNA, 221 bp, Heterodera glycines
aaattatttcaaaacttaatcaaataggttggccccactgtcatttttttggttcgaagcaccaattaacaaattcatttcaaaagttctaattatagtattgcaaaaaagattaatttgcatgttttttaagtcttttactcgaattaacactaaaaaaatgatcaaaaatctaaagaatttgttcaaaccgcccaccaaacgccgtgagaaagaaaatg

SEQ ID NO: 108412 - DNA, 300 bp, Heterodera glycines
  unsure (1)..(300): unsure at all n locations
aaaaaaaaatttaaaanttaatcatataaaaaaaattattaatttattttaaataaattttacattatatatttagtataggaatttattgttatttggtattttgtagtcactgaantcattttaatattcctttagcnaaccatttaatggcgaactaattaatcaattattgaacagcaggtgttttacgcgaaattttatctatttgttaagccanccgacgggaggattacgtcaaaagccgaaaaaggaggtcgtcgcttttgcgtttctgcgaaaattcgcgtgccaaaaatg

SEQ ID NO: 108413 - DNA, 734 bp, Heterodera glycines
ttcattagcattcggagagaattttacgatgggatttttgagcaatttccgacactaaatgattttttgaaaggaacggagaatattgcattgaacccaaacaaatatacggtaactaactctctctatggctttcttctctctctctctctcccgctttctcactcgcacttttctctctctcgattttttctccgactctctcgctttctcttctctctctctctcgctttctctccctctctctcttctctctctctctctcgctttctctccccctctctcttctctctctctcgcttttttctccgactctctcgctttctctctctttctcgcattctctctcttccttctctgtctctctctctcgctttctctatctctctcttctctctcgcggcgcatttaggcactgctgcttgctctccaatatgaaatattggggtgggaagaatgttatgtcaaagtgccgaaaaaattgatttagaaattcataacaattgaataataaagtaaattaaaacttggccagattattctcttataaatgcaggaagtgttaaaaagcattctttatagtcaatttcggtttacggttcttctaaaaatttcaattcttgacagccatataaacgatgtctctttaaataattgtagaaaacacaataaatctttcatatgtcaaataattggttgaaattaaaatattattttatttattctagaaaatg

SEQ ID NO: 108414 - DNA, 369 bp, Heterodera glycines
atgaatgagacagggattgcgaccaatcggtcggttgccccccccccctccaccagcaatctcctccaaaaatcattcgattatactttgagtttttatcctttttccacccgttctatttttacgctttaagtcgttcggtggccaaaactgtgcgtaaccgttttctttttgccttcctttccatcaattcaaaaggagagggagggaagaaacgcattggtttaactttcaaatggaatgactgttttatatgcatagtatgtgtacatacataattttcatttaatttagaaaaaaacgcaattggaaagaggccaaaaggagcacaattttaaattcaaagacgaagaaaaaaaggcgcaaatg

SEQ ID NO: 108415 - DNA, 482 bp, Heterodera glycines
ggtgaaaaagaagaagcgcaacaaatgacaacaaaaggcaattaagcccaattagttagtcaattaattaattggtggtggaacagcaaatgaaatacatagcggtcgcccctctctcttcccgccgtactaacggaaatttcctccgaatgaactttttcctatgaataaaaatataacaatttaaaattattatattttttcattaccacaaagtgctaaaaaatgggaaggaatgcattttttaaaggtacataaaaataattttttttaaagaatttaatgggaaattggtactgaactacacttactgaaattgttgatcattggttgaattatcgagtaattattagtttgtgaccattcatatatttaaatgtatcataatatcctgagggctcataaaccaattaggaatgattcaaaaagcattttccattaaattttgaaaaattatagccaaataataaattagacatatg

SEQ ID NO: 108416 - DNA, 309 bp, Heterodera glycines
tgtgacagatcgcaaacggaaattggtagagagacgaaaatttgaaaaatgccataattttacccatcatttttctcccacagccgcatttgccatcggacaacgaacttcttcttctgctgctgcttcttccccggttcaattacatcacagaaagcaagcaaaggacacgcaccaacaacctgcgcaccctctgtcagtgcatggcacccgcattttgttgtgtttgagtctctgaatcgcatccctttcccctctttcagcactgatgatggcaccggcaacttcttcctgagcgcatatgccatg

SEQ ID NO: 108417 - DNA, 114 bp, Heterodera glycines
tttgccctctctccgattgtgccgataatttgaattttggcggtcgttcgggccgtttcataaataaaattctacccagcagagagtgccaatgaatataatttttgaaaaatg

SEQ ID NO: 108418 - DNA, 227 bp, Heterodera glycines
  unsure (1)..(227): unsure at all n locations
aaaaaaattaaaaatgtttgccaaatcacattaataaccattatttgaaggtgtcgacatctgcattttctcagttttgacattattgttcagtgttagtgagaaaattgcaacaccaancaactgtagtgttaatgggtaaaattaaattttgattgccttntaaaaaataaaaatttgtagctttgaattcacaattctgcttttactggcgggcagtgataatg

SEQ ID NO: 108419 - DNA, 162 bp, Heterodera glycines
tctaaaaaaccaattaaattaaaatagataattaaatattcattttttttgggttgctaattgcctttttatttgttctaattgaatccgagatcaaataattaattaattttgtatttatttctctacccattccaagcatcttcggctagccgataaatg

SEQ ID NO: 108420 - DNA, 1003 bp, Heterodera glycines
gcaattctcagacaaaaataacgagttcgaacaaaaggtctaaaagtcgaacatttttagaataggttccaaaatgttcaggagaccattttaggcatgggtttaccccataaggggtaaaaaagcttgtattttcgtccaaaaatgacgtttagacccactttttgcagttcgaaaaattttcggtaattatttcggggctctagagcagccagaaaaccaaaaaattttcgcaactaataaaaaaatgatttcgagccattctcagaccaaaatagcgagttcgaacaaaaggtctaaaagtcgaactttgttcgaacttctctcaaaatgttcaggagaccattacagactagagtttaccccaaaggggtaaaaatgctcgtatttttgtccaaaaatgatgttagacccacttttcacagttcgaaaaatttttggccatcatttcgagccctagagtagccagaagaccaaaaaaattcttcacaacaaatttcaaaatgatttcgagacattctcagaccaaaatagcaagttcgaacaaaaggtcgaaaagtcgaacatttttataatttgtccaaaaaatgtcaggagaccattttaggcagggagatagatcaaggggtcacaaattttagtaattcacaatatatgttttaatccctactcagtactttaaacctttttagccattttaattctattttacttttggagccgtttttcccgccaaaacattgacaaaatgagcgacaaacttatgcgttttcaatttgtgccttcctcaaatcaaaaagctgctgccgacgaatttcctgcgcagcttaaaaatttaagtgaagtgattcagttcaattcacctggcacattttttgtgcgcgcagtcgtcgataatgttcagtactgtctttacaaggtcatttactcatacactcactctctaaaacaattcaatttgctttatggaatctaggcatgtccccttaaaaccgtgggcatg

SEQ ID NO: 108421 - DNA, 488 bp, Heterodera glycines
aaaattgaccatcattgctttggtaattaattaaattacctcccctttttcctctcccctcccatttcccccctttttccatccaaccgatttttgttttatcatttgtccaatctctcctccccttcccctcgccctcttatcgtcgtcctccaatcggacaaccggtggccaatgaaagaatgatcagaatatgaaaagagaagagaatagtccaattctgttgttctcagcagatcattcattcatttacagcacatcctttgggtggtacaaagtcaaattaacaaataaaagtgataatctcctttttttttcttatcttttgcccatttgtcccgtcccattttttgtccgccctttttgccatttgtccgtcccttttgtccgtccctattccccctctccttgtggcccctttttggcacttttttcaacttatcatttccctttttgcactttcagctttttcattcgttttgctaatg

SEQ ID NO: 108422 - DNA, 360 bp, Heterodera glycines
ggtccgttttataccgaaattttgaaatgaaagggatagaagagacctgacaatgcatcgggacttgagcacttgtaggagacggactgagacttttagtacatgactaacgtgtcatttgccgggattcctagtcccggtctttcctcttgataagtcccgtctggctcgcgtcatgtctttagtccgtcaggctgctcttttggtacactttattccattttgtccattccccattttcagactttgggggcgtcttttgctggagcgcaaaatcagcgcggtttgtgtttccatttcccaaaaattattgcattttccatttggtaggtggtcgtctcttttcccgccactgcaatg

SEQ ID NO: 108423 - DNA, 374 bp, Heterodera glycines
ttatgctgtatcattgtgggcaaaggtatagattattggtcccgaaaaattctttaaataaaatttgagaaaattgtttttaggggtagtcttaggcgccgagcacgaatccggccttattttggctgtttcgaaccccgaacccggatttgaactaaagttcgagaattcaattttttcagttttagttcaaagcccggctatatacgtggaatcaaataggcacattaatacctcaataaaaaaattatttaaactacttagggtggaacataatttttgatacccaaatttttttaattaaaaattttttttttaatttcaacaaaccacaatcatgattcaaaatacccgccattattatcaataatatg

SEQ ID NO: 108424 - DNA, 78 bp, Heterodera glycines
  unsure (1)..(78): unsure at all n locations
tttgtgaattttttagaaatttctatcccgtcatatcggcttttggaattttaatgagtaaatcagtanccgtaaatg

SEQ ID NO: 108425 - DNA, 60 bp, Heterodera glycines
  unsure (1)..(60): unsure at all n locations
tattaaatttttgggtgggtggtcggcacnaggacggatggcgtgtacacggagcaaatg

SEQ ID NO: 108426 - DNA, 66 bp, Heterodera glycines
ttttttttaaattaacaaaattaaaagttatatatagagttttaaatctaaatgtaattaaaaatg

SEQ ID NO: 108427 - DNA, 251 bp, Heterodera glycines
ttggttattgatcttaaattgtcagtcgatgatataataaataagttgtacgcttcaccttgatcaagcacttctcatgcacttggtgctgaacgtgtgtcaaacgacgtctggcgccccctttgatgtgccgcttcaccggaagtccgctgcgatcaactgttgttatgacaatggtgaacggctctccccatagcgtaacacctttctgttgttttgactgcgcaactttggtgaacagattcagaatg

SEQ ID NO: 108428 - DNA, 376 bp, Heterodera glycines
cctaaaaaatggcaaaaatggtacaattttaaaatttgtccacttcatttcctaccgccgtttccgctccgctcccgtcctgtggccgctgactgcggttgtttcgacttcgtctgacccggtttaaagaacagacgtcaaccgaggcggctgaatccaaaacttttgattcgttttaggaaatgaaagttttatgtgaaaatgaagtgattggaaaaagtttttgttttggttttatttattttattataatttgccggattggcttaagaccgtccctgagaatgtcagggagttcgagtggccgggatggcacacaattgctttgaacgcaaggttttacaacgcaaaacctttattacacaccaaaaaaatg

SEQ ID NO: 108429 - DNA, 75 bp, Heterodera glycines
ggtgctttcatttcaacatcactattacctaattaaatatttatgttccccctctttccaggctgtttcttcatg

SEQ ID NO: 108430 - DNA, 1003 bp, Heterodera glycines
tttgtatgacctatttttgaacggtttttcataccttaaaaaattcaaatcaaaaatcgaaacaatttcgcatgctatacaaagtgttggctttcagatgataccacatctttttaaatttcttttttccctttttcgggattatcgtgccttaaatgccttttttggcatttttccattttggtgttatttttggcgtttttacgaaaaatccattaaaaatgcaataaaatcgggaaaatgcaccctaagaaatgacccgaaatttttttagaaaacacacccccttagaattgaagatttttttttcaatagacctctaagaaatgagaaatttctcaaaaattaatctccaaaataatatattttttgataaaaattttggtttaattatcaccaaaattatctgcgataagggcggagggaatggaatataaaagggacgaatgaatgaccaatgaaacgaaatgaattcgcctttttggcgcttatctccgcgccgacgaataaacgcggaaaatgaatgaatgttttgattttgtgcatttatttactctcctttttcacctctgtgtgcattaaattaaattgcccaaagtttaattagtaatttttaaatgcaaaaatatttttgttttaaaaattgttttgggaacaaatagaaaataaggggaaatgcaaacaaaatcatctttgcatatttaagttaagcctgtaatttataaaacaatttaattcattaaccaaaatgaatattaaattaaaccaaaaaagtaaaaattgcagaaaataatgatagattattaataaaccaaacgcttttctcattaactaaatgcactcattaaaaaggacaaattttgcaatattattttttatgcggcatttttttttaattcgagaaaaattttttaaaaaatttctttccatgcctttggttttgccaataattatttcatttttaataaataaatttcccagaaattcctcccacttttaaatg

SEQ ID NO: 108431 - DNA, 646 bp, Heterodera glycines
acaatagacaggaacccggacgaacgggactaattgtcccattttgtcaggattcatttgtcctgacattttacccaaagagaaatctcggcaaacgcaaagcggaatcccgcaaatttgaaattcccgggctctagaaaattttgtacaaaaaacataggtttattgcaggctaattaggattgaattataagtaacttcaaaatttcacagattcatttcagcaattactttttttttacataatgccaagcctattttacattgccaaaatgccatcggattgattttcttttgtaaaataaatgccaaattctattaaggcaagaattattctcttcatgcctattcacattaatgcccttttacacgtgttggacaatgcacataaattcccagcagatcctccaaaatggcattcattcatttgttttttttaatttctaaaaatgcgtcggattccttttgcccaactgttcattctgctgaacattataattgaaattgtcatttttgtggatgggatggaccagtcccaatttgaaatgattgactattatggcacaacggagaagaaagacattgaaaaagcaaaacaaattcgcaacacatttgtcaccattggcattgtgaaattggaaaaatg

SEQ ID NO: 108432 - DNA, 57 bp, Heterodera glycines
  unsure (1)..(57): unsure at all n locations
cgtcatcgaatttctntcgttcaaacaagcaaattttntgcgaaaggcaccaacatg

SEQ ID NO: 108433 - DNA, 256 bp, Heterodera glycines
gatttttgtgaaattaaagaattagggagaattagcgtcaaaaattcggacaattattgtaagggaaatggaaaataaatatattaatgtatcttttaggtttgttttatgcgttaactttaagcagattttatcaattaattaataaaaatgacgaagagaaaattttgatggatcaatttcggaaaattataaagaatgaacagagacaaagcgaagcagtaaaaaaataattattgatgctaaaattaatatg

SEQ ID NO: 108434 - DNA, 707 bp, Heterodera glycines
ttttgttagagagcatattttatccaagtaattaggctaggtatctttatatatttattatttattttacaataattataattttttttgtatttccgtgtaattcattgatttctttacttttgatcatttatcattgtagtccatcagcgactctttttttttttgtttcatttacacccttttgcttctttccgtgtcaatgaatttttggggcggttcagcagatttgaatcacaacaacacagcatttaccatttccattcaatttcaatcagtcagtcagctgtttcatctttcaacctcaaaaagccccaaagagtgaattcgacggcgaaattcgatcatttaaacagcgtccgatcaccaaattaacggaagagagaaagaaagaaagagaaaggagcaaaagcaccgaacattctcagaactgactgatcacattttaatgaacaaacaaattggcaaaaaaaatatgtgcaaagaaaaagccattaacaaaagaccgaccgatcgaacgggtggatgatttgtttattttttaaaacctttctccaaagaaaaattcatacataattaaaagcggacgtaattttccattttggttaaaaagtgaaaaatggaaatatatttttcttacaaaattaatgttggtaatattattttattagctgatattggacaaaatactttccttatttaaaatg

SEQ ID NO: 108435 - DNA, 82 bp, Heterodera glycines
  unsure (1)..(82): unsure at all n locations
catgcacccagagactccggaagagnatccgccttcgaacaaatatatatgaacaaaaacaaatagtttacatgccaaaatg

SEQ ID NO: 108436 - DNA, 876 bp, Heterodera glycines
ttatttattggcacccacttttgtaacagaaaattgaaaatataacgcggagttgttgggggataaattatacctaattagggcccggatttataagtttttactgattttttctgcgaccttttaatttaaaaattaagcgttttaaaacagagccatagaggcaataaacaaaaacagaattgaaagtataaggaaacattctgctttactgcttaggatataaatgatcaatatcttttgtcttttaaacaaaaatttcacaccaaaactgacagggcagccaacttttgttacacattttcactacataataaaattctttcaatttttgcaaattcggtagatataatactttgtatatttggttaccccaaattctgaagggttctcggggggcgctaaccagggatctgacatccattatatccaattttgaatgtctaacctaaattcaagcaaaaaagcaaactccgaaaaacttagttttctatttcactcgagttcgggtaagagatttgtcaaaattggtataagattcgtgattagctactcccgaaaacccataaaacaagttttcacgaaaaaaagggccctcaccctgtggtttttttcggagtgccccaacagcaaaaaatgcagatatgaattcccagggaaagaacaaattgaaaaattttttaatgggtatttttaaattaaatttgtcacttttttaatctggcataatgttaatagttaaaaaatttgaacgaaatatgactacttctggtagataaaaatcagtgctatcacttcaaaatcacaaattccttttcaaaaatacagacagaccagaaatattcttttgaactttcctttttgataattgtaatg

SEQ ID NO: 108437 - DNA, 305 bp, Heterodera glycines
aaccagagcggcagagagctttatgcccacggagcagctgcaggactgcgccacatccattcgagggcatcattcattgcaatattgctgcccgcaattgtctttacaccgggggagtgaagggcgaggcaaaaagcaaaaaatgtcataaaacaaactgctcatttatttataggtgaagatagcagacttcggcatgccataccaaggggcagtgaagacgatgccggcagacgcgcaactaccgatcgcatggatggcgcccgagtcgctgaggaagaactgcttcacggagaatagtgatg

SEQ ID NO: 108438 - DNA, 1003 bp, Heterodera glycines
ttttcctttcataaaggcaaaagttaaaatatttttaatcaaaaatcacatcactattttttaatgtcgaaaattttttggattcaaatgatagaatatgtattatgaaaaaagagccagagaaatccaaattaaatcttttaaccggtcagaagtgaattggaatccgaagaatttcttttctcttaaaaaattttcggaattttaaaaaacccataaagcaggattttgtggtaagctgtgccgacaggcgaaggtgggaaatttttgttattaatttgtctcaatttgcttacaattttctctaaaaagtacattcaaatcaattaatcctgtggaccaaaactgacgaaagtgcaagtccataaaataattgtatgattttatgattatttaactcttaaagtaaaatttctcatttttttattttaaaattactaactaactaataatgcatttttaggagcttaggttttttgtgaaaaaatttatttgatctgtcaaatgatatttatcataaaatatgcatcgagtgattcattcctttacgccgctttaattttgtcatcgcttcactattattttcaaaaaaattatgcaataataattcaccaaaaataataataatattttttaaattttagatattataaaacaaaaatataaaatcccaataaaaatagtcaaaaaattattcgaaataaatttggaaaacgtacctttcaatggatttagtgaattaaacctgatcatccttttaatcgcttttaattaattttttaattactttttattgtgtacgccacgcattaaattaaatttggtctttcagctataaaatttccccaatgccaagcatcatcattacggccacttttgtagcggtggtacttttcacttgcgcttttttggacctttgccatggtaaaaaaacattttcaatctcaatatatttaattgcttttttaataaagcattgacttgcaaaagccgttcgataatg

SEQ ID NO: 108439 - DNA, 798 bp, Heterodera glycines
cagtgacgggtaaattttgagaatgggaagcgacactgcttgtttcacccgacaagcactgtcctggaccagtattgcttggtttaccttttcttatggatttgaaaggagttattgcacttggggaaaagaaagttcgattgggtgaaatttgacaagcagagtatcagtgataggcacagaaccaccaaaaccaccgagagtaattttaccaaaaaatgacacgtttgaaccacggacggaaaatattcttaatgcgagagttgatgaaatttttccaactggacaaaatttcttggtaaggggtatacagcatcagtaccctgggattatcattggaaggacattggttgccccaggcgcgaccaaagaagtcataataagacttatgaatgcgggaaatgcaccaattaaaatttacgggaactcaaatttggcagatttggagccattacaaattaatgcattacctggcgatgatattgcggctaaagattttattccacctgaaactcggtggagtgaaaatttgcctaaattacccgtaaatgacatgaatcggcctccttcagaaagaatagatttggaaaagacaagactaagtgaaaaggcacagcattaaagcaaattgtggacaaatattccgatgcatttgtcggtgatgacggaaaaattggtcgttacaatggtccaattgttcacaaaatcgatttgacgcccggggcgttaccattccattttagaccttatcgttaccccccagagactcagaaggaaattgagaggcaaattagaatg

SEQ ID NO: 108440 - DNA, 105 bp, Heterodera glycines
ttcgtcaatcggcaaaaccctttccttttcatcacccgtggttctgtttttgagtcagaacaagcccgcctggaaaaaagtcttaaagacttgtcaaaacggatg

SEQ ID NO: 108441 - DNA, 746 bp, Heterodera glycines
tgttcaggctgaacatcggcgaatggttacggcattttattggtaaaaaaaattatttaaaattaaaataattttttttaaatttactgtcaaatttccgattcaataaataataaattatttatttcaataaaacaaaaattaaatctcattcaagtttctattcaacaaataatataattatttatttcatttgaaaaaataaacctaaaaatgttatatgcttttttaattgcaaatattaataaaaaaaaaaattacgattatcctattgtagtgatttgtagggatgggatttttaggctctaaaaactgccaaaataggtaggctttaggctctaaaaaaccccaaaataggcaccaaaaatcctcaaatttagggggtgtaaaatgacaaaattttattcaaaaaagtaaaaaaaaattaggccaaatcagtattgagataaataatttttaaagcacaaattcttgtcaagaacataaaaaataaattttggagatgaatttttgaaaagtttttcatttctgtatgggtgtatttttgaaaattttcgggtcgattcttagggggtgtatttttcgtttttattgcatttttgttaataattttgggcaaaacgccaaaatagccaaaaataggctctttcaaatttttttaggctttttaggcgctaaaaataaaagcctagaaaataggcactaataactcgaaaaatagcttaacaacagcccaaaaaaacatg

SEQ ID NO: 108442 - DNA, 61 bp, Heterodera glycines
agcaggaaattgagaaacagtggatggaattaacagcgctccgtctcgtgttcacggaatg

SEQ ID NO: 108443 - DNA, 132 bp, Heterodera glycines
ttctttgcccccggcgctgcccagggccctttcccctggtggccccccggtccttccgattttccaaattcaaccatctacgcacacttgccgcatcccgacgaacttgccgacgaatttcccgacgaaatg

SEQ ID NO: 108444 - DNA, 454 bp, Heterodera glycines
aggcttcgaagcggaatatttaaagaggacgaagaagaaggagaaaaaatcattttcattccaaaaaatgggctcttgtaaaattggagatattgttcataaaaattttaattttattcgcgcattggcaaaaactaaatcgaacggaaaaagaaaacaaattttaaaacgcgcaaatgccgatcaattgttaacacttgttgaaatttgcctaaacatcctttgccaacgtttcaaaatgacaactcgacaaaaaaaacgtcttttaccatatgctaattttgttcggagtcttgctcgacgaagaaccgagaaaggagcccgcaaacttttagttcaaaccggaggcggacttggcggtgtttttgcagctctgcttacccctatattaattgatttggctcgatccgctataaattcgagctcatcttcggagaattaaccatttaggatg

SEQ ID NO: 108445 - DNA, 1003 bp, Heterodera glycines
gagagaagataataaatttttcaaagctcggctagcgcgaggtgcgcgagcgaagcgagcgcgcctgcgctagttaatattatttttcctaaaaattgaatttgcggaaaataaattgagcatcaagcgttgatatcccgacgaaaaaaatgttaaaaatttggcaggattttttctaggcttaaaaaatgcgctaaccacgaatatgaactcgtttttgaaaattattttgtctataaaattttatcatgtacttggttttttcaaaattttttattttctgtaaagcttttattttcaatgaatttgggataaaaaatgctcaggtcatgaataggatgaggattcttaggtttttatttattttttctgcggctttaactcgacgagaaattcacgaaaaaaaaacttttttttcgaaaattttgcgttcgcccttaaaataagtttttgcccttattttggcgttttgaccaaaatttattaacaaacatgcaataaaaacgaaaaatatatataccactgagaatcgaccctaaaattttcataatttgtaactgcaatcattgaataaaattgtttgccttaatctgaaattattttcatataaaaaagagcaatttagaattatacacctaaatttggaactttttcgtccttatttacggccttattttggctttttcgcccttaaaacctcgccctaatcatgaataggatgaggattcttaggtttttacttattttttctgcggctttaactcgacgagaaatgcatgaaaaacattttttgttcggaaattcttcgttttaacgcccctatccgaccctaggaatccctatttcagatgtacggccctaaaaatcctcaccctagtcatgaatctgtgttctcattttgcaagaaatttcaatatttttaagttttcccagaggtcgaataaccttagttaaaatattgccaaatttgctcaaaaataatttatttcgatggtaaaatatg

SEQ ID NO: 108446 - DNA, 64 bp, Heterodera glycines
  unsure (1)..(64): unsure at all n locations
ttatgaagcctcaaagtcgntcacactcaaattgccnactttcaaagactcccacagcgaaatg

SEQ ID NO: 108447 - DNA, 238 bp, Heterodera glycines
tccgaacaacacaataaagtcacatgaaaaaatttaagaggggtggggggagagaattggcacaactccagcaaaaaaaaaaacaacgttaaatggaaaattgctgaacttttaaaagaaaatgtataaaaaaacgactgacagcaataaattaatgataattaatgaaattagtaattaatttgggggatttgaacatagtctcaaataacacctgacaagcagagcaccgacaatg

SEQ ID NO: 108448 - DNA, 287 bp, Heterodera glycines
ttcggagtcaaaagtgcgccaagcatttttcaaaaattgatggacgaactcaccgctggccttcacggagtgttcgggtatttggacgattttatcgtgggcacgcccactttggaggagcacgatgctctcctaaaacttttctttggtcgcctccaagactgggggctccgtgttcatttaaataaatgcaaatttctttgtccccaaattaagtttctgggcacatcgtttctgccgaaggaattcatcccgatccggcccggtcagcagcaattgagtcaatg

SEQ ID NO: 108449 - DNA, 306 bp, Heterodera glycines
aagaccctttcactgaccacccccttgtacaggtatgggttgggatttaaattggtggaggttcgattagcgaaatcgcattttttaaaaaatctaaaatttactaaagtaagaaatttgaaacttaaaagggttttacaatgaaattctgagtttctcatttgctaataaaagcacataaacaaaaaagtaaaagcaaaatttccacctttggttttgttagtctctcatggcaattgtctattttccttagtcattgttcgaatagcccccccccccccccccttaggccgtttccttcaaatg

SEQ ID NO: 108450 - DNA, 84 bp, Heterodera glycines
tgtaagaaatctttagatgtaatcaccaccttaaacgcaatattacccaattttacatccttttttaggtatggaattgcaatg

SEQ ID NO: 108451 - DNA, 636 bp, Heterodera glycines
aatcccaaatcgagggacattcgacttaaggagggaggtgttggatagggatcaaagatcactttcccatcattgttatcgactattctctctccccctttctctgtccaacactatttccattctctctctctctgcctatctcctccacatttctctgaccccacgtctttataagtgcgtccattccctcactcatggctctccgctccattcattcgcattggacatttttattattttattctcctccgtcgctgcactcctccgacctcatcaatttgtgcatttatttttattggtgtttattaataaattgttgatacacaacaattttggcgcagtcagcagcagcagataaattctgcacatcatcaagccaaatcaaggctaattctgcaaaatcttcaagccaaatcaaggcatattctgcacaacctccaagccaaatcaaggcataattcagcaagcctaattttggcacttcaaaagcctgggcggctttcatcggacatcgacaaaaactgatcacctgggtggtgtaagttccgctgggtgcggtttctcatcgacaaaaactgatcacctgggtggtgtaaagtaccgctgggtgcggtttaatcaacaatcaaaatg

SEQ ID NO: 108452 - DNA, 52 bp, Heterodera glycines
acataatggagtctctaactacttcaaaaaacagccaaataattttgtaatg

SEQ ID NO: 108453 - DNA, 175 bp, Heterodera glycines
cgtctgcgcctttctctcctctcccttgggctgtcccacgttgttgtcatgcgtttttagttcttaaattttgctttatattatccataaaagctataattggataatttgttattaatgattaaataattcataaactaacagatagaatcaaaaaataacagatgaatcgatg

SEQ ID NO: 108454 - DNA, 518 bp, Heterodera glycines
aatttcgccagtgaaactgccccaaatttgaaaaatttaataattattttgacaaaatgtctttagttcaaagattgaagacacaactcaagggatttttggaaattaatctgtgcaaatatcacaaaaccatataaaatattcaaaattttattccaaattagtattttttttgaaattctctcaactcaggggtggtctacccacctacaaagttccatttggaaatttttcttcaaaattaaatgtaaatattccattcatatgaaatgaaattcaaaaaaatttgttttgtaaaaaataaaaatttgattattttttgagtgtgtcattttaattttgccgatttcatttcaatttaggttaaggaactttttaaaaaaattaattaatttatttatttatttattttacagcgcctcccccgccaaaccccgagaactcttctgtgcctggtgaaatttttttttcttttctaatttttttttatttttcagtaccgccaaaactgcagaatg

SEQ ID NO: 108455 - DNA, 627 bp, Heterodera glycines
ttgtacagaatagtttttggccgggctgaacataatttcattttgctcaaattgccggcttttagtgggtccgcaattgtggattgcagaattattaattgaagatgaagaaactgttaaaaattaatttaatttacatttcaaacctattaattaattttaaagtgaatattgctaatcacgtctatcttcagtttttgccgcgtgagattttttgaccatttttgttttttagacaaagttattttttctgaattacaattttcctttacttagtagaattttttaagcttaagcaatttaaatatttctatttccacttttataaaaatttgtataaaaatcaccaaaattgttcatttttaaaacaatttaaattacttgaatgtctagaaattttaacgtcccgaccttgcttgtcatacaaaatccgtcccccaatttccaaccccgccatcgtggtttttagcagtaaaattagtatttagtccaatgtttagatgctggaactcgtttccaaaccggcggtattttttaaaattttttttttccatttttgttgtttaaaatttgtcagaaaattatctatcatggatgatttaaattttccattttttgaaggtgatg

SEQ ID NO: 108456 - DNA, 478 bp, Heterodera glycines
tattgatataaacaaaattttaattaatcaaaaaaaaacgattgataaataccattagaaattattatcttttttattccataaaatgaaaattaaattcaaacgaataaaacacagcggagcgagatatttaacataattaatgaatatgaaactaattaaaatataattacgcattaattaattaataaaggtcaaaaataataaataacaaacatatttattgctatgagtaaaaaacaaatactcattttcggagcagtgaaaggagccattgaacaactcaatgccatgggagttgtaaacatcaataaaagaaaaaaaagatgctaacaaaaatattaaaaattaattccatagtgaatgctgaaaaaaattatggcataaaaataaaaatttataaaataaacaaaaaataataagaaaaaactaaaaaatacattaaaaaatcttaaggcaataaaaaatccgataaatg

SEQ ID NO: 108457 - DNA, 1003 bp, Heterodera glycines
ttaaataaaaattgataaaataaaaattatttttaataattagggaaatgatacaatattaaaatttgaattaacacaaaaaatttttatttgtaatttatttttagagaaaaaaatcatttatataaaattattatttaaattaatttataaatgattcttaaagagatttaatctcgtctttattttatttattgtttataaactcctaacaattgataaaaaaattatttttatttctaaataaaaaattgtttttaaattatttcattaaaaattactgaaaataattaaacgaaaaattgttatactcaatcattttggaaacaaaaaataatcaaaaatctttatcaaggatttcattgctgctgaagcgatatctgaattttcatttagacaaattggcttctctcgagaaacagtcctttttatttgagtgggtaattctttggctctttttaaaataaaaatggaattaaataaaatttgcattttaataaagaaaataatataaaattaaaaaaactaaattaaccaaaaaatttattagtaatttaattttttgatcaaaaaagaatcatttaatataaaattataatttcaattaaatttacaaaatttaatctcgtctttattttatttattgtttataaactcctaacaattgataaaaaattatttttatttctaaataaaaataaaataaaaattatttcgtaaaaattgcggaaaataaactaaacgaaaaattgttattatcaatcatttttgaaacaaaaaaaaatgaaagtttataatcaaggctttctttcactgctgctgaagcgatctctgaattttcatttagacaaattggcttctcccgagaagctgtcctttttatttgagtgggtaattatttggctctcgagatttgattgatggatggcattatttttctcgtcaaaatgtgcatgttgacgttaaccccaccgtttagtgtgctgattgagcggtaaaaatg

SEQ ID NO: 108458 - DNA, 346 bp, Heterodera glycines
ttttgtgggcgaattttattgtcagtcactgccccctcccccccccctttcattttaatccattttcatttttttcgcgcatttccttccctttcttttcaccccaaagtgtttatttccacccttttttctccccttttctccttcgcttacactttcaattccgatcaatttttcttccccctccttccaacttcctcttcccccccccctttacagcactgatgatgatggttcgttcttcctcctcctcttccttttcccttccgtcgtacttcctttctctcctccccctccttctcctccttttctcccaatgttccaaaatttcttttgcttgccaatg

SEQ ID NO: 108459 - DNA, 103 bp, Heterodera glycines
cccctttaaccgacagaatgcagaaaaaggcgttttgcttttgcccaaatgggtgctcagcaattaccgggtgtaccgctcggaagtgcccaggggcaacatg

SEQ ID NO: 108460 - DNA, 145 bp, Heterodera glycines
gttttattttaatccgattaaatattataaatatcaatttaaaaaatggtaccatcataatgttgaaccaaaattattgaatgagaataaattgagaaatgaaattaaatcggaaaacggaccaaaaaagtaaattaatgaaatg

SEQ ID NO: 108461 - DNA, 323 bp, Heterodera glycines
aaaaataaataaaaacaaaaatatttaaaatggaaataatcgaaattaatttattctggaagaagtcagagaaactggaaatggaattgagggtggccaaacaaatgtgcgcgttcatcaaaatggaacttgaagaggcagggattccagaaaaagctaaaaatcaaataccataaatatttaaaaaataaaataaaattacaaaactttgaaaaataaatttcgtaaattttaatttttcacagaaggcacttcaagcagaattaaaacagcaaagactgattgaagaaaacattgagttgaaagtcaaaatttacagaatg

SEQ ID NO: 108462 - DNA, 101 bp, Heterodera glycines
tttttctctttttttgcccattttcaggcaaacttttgtggaacgaatggggtttctacggtgttgaatacagtgcacaacgtttgagcaaaatcagaatg

SEQ ID NO: 108463 - DNA, 312 bp, Heterodera glycines
agtatgggttgagaaattgttacaaaatatatttaagaatttgtcttttcaacaggtggttgctccattgactctaaaaatgaaatcacctgtcctcggcatgtcgcttttcccgattttcccgcctttcatttaagacattgcgcctattgccaacaaaaacccgaatcgccaggtttcacagttacactaaccttgaacttgactaacactttttcagatgaactagttaaatgtacagtttgctttcggtcagcacatttgaaatgttacaatgaatcaaaactgacggcgacaaatgacgagggaatg

SEQ ID NO: 108464 - DNA, 309 bp, Heterodera glycines
ccccgggcgacgaattttttttgcggccctttttacaaacaacttttgggaaatagaggggtcctgtggtgtcgactttttttgagaattagagtgaaatttattaacagattttgtccagaaaattggtaaattttagattttcggaaaaatttgggtgaggtatctcttcgatagggtaccaacaaggaaaatcgaaaattttcggcaaaaatatatttttccacaatacatgtgcccccttctctgttgttaagctccaacaagtcgttgccaactcctttcgttgttttggcactttttccgatg

SEQ ID NO: 108465 - DNA, 179 bp, Heterodera glycines
tttttttttgtgtcgagaaaaatttagaatgattcgccaaatggggtggaatttcaaaagcgggccaattttatacttttcaatcggttaggctccgcccacttttcagttcgcaaagttcatccgtccaaaatcacgattcatttgcaaaaaaaaatcaaaaaatttccaacaaaatg

SEQ ID NO: 108466 - DNA, 1003 bp, Heterodera glycines
ctttgctgactccgatttcatttacgtatttggcggatacaacccatttcactctcctgacagcacttagtctgtgcttttctattttaaaaacgatcttttagctaaagatcattttcataattttagcactgatttttggcgcttcaaccgtctcacccatttatggcaaaaatgcggcctttcctcctctgacccaacgactcagttgccgaattcgttggcttcttttgcatgtaatttcatttgtgcaattatcaatcattgaacaattttttaataaaagttcaaacgaagggacaaagtccgcatacatttttgaagaaaaattaatacgtttatttcccccttttagtggcttcatcttctaggcccagcgagtgttttatttttgggggtaccggcattcccttcggtctcgccgcttcaaatgaattgcatcgaattcgaattgatttgcttggaaatgtcaatgttcgggtatgaaaatggggtggtatattcccgatgccccccccccccttttttttgacagaaaaaatttttaagacgaaaaacatatttctaaatttagaattttttattttttttcggatcagtgattttatataggccaaataaatgatatatttgtgaaaagcgactcccaaaaccctcagaagcatgctttcacgacaaataaaacaaattgtctttcaaaaaaaaggggggggaacagcaaaatttgatatggaacagaacgaccattcgcaagactctgcttcagactgagccgaaacaaagctatgaacaaagacaaaacacagcgaacattcggcagagggggcgcagtggcggggaggcggcggacgacgcggcggaacagcggctgatgcccccgcggatgtgagcaaaggcatttttagggatgggaaattggcaattctttgtttttacgcttgtgcggttattaatgatgctttttacccatttaattgtttttttcagatacggacacgcaatg

SEQ ID NO: 108467 - DNA, 74 bp, Heterodera glycines; identical to SEQ ID NO: 99895

SEQ ID NO: 108468 - DNA, 724 bp, Heterodera glycines
caaaaaaaacgcgacctcgagagggagcacattctgtcgattgcgctcactttgactttccgtgtgcgaaatgcgttgtctaagtcgtccaacttggtcctttttgtgcgcaattttcgcccgaatttcttcaatggagcgactgagctggtgaaattcaccctcgaatttgatctgaaaattacaaatgtttcatttagaccgaagaatttcaggcaatccggggaatggaatggaaaatcgatgactcaaatctaagcgaataaactacgaaattgaaaaaagcactcaaaatttttccgacgacctttttttaggttcaccccattttttgcggcgctttttccaaagaactttaggggacggggggtgggccgcgcgccggaggtgccgaattatcacactttgttaatagattttgtcgaaaagtgaccgaatttgctatttttaaggcgatttcattaactctctaccatatacttttgaaaaatttacgaaattggagaaacgcaaaagaaattaataaaaaaaattatgaaatcggaaaaaacttgatagacttttgtctttaacaatgcttttttcgattttcgccaaaaattaaacgaaattgaccccccccccccgccccttgtccacctatggcaataaaacaggaccggatcagaaaagcctttccccgggtgggactcacttcgtcggcgagtgcgttctggatgagatg

SEQ ID NO: 108469 - DNA, 146 bp, Heterodera glycines
  unsure (1)..(146): unsure at all n locations
ttaatgatactantagcaaacaaatganggtgtttttcaatgcaaatattatctattttttggcctaccatcaaaaatgtgagtcaaatttgctgaattcatttaaaaacttatttttctattaaaatttttaggacaattttatg

SEQ ID NO: 108470 - DNA, 155 bp, Heterodera glycines
gagtgcaaaaacttgcccaaatcagccgcttttcatgcccgagttgacctcaaaaaggtggtaccaacagcaatccattatttgctgtattttacaatttcgttgtttcattcatttagttccctcattacaacgacaaaattcagcgaccgatg

SEQ ID NO: 108471 - DNA, 73 bp, Heterodera glycines
tgtaagtaaataatttaattaaaacaaaaaatttttaataattttaacatttttaagaattaatttcgttatg

SEQ ID NO: 108472 - DNA, 1003 bp, Heterodera glycines
cgctgatcacgaatacagcacccttttttgccaatttcgaatccctgacacgaactcaaacaaaaaaaattagacaatttgtatggatgatatcttcattggcaccttgctcatgagggtattattggtacaggaagcctatcaagtctttgtccctgacagctcatgtagtgaatggtagcgctgatctgagcccggattcgtgatcagcgagagaaattacaaagaaaaagagaaacgacgagatagtactaggcttttctctgcacagtggagtgacccatagtgtcttcttacaatcgtcatttcaacgggaaccgcccacttcggcgccggccttttcggcgccgttgctaacaacttttttcctgatcaaccaaattaaaaatgtttgttatcattcgatagctcttcagattctctattagcctgtaaaacttcaaaaaatttcgtcagtttacaaaaaagttatggccaaaaaacctcaaaaattaactttttcttggctttccgcgtggcataactttcttatttttgaatcattcatttctatttttacatgtaaatatagagcacacatagagctttcaaatgatgccagattggctaaagctaactgacaaataaaaaagttatagcatttcaaaatttgcggcgccgaaatggtccgcgccgaagtgaccccgacccatttcaacaatataagaatcatttgtttttattttttacatacagtagaagcatgtctttaacaataaataaaagcatctccttaacgagaagtggaagaaatcttacttcaatctccgttaattgctctaccttggttggtaagcagcttttgttttcatcatggattatgaacaaaatttaagccatcattgaaggaaagggcaataatcgtgggcaaattggtgcgtttatcgtcgatgtgtggtttggaaatttctttttgcataggcatggccgcaatggacattcgctattctgaactcactctatg

SEQ ID NO: 108473 - DNA, 518 bp, Heterodera glycines
tttttggcggcggttcgaacaacgaaaagaaacggacggaggaggccaaatgctttgtccaatgcttttgtcgatgaatttccaaaagaaaatcgcttaattaattaattaaccaattaattaatggatgactcacttaaaatgtcccattaaaatttttaatattaatacaaaatttctcaataaactcaaattatctccgaatttttcatttgtttaggcggcgtttaaaagataaaaataaaaagtgttttgttttgtcgtcgcattttatcatttcattggtgggaaagagaagagaagggataaacaaaaagtcgcattcattcgcaagaaaatgtttcatttgaaaaagctgaacaaatcaaaaaagagtcccttttcaacaaaaaataataatttattcatttcatgtttaattgtttcatttattttaactttttagtctttagaaataaaaagggaaaattaatttaaatatttattaataataattattattatttaataatattatg

SEQ ID NO: 108474 - DNA, 504 bp, Heterodera glycines
tattctcaactgaaccgaacaaatttaatatctaaaaaaagtatttgaaaaggagaatcttttctatgcgaatgctaagcaatttgtcagcacagaaaaaaattgtcgataaaggaataatttgaaaatttagaagaaaaaaaaataaatgaggcaaaaagtaagcttttggataaatttttctccaaattttacattattgtcccaaatctattcaaatggactgaatataatagaaaataaatatcacggccatttagtgcattttaatcgatttcggacaatacaagagaattttgtgaaaaattaaatttcgacttttgttcgagttcgggttctgggtccgaaataggtcgaaatggttcgttttcttgtgtcgtttttgtccactaaagtttttgtttcgttttcggtttacaaaattttgattttttgtttcctgtttcgtttttgtcaaagcaaaattggacaaaaaatacgaaaatatttacacccttaagaatg

SEQ ID NO: 108475 - DNA, 94 bp, Heterodera glycines
tgagattttttgggtagatagagcacacctggggttctaagaaaaaatgttttaaatttctgccaaatgaccccctgtgccgagataaaaaatg

SEQ ID NO: 108476 - DNA, 1003 bp, Heterodera glycines
gatcgcacaaaaaagaaaccgcggtcgcgcattcaaattgccgcggccgcgaccgcggatcgcacaaaaaaagaaacgcggtcgcgcattcaaattgccgcggccgcgaccgcggatcgcacaaaaaagaaaccgcggtcgcgcattcaaattgccgcggccgcgaccacggatcgcgcaaaaaaagaaaccgcggtcgcgcattcaaattgccgcggccgcgaccgcggatcgcacaaaaaagaaaccgcggtcgcgcattcaaattgccgcggccgcgaccacggatcgcgcaaaaaaagaaaccgcggtcgcgcattcaaattgccgcggccgcgaccgcggatcgcacaaaaaaaaacgccgcggatcgcggtcgcgcttcactcttgttattaacccaattaaatgtattattaattaattcacaaattatttaattaatttaatgttttaataatcatgcataccaattgtcattcattattttaaatagaattttcccatttcgaattattgatgcaaaaacatatttttggactcagatgtttttaagtggaggagaaaaattcaaggaacaaccaaactatagaggtaaataatttttaataagttttctaataaataattttatatttattttttcattcaaataatttttttgtttatttaaaagtttaatttttcttctttaatattaatgttatggccaaaaaatattataaaaaaatgatttaccttttttaaaacgctacaaaatattctttatttctaaaaatagacggaaagaaaaaatatataaattaaaatccaaaaaataaaacaacaacattgttgttgtttttttttaaatttatttttttggttgttctcctaatagcctatttaattaaatctattattaaacaatgcttatgctttagaaaacttcaaatttattctccgtttgtctaattacacattgacacaatacgaaatttcgaatttcttgagggtaattatg

SEQ ID NO: 108477 - DNA, 239 bp, Heterodera glycines
cgacagaaggcctaatttttgttgtttttgaatggtttattcctgtttttccttttttcaattgaacaggactgtgccgccaagaaaaaaaaccgttttaccgggcgactcggtcccggttcaaaatttttgctgggcgccctccgggatcgggcttttttcaaaatggtcctaaaaaacttcatcaatccaaagttattttttgatgcgtttatgttatttcacgcttttttcagatg

SEQ ID NO: 108478 - DNA, 432 bp, Heterodera glycines
  unsure (1)..(432): unsure at all n locations
agcattgactgtttgctgtgtgaacagcgggacaagtgttttttgcgggtattacataatcccattaattaatnntgttggggtaacaaaaaaattgtttaattgattttttaattgtttcttgtgccttttgtatcaatttagctaatgatccctgattaggggggatgacaaaaatctccgccgctcaaaaaatccgggaagaccaaaaataaattctttttatccctcatatgttttttttttattcctattcaccaatgactactcttaacactaaaaatgatttgaagcatgccccaataccaagccttcagacggacacaaaaagctacctaaaattagggacaccctcgtttcgtcggcaatatcatcattggaacaggacgaatcaagctcaagcaaccgtccaacatctctttcgtgctaatg

SEQ ID NO: 108479 - DNA, 284 bp, Heterodera glycines; identical to SEQ ID NO: 98949

SEQ ID NO: 108480 - DNA, 167 bp, Heterodera glycines
ttgattgtaaaaaaaaattgtataaatatggcaaaaggccataattatgattattaaatttttaaaaattatttaaaataacataaatataaataattctaaagacaaaatttgtgtaaatatttttattttaaaataattagtttttcatttttgggacagaaatg

SEQ ID NO: 108481 - DNA, 94 bp, Heterodera glycines
tttagttctatcggcaaatgatcaaattgtaaagcattgtaatattgaaggcggggttttttcatcagatcatttggcgcaatttttcactatg

SEQ ID NO: 108482 - DNA, 145 bp, Heterodera glycines
tgacatacgcgcgtccgacgggtgagaaaaagtgatatttttgattcatcccttatttttgatgtttattgcccacgcattttggcatttttcgcttctttatagcatttaacagaaatttccgtataaactctataagattatg

SEQ ID NO: 108483 - DNA, 465 bp, Heterodera glycines
tattgtatagtagaatctcgataagactaaaatttggttaaattttcaaaaaagttttttaaaaaaattgaaagcccgctgattatagatctgaaatctgtttcgccgatgtcctaatcacggacccgattcagcaatcgaggacccttttttgatcaaaaagagccatacgaatttgggaaatttgagctcgactttgtgggttaaaatttagtcgaaaggaatgtcagattcgttaccaggggccttgaaatggactaaaaagttatcgtataatttttttttttttgaaatttcaacccaaaaaaaccagttccgagtaaactggtgataaacaagtaccgagtcgtcaccaataaccacacacagttttggtttcgcaccaaaatctttgtgaatttcgatagtcctccaaattttcttttctgtgccattgaaatgtttgtccactaaaacatcaaaatg

SEQ ID NO: 108484 - DNA, 156 bp, Heterodera glycines
taacattgttggacctgaaaatttcaaagcataaattcctttagcataagaattgttcaaattttacctgattttcaattcgaaactttgggttgttaccattcaggggacaaaagccgtagttaagacagacaaggccatcccgggttcgaaatg

SEQ ID NO: 108485 - DNA, 505 bp, Heterodera glycines
agttgtgcttggctttttggcactgaccgttccgtttcgctaatttccgcgtgtatcgacggagccattagaatttgggacgcaaaaagtggcgagcctttggcggtagacaattcgaacaaaacgaaaaccacgaattatgtggtaaattttagttacttctcggagcagaggaggaaatttactatttgtgtgtggctaaggacggcgatgggcgcatttttctcttttccgcgtgtgccaatggcacagttcgaatatttcgactgacggccaatgaattgacgcgggcggagagttaacacggcgtcccctcgaattattttgtcgcgattatttttgttaaatttttaaattttaagcattttttcggtttattggaaaatcccatcccattttatgttttgttttatttgtttttcgttttaattttttatttctccttagtttgtttatttatctgttgttgattttctcaacagtgttctctttttcggccacaatg

SEQ ID NO: 108486 - DNA, 351 bp, Heterodera glycines
ctcaaaaaatttctcaatgactaacctagaaaagtctcacaataaattacacgttatccctattttgtgaaaaaacaaaatacaaatgacaaacttttgaaaatattacaaaaaaaaaactctagctataattgtatacaaaagatattatagttattatgaacttaatgcaaaatttttattattttaaaaacaaaataaataaatattttaattatagaaataaaaaacaaacacaaaaaccgactatatctataagataaacgagtaaataagaagcaaatctgcgtagttataccataccaatttaaataaatataaattttaagaaacattaaagcaataaacatg

SEQ ID NO: 108487 - DNA, 779 bp, Heterodera glycines
agaaattgcgcttaattatgtatttatcaaagaatttttaattatttttagtttagtaaatcttttttaattggccacacataattatgaaattatttttttaaattaaattttaaatgctctttgacctctaattgattgattggctaatgagtcgcataaacaaattcacttaatttgatgggttcgaaatgatggataaaatatccgatgaatggacagttgtcgttcatttttactcatttactgctgaattccaatcgccaattgttcatttttctcattttttttgtcaataatttacctcaaacgtgttcaagtactctttaaattttaaaccttaaaatcccaatattaaagcctttgatccgaaagaatatttctctttccatttttaaagcattaacaatttaatcccaaaatcctttaaaatttagtcaatttttttaaaattccgccctctaaactctgaaagaattcatgaaacattaataaacaattgaaaataaattttatttttctttgttaaaactagggttcctccccgaccctcatggagagaacagtcggggatcgggcaggaaatcacccagaaaaagaatggatccatttaaataattttcaccaaaaaattgatattctatttttgattttttggttgcttaagaaaaaaaaagaaaactaaatttaatattcacggtggcaagtcattttttttaaagcaaatttgtggtaaataataaatttaaaagcaaaaagacaattcttttgtgccaatg

SEQ ID NO: 108488 - DNA, 60 bp, Heterodera glycines
agttggatgaggaggaagggatgtcgaaatgctccgaatcgatgcttaagcaagctaatg

SEQ ID NO: 108489 - DNA, 470 bp, Heterodera glycines
aggtgctaaattttgaatgcttttcaatgcttctaacttgatgtgttaaggctgaagaaatttgccattgtttgacggtgcgccgattagaattttgtttgtgtgacctttgatatgtttacatagatggttattttttgcataatttctcattgttttttattcaaataaattcgtcgaaacattttgactttttctcaattattggctgttgtattatacaggaataagttattcttaaaatttatttattttttaaaacattttttaaccattgatttgggtttgaataaaaattgaaaagtgagcactttaaaattaaatcccattaaaatgaatatttctagtgaggggaagagaacacaaagtgtagaagaatgccagaacgatttattttttaaggatcattgaagacactgaccctttacatatttcagctttttcacggaatacacttcattttggaaatg

SEQ ID NO: 108490 - DNA, 358 bp, Heterodera glycines
taaattattattttttgatctaaagtttagcaaaagattatacaataaatatatatatgtatatgctagtgggatttgcgaaaacaacgcagttattttatcagaatatttgttaggttatcaatagcgaccggattttgaagcatacctatgccttttttgcgaacttgctacggcctaatacagacgaaaaacgagtttttaacatggtttgaagcttctagctttaacttattggtgcgctttttgcgattttgatgcctaatgctgggcacgtaattttgtaatcttttttgacctttgatgccttgttcatgcctttttcagtatttttttgaaaattttcttaatgaaaatg

SEQ ID NO: 108491 - DNA, 447 bp, Heterodera glycines
tttcaatttaaaaatcaaaaatcagttttcctcctgccaaaatagaacggcaaacggcagaatcggcacacaacggacggtgacgccgcaggcgctgcttccgcttgtggccaatgcgtgtgttgaggtagacagacagaaacaccagcggggggggggggggggattagtaactaacgctgcagggaatgccgactcggaaattgctgaatctgttccgccgactgaaattgtcgatttcggaatcactttttaaattagccattggcatttaaatttaagaaatttatttgcaaaatatgaatggagcttattagtgttttgcctttgcttacaattgtctcttaagcacaaacttctctattttctcaggtcaatgtttcgtgtctgttcgagaattccgtgtccccccaatggaacgcacgtcgcgtgctcgacctgcgcatg

SEQ ID NO: 108492 - DNA, 75 bp, Heterodera glycines
tatagccctgggagctgtcttgatacctgtcctgagtgttttagcccaacatttattagaaaaaataacatcatg

SEQ ID NO: 108493 - DNA, 199 bp, Heterodera glycines
acctatcatgccttgaaatattttaaaataaattccttaaaaaattaaaaattttattataattgcaaaatgtgatcccagcaaccaacatttatgcaaaactaatttataataaattatttatttctttttcttttagctcatattaaatttgccaataaatcagaaaatttgtttgtttgcttttcattggcacatg

SEQ ID NO: 108494 - DNA, 337 bp, Heterodera glycines
  unsure (1)..(337): unsure at all n locations
ctttttatataaatttgactggacagatcaaaagttaatttgtagttttntattagaaaataaaattataaaattaattagttaattttttttttgataatgaaacttttttgtatcaaatcccgatcaacgttatgttattgactacttaattaggagaaaaatgtctcgcaaataatcagcgactaattgacctatttttacatgcaatttcaattttacctttaagcatttctttaatgaaaaattcatccaaaatgaacttttaattctttaattatattttaaattgaatttttacaaataaaattcatttaaaatatttagattaaaaatg

SEQ ID NO: 108495 - DNA, 76 bp, Heterodera glycines
aaaaaatgatttgagcaaaacgtcggaaagagagaaagagcaaaatgtaataaaaggaattgtgagaaggaaaatg

SEQ ID NO: 108496 - DNA, 904 bp, Heterodera glycines
agagaatgaattgacgcttttccctccgttcgcttctcctgttgctcaattcattttgttcgaatgtttttagtggtggaaatccgttcaaatttcactaaatttcaaatgtcaaaatctctttttcccatttcatttctttttaatacgatgtcttcaatttgtcgtccaaaatgaatcgcattaattcggtgcttccgccgccgcttccatttcgaaacttaataagtgccgaaatgtaggacgaaacgaaaacgaaacgttttcgtcaatccctgggtctgacaaaggaaggtccccaggtgtccgtgggatttccaaatgaaatttggtgggtggatagagcacccatggtttcttaagaaaaatatttttattttctgcgaaatgagcacgagtgccgagttatgacgtgccaaagttttttaatgaataaacaaattaaaaaattgtttggacacctctgcagagttcagtggtgcagcggtagtgcgctattcagtgttttctggacccaggttcggatctcccacatacattttcattttttaatttttgctttttatgccaaagtcaattatcattatcacaaaaaaaaatttttttgatttaaaatcttatttttttaatccattttgacaaataaattactcataaagttttacacaaaaattaatttgtttttaagtaaaaattgtaaaatgtattagaacgcagaggattcgaacctgggacacaaaaaaattttacctaacacactacctctgcaccatcagatgcttttaagtgaacaaaataattgttccttttctttaattagaaaaaataaaaactttggcacgtcataactcggcactcgtgctcatttcgcagaaaataaaaatatttttcttaagaaaccatg

SEQ ID NO: 108497 - DNA, 347 bp, Heterodera glycines
ccccttttgtgggagtgaaaaaaaaaccccccggggggttctatgctatcaaaagtatcacaattttagttcactgactcagggacggtccctgggttttatggggcataaaaacccataattactgtgttcaaaaacgcttccataatccctgactagcccaagtgacgatcctaggctcggctggagaaactgaaaaccctgattttatattaaatgatcattttttcaaaaaagagtaattttggccacttgtaatggacgggggggggggattttgtttcgaaatagttaattttcatgattttttgtaattaaatgttccgagaatttcggagtcattaatg

SEQ ID NO: 108498 - DNA, 930 bp, Heterodera glycines
aacggacaattcattgttgtgtttaaatatcatttgttgatttcacaatttcaaaattttacataattgaataaatttccacaaagtggaaaaaattgattcaaaaagggatagtttagtaattttgcgttttttgctgtggttaggtcgcaatgattttctaccaaaaattgtgtgagcaaattaaaaaatattttcttttgcgttttatctatttttcgtctacaatctgacaacaacactatttccatttcctctgtgtctgttttacattgtttgttcctaatggcagagagtaccaacaaataaaataaatattttacgcgttttcccaccggcggagacgaaaaatttgcacaccccgaaaaaagcactgctgcttctgccgattagtcatgtttcttctcctttgttcgtcgtcataaatacaaaaatgtgatgtgtccaatcgctttttgtttttctccattggttcacttacctaattaaatatttccctacaatttcgcgtaaaagtgccaaattttgatgcaaaaatcgcaagattggcataaaaaagacaactttaccttcagatccattgacattttaattcccttatatttatccaatctgtttgaaaaattgtgaccaatttttaatgatttaggaaaaatctgtaattttacaaacttgcccaattttcattaaaattgcattggccaatcgctgcccaaattcatttgaatttataatttttgtacaaaatttttcattattttactttttgttcgtttcctctcttatctttcttccatttgctatttttgagctacccatttccttttttgcactgtcatcattttttcgtacaaattttggtttttttggccaaaaaatcatttttcaggaaatgttcatttattactgttgccgaacaactgaaaaatg

SEQ ID NO: 108499 - DNA, 152 bp, Heterodera glycines
actgaaatcaaatttgccacaactcgatgacacacatgtgtaagttgaaatccgtgagcgaatattaaagtttttactaatttttttctgcggctttaattcaatgaaaaaagtgcataaaaatacatttttagcgcgaaaatgcttaaatg

SEQ ID NO: 108500 - DNA, 433 bp, Heterodera glycines
tgaagaaatagattttttaagaattgtcctaattgcctcgttttcggctcaatttggtctcaaggtctcgagttgaataaaattttgccaacaagcataaaacaaattataacaattttaaaaatgaatccttttttaatcattaatttcagtgaaaaacccgatcttttggaaagattgagtaaattgatggtatggtgaataatcaaaatgcatattaattatgacaaattgtgttgggaaaatgaaaatcattcagctgctatccgatcattagagaagggacggacactttttttaaacaaattcatcatttttaaccactacaaattttgtccatttttatgcattttcacaaaaaatctctcaattaatttatcctgtttctttttgataagttttttgatttaaatagattttagccataattatg

SEQ ID NO: 108501 - DNA, 194 bp, Heterodera glycines
tgaaacgaaaccggcggtaagacgactcaatcgagaattgtaggaagttcaccgtaggagccaaccccatttattggtgtgcccacaagggatcatccttgtggagaataccggacgcggataaatcaccattctgcaaaccacctccaggcctcacctctcagtggaaaagattgaccatctcactttacatg

SEQ ID NO: 108502 - DNA, 231 bp, Heterodera glycines
agtggacaatccgtcactggacaatccctcagtaagtggacaatccgtcagtggatatccgtcagtaactaatccataagcaaatttatttttaaaatacccagatttatttaaaatcatgtgaaaatttatttgattcgctaaaaagctgaattaatgatttgtgttatttaaaaaaaaatatatgaaataatcattttttaaaaaattaaatgataatttctagagatg

SEQ ID NO: 108503 - DNA, 634 bp, Heterodera glycines
tgtttttattgtgaaagaaatgtgtggcgcggcggttagtgtcaaaaaaataggagacaaaattgtcgagaacatcaaagcagcacattcgagagcgcacgagaaccggttgtttacgggagaagtaatttaattggggacgaaaattgtaaattttaaattggcaatcaatggaaaacaatgaaatcttgtcttataaagaaagggctagtggaacttaggctgggcaaattttaattctaatcagatttttctagcagctttttgctaatttgaggaattttgtcaaaaaatcctttaaaacaataaaaaaaactcaactccttactttcaaaaaatcctctttaaacttctccaaaaccacatatgatgtgataaattcttgaaactatattctgcttataattaaacgaaattgctcaaaatattattcccttcaaattaaagagaagccaattataaattaatttatttcttattttttatattcggtgtttttttttgccaaggggaaataataaattctctaaatatcgtcgtaaattgtgctcccggcccacctgactgctggttgctaattgatcaagggaacgttttcaatcaccgatcgcattaaattttacaccacaaaatg

SEQ ID NO: 108504 - DNA, 253 bp, Heterodera glycines
agtgaataaaaagtgaaagaaacaaaatgattggacagtttagcacggttttgttgacattgaccaattggaaaggaacaatttgcccaaaatgacagaacagccccaggcgaagacacggaaaatgtcggcgacatcaaactcagccaagtttagtcgaaattggccaacaaattgcaggcgagggaagaggaaaacgaaacgacaaacattttaggtgtcaatttcatggacaacgaccgcaccaaaaatg

SEQ ID NO: 108505 - DNA, 1003 bp, Heterodera glycines
caaatcccaaccccaaattgcactgcggcaatgtccctccgctgactttccgtctttgttcattaatccaaaaatcatttccaaaagtgccctccgctcaaatgtcttcaaagggtgagaaatgggcgagggaatcccatcagatggaacttccgttgaggacgacccgtaatagaaggcaaagttcggaaggccacgaaaatggcggaagaccaaaaagaaatcgttcgatttcgaccgatgacggaaaatgcgttgggagaagcgatgcgcgcgcaatgggaacaaatattaaaccgacaaagagaatggcaggcgaaatcaggcacaaatgacttacgatgcgatgggatggcaatgaatcgcgccaatttcacctctttccctccctttgtgctccttcctcgcccttggcatgtttaggcaatttggacaatggcaataaaacactcagagattgttatgaataattaattacctaattaattaacattccaaattgccgaattcccctctttagtcattttttaaaagttcataattcgcttttttcatatcattatgcttctttttaagtcttggctttgctcgagtttaaaatgcttttttttgttctttgttttatgggattattttcatagtttgatactttcttcttcatctgaattttgactgcaaactaaaaatttataaacccggaattcgaaaaaaatatcttaactttttttttacgaataaatcttctgctttttcttagaaatctctttcgatactaaaattgttcagtttaattagagctaaagctgaagcgagctatagcctatcgaaataacatcttaaaaagggcattgatcaatgcattttgaattttgcacaaatatggccaggtttggtgttatgattgttttgtttaaaacatggacacggagttgacccaccatttaaacatgtgtggacccataatcggatggttaggtatacctattttgtttttaagaaaatg

SEQ ID NO: 108506 - DNA, 530 bp, Heterodera glycines
ttgtcagttgggtcgcatccatttaatagcatctttcagtgacctacctattcgtcattccttcatttttatctttgtttatccatgtacatattccaactctctctgaatcaataactccgcttttctcctcccaattttttttttattggtcgttttcgtttagtcgcaatattatggacattgtacccatttttattccaaaaattcattgttattttgctcaaaacaaataaatagtacaatttatttgtatattcgaagagctcaaatgttctgagcattcaaaattctaaaaaatcgttttgtttacaaaaaaacacaaataaaaaatatttttaatctttttttgttatagcttttttaaaactattaatttttttgaattttaaattataaaaagttgaaattcccattatattaattgaatttaatatctcatgacccctaacactcttctgactctaaatttggaatttccttgcgcttacaaataatttaactaaatttaaatgtttagaaaagcgatg

SEQ ID NO: 108507 - DNA, 80 bp, Heterodera glycines
  unsure (1)..(80): unsure at all n locations
atttttatgaattttaataatcatttcataaaatttaccattttttattttattatgnagaggcaaatgaaaaaggaatg

SEQ ID NO: 108508 - DNA, 839 bp, Heterodera glycines
tgacgggcttcaagtgaatggatcaagaaccggacccggcctgggagatagcctttgaaaaactgaacaaaaaattgttcttaaccgggccggtccgggttccggatcaggcacttttggtgccccgaaagtggtgcgataggcttccggaaaatgaccaatcaatcactgagcttttttgtggaatgactcaccacgctttcgaatgataccaagattgttagatttggccaacaacgacaaaagttgtagtccaaaacttgggctggcaccgtaccgtcctgagaaaaacagtaattttaaaaattgacatattctgaattttcatttttaaaatttcacgatatgtgttgaaattttccaaattattttttttagtgaaaattggttacaaaacagtaacgaaaggtgcaatttaattgttgaccaaattacaaaagggccaaagaacaaattgtggcagaaaattgtttcactattcgtcaccatttcagactttttgtcactattttgactttggtaatatttcgagattttttaaagaaatggtttttaagttgacttttttttattatgtatattaattttaagtttcagattatcgaaaacaaacttaaagtgaatgggaattgccgggaaattgaggtacagtatgtgtttttttggtactgtatatataattttgatttggttttattgcaaaaatgagcattcttttcacaaaaaataaaatcccattaacaactaaataaagtatgtaactggtgggatggatggcattccgaggcatggaaattccaacataaatcgaattcttacctcaaaaatgtcaggaaatg

SEQ ID NO: 108509 - DNA, 536 bp, Heterodera glycines
ttcaaacatggcgaaatatggaaaaaatatggacgaaaaagtgaaatatggaaatatatggattatatggaaaatatggaaacacaaatacaaaaaatgaaaaatttaccagagaattggattaaacatttgatttacatttttagagcaaatacagaataaaggaaaaggaaaattttctgtttggaaagaaaataaaagctttcgcttagaagaataaccaatcaaagttatttcataagaaaaattgtttttgcttttgaaaatgcacggtgtgtcaataacaaactctttttgttgtttggtgtcttaatcgagtgtgcatgtgagcaataacaaagaaagaaaagggaaggagagagaaattgcaaaatctttcgtgccaataaataatctgtttttccgctcaaaaaaggcaaaaaaacacggaatgacacacccaattagtataatagattattatgtatgtatattttttgttattgtgaaacttgccaaatacatacatattatcattttagatagattttttaatg

SEQ ID NO: 108510 - DNA, 125 bp, Heterodera glycines
taaaattaaatcaaaaaatttaaaaaagaatatataatcttcaaaaatcaattctatttttaggttattttttctttttattttttaaaatgattttaatttaaattcttttcaggccagaaatg

SEQ ID NO: 108511 - DNA, 1003 bp, Heterodera glycines
ttatcagaggcataaatcataaaaaactgtccacaaacattcgacgggcgtggatttgatccttttcgctgctgccgacgacggtcaaatggaaaaggcgcaatccatcggccgattaggcgggggggggggagacggatgatcagagcaatcggcaggatcaatcagccccgttggtgtcaacctgtttactaatcagccattcttggtcaccgacagcaaacagtccgccaacgaaatgcaaaaagaaagtcccatctgtgaacaatgagtgagcaaaacgcatcatattaagcaggatttggacaccaccgaataaattaattaatgaaagcatttaaaataaaaagtcaaaatgttaagcaaaactgatcaatgaaaaagaaggtcacatacgcactgttaaccataatagcggatttacgaaaaaaaacttacaattagcatcaccgatttgtcataatttgcttaatttctctacaaaacgcattacattaatttaattcttttttattataattattattaaatgaaaaaacaccttcccaactcacgtcattcgttagttggcacgtggcatgtgacttcaaaaaacaaaataaaaaacaataataataataataattattattattataatgttagtggtgtctcaatgctaaaaaacataatatttttaacggaaataagagctaaaaaataaaagggccctaaagaaaaaggagaaatcacacgacaacataataaatattttcgcacgagaaaatgcgaaaaattttgtataaaagtgaacgcatttcactcaatctcaataacttttgcgggaaaagtgcccactccccctcgcctccctcgtcagattagtcagcccatgccatgccattagtgacaatcaaagttttttatgatgtaaaatcatttacatggaataattttgctggaaaagtgcattttcattgatcttaaaaaatatttttttatataacagaaagaaattgaaatg

SEQ ID NO: 108512 - DNA, 913 bp, Heterodera glycines
tttcggagcctttagtaaaaagacgacaattaattattaattaaataattaggaagcaaaattaggcaaatgcctacattttcaggaagtgttaatgctaaaataagcaagaaaaacaattttcacttagttttgagcttatatatttataaaaaattttgtgcctaaaattgactattaattaattatttaattaattactaatttaatgcgatttaacgctggatttacggaccactcatttttttccaacggaaaacgagcacaattgcaaccaaaatataaaataagaaggaagtgcagtcaatcagcagcccatttcgcaacgctgtttccgccgccatgccaaaggcgaacgcgtcactgttagtgcacaaaacgggcctaataaaaaacaataattaattaattaattgattgatttaattgaccaatccggatatgtaaaaagtgcccaattagcagccatcacaaccatataaatgctgtaaccgaaagtgacgaaaagcatcggagagatgtaaagaaggagatgtttctccaaaaggttgcaactaattgatccattaattggttaataattacacattaattatgcaaaattaccgtaacggaaagagaacggcgattaatcggtcgaagccgacaaagaaaacaatccaaacggaggagaaaatgctcaaatttggcagaagttggaggaagtaacaggtgaaaagggagatgaagttgtggccagacaaagtgacgacaaaagtgacggagaaagtgagcaaagaaacgatgtcgagcaaagaaccaatggccaaaagggtggagcaagtggagcggagactccttggaattcgggggggggggggtacaatgttttaatgagacacggaaaaaccaaaatatacatacataaataatg

SEQ ID NO: 108513 - DNA, 83 bp, Heterodera glycines
agtttagaaggatattgattaacgacattactaagggatttgaccccttgccgaggagttgtacgaagcagggggttgcgatg

SEQ ID NO: 108514 - DNA, 1003 bp, Heterodera glycines
attcgttttttttcgattttttataaaagtcgttcgattgtttcggtttttttgataaattcagtcgtttttttacagcactttgtttgcgctgcgcatattcaagaaataattttcggaataggggagttcggcagtgccgataaacgccgccggtaaatttttttaaattttcaccaatttcttaacagattttatacgtccaaataagaacaaaggtcgcttttttgagtcaatttttaatggattcttctgacaggccgaaggcagagtctagaaaattttacaatttttctaaaattttgcgatgaatgagatttattgttaaaacttatttagttatagtataaaatcattttttgagaaatatttcgatgacatttgatagaatgggatgatttctattaattttttgataataccaaggagtgtttaggcgtccaatgagtgaccaccctcactttttttggtcataacttttttcctggtcaatccatgcattcttggtatcattcgaaagtttagcttaggaaagattttttatgcaaaattctcggataaaggcaatacacaaaaaaattattcttgaaatatacgcgaaaaaatatgcatttcgtggttttctcattgcaattttttcttaatacaagtatttgttcttttcttgtatttataaattccctaaactttaagctttcgaatgataccaagaaattaaccaagtaaaaaaaaagttatgacctataaaattgagggtggtcactcattggacgcgtaaacatcgattggacgcgtaaactggaatagagtcttttgtttattacgccattttattttctgccacttttttcccttttttaccgtccatgccttatcttatcccgcgatcccccccccaccccctaaattccgtattaaattgacaaaaaaaagagcataaaaacggagcccacaccatttccctccaatttaaccagaattgctgacatcagtgattggaatg

SEQ ID NO: 108515 - DNA, 630 bp, Heterodera glycines
ttcgtctttttcatcaattatttggatttgtaatttctctattttctggaaatgttcttcgagcgatttttaaggaatttctagtattagaaaattttaaaaatttcaacggcggtgctttttgaaacgaaaatcttttaccgaacgatgattatcctccctttcttaggccttaactttttccgtacttggtcattgcatatattccagctatcaaacaaaatcttagtctctgaatttataaatgatgcgttgatgagaaacgaaatttccgtattttcagtaacaatttttttatttcttttcttgagcatagtttagttacacaaaaacttctgtacctttcaagcttccgattgatactaaaaaatttaggtcgggaccaagtaagaaaaaagttatggcctaagaaactatgtatggtcatgattggacacgcaacaaaattcattatgcaaccctgactaaatacacattacacatccgtacaaattgtcacccttttttgtcaatcttgtaaaaggaccttatttgttaaaattgtaaacagcaatattcccgttttccgaagcagctaactaatccttttttagaaattctaaaataaattctttattttctgaaaaaatg

SEQ ID NO: 108516 - DNA, 975 bp, Heterodera glycines
taatctgccaaatgttgttaatatcgctttagtaaaatttcagctaaatatatagtatatattttaatacaaaaacagaggtataaaattttgatctaagatgcagttaaaaaattatatttcaagatagaattttcaaataaagatattttttatataaatgtagagaaaacataattattagtaaaattaaaaaaattttacaacaaaattttttaattttattaaattatgcaatattcaaaatagcaaaattctcgtttaaacaaatcaaataatgaaaacattaatacaatttccaatttaatttaattatttttgattgcgatttgccactaatagcagccacagcaattgtaaccacgccctgctccatgaaggaacagcaaagattcgtcatgtcaaagtttgaggacaacaacttgtttgatcgccatggctcatcaacaccactaatgaggactgcagatgtcccacaaactattagggcaattgaaatgaaacatgtacactctacaaaaattatacttttgacaaatcaattaaataattttcaacaaattaagaaacaaaataaaagtgtctttgaatctaaacgacaaatattgaacgaaaaaataattaatcgcggaaatttaatcgctataattcaataaccaaataattttaaaaaactaagaggtaaaaatggaactgaaactaaaattatttattaaaattcattgattgcaaaaaaatacggcgtcatttaaaaaaaatatcatgcaaattctatgggaataatttttgcagcaaatttttaaatatttaaagaaactaaattataataagaaaaaaatattataaaaagcaaataaaaagaagcattataattgatactatcatattacatcggccggcggactgttggattttggacgcttggggttttttcattttttttgcttttttaatttaattttttgcagtgggatg

SEQ ID NO: 108517 - DNA, 183 bp, Heterodera glycines
aaggaagtgatcgtcgactccatcgacattcaacgacaactcctaaatgagcaggcggtcgcctttcggtccatgcgccgcagtatagaggaggccaccgacacaagaagaagtcctctcagtgaagtccgcctcctcgagcgctggtccacctggtctctgcgcggggagtgtcgccaaatg

SEQ ID NO: 108518 - DNA, 163 bp, Heterodera glycines
ggtcaatatttatctttaaggcgggatcagtaacaaattgattcactcttgttcttcttgatcatccaaaatttttacgttttattaaatttcagtctttctccattggtcatcatagtttccttttttgcagattttggtggagcaaagtaatgcagaaatg

SEQ ID NO: 108519 - DNA, 407 bp, Heterodera glycines
atttggcacgtgatcagttggccgttgatggggagctttcgatttggaatgctgtaacattttttaaaatttattaaaatggaaatttgttttttcctatttttcccttaggcactccgttgggccgacgcgcaatgcctccaaaaaggcaaagaatgttcgggggaaagtcggcgtgatgtgcttggcccggcactgttcaaaattcgtcttacgcacatcactcgggaggatttctacaaatatatcggtgaaaaacttaaacctttcggtgaatttaaatagttggccttgtaatccttcaacataatggtcgaaaatccccgactaaatttatttgtggggtcggtataataataataattaatttgccagttccgaccggtgtgttgacagtttgcgaaatg

SEQ ID NO: 108520 - DNA, 201 bp, Heterodera glycines
aataatatttaaaatttagttcaaattagaaaaacggaaacgccaagaaaatcgaaaagaataattcaaataaatgaaaaaaacaaaattgaacactgtgcagaggaagcaaaaaaatgcattgagaaacggagaaaaagtgacaatttataaaataattatgaagtggaattaattattcattcagaaagcagccaaatg

SEQ ID NO: 108521 - DNA, 1003 bp, Heterodera glycines
tttctgttgatttcactgataagccaaaaataatgtgaattaattgttaagcaaacactttttttcttttatgtttccgaatttcttaaatagttattagtcatcattaattaaatgattaaattccaaatttcattaaattatttgtggcaattttttaagcagctattaaaatgccatatttacacgtaattgccattttttcttgtaatttttttttatcactctttgagatgccgctggacgagcttttgggtaagtttttttttcattgtcaactaaattgaacattgttagtattactatgggatgacagttttagacaaaaaaatcgccaaaaaagggccgaaaaaatcaaaaattccaaaggcatgaaaaaggcaaaaaattaaaaaaggcagcaaaaaactgcgctaattttctcaaatttttccataattgatttgatgatttgaaatatttctgaagaaaaaataaataatttatttttatttaacttgaaaaatggtaaaatattttttgcaagttccaattgttttcttcacacgattccgttcagtgcccattttcggtgaaattctttaaaattaggggtccctattttaggtgcaaaaaaaccaaaaataagggcggggccaagaaaatgcttcatttggcattccgcaatcaatttcaattgttttggtgtttttgtaatcttaataacttacatttttctatagttttttgcccatttttgaaataaaaaggacggttcttacgacatttttcggtcccattttgcctatgcttttttccctcccctccaaaataattttagctttttaatatacgctacagaaaaaagcatcgtgtctttttttggcactgcaaatcatttaaattttttattaattgatttgtatttgccatcaaatggctggcaaattcgagtggtttcctatattttttaaaacatatgcattttataaagaattgtaaaatatttccaaattcacagatg

SEQ ID NO: 108522 - DNA, 341 bp, Heterodera glycines
  unsure (1)..(341): unsure at all n locations
catcaatttttgcacgtacaacttatcaccacacaattcattaattgtttgtttataaaaattaattttttatntaaaaaatattctgaaaattaatgaaaaattctntaaataatatagggaattgtctttaacagggctgtcagaatatgcaaatgtatattttttcctggattcacgtagtctgattagtaggaaaaacactttgtttttagtatttgcgtatgaagtcgggacttttatttccataatttgtatattcatttttcgtcaaatacttccgatttgaaatcccttagaaaaaatttgatcatgccaaaaattaaatccaaatcttaatg

SEQ ID NO: 108523 - DNA, 394 bp, Heterodera glycines
  unsure (1)..(394): unsure at all n locations
caactcgtgcgcttaaactccgccccaccagcagaaaatcctttaacgtacaccacgttgggtacggnacgtccctcccctcctccgtcatccgtcggcggtattttgccagcggcaattgatttgcgttcgttcgtcaaattccccccgctgctggtgtccccccgccattcgtcggtgaacgaacggtcgcactttttctcgaaaacattgcgaaaggttctaaggtcctcgagactgttttttgccttttgccccttttggtcaatgccttcccaattttgtcaaatgcaaacgcaaatttcccactttaagattttgcggtgagaagtgccttttgtgcctttttgtttctttttttgtgcctttcctttggcggaactccaaaaaaatg

SEQ ID NO: 108524 - DNA, 895 bp, Heterodera glycines
  unsure (1)..(895): unsure at all n locations
gtcagttcatttaaatatttttatccaaaaaattttttttgggtttcgggggcagtccccctganccgatgcgcccagattatgggngagacgaaatccttncggaatagcttcactatagcctgtacttaatttctgcgtgggatttttgctccccataattgttggagtaccccaaacggacacttgaaaaaatcgatttatttttgttttcggggcagtccccccgaaccgatgcgcccagatttatggggagaccgaatccttcgggaatagcttccctatagcctgtactttaattctgcgttggatttttgctccccataattgtttgagtaccccaaacggacacttgaaaaaatcgatttttttgttttcggggcagtccccccgaaccgatgcgcccagatttatggggagaccgaatccttcgggaatagcttccctatagcctgtactttaattctgcgttggatttttgctccccataattgtttgagtaccccaaacggacacttgaaaaaatcgatttttttgttttcggggcagtccccccgaaccgatgcgcccagatttatggggagaccgaatccttccggaatagcttccctatagcctgtactttaattctgcgttggatttttgctccccataattgtttgagtaccccaaacggacacttgaaaaaatcgatttttttgttttcggggcagtccccccgaaccgatgcgcccagatttatggggagaccgaatccttcgggaatagcttccctatagcctgtactttaattctgcgttggatttttgctccccataaatgtttgagtaccccaaacggacacttgaaaaaatcgatttttttgtttcataaatatttttttcagaaagtcatg

SEQ ID NO: 108525 - DNA, 1000 bp, Heterodera glycines
tgattggccatgatcaatttagagcaatttttttttagaaataggtaagcattttgtgaaattctaagcacgaaaaacggaagttgatttttttgcggcgctttttccgaaaaacttgaggaataaggggggccagcggtgccgataggcgccgccgcgaagaattttgtgatttttaatacgatttgttaacagatttatccacaaaaatggccaaattttacggttttgagcaaatttttaagaaaataaaggatttttaagctcggggtgttccgataggcgccgccggggaaaaattaagaattttgactatatttttagctgattttcattgcaaaaattcttaattttgtgaattttcggaaaagaattggttattttctagtttttatgaaatatttaacaaaaaaccacaaaaaacctcaaaatttctcaaaaaaccacaaaaagcctcaaagtctcattttgaaaatttagcctcattgacctatcaaaaaaccacaaaatgaggctaaaacctcacatctgggagccctgattatcacgaaagcgtgaaaaagacaaaaaaaaaatttaaaaattttattattggtatttaattcttttcaaaaactttcttatgcattcattcattttctcaccaaatttttttcaaagtgtgtgaaaatatgtaacacaaatgtctcaaatttgttgattttcatttccatatcatttatattggcaaagtcaattattttattaaaatcacaaaaatttttggttatttatttgaaatttttgaaaatctcaattatatattaataaaaattacagaaattcaaattattaatttttagaatcttttacttacttactgcataaatatacaatttaaaatggaccaaaataaaacggtatttaaaaaattattatataaataataaattattggtttttagctttttgattaagttttagaatcatttattcattgcttattatatcaattaaaatg

SEQ ID NO: 108526 - DNA, 125 bp, Heterodera glycines
gacatcgtacggaagtgacggaacgaattcatcccaaaatgaatttaatgggaagaaaaaagtcataaagaaaataagtgaaaaagagcaaaggaaaacaggagaggacgagaaaaggagaaatg

SEQ ID NO: 108527 - DNA, 125 bp, Heterodera glycines
agaaattgtaaagatagatggaccattaataataatttactaaatagcaagaaattgtatgggcatataattacatgaatcaaagattaatgcaaaacctttgatttttcagaacccaattaatg

SEQ ID NO: 108528 - DNA, 159 bp, Heterodera glycines
agattgcggcaagaattggacaaaattcccggcattttaatggtaattcacgttttataaactgcttgatttgctcagatttcccaagcgaattttgactacgaatctgcgtcagtgaatgcattttgcgatgtttttccaactgtcagaccaaaaatg

SEQ ID NO: 108529 - DNA, 611 bp, Heterodera glycines
attttcaaaaaaaagaattttaaaaaaccggaataaaattttttaatttattttttcatttaataataaattttaaaatgctgatttttgtcggccaaatgctgatttggaaattttcagttgggagccccataatgagctcagtctgttcaagacttaagatttataagtctaaatagaattagacgggtctcttgatattttcgggcacaaataagccgggtattcaggtctaagtccaaacagaaaactagtacacgtctaaccttacgtttaaacagctgtaagaattgactaaatagactaaataataagatcatcaggtttcaattcttctatttttttaattttcaagaaaatataaatttttaagcacaaacttgttaaaagttattaaatttaattagtcttatgacttttaatgtcaagctcgccataatggtcttttctcagtttttgggtcattttaaatagtatccaccattggtgtgacgtgataagaatgaagcagcccactaagattttttttgtctttattttaaattaacacactgtatatcgagaaaaaaacattattattctttaaggtacttttttttggaaataaaatg

SEQ ID NO: 108530 - DNA, 134 bp, Heterodera glycines
tgcagggcgaccttttgcaggcattttttggggactcaataaattattttaaataaataaattttaatttaaatagatttaatttaattaatttgaacattaaataggcggctgatgcgatcaccgaaaatatg

SEQ ID NO: 108531 - DNA, 140 bp, Heterodera glycines
agatttaggcttttatctattgattggatgaattgttgatttagggagtttacctattaatttttccacattttttgccatggcttcaattgacttgtcacaagaagttagtaaatttcactttaaagtagatataaatg

SEQ ID NO: 108532 - DNA, 123 bp, Heterodera glycines
aaagaaatattttgcgctgctatttatttgtctaggcgacaaaaacttagctcaaccacgcgcacccacactgatagcatccaggcgctgttatcaatagtgtggtgaacaaccaaaagaatg

SEQ ID NO: 108533 - DNA, 738 bp, Heterodera glycines
attggaaattttggcctttttcaaattcctattttgtgtctgtttggattaaaaattaatacattgaatgacggtctaactcagttgggcgcactccaacttttgatgctgctgctgcgcattgtgcagaatgtgctaattaattctatggcttatttggccaattgagcgatgaagcgagcaaaaattcctttgattttttgttggcgattgttttgcgtgaaattgtattttgataaatcctccaatgccactcctttgcctgcttcgcttcccttcccttgtccatatggcttttttcctatgctttatccaatgcttttcctccatttccctgtgcctcccctcggggcttacattccatgccctcccccccccccaccccacccttctcattcatcccgttttcgcttctctttttgcccctcctataattcgattattctccccgtttatttcccaaaagtgccgcgccgtcgtaaaattccttcgtcacttttttcgccaattgcactgcgcattttcgttaattttttcacgccattctttcgagtttttcaggaatttccgtccttagccgcgaaagtgtgtttaattggattgacgattttagcgaagaacgatgtgcttttgttgtgttgcactgaggcggaatcgtacacagcggcggagcgaaagtatttaagcgacaaaggcaacggacagtcaccgaaagagtgccgaaagaacgaagaaatg

SEQ ID NO: 108534 - DNA, 514 bp, Heterodera glycines
atcactatttttaaatataataacagcagttgcaatcaaatgtttttcttttttatttcttcttattgataaaaatctttaattttttaacaatgttttttgcttgaaatttatcattcaacaaatctaaaaaaacttacggcgttaacggataagggaagccacatggtgatcagctgtgatcacaggtatctttcaaatttgtttatttatttattttttatttcatcttgtcacacaattacagctaattgatcaatcgcaaaataaattagttagttataaaaccattttacataatgatattaattaattaatcttatacagcagataattattactaatcgtagcatttaacattagtaattacaaaacgaccgcgaacaggtgatcaagaaatgattgaatagagaatattttgcatataaaagaccctcaaatttgtctgtaatcagtttcaaatcgtattttaattccaaaaatcaacaaattcacctcccatttttacaaaatg

SEQ ID NO: 108535 - DNA, 935 bp, Heterodera glycines
ttgtgtcgattttgttttgctcaatttctcttagaccattccaatggaaatggggggcgtagagtgactttgtgttcgttttcttatcatacatgaagggctttcgagattttcagcagattatgtatgagcctatctgacaatctgcggacgtttcaatctctactctcgtctactaaaaatcggcacccaaattcatggtcaggctcaacggcagcccttgtggcatcgatcaattagtcgcactcgatcaatctcaattatgatagcggagggtggacggccaggggatggttggcgtacgggattcggagggatcgctctacgtgatggcgcttcggtgactaatcaggcgggatcccgttccgcaaagaattttgagtccatcagccccttttaatgcatcccgccagcccctaaaaatttatttttcaaaacttcaggtattttttgatttttggatttgaaatttaattaaatttttttcgaattttccaaaatttatgaaccaaagttctgtttattaatttttaatgatattttgacactacaaaagacaaaattcgcattcccataatttctcttttcatttaaatttcgaaaaatgctactgtttgtttaactggtgtgttgaatgttaaggtttgaagctggcaatttttatgaaccaaatgttttaaaattattatgaaatatggcgcaaagcagacaaaaaattcaaacaatctaacaatttgaatgctaaataaatatttggtcaaactctttaaatcaaattttccatataaaaaggtcttttcagaaaaaaaaacataaattattcaacatctcttaatagtgcagtttatctaatattaattaaattaattatggctttgcttgggcctgtttagaataataattttgaataaattttgtcaatttatataaaaatg

SEQ ID NO: 108536 - DNA, 263 bp, Heterodera glycines
atgaaatgattttttccttgttttacctctaaaccgtctgccaatttatcaacgaatatttaccatgattatatttttgtatattttttctgtaactctcagcagtcggccctaatctgtgatcctttccatgagggaatgagaatgaaaaagggagaaattgttggtccctatcccagccgagccccttcttttcccaggtggtgttgcccaagttcaaattggaggccacgcacggattgaacaaaccgttgaccaacatg

SEQ ID NO: 108537 - DNA, 250 bp, Heterodera glycines
tgtgttgtgctttggggcacctttggtcggactttggctcggttaatctatatgttttgtttatttgcgccttgatttgataaaaaatgaattctaacatgtcttttttgcccatttaccactcaaaaaaggcatttaatccactgacttacaattaactcggtgttatttgtcgacttatttttggttcatttgttctttcacaaaaccatcttctaattattgcttttgactttgtcacccgccaatg

SEQ ID NO: 108538 - DNA, 415 bp, Heterodera glycines
aatgtgccattattgactacgctttccttaacaattgattgagccgcaaaagccacccgcccgaaccggcaaacgcatcgctatcaatggcagtgggcctgcggggttggcggtggctgctcaattgaacaaagttggccacgcggtggtggtatacgaacggaagaataggattggtgggctgctccgctacggcattccgcagatgaaacttgacaagttcgtgttggaccgacggttgaagctgatggatgaggagggcatccggttcattccgaacacagagatcggcaaacacgtgccggcagaattgttgctgaaggagaacgacgtggttgtggtgtgcacgggaagtacgacaccaagagacattcgtatcccgggcagggaggcgaaaggcatttgtttcgcaatg

SEQ ID NO: 108539 - DNA, 241 bp, Heterodera glycines
tctaagagttgagtgataactgatcgatttttacggaacccatgctgacattaaggtaaaatcttattggtttcaacaaaatctcttatatttcgagctatattttcttctaaaatttttgacattgtacagagcaaagaaattggacgaaaatcaatgggattagcaggattcggaatttttgggattggacaaacaatcgattttttccatattgtaggaattttgccacacattaatg

SEQ ID NO: 108540 - DNA, 170 bp, Heterodera glycines
attttattcgtttaccactactacgcagaataaaattgtcaatcttttcggctttcacttcagtccttttgtctgttttcgttagagtcttcatcttttcatcaaatttggttttgtactccgaatctttatgcttttcacttttcagatgacaaattaatgatgatatg

SEQ ID NO: 108541 - DNA, 216 bp, Heterodera glycines
agttgaatatattttttgcctttgaattgactgatcactgatttcttttgtttatatttttgtttgcccaccccaaatggccctctttaggactgtaaccacccaaatggacggaattgacatgcttttttattgagtttttggtcttataaatcggacataaaaattcgatggcacaaaccttggtacctagtaatcgatccgccacttaaaatg

SEQ ID NO: 108542 - DNA, 136 bp, Heterodera glycines
cgttgtcggtgtaaaaaccggtcatctgttgggcccttcttgaaacacggaccaaggagtttagcgtatgcgcaagtcattgggtgttcaaaacccaaaggcgcaattaaagtgaagttttcttacggaactgatg

SEQ ID NO: 108543 - DNA, 425 bp, Heterodera glycines
ggaagtggccggtagggaaatggctggtagggaattggcggtagggaaatggctcgatcccggaaatatggacataaatcgcgaaatatggaaaatatggatatagaaatccttcctagaagcttcaaaccaagctaaaaacatgtttttcgtgcgtttcaggcctcccacagtccaggaaaaaatatggatttccatataattggactccctacttataacttggtcaatactagaccaaataaaaccattttatgctcattttgaagggaaaattctgaagaatatttctaaattagtcaaaaatttaaaaaattgtttattgacaaacaaatgatttcattttcttgagtgtaaaatgccccaaaatttcagccacggaatttattttttactgttcaaaaaaaaattatatttgaaaaatg

SEQ ID NO: 108544 - DNA, 257 bp, Heterodera glycines
ttggcggacggttatgaatgcgacaccagttcgggatacggaaggtttctgggaaattagttcattttttcagaatcccggaaattttaaattttgctaatcggaataaggaagtttgaaaatgtatgggtttcaattcaattagttcacttatgggagtacatcgtggatgcctaatttcccgttcggcacactcattttggttatgtccattcagtcctggtgcgctcggcacgccgttggcgagtccggcgatg

SEQ ID NO: 108545 - DNA, 95 bp, Heterodera glycines
ggtaccattttcttgagtgaagatttaaatgtttaattcaataaaaccatttttaccgttttttgcagtttcagtttgttgtttggtttccaatg

SEQ ID NO: 108546 - DNA, 213 bp, Heterodera glycines
ttttcttctgctgaaataggaatagacggctaaattttaatattattattataattttgggcaagtatgcaaatgtaaaaagtaataaatttatatttataacaaattcattatttaatatagataagtaatatggattgaaatttcgaaaattattaaaattttaatttaaaaaaaaaaaataatttcagaacaaaaaacttatttcgaatg

SEQ ID NO: 108547 - DNA, 493 bp, Heterodera glycines
taatttctttgaaatataacgaatttttaaaatttgcagagagaatttttaggtttaccgaacgataacaaattggttaaattcggacaatatgaaaggagttatactccaaaaaccgggctgtcgcccagtttgccatcgtccagttttacaaaagaaatcgcgtttcacaatttttttttcatttccagaaaatcgtggctcaaaataccgaaggcggctttcggcaaagccgtcttcgaacatatgataggtgcacaaatttaattacttttttaaaatgtaattaaacatcttttctcgatgattttaaggtgcctgccctgccgtcgtgcgtctattcgacccgccctctgacgcgtcgacaattgtgcgtcatcaacgctatttcacggagctggttcagcgtgtggtggacgcatttttgcgaccaacccctgaggcactcaatatttttaaataaattttaaatattttttatttgatagcaatg

SEQ ID NO: 108548 - DNA, 1003 bp, Heterodera glycines
accatagcaacgcgagatttttgggccaagaccaaacccagctatttctccttcaattgctaaaaagacggaacggtgtccacttaaatttgttttttttttgataaaacaagattgaacccgatttttgatttagactaaatttatggagcgcatatgtccgcagcgcagattcgagtaatctttatcgtaattctcaaattcccgatgcccaaattccatatttcccgatttttctcacaaaagtatgcaaatttttttggcataatgttatttcattttttaattaataatttaattagaaactccaccggagttatttaataatatgctttttatattgtttccaaatttcttgtaaggaaaaagaagaatggcaccgaattgacaccaccagataaaattggaatttttatattaactttttagtaattttggcattgttttctttaatgtttcattaattttaattaggaaacttcaccgtagttacggctttctgttggccatctgttctttttgtgacgcactcaccgaattggccaccccattggctaccggtaaaataattaaataaatatattatttcattatttattttttaaaattatctttagttctcgtttttcttcgtgtgcggattcctttgttgacttgtgtttatgcccaattttttgctttcactggaagtattaattcatttataaatctgttttggataagcgttgatcgatttgtggcattggcattccccgttttgtaattatataaattattattaagaaaattaaatattcaggaaattaatcaaactttctttaagttttcgtaacatctcaaggttttccggaaaatatgtgttaattgccaatgtcttttccttgtcaattgcattttatattatttatttgtcgtttttatttgctctacaaaatcccgaaatgtaattattaataattgattaattgactaattaataataattttaccaattgaaaggatg

SEQ ID NO: 108549 - DNA, 165 bp, Heterodera glycines
tttcttcccaattttgttgtttgcaaataattgcaataaattgagagaacgaccaccgtgacccaactttctttgctccatttttgaatccgctccatccaattattaggccggcccttccgttggccaattttccttctctctgtgcgcaaaatttgtggcatg

SEQ ID NO: 108550 - DNA, 1003 bp, Heterodera glycines
agtaaaaaatatgatgcgttttaattatgagaatgataaaatatatacattcgctcataaattaaatacttccaatataaaaaattaataaaatattaacatgatcaacattttcattgaattgataaataagtatgtttaaaatcaagcattttcaaaaaatatttcaatttacatgttcgttatgtaaataaaggtttaaaaaataaatataaatatatataatataatgtttaaaataataaatataaatataaatagttataaagttgtaaatagataatgtaattaacataagggtctgacaatcaaatttacaagcggtttgaattaattaaatataagtaatagtatcaagcgaaccgaatatgaagaagcctcgcttatttaatacatattagaaaatttaaaaaaattatgtggcaataattaaaaatttttgctgacaatgtagaaaaattagtatcgaaaaaacaataaaaaaacttctcctcattaataaaatttgattttattaaagttcaaaaaaatacaaaaatgttagagaaggaagtaattattgattaggtgtatgaccccacgccacttcgccatcttccccctcccattcccctcattcagttgattattgtgcccaccaatttgacctcccaatttattctctgcatttatttattattttattttcttcggcaaataaacttatttaatttgttatcttcggacataacaaattttggcgcagtcagcaatcaactgcacatcaccggcaacaacaattccgagctttatctcgtgttgatattgctcgagagggaaaattagaaagctcgtgttgatttctaattttcccagatcatcaaaaacttttctctccgtgtgagattaaagtctgccgtgtgcagttctcttcaattggccatggacgcgcaacagctacaacaattgcttaatgcactccaacaaatggtcactaatgccgcaccagcaaatttgagcaatg

SEQ ID NO: 108551 - DNA, 94 bp, Heterodera glycines
agcatttcctgataataaaacctggaccagtcacggtctctacttatatttttaggactcattcttatttcagcgattttgaatttttactatg

SEQ ID NO: 108552 - DNA, 65 bp, Heterodera glycines
taatccacaaatatatttaaaaaataaaacaaatttctttatttcataaaaatttgtcaaagatg

SEQ ID NO: 108553 - DNA, 89 bp, Heterodera glycines
cagcaaccaaagcaaatgaacttttcggtacactttttgaattattaaatatttaggcacttttattttgcaattctcagacacgaatg

SEQ ID NO: 108554 - DNA, 173 bp, Heterodera glycines
acgtgcaaaaagcgcgccaagtgtaggagaaaattaggcataaattcgataatttacaaaaatttagcgtttttgcaaaaaatggacgtgggaatgaggacttttccttatttggaataattaatgggcagcgtgttgatgtggtaatgtgccaaaaaatttagcgcaaaatg

SEQ ID NO: 108555 - DNA, 659 bp, Heterodera glycines
ccaaaaggcaaaggcttcgtaaaaggcgcatttccatcttgagaaaggcttaatgtgaatgttgttacatattattatactttcctttaacttttgctctgcttaatttatttcattgtttttgtttaagggtctttcgttaataaaattttattttttttcttcaattgtttaaataaattttttcaaattcaaaaattacctaagattttttgccttttatgtgaaaataaaatttgctaagaatgtcacggcataagaagacgcacaaacgcaacagcaggaagggctcgaagaagttcagttgtttaatttctgcactttattttaacttttttcaaaagcgtaaaaatttccatttttccgtttattttccccccaataaagcgctaatcttaaccaaattttgcatcaaggaaaaggggccgagggagcgcttcttccaatgggtcaaccgattcggacggtgccgttggcacttcgtccacccgccgggcaaagagttcgaatagggcaaatggacggcattctccgccgtcctcctacgactcgaccctttccgaatgttccacctcctcaacggcgcattgtcagcattttccggaccgggcaaagaatggaaacaattttggtcaaattcgcattcgaaaaacacgatg

SEQ ID NO: 108556 - DNA, 1003 bp, Heterodera glycines
aaaatttcaacgcagaaatgcgttttttgagctcctttcttcaaaacaatcgagcaaaaaaaaagttaaatcactaaaagttgcatccctagtgatcagaaaataaaaaacaaaaaggatactttggttttgaaaaatgtaaatttatagtttgtaactctcaccaacaatggatcattttccaaacaaccggaagatttcccttttaatgttccaaacaatgtttacttaggaaaatgtcaattagcaataaaaattgaatactctccgaaaagttttggaatcgggttttccaaaaaaaatatattcaaaaatttcattaattttcaccaattttacgaatttgaggagggagagaattacattaattatcaataagtttcaaaaaagttatgatcaaaaatgtatgtctgaaaaatggttccttgggtacttttggccatactttgcttaaacttgacggacgaaatcttttcaaatttttgaggctaatagagaacccttagggttatcgaatgatatcaagaattaaaatttagttgctcttaaacaaagttatggctaattttttgttataattttcatttgatggtttttatataaacgactcagcacagcaaaaaatcataattttaaatttttttaatgtatagtaatgaccttgggggtttttgggtccctgatcactaatctttcgattatttgaccaattcgattttctaatctaaatttgaacaaaaaatcaaatcgaaaaattccatttttcaatttttgtagaaattggtcaaaatatgtcagattcgtgatcagcgacagcgccgattttttgaatatacgaagtttgcttccgtttctaccagctttgcttaacagagggaggataagtggggatattgtccatgtaatttccaactttaatcgtgtccagcaggactcaaacgaactttttgcttacagttggtacatgtaaaaagttggccatttgtgccccaaggcagacatg

SEQ ID NO: 108557 - DNA, 79 bp, Heterodera glycines
atttttatgattaaaaatttcttatttaaaaaaattaattatttaatagtgaataatgggaccacactaatggcaaatg

SEQ ID NO: 108558 - DNA, 1003 bp, Heterodera glycines
aataaaatgacacgacaaaattcaacgcttcactttttgattaaattctatgactcaaaatttctccaatcgcctgtaaatttcaaaaagtttttcagttgttagcaaaaaataggacataatatttttggcgcttgtgaaaaagtggcagtttttgaaaaattttttcaatttttttcatgcaatttaattattataaatactttcaaaacttattttaaattttccgattgaattctataagggcgataaaacgcaaaatttcgaacaaaaatatcttttttgtgcatttctcgtcgagttaaagccgcagaaaaaataagtaaaaaccccgttaatagcgagcaaaaactacacatcatccaattatgaaaattgataatttgattttttgttgtaggcgcatttaaaaattgttatttaaacaatcaaatatatgaaatttaaaagaacacttattaacccaaaataaatcaatttttatttcttttcattctaaaattaaatttgatgcatttattatctcaaattcaaaaataataattatttcttacaaagtgaaaacaaaatttaaaattataatccaaaattatagtgtttaaatgttgccatttacacgaagagcaaaccgatgtagacttcgcttgaaaattattatgaaggctataattaaaaaaaataatacatttcaaaatggagtaaattttaataaatatttaagaaaagcaaagcagttggtcaacgttctgcactcaacttcttgctgctgcacttcttttttaaacaacttgtttatattaaaacccgataaaaataacaaggaataaaaaatttattaatgctgtttaactatatataaacccatagcaaaaataaaaaaaaattccaataagttcattaaatgcaatgcaaatagatgcaggtatatgcaatataaaatttaaaagaaaaaaaatcagagcaaataaaaaatattgtatttaatttaaagcaattaataatg

SEQ ID NO: 108559 - DNA, 122 bp, Heterodera glycines
tgagtactgtttttcggtgggcctgagcggtaagtgataagaagattaaattataaacattatgccataaaatatttagttgctttaaaatttgaaaattccgtaggtttcttatagcaatg

SEQ ID NO: 108560 - DNA, 401 bp, Heterodera glycines
tttactgatttgagctctccttaatcagggatcgcgtcccagcaaatcctcgccctccccgaatcggaaaggattgtgatcggaggaggatgtgggaggaagatgggggaaaatgctgatcgaggcacgcatttgtttgtggaggggatggtggggggagattggagatccacaaattgtgtgtcggaggactgacgggatctgtctgctgtctgttcatcaccagcccacacaaatgaccgataatgcccgcgatcggacctcattgtgatcgcgatcgcggtggggtaaaacagtgttttatttgttgccccctcccccgcttggcttggccccaagaatagaagagttccaggcggtggtgctggtggtgcgcaaactttgcggacacatggatcatg

SEQ ID NO: 108561 - DNA, 209 bp, Heterodera glycines
cataatttatcagaatgggcaaataaatggcaaatcagaatctaaattaaaaaaacttttgtacttcatttggggaataaaaaccccaaagaaatatataaaattgtatggaaatataataaatgttgtggatacaattagggatttaggcataaatattgataataaattgcaattttccaatcatgtcacacaaataataaagaatg

SEQ ID NO: 108562 - DNA, 1003 bp, Heterodera glycines
ccccccctttcccatttttccccattttctcctttgaattgtgttgatactgccctccctctgtttatgcagaatttgcaattggatgatgggcgttattcgttggccattgaacactcgtcagagtgcaaagaaacaaatcttttcatttgttgacattaatatttttttttcattttgttttcatctctaagaacaatttagcgaaggacaaatttatttacaaatttatttttgagtttcgaatcacttctccgagttcgaaaaggtattaatacttaattaatgatttaaataagtttatgtttgacgttaagttaaaatttatatagctattttttctcctcaaaaatcgccgaaatcgaccattaaatttgtctcttttctctatttttttaattgtttttgttcgttgtgcgctatttttatataaaagtttattttgccattttcctatgagatttaacaaatttataagcgctttgctggtggcgtagaagcattttcggcaactgtgaactttgcggtgctaaaccaaggccacctgccacctaacactaacaaatatgtgaaccccccaacaaacagccaaggggcggccgagacagggttcagtggtcgttactgtggacatgccaccattagaaatgaattacatataagtaaaataggttaaatggcaaaaataaatcaaaaaaagaaataaaagcaattagacagacaacgaataaaataattataaaaatgaagaaaaacacagattttttttggtcgttttcgagagtgagaaatagggcgtcggaaatttttttgttttcgtttttgtgtttgttttcgtatttggtttttttttctctcttcactatcggcagtaattatatggatgcaagtttttcgtaagtttggcattcgacaaaaaaaaacgaagggtcaaaatcgattcatttctaattgattcccattcccatctcagtgccgttgaccaacaaaaacagaggaaatg

SEQ ID NO: 108563 - DNA, 112 bp, Heterodera glycines
gctggaaaagagaaaagtaaaaaaagcaaaagtcagtgatttaccggtggtgccacccaaattgaccggcaaagaacgcaaagtgtccaaagcgggacgaggaagtgacatg

SEQ ID NO: 108564 - DNA, 1003 bp, Heterodera glycines
attacaacaataaatatgggcatatttgaatgcaaaaattttaattgaaaataaacgcgattaaatattgttacaaagtaattatttttaaattatgctgaaaaacgcttaattgattaaaaaattaattaactcaaatttgtttgcgagccgtgtaaaaacggaacggataagataacattttaaaatttaaattggaatcaaatgggtgcctcgaatgctgaatgacaagtatcattgacgcacaaaggaggagcattgattgctgattacgtggagcccatgttcggaaaattgtggtattagtgactctttgaccctttatttgattgtttgaatttgtttggcataatgtttatttgaattcgacccaaatattttggttttcttcaagagtagttagtggatttttttggttatcgtcggtgataatttttagccgttttgttggtcgtcgatttatttgtgtttttattaatttgttgttgattgaattttatttattttggattgtcttttaattatttgttgcataaatttattttgtttggtattggatttttaaagcaggttttggccaattcatagactatttgtgcaaaatttagaagcgtggcaaagaaacccccgacaaattgattcttcttttccaacatggcgctcctggtaacaaaggttagctaggtggcggacggcttggtttttcttcagtgatatttcttatattttttttaaaagcaactaatttggaaaaaccctcgtgttgggttcatcgactgctcgtcaaatttttaataccctcgtgttgggtttatcgactgttcttcaaatttttaataccctcgtgttgggtttgtttttcttcatccgccttatttggtccacttttacaacttatcgtcgaaagcactcgtgttgtgctacaccaattaaattttgtaaaagctcgtgttgctttaaattggatttttgttttatctcgtgttgataaaacaaaattatg

SEQ ID NO: 108565 - DNA, 349 bp, Heterodera glycines
atgcttggtgataatttacgcaaaaaaatgaatccatttaaatcaatgaatatttctaatttttttaaaaattgggttttttctgcttttattggagtatttgtgttttgatttaaagcactaagattaatttttgtttaaggacatcaaaaccaagtcattatgttaaggcatagaaatttttcatcattttcaagaaaattaaacggttttagcggttctataaaatacggttgtttttaaacaccgtaatgcttgaataggttaatgttttttgttagctaattgttcatatatttatcaaatacagttctataattagtgccggattttgacagaccaatccatg

SEQ ID NO: 108566 - DNA, 624 bp, Heterodera glycines
tgtttccggaacccgcttgtgcaacggctaatggaaccacctaaaattaagattgtaataaattaggtataagcgaaaaattttatggcacaaagcttgagaatttctttggcattatgccttcggggacaaaatctcgccgcagaaatttcaaaaaaaagaaaaatttaaacttagaaatttttcaagaaaaaaaattcttagaaaatttttcataagagaattaaaaggagaaaaaatgtttgaacattttattataaattactggtttttttgaaaaattttcaaagaaaaacttaacaaataatttttttttgaaattgtaaagtggatttccgatcacttccccgtttggtctctggtctcttctccgctaaatccttttccgagatttcccgagcattttatcatttcatttcatcatttctccatcctttcccatttcgatcagttccatccttccccatttcgatccgtcatttgtattttccattcatttcacatttcacaagcaaaggtttaattacccaagtttgagatggaacaataaaggatttctggataatatttggactacagcgatcctgggaagggccccccacgtttcactggtagcaccggatg

SEQ ID NO: 108567 - DNA, 132 bp, Heterodera glycines
taaaataatttaaaattattaaaataggaattgatgacgcctttttgacaattcattcctggcaattgaccatcaaacgcaagagaaaaaatggtgaattgaaaattccaacaaattcaaaatcgttggatg

SEQ ID NO: 108568 - DNA, 194 bp, Heterodera glycines
gctcttccatcatcgtggcagcagacgcgtccaaaatcgtaattggcgcaacgattggccacatttttccggataagtccgagaaagtgatcgaacacgcatcttgtgttttgtcagattcccagcagaattacagccagatcgaaaaagaagcattggctcttgtgttcgcagtgcagaaattccaccgaatg

SEQ ID NO: 108569 - DNA, 571 bp, Heterodera glycines
ttagtcctagtaggaggaacagtgaaaataattaatggagtcggctttggattatctttcgtttttttttgttgccatgcaatttgccacaaaatatttaaattttaaatagtcaaaataagtttatcaaatgatagaaaaatctccatggtgaaatgacatgaagaaaaattaaccaaataatattttaataaataaggctgtggtcatttttatgaaggtattattggttgaaattcttcgcttggcttggaaatgatggggagagaacggcgcagtgggagtggagagtacatagagagaaagagaggagagatagagaacgtgagagacagggagagaacaacgaaacagctgctgagagagagagagagatatagcgagagagaaggggagagaacaataaataactgggacggatatcctgttggattaatgcaaatgtgggattgaagtctgtgaccccgcgcgggatcttatgctacccacccagggtcctattttacactaaattctttaaaatacgcaattatttttataaaatattttaggcggaaattaatttttaatg

SEQ ID NO: 108570 - DNA, 475 bp, Heterodera glycines
  unsure (1)..(475): unsure at all n locations
tcatgacaatttgtgagccaaaaatagtcagaaatgcaatttacagagaaaccannccaataatttatgagaattttttttaaactaatattggaaatttttatcaaaaatttccaatttctctccttcggccccatcgcattaaaaatagatttaaatgatttttttaaatagataagtcactaaaattgccggccctaattattaagctcaatgaatttatgtaaataacattttttgtgacagtagtccaatattaaccaattaattccttgagaacaagaaattcatgataacaattatcaaataattagaatttataatcttttccttttttaatttagaaaatgcataattatcatttaatctttttgcttgtcgcactaataggaggtattaactccttaattgacaataataaaaaaaagtaaatatattttatttaatcaaaggttttggtctgatagcaccaatg

SEQ ID NO: 108571 - DNA, 159 bp, Heterodera glycines
tttttgaccttttcaagtgtccacgaatacggcggcgcttctctgtgcgtgcaatggcacagtgccaatggcgggagtcctttggtgtgccattccggcggcatttggctgttgtccgcccccggcgcggttcccaagccgatcattcaaagcgaaatg

SEQ ID NO: 108572 - DNA, 289 bp, Heterodera glycines
atttggaatttttaaattttccaattttcgatagaaattgcggaagaaaccaataaaaataatttggattttgtcaaatatttttcccctgtaagggaaagaatcgttttttggcaattcatttttaccccgattcgtttttgacccaattcgtttttattaccccaattcgtttttattaccccgatcgtttttttaccccgattcgttttttgaggtagaaattcaaaaattcgaggttgaatcgatgaaattttaaatatttaagaaaaattgcagcttaggaatg

SEQ ID NO: 108573 - DNA, 1003 bp, Heterodera glycines
tttttaaaaaatttagtgaaagggggaataaaggtcctgaggtgccgtctggcagtgccggaaaaatttttttggaaattttaatgaaggcaattaaaattcaaaaaaattttttgatatcctttttataaatttagataaaaattattcaaaattttgttttaaattaggtaacgatgaaagaaagcaagtgcgcttcgcgttgaaacaaattcaaagcaattcgtgcattaaattcaaagaatatgcagcaaaacccacccacacaacacatcttcattatctgaaggagacaagtttgggagcgtaagtgaaatacacagaaaaatagggcaacgggtactgtattgtattttaaattggatgcaatacggtagcagtaagaatagtttataattttggtattctataatcgagtatgatgaaatttgggtggttttcccattatagttcattaaataattattatgattcattttacaaatttttagtccttgctttgcactaaatgttctaaatgttctctattagcctataaaaatttgaaaaaattttgtttaagttttcaaaaatttatgaccaaaaatgtgcttaaaaactcggtttttttgagttcctctggccataacttttttgaatgtaacaaaaattgttgaaattttgaaggctaatagagaacattttgggctagcgaatattatcaagaactaaaaattttgttcttggcaaaattatgaaaattttgattgtttgttaaagattttccattttatggtgttgtttttgagtaacgacccggcacctttattttaactaaaaacttaaaaattaaattgatatcttttttgtcagaattaaatgaaaaaaatcaacaaaaaaaaattaaatttaaaataaatttttgcaattttttagttgtggcttcagcgaaattggcatggttaagccattcaatcgcataatgttgagctttcgatgtcccagccaaattgggataattatg

SEQ ID NO: 108574 - DNA, 88 bp, Heterodera glycines
tttttccatttcccactgtttttgttttctcatttcattctttgccaatcggtcggtccatcgtatttagctaataattctgcaaatg

SEQ ID NO: 108575 - DNA, 285 bp, Heterodera glycines
caacaatttgaattttttaaatatgtcattatttttccgtttgccctgaggatatgaattaaatatgattttttttattattgtaaattaatgtaaaatatttcttatttttgatgaatcattcattcattggataattgtcctgatttttttgtgtttgtactgttttttgtaatcgatttaaaagcaataaattctcattttcttcatttaataaataattcattaagctaaaaatttcctatacattgataattaggtaatacttattgccaattaaaaatg

SEQ ID NO: 108576 - DNA, 819 bp, Heterodera glycines
  unsure (1)..(819): unsure at all n locations
taggatcanctgaaagaacctgctcataaccgagctatgctatcagcattaaactaacaaacgcttattatttgcttttgatttttaaagaacctgctcatactggaggttgtgtgttctttattacattactaaccaacgcttattgtatttttgctttatagtcttataaagaacctgctcctatcggagatagtgttttctttgtttatttgtaaccagtgctttatatgtgctttgtgctttttcaagaacctgctcataatggagattgtgtgttctttattacattactaaccaacgcttattgtatttttgctttataatcttataaagaacctgctcctaccggagatagtgttttctttgtttatttttaacccatgctttatatgtgcttgtgttttttaaagaatctactcatattggagattgtggattctttattatactactaaccaacgctattatttgcttttttattatgaataactctcataatggaaatggtttgtctgtggccaatacagcctgcctaccctcatgggattttgggcactcagactggcctctttaagtattggtcaatctttacactttccatatctgcactcaatgtcctttttggcaaaataggataggtgagccctgactgatagatttcggcaacggctacacttatggtaattgagaacccacatcatttttcacgtttttaggtcatttgtataaatatttgatatttgcacattcattggtttaattccttcatatttttgtcgcaaccactttttcacgttgattttttgatttaagatg

SEQ ID NO: 108577 - DNA, 157 bp, Heterodera glycines; identical to SEQ ID NO: 100221

SEQ ID NO: 108578 - DNA, 524 bp, Heterodera glycines
tctagagtcaaattgggtggggaaatagaaaataattatcattaattctcctcccagggcttggattaagatggagaattatttttggaaccataaacgacagagaaaaagccgaaaaagagacggaagtgaccaaaatagccgaacattggcaagaagtgaattttagcaaagatcagaaaaatgaaagaatgggaaaaagcgaattggtaaattgggaaaggaaaattgtgaaggaaattaaattcaggtgaaaaaaggcttaatttcaacggaatctgatcaaaatttgcaaaatgtattgagccaaatagaggagctgatcaccaaatgggtgccatttccaaatttccatttgccatttcccctttcccatttcagtccccctttgcccaatttgtcgtctcccaatcttttggcggtcgcttcgattcgttttgtctctttcccagtgtgtttagcatcgaaaatattatcggaaagcatttttgcaatttaaatggaagggaaaatcgagaaaaatg

SEQ ID NO: 108579 - DNA, 202 bp, Heterodera glycines
aggtaatctaaaattagagcatgtgaatgagaaaaagaattttatttttaaatttttaggtttcttttgaatttcaaaataggtatttaaaattttattctctttttcttttttgcttttacgttttcggcttcacaatttttaaatttaaattgttccttcttttcaagattttaattctttcttcaataataatttaatg

SEQ ID NO: 108580 - DNA, 717 bp, Heterodera glycines
ttttgttgaggtaaattattaagacagaatttcggcacttttgcaatcagttggcaacgattttgtaagcttcaaaaatttatataaaaataaatatttgcgtatacctaagtcatgaaagaatgatgattacatagtatggccgcaacttttagttaaaatctcaaaatatttaacgaaattagtgaggaaaatgccaaaatagtgacgaatggtgacataattttcagcggtgtaaataagaagggtttttggtgtccccaatcacgaatctttcaattattttgatcaattccgatttcctaatctaaatttgaacaaaaaatcataatttgaaaaattaaaaatttcgatttttattcgagttcgggttaaggattagaaattagtcaaaatacatttcagattcgtgattagcgacctttaaaaccccggataacaaattagcatggttttttatattaaaaaaattttgcaaaacaaaaggtcctccccccttttgtttcaaaatcggtaacttttacagtagcgcccaagtttttctatttttcgttgttaaccaaatccaatatcttggtatcatttgaaagcttattatgtttagaaattttcttagcctattgtttcgcgattagaaaattaccaaaaaagttatacatgaaaaattattcattccccattatttcgtctctctcttcgactttctctctgacaatg

SEQ ID NO: 108581 - DNA, 1003 bp, Heterodera glycines
tggcatccaaatccatcaatcttggtatcattcgaaagctcttaaaatgctctattagccttagcaaaaagcaaaaagtttttcaagcctgaaaaaatttttaatgaaaaaaacttgaaaatttcgactttttcgcaatattcatgtacagtcatggtcataagtgttgtcccatcatgctttgaaaaaaataattgcgtataaaattgtcattttccaatttcaacagataagtagcataccattggatagcattttttatgggctttccaatgataccatatttgcatttgtgacataaacatttatttgatttattttaccatattcacaatttgatcaaaatataggtggtcaaaagtgttgtcccatttcatttttaaaatattgcttctctggatcagcattaaaaaaatctaaaaaaattcaggtaagcataactttggatgctgatcaaaaaaggtagcaacaccaagttgatcagatcactccttcatggtgatctgatcagcccattttggctgggaacgaggggtaaatttcaaaaaaaatttctagggggttgggaaaatttttctggaaattttgagtaggcccattttatagagcacaaaatttgctaccgaattgcctttggaatagtgggtctacgatttaggcccgctgagatagatcgacttttatttcggtgcctataaaaagcactgtataagataagaaaatagtgctgcattttacactacgcaaaattcggaagtgcacatacctatttttgaaatgaaatatgtaggaattatcgacctctcaaagtggcaaatgcgatttccgatcagtgactgttgaacaaatggctgaccgtgaaatgactaatgaaaatggtcgacagtatacgcacgtatacttggccccaccattaatactaatatgcgaattgattttccaattaattatgcatcatttgaataaattagggatcgcgtaatccctacttggaccgcatatg

SEQ ID NO: 108582 - DNA, 180 bp, Heterodera glycines
cgttttgcgcccgcttttacggcgttgcgagcgcggactgaatagtacggacaattgccatttgggcgagtcatacgaagaggttttagtgaattggcacttgcgaatgcatttaattttacattctctacttttcagatatgcaattttttgcgctcatccaatcggcaaccagtgatg

SEQ ID NO: 108583 - DNA, 121 bp, Heterodera glycines
agggtcccccctttttgaaaaaattttcaaaaactgtcctcctaagatagtgccattcttgtcattcattaattttttcctttcttatatttcagcttttctcgacaaaaaattgcaaatg

SEQ ID NO: 108584 - DNA, 183 bp, Heterodera glycines
tgccacaagtgccaaaaacaaggccacattgctaatgtttgccgaaagggagcattcacgacaaagaagcaacgccgttcatttcacacggtccaagtcaaagcaacatgcctacaaattggcacgactcaaggacggtggtggacaattttggtctaaattaacggcacaaaaatcgaaatg

SEQ ID NO: 108585 - DNA, 224 bp, Heterodera glycines
tgtccgccagcgtttgggccaaccgataattgaacagcacatgggaattggtgaaaccgggcacaatttgcagaattcgaagtgaacggacggagaatgtgagaacggacaaaaagaggaggggggaaaggcggacaaacggacaataacgaagatggcacatatcagagtcagaaagtttcgaagcctcaattttggggaatcggaatccaactcttaaaatg

SEQ ID NO: 108586 - DNA, 258 bp, Heterodera glycines
ccccccccccccccccccctcgccgactccttctgttgcgtagaattttttttttaaacgaaccgcaaaaaaagggacgaaatgctagaaaaagtcactactgcttattccttttgtttgtgtttttaattttttaaagtatccttgaattcgcaaattttccctcttatatcattttaaattgagctaaccgatggttactctgttttatgcataattatataatagaaccttaacatacacaaaaaaaaaccaatg

SEQ ID NO: 108587 - DNA, 166 bp, Heterodera glycines
tctaaaaaagtaaatgtgtcaaaatttagcaatcataacaattttcaatgacattttagcagataaaaaaaagtttatttcaaaaagacagattttgaaaaatattgttcacaagaaataaaaatgaacaatctttaatattttatatagataattttgatgaatg

SEQ ID NO: 108588 - DNA, 1003 bp, Heterodera glycines
gtcgcaattccattcgtttaagggtttggacggttcagtcccaaagccattttgtcatttcagtcccgggtctgtaactcttcagcgattggttaccgccaaaaaattctttcggattctttcattagagaccgagcggagtcgattggtatataatttatatacattttccatcccgtcagtatccttcacttttaccttttatagtcatgaaaagggagggattgatgaagtttgttgtatctttttgttcatgtgttataaatagggctatgtttttaggtttttacatatttgtttcctgagctccccatggcctgaaacgcacgaaaaacatattttttttggctgttgttaagctacttttcgagttattagggcctattttctaggtttttattttgaaggaatagaccccaaaaaccggtcggggtcgttttcgcgtggccattttcgcgtgagtacctgtttaggactgaaattggtcggatttgtgcaaaacatccatgtttcgaatcccgaacccgaattcggacaaatttcttaacttttttatttcttgcggctagtatcttctacaataatttgtcagtttggtcggatgtgcgtcaaacggaaaaaataattaaaattggttctagtcggttttacgcgtcccatgacactacgcgtcccatgacactttacgcgtcccatgacattttacgcgtcccataacattttacgcgtcccatgacactttacgcgtcccatgacattttacgcgtcccataacattttacgcgtccgatgacattttacgcgttccataacattttacgcgtcccataacattttacgcgtcccatgacattttacgcgtcccaacaacactttacgcgtcccatgacattttacgcgtcccatgacattttacgcgtcccataacattttacgcgtcccatgacattttacgcgtcccaacaacattttacgcgtcccatgacattttacgcgtcccatg

SEQ ID NO: 108589 - DNA, 79 bp, Heterodera glycines
ttctgtatttattaaatacaattataaatttgcttatttattttaacacctcccctcatgtcaggttggctcatttatg

SEQ ID NO: 108590 - DNA, 239 bp, Heterodera glycines
cagtcacagattaatgcatttttaattttaaatcccggattaacacgacaatctatttttgttttttctaatttaagcgcaattataaagatctgatttgtgtacaaaatctgactaaattcaaaatgcctgttaactaagaacaaaagtcagattcgtaatcagcgacataaatagcatcgaaaaaattaaaattattattttttttattattaaacccacattttcgttttgctatg

SEQ ID NO: 108591 - DNA, 1003 bp, Heterodera glycines
agggtgtgaagtttttcatacgcaatttatagttccaataacagtacagtgcttgtcattaaaatcaggacacaccccattttcagaatttaaccgcttcccgtgaactggtcgaattgattattaattcaatgagttatttgtagacacgactaaaaaggcaccaaaaaatcgcgaaaaaaggactatttacatataataggcatcaaaaattgaaaaaaggcacgaaaatggaccgatgggttagacaatgtgccaatgggagacgaaaaattattgccaaaaatggaagggatggaaacattttgacacaactttgtttttaaaataagaaaattttaaataaaaatctgaaaatgaatcatgatattactagggctggtaattaaatgcacataaaatcttaaactatgcgcataaaagtgaaaaatatgcacataaatttttccaaattgggggcaaaattttcacaaattcttcaaatttgttaaattgaagcataaaaatctcgaaaataactaaatgtagtatgaataatcattagggttataaattatatgcttttgcatattttttctgcgcatatgctatgaagaaaggggctcaaaaatagcatttctacgttaaaattttttgatttgaagaaagtttttagtccatataaatccatattttgggggttttcgggaataaatccatatttcgcgatttttgcattttcagtccatattttggccgtttttagcaaaacaatttgcgtctaacaatttctgctggccaagcattgtccaaatggttgcactctccgagaaaagatggccaacccaagcgattgcgttgttggcaagggaactttgaatggatcaacaatttcaaggaggtgtggccataatctcgaaaaatcactgatttttgttttcaaattgtttagcattttctccgtgccaatgccatttcttccgtcagttaccaaattcatttttctgttcatgtgccatcaatg

SEQ ID NO: 108592 - DNA, 1003 bp, Heterodera glycines
ggcagaaaaagacgaagaaaatattaaagaaaaaagaaagaaagaacagagaaaaagaaaaataattattgaaaaacttaataagataaaataaaaagttaagcaagaaagaagaaaagattcaaaaaaatatgatttggtgaattgattaaatttcattttaaatacctattaattattaacgataataacgataatatgtttaaaataatttaaatatttccattatttaacaattcccggtcccggtcccggtttttggaaaaacaggaatcccagtcccggttttgccagtcccggtcccggcgggactaaatggcatcatggatttaggtagcattttaaaaaatgaaaattaaaaatatatctatttaattttatatgattttttatatttctatcacatattgtttgcattattttttgcgtaaaatgaaaaataattttttgcaattttgtgacggccaaaattaaatgtaaagacagcaaaaaccagtgcttttgcgcaaatttgggacggggaaaaaatgaaatgagtgaacaggtctaaaccagtgcttttgcgcacaatttgatggcaaaaataaatcgtttcctgtgaagaaaaatgtaataattttaacgatggtcgaagctaaaaccaaaatgaacaaattgtcaacaaaatgattacaacaatcatattcttttgtgtaacaactcctatttggtttcatctggcctttgttgtgcctatttaaagcggtggaaattaggttttgtcacattccactggcaaccgatcacttatattattcattaaacctaaccaagattttgccgtatctaaccatttctgacctttgcaaaatatttaggccgagtttttttaaaataaactggcggaattttttccagtccgaaattttatgtttgagctaataataagttttgtcaaaaaataactgattccaactttgtaattaattataggttaaatcaataaatctattttggcacaatg

SEQ ID NO: 108593 - DNA, 61 bp, Heterodera glycines
ggtatgatgataaatgatttttttttaattttgcataaattttcaggaggctgtcaccatg

SEQ ID NO: 108594 - DNA, 368 bp, Heterodera glycines
  unsure (1)..(368): unsure at all n locations
aaattttggctttaattaatcgcgatcgcttaattggaatattgattttttaggaaaacaaagcttgaattgacaacaaaattaataatcaaaacttaagttttttacacctataaaattctatttgaacaattcacgaagagttgatcactcaatttatatatttgatcactcaatttattgatttgatcaccaatttatgnataaggcatttcggaccgattctgttcacttttccctttgtcagacgaaactatcgaatgcccactaattatgatcattttaaaatgctatctcgcaaatacagctgctgatcagcctctataataaaatttaatcccatttttggcgtccaacttggcgatatg

SEQ ID NO: 108595 - DNA, 390 bp, Heterodera glycines
ggtaaaaaaaggaaaaaaaagagatagccatttttggtcaagaatttttttgtttgggttcaaaatatcgtaagattgtttgataaggccagacaagagaaggcagctgttggtacctagtttgcagtaaaaaaatgacaaaaaagagatagccattttttggtcaagaattttttttgtttgcgtttcaaatatcgtaagattgtttgatagggccagacaagagaaggcaactgttggtaccaagtttgcggtaaaaaaatgagaaaaaagagataaccatttttggtcaagaattttttttgtttgcgtttcaaatatcgtaagattgttcgatagggccagacaagagaaggcaactgttggtaccaattttgccgtaaaaaaatg

SEQ ID NO: 108596 - DNA, 544 bp, Heterodera glycines
acaaaaaagaaccgtacaaagcttcaaaacaatgaccattcatacttttttacaagccgaagtaaaaatttttaaaaatattttcagttaaaataatttaaatttaatgaaaaaaaaaattaaattttgttgtccgttattaataaatattaaaaaaacgaaattttaccagctttatccggtccccggattcttaaattggatcgagaattttttttcccgaatttacaattggtttcaaatcgctttgtagggcttccaggggcccgaaaattaggaagtaagacccggatttaactattcaaatttaaccccagcaggtactgtaagaatccgaagtccctaaagcttcgggattttgagcccggttttgggttccccggaagttgcggtattgggtttaaacctatttttggctcggttcaaaattcgaaaaattcagagatttgacacttctaactttttttaaaacaatcgaatcctgataaatttggtatcatccgaaagctattggcgagctaagtctagaaatcagcgaaaaatg

SEQ ID NO: 108597 - DNA, 208 bp, Heterodera glycines
ctgagccgaagaaagggtaatggggcgccgagagatgctgtgcagccgaggaagacggacaagttcagaaaggaggtgttagtgccaaagaaatgcatcgtgcacgtaatcggaaatggtggtgagaacatccgccatttgcaggtgccgagaggcccaattcgtacagcgaaaagcattcattcaggagaaattcggggtcaaaatg

SEQ ID NO: 108598 - DNA, 169 bp, Heterodera glycines
caacacccccgaaaacccaccgaatagtaattttaggaccaatatataaaagttaaattaggcaccacaattctgcaccatttgctagcaaaaatggccgcgccaaaaaagctcgcgccaaaaaaacctcgcgccaaaatacccgcgccaaagtggctgcgccaaaatg

SEQ ID NO: 108599 - DNA, 1003 bp, Heterodera glycines
gcaacgaccaaaaggataatttttattttctattaaaacaaaaatcccaataaaaagtacatattaggtaattttttccaaaattgtaatttgcaatcagtattattgcatatcccggctgcacctatcggcaccagggctgggcgaagctcggctaaaaaaaggaaggtccccaggtgtccgtttgatttccgaataaaatttggtgggtggatagagcacccacaggttcttaagaaaagtgattttattttttgcggaatgaactcgagtgccgagttatgacgtgccaaagttttttagtgaataaataaattaaaatttatttgcgccttcatcaggtctctaatggcgcagcggtagtgagctagtcctcgttttttaagcccacaggttcggatccctgacatgcaaactcattttttaattttatttttgcctttttatgcaaaagtaaataatcaaatatgttttttatgaactaaatttttttaccattttaacatataagatattcaataaaaatattagataaaattatatctttaacagaaaggtgtgtatcttttaaattaaattattgcgtctttatctttaatgattttttgggtgttaatgaaataaaattaaaataattgaaaattttatttcaattaaattccttacttttgatgagttctatttcctggcacattttttacaacaattttgttgagtagagagtacgacggtgccgatagacgccgccggggaaaattaagaaaatttagttgtgggtttttaacagattttgtccattaaatgatcaaattttcaaaatttatgattttgggtccggcagttttcggaattcttgtcacaatttattaaacgattttcacaaaaaattgaattttttggctatgtttaaaaaatgaaagaaatatttaaattgtttttttatttttcggtggttagaaaatttttgtaattaaatttttaaaataattttacagctaaaatg

SEQ ID NO: 108600 - DNA, 753 bp, Heterodera glycines
agtgtgggcgatccacaaaaaactcagtgtgggcgatccacaaaaaaactcagtgtgggcgatccacaaaaaatatcagtgttggtgatccacaaaaaaactcagtgtgggcgatccacaaaaaatctcagtgtgggtgatccacaaaaaaactcagtgtgggcgatccacaaaaaatctcagtgtgggcgatccacaaaaaaactcagtgtgggcgatccgcaaaaaaactcagtgtgggcgatccacaaaaaatctcagtgaataattaaataattaattttaattatatagaacgtgtcactgaattaattataattaaatttattttataccattatatttcaagataaatttaaaaagaacaaataaaaatttgtcatttttgttttaattttttgcataaatatcttttgtcatttatggcaaaaaatgcaaaaaaagggtaaacaaaaggaatggcatgaaatttcatactaaaattgaaaaaataataaaataaaatggaatggctgaaattctaggagcaaaaatggcttaatctatgggctaaaaattcaaaaaaaaaggtaaacaaaaggaatggcatgaaatttcatactaaaattgaaaaaatagtaaaataaaatggaatggcttgaaatcctaggagcaaaaattgcattcgatgagaatgaaatgttgaataaaacaaaaaatgggtatatatatataagtaacaatatggtctttccatcatgagtctcaaaaatg

SEQ ID NO: 108601 - DNA, 388 bp, Heterodera glycines
aattcatttgaatgttttggcattgtctcaacattcacttaattgaatattctcgtcgcatgcaaaaacggcacaattggccaaacattggccataattattattatcattcaaatgcaaatgggaaaaaaagctgcagcagacaataaattgatgccatttttgacacatttggtcaaaaatcattgtcattatattattgttttttggttctggcaaattatggcaccgaaaatgccaaacccgtggctttattctcacatggcaaaaattggtggctataaatacataaatggacagagacagtaaagcaaattcttccatcagtcagtcacacaattttaaaaaattccaccgattttctctccaaaaaattaatccaaaaatg

SEQ ID NO: 108602 - DNA, 609 bp, Heterodera glycines
atgacgaaaatgccgatgaagcaaaatggaaatgttttggtctgagaaaatacagagaaactaaaaatagtgactgttttatcatgggaaataagccaaggaaaaagggcggctaatgagggaaatgaacggtaaaagattaaattaagggagaaaaataattaaatttgaaaatgatttgatattggactcgttattaattaatttatgaaactaataaaaatattttttattcttttagcaaaaattttcgatcggacgaaatttgatacataaaataaacggacgatggtaatgagaaaggatttttgtttatttgaatacacagtgatatcgttcaataatgaatttcgaatcggaatttgttacttttttaatttccaaaatattattatatttcgtcatttttaatttgtcccttttttatttttaattattttttttgtctgatgggtgttagtcccgcctcggctgtgtccaccgcgctgaatttgttcacaattctgtccctgccaatgggccaaaaggaattggacacggacatggccaaaattaatacgtaacttaagcaattataagccaaaatcttctgctggtttcagacacatg

SEQ ID NO: 108603 - DNA, 234 bp, Heterodera glycines
taagggcttttgaatcagaccaagaatggtgtatttcggttaacaaagaaaaatgctatgatactcaaaacttggctgggacagagttggcgtgagggatttggcccgtcctcgcaccagggatggcacggaattcgattttcaatttccaaaattttttaggccctcggaatgccatccatccctgtcccgcaccatacacagaattttttttttaaagatgtgtacaaaatg

SEQ ID NO: 108604 - DNA, 318 bp, Heterodera glycines
aaaataacgaaaaaaaaaatataaaaaaaaaaggtttggaactatgacgagtgggacgacgacttgttcagcaaatatgtcaatacattcgttggtctcaaagtccaagcgactgggtggccggaagggtgtgagacagatgaacaacgtaaagaattcgtggataatttcatgcgcacggaaggcatccaattagactcaacgaaaatgacacccaacccagggctccgcctcattgccaaaacattggcaaattctctgtggtatacgtttttaaacttctatttgaacaaaaaaaaaatgtttaggggaaaaatg

SEQ ID NO: 108605 - DNA, 127 bp, Heterodera glycines
ggtatgtaattgggttttttcaaaaaatccaaaattctctaaccccccccccccgcaaaggtattcggaggcgtgcagctcaacgctggccaccgcctattcaagcggttcgtcgggcgaacggatg

SEQ ID NO: 108606 - DNA, 215 bp, Heterodera glycines
atttaatgtctacttctagatttttatgtctaaaatttccatccctactaatagcatattagtttaatgatattaaaacataaggttctatccgtttttgcgtggcaagaaagccgacggcatacaatctaacaaaaagattggatggaacaatttgtactgatgggatcaataaaacccaatttgtttttcccaattcgatcaaatttgaaatg

SEQ ID NO: 108607 - DNA, 1003 bp, Heterodera glycines
agttattagcacctattttatcgtttttattttctttgaaccctaagaagtttaacaaaacctatgttgaccttttttgtgttttgctcaaaatttatgaataaaaatgtaacaaaaacaaaaattaaacccctaagaaccgatccttaaaattttcaaaaatacatcactaggaaataaaaaattttctaaaattcatcaccaaaaattattttttttttttttgttaaaaatttttgagtttaaatattatgtgtctcaatactgatttggcttaatgttgatttttggaaaaaatttacgcttttacacacctaaatgtgaaacttaattactttttactgccgaaaaatctactgtcgaaaagtcccctcctaaattttatgatatttctgtcgaaatgtcctttgctgtcgaaatgtcctttgctgtcgaaaagtcccctcctaaagtttatgatatttctgtcgaaatcaaaaaatttcctagcagtgaattggtaaagcatcgatttttttagaatattcctactgatgattataatgtatattataaaaaataaagaaactaatcatcatataatatttatagttaaacatcgatttagaaataatgttaaggaataaaaaagcactttttccgtggggcattaataaaatgaacataattaaatcttttaatgctttaataaagtgaaaaattgattattaaagaaagtggaaatttttgaataaaaggagaaaccaaatgaaagaataaacaatttttttttggccgaagaatgtgataacgaataacaaagttacggtatgaagatttcgacccatattctgtaccaaaaattctataatcaatccttttttgctgtaattagtccacaaaaacctttgggataagcatgaaaaattacaattgaacttattaatacaaatattgatgagtcattttacagaaattttggaactcttaattcataaatttatttctcaggttcctttaaatg

SEQ ID NO: 108608 - DNA, 318 bp, Heterodera glycines
cgaaattggtcaaaatgaatgtcagattcgtgatcagcgaccctaaaacccctattaacatgttttaacacttttagaacaaaaatttatattccaaaaaggggggaccatcggcagtattaccatatcttttgcatcacaaaaacaatagatgggtcagatttgatttgttttccctctggaatttaatatccgctgaatttttctgttgattggtgccaaacttgaggtttcttctcgacatttggcatttatttcccattttcaggaacaattttcgcctacggacagacgggcaccggcaaaacgtacacaatg

SEQ ID NO: 108609 - DNA, 124 bp, Heterodera glycines
  unsure (1)..(124): unsure at all n locations
aaaaaaaaatttttttttttttttgctgctntcgnncagtcaannaattgtacggnaattngcngaaacntaagcgaaattttttttttcattatatacctatgcactaatttcagcgttcatg

SEQ ID NO: 108610 - DNA, 452 bp, Heterodera glycines
ttcggcgccctccccagttcgttggctaagttctcaagtcgagtgaagtcgtcattatcagaacgatgtcgtaaaaaagcccaacaatttcccatataatatggctaaaaagcctagggttagacattggtccatcggaaaattattcaaatttgtttggagttgaaaagtcaacaaaaaaattcgtaaaaaacctctaaagtcacatttcagtaattcgccaccagatttttattattattatttttcagtctgccatttcagtcccgatggtataggaaatttcggtgccactctttaagattgacttacctatttttctggattttctctaacatcaattgattcctttccctaaattcgtgatcactgatcagtgagcccgaaaaatcccggggaacaattttttttttttgagagtcacatttaaacatttatttttaagtgtaatg

SEQ ID NO: 108611 - DNA, 353 bp, Heterodera glycines
tctgaaaagttaattcgtaaagatcattttcaataactcagcgttgaacaaaagtaatttgtaccaaccttgagtcgaatatttttaaaaatatttaaaatgtggtaacaaatgaatgaaaatttttaaacatttattaaagaccaaattttatttagacaatcataaacacagcggcccaattttgggctccaagtacaaatatgctggatttttcgtcttagtggtctgtgagttagtcaacaaaaagggggtctcaagttcaattcctccttgtgtttgtgtataaatttcaattttttaaagcaaataaataaaataataataaatacagaacgccaaaagaacaaatg

SEQ ID NO: 108612 - DNA, 255 bp, Heterodera glycines
ttcactccctttatataccccttctataaatagcaacccaatataaaattaaattgaaaaatgaactgcccacataaaattaagtgttgtcattactgtccctgtcattacgagatttgtagcaggtgtaaaaagcacagtcttttgcatttcggtacatcattatttgataatttctggctatgccccaaatgcgcgaaacatgttccctatgaaaatataaataggtcaaataaataagaggaattaaaaatg

SEQ ID NO: 108613 - DNA, 1003 bp, Heterodera glycines
ttaaattttaaattttttaattgattaaaattcatttgaaaatggtcaacattatgccacaaaatttaaaaaacaaaacgtcaattttttaatagattcgaattcgaaatgtgaaattctcaaattcgtcggttttttttttgtttttcccctctatcgcttctgaactttaatcctccattttttctgttgtgattttcgtactttgtctgtgcattttttttgtgttcgcgcccacacatacattttaaattcgaaaagaattttgtttatttaagcgatttatttgttttcccaagcaacaaaaaactccaaccgaacttttacttttgctcacacggcgggacactcaaaattcctttgccgatcgaccgacagacaaacggcggcgacgacgaagcaaaaaagaaaagtgcgcgcattaatttttgaggagcatcgctttgatggagaagagaggtgaacagagcgccaacaatcggtttttaccgccgccatttgcgaaaagcgaagcgcctttccctccaccgtttgccaccaatttctgcctttgattgttgggagcaaaggtttccgatttttttaattgcattctttgtgcctttgaacggtcgaatttttctaacaaaaaaggaaacgacttgtcactgttaaaagtgcattttaaaatttgcttttccatttattttttctttggcttttcgtttatcattttcatattttagtaaaaggtcaattgtttgattttttaccaatttctgaaattcgtcttgttgataattgctggctgacccattccaaaattttaaattaacttgaaaacgacaacaaaagatttaggattaaaaaaaattgtacggcctgccataaaaccataaataaaaattttggtgtttcctatattttctatgttttgtttggcttttcaatttcaattttttcgtttagccttccgtccgttccctcctcctcttcccttctcgtcattccccccatttgaatg

SEQ ID NO: 108614 - DNA, 106 bp, Heterodera glycines
ttcctcatttataaaattaatttccatttcctcaagtctcctattttcagaactattttctgtacgtatctcaatctctttttcagtttcatattcagtctcaatg

SEQ ID NO: 108615 - DNA, 1003 bp, Heterodera glycines
gggcatggtttcacagaatctttttttttgttaaaataccgtaccactggcgaaatttcataaaactacttctcttatgattagagaccgacttttgaggcatatgcctttttttctgcgcactagtttcgatatattaagcataaataacacattttccacttggtttgaggcttctacgtcgacttttattatgcctttttttgcctttttcgggattttcgtgccttaaatgccttttttggcatttttttcagaaaaattccataaaaatgcaataaatcgggaaaatacacccctaagaaatgaaaaatttctcaaaaattcatctccaaaatttgatatttttttcttgatagaaaattttagttttataaatttcataatacgaaaaaaattataaaatatttaattatcatttaaatgaccaaaattaattttttggttaacttttacgtgtttttgctccctaaaagtccttaataaaaagatttaaatgccttttttcatgcctttttcgggattttcgtgcctttttttcaatttttgggtgcctttttcgcggtttttggtgcctttttagtcggtctctacttatgatatatatttttataattaattcttttacaaataaagagcatttgagaagaaccgagtgttcttcagagtacaagtgtatggattttttgacgaatatttgaattatttcaatgaatttttacgtaaattatccgaaaaaagcggtggcacaacgcgattttggaagtttttgagcagcgaaattttgccggacattagggacggcgattggatggccaaagaattgtggaaaacgcagcaaacggaggccaatgaatgttcgaaaattatcaccaattaattattattgacaatagcatttagtaaatggcttagcattttgtaaaaaagaaaaataatatataaaaaagagaaaaattaattgcccaattaaaagaaattaaaacaattataaaataaaatg

SEQ ID NO: 108616 - DNA, 111 bp, Heterodera glycines
tttcaacagcatttcttttcggaagaaaattttgcggcgcatccaaatgttgttgccgaacacctcgaacagcgagggcaaattcatttcgcaccggcgcgtcggccaatg

SEQ ID NO: 108617 - DNA, 132 bp, Heterodera glycines
  unsure (1)..(132): unsure at all n locations
ggagagacgtagaaagacatttaatcagatcacnaatatctcgattccatccaaacccaactaaacacactacgagaaacaaatcctcacattttagaagagcctgatataaaaatttggtttgacaaaatg

SEQ ID NO: 108618 - DNA, 972 bp, Heterodera glycines
ttttctgcaggccagggggtggctctataaaaaaaataaaaaataccagcatgtagaggacactttggcggggtgccctcgcagcgggcattttttgattcgagttttagaaaaaaagttatgggccttcaaacgcaagcaaaagtgagaaattagccgccgggactcagttggccaccggagaggaaaacctatagttttcccagatgcgcctcaaaaagttgtaagacccttccactactttcagggcgctccctctgctagaactggagattttgttttagaaacgaaaccccctttttctgtagagtaatataaactagcgggtgcgtgaaccgtcggctatttagctgggaaaaagcgcttcgcgctttgggagcttcgctacctaggctgtgaagtgatttaaattgatcgaatttgttggagaggtttttttgaatttttaaaaaattattaggggtttttagtccacatcgaggctcaagacgggcgcttcgcgcccgttttttaaatttgttgaactcatacgggcgcttcgcgcccattttttagcttgtatggccgcttcgcggcctcaggacgggcgcttcgcgcccgttttttagcttgttaggccacttcgcggcctcagtcgggcgcttcgcgccggtttttcaatttttgttggccttggacgggcggttcgcgcccgttttttaaattcattgaactcatacgggcgcttcgcgcccgttttttagcttgttaagccgcttcgcggcctcagtcgggcgcttcgcccggtttctaaatgtgggtgttctcggccgcttcgctgccttagacgggcgcttcgtgcccgtttttaaattgtgttgggctctggcgggcgcttcgcgcccgtttgatcataagaggtacaacagtgattagaagaggtacaacagcaattaaaagaggtcaaaagtgattagaagagttataaaaatg

SEQ ID NO: 108619 - DNA, 1003 bp, Heterodera glycines
gcataaagttttggataaggatttaccgatttaatgggacataaaagcattttttattaggctgtataaagaaaaatgccgatagctaataaaatcaccaaccaactctctggccaatcactgacgagtgcaggccgctatctctctgagtgttttctgcgccgtagaaatggatgttgtagttggagtttacaattaaacgaaagcttaatgaatgctaactgccttctgtgagcatcttttatactcattcatagcataaaaagttggtctttggccatgtctagacaaataacctgttaaagtaaaacatgatcaaaaatgcttctgtgtgtataatttttttgggtaggccatatgctcattaaatcagattattttaactaatgtttgcctagggaattaaatttggtcctccaagtgtctggcgtttgacatttatctcagtgattaattgccggctgacggcgaataaagaagcttagcgctaaacattttttatctccggtgaccatcttgcgcttcatcggctggtcatgtgcagttcacccgttccattccactccgacgactatttcaccggttggtcatgtgcaatgcagccgttcggttccgctccggcgaccatcttgcgcttcatcggctcgcgcatgtgcaaccgttccgttgaacgttaatcctccgaaaaaagcagacaagcagacactttgataggctatttaaatgagatttcttctgatgatcataagcatttgtaatgaatcggagagggcgttcagtgccaccaaagggcgtaaatagcgaaagtaattgtgcaaactgcccattggaccatgcgttccgtttctttcaacgtttgcacgatgcccgcggcggaaaacgtttagtgtcaacccctccggcatttatttttcaagaccgaagactcccgcctttatgtatgccaatttagaaatttccacacgccccatttaattaagtgccaaaaatatattccgaaatg

SEQ ID NO: 108620 - DNA, 250 bp, Heterodera glycines
cgatttccggtccgtgcattttttgtttctaaaatgtgccattttgaacttttttgaatggtttccttttatgtttattcaaaagaggcgaaagatagtggctaaaaatagtagaagatcggctttactaatccgccacaaaaatggaaagcactgaatttggaaagtcacgtcaatccaaagtgttggtatgtataaatatgctattcgttctcttccgaagttgctttctcattattcctaacaaatg

SEQ ID NO: 108621 - DNA, 295 bp, Heterodera glycines
  unsure (1)..(295): unsure at all n locations
tgataaganatttttgatttaaaatcttatttaggatcctttattggtctggcttaattttcttgctttttgaataaaaattgtcattttacagccctaaatttgaggcttttagtgcctgtttttttttggtttttttaagaacctaaagcctaccttttggccgatttttagagcctataaatattagccctactctagaaaaaccaaaaaattttttaaattcattcctgtgagactccaattctccagtattaccactaaatcattggaattttcatgtgaatttcagatg

SEQ ID NO: 108622 - DNA, 71 bp, Heterodera glycines
attaggcattagaggaggcaatccaacgctatccgccaaatccgtggtcagtgcacgcggccccccctatg

SEQ ID NO: 108623 - DNA, 497 bp, Heterodera glycines
taatttaattttgggctacggcaaatagacaaaattattcttatttcatgtttctaatatttttcttaataccaagttttgctggcttgataccaagaatgtaggcactgaacaaataaaaaaactgatggccatgcctaagaaactgagaatggcattgattggagcataaaactggaatagagccaaaaaaaaaaattttttttttgaatgggtttggtcattttttgcctactaattttggtacaaaacgaagattggggattttcttagtcagatgtgattatgatttttgagtcaatcagtgatgtatcgggagtctcgatgccagggttttttcaaaactgtcaagatcaggaatatacatatcgaatgaatctctctagtcacaataaaaaaaaaatcgttatttagacaagtccatttccaatttttttttttttaaattcttgattcatttctgacccctttccattctttacatatttaaacaaatg

SEQ ID NO: 108624 - DNA, 628 bp, Heterodera glycines
ttcttacattaataaccaaaaagcctaaattaattttttttgtttttttaacaggactccgggtgctgttgagcgaagcaggacaaaactcggtaatactatggcacccccacaaagtgtccaagccacgaaatgtccaaaagagtaaaaacccacgaaatgtccaaaatttttcaaaatttataaaaacaaaatgagtctaatttaggatttttaaggttttcggggtcgctgaatacgaatataccctttatattaccccttgcctaaccttaggcccatctgaataataaaaaactcaaattcgagacttggacatttcgtgggctggacattttgtgggtcagcgaatactataagatgggatcgacccatttccatactgccgtttccataccgccatttacataccgccgtttccgtaccagccatttccataccggccgttccatgccaccgtttccataccgccatttccatactaaggtatttaggccatttccataccaaaaatttttcgaaaattttcaggtaaaattcaataaatagataggtttcaactgtttgatgcttaatatgaattataaattcaatggattctcttttcaacgttatagattggaaaatg

SEQ ID NO: 108625 - DNA, 155 bp, Heterodera glycines
ggtagcataattaacaaatcatgaaagtatttggagtgtcttgggggaaacggaaaacaattgcatgtaaatcaattgtgtacggcattgcttttaaaattgtaattccgaaaaggggtaaaaaaagcatttccggcatttcgttattaaaaatg

SEQ ID NO: 108626 - DNA, 57 bp, Heterodera glycines
ggtgtcgtcgatgataaaattgcaattcattcactcattcattttaattttcagatg

SEQ ID NO: 108627 - DNA, 222 bp, Heterodera glycines
tcattcattcaataaaacatggctaataagtttttacttgtcccacaagaaatttacaggggtttgacctcaatgtcggacacgggtgacattaatttggatgctgtacgacacgatttgaaccgaaccaggggcgaacgaacaaatccctctgctaaaaatgtcaactacaaccaacaacttaggcggtatttgaaaatgaggagggaactaacaaacatg

SEQ ID NO: 108628 - DNA, 1003 bp, Heterodera glycines
aaaccagcttttttgaaattttgcaggcttatagaggacacttagtgctatcatgttagcacgtcataactagggaaaagaaatatattgatataaataaaatcgtgaaatatggacataaaattaggacaaaaaatcgcgaaatatggatataaaaggcaaaaatatggacataaatctttggggtcaaaaaggccaatttagttgttgggggccgttctaatagaggtttttggaaaaatgccaaaatatggacataaaatatgataactcgacactcgtgctcatttggcagaattttttttaagaacccatggatgctctacccacctaccaagtttcattcggaaatcccacggacacttggtcacctccccttatcagactaaaacggcccgtatgtgctaatatagtgacttaaaatatgtttggcgttttgttgttttattttgtgttatttttaattgtgattttgtgtgataattagtagttagttgatgcagtcgtcatttttccctattgatttgtgttcgccttattttaattggaattaaacgaaaattttcttcgacattgtaatgagtggaaaagcagagcgagcatttgacgtcgccaaaaaacatcgcccgaaaaatttcaacgaaatttgccgcggaatagaagaaattttagcgagtgggacgcacagaaatgcaggcattcaatgaagggccggtgtgaagcgacgaccgaatgagtctgtcgatgaattcgcggaacggctctactgcattgttgaatgtgcttacccaggtttgccgccaaattttgtcaacgattttggaatcaaacacctaattcatgctttggaaaacccggaaatttcggtgggattggaattggctcgtcgaccaggcatgagcttcgacagtttcgtcgctcttgcagtgcgatcagagtacaaaaagcaacgaaatcggctgaaactggaaaagagcactagccaaattttcagccgaaaatg

SEQ ID NO: 108629 - DNA, 1003 bp, Heterodera glycines
actagagccattaatattttgaaaatatctttataggtagctcacaacattctctattagcatgcaaaattacaaaaaaattttgtggtgtttataaaaaaaaagttatgaccaaaaacctcaaaaattgactttttcatggctttttcgtcgcggttgacataacttcttttaccttgtgcatgatttatttctttttcacatattagagctttcaaatgatgccagatttgctaactttaactgacaaagaaaaaagtcagaataatacaaagttggcggcgccaaaacagttccacgccgccgaactaatcccgaccttacttaagtggaagaatgatgaatagggcgaggattcttaggtttttacttattttttctgcggctttaactcgacgagaaatgcacgaaaaacaccttttttgttcggaaaaccttcgttttaacgcccctatccgaccctagaaatccctattttggatgttcgcccctaaaaatccctattttgagtgttcgcccctaaaataagtttttacccctattttggcgttttctccaaaatttattaacaaaaatgcaataaaaacgaaaaatacaccccaaagaatcgaccaaaaaattttcagaaaaatataccccaaagaatcgatccaaaaaatttcgaaaaatataccctaagaatcaatccaaaaaatttcgaaaaaatatacccctaagaatcgacactaaaatgaaaaaactttctaaaatatatcttatttgtaactgcaatcagtgaataaaattgtttgccttaattttaacttatttacatagagaaaacagcaatttaaaaaattgcacccctaaatttgaaactttttcgcccctatttttgcccctatttcgcgaattttttgcccctatttaggtccctaaattggaatttttcgcccctaaaaatcctcgccctaatgatgaagaagagcaaaattggcataattttcagggcgcccggaaaatg

SEQ ID NO: 108630 - DNA, 389 bp, Heterodera glycines
tctgtttctctgcttttcatcgttttctcctctttttcactgttattgatttattccctttccgccattccctccaacgcttttgcctttgtattttaaaagtgcgttcatttcatacacaacagacacatgtgtataaaccacacaaataggacagcaaaaggaagcatgcttttcaatttattgagggcattacgaaaacaatgagatggacgattaggacatcctccaccaaacgcccaaattaaaattcaatgcttttgctctattttaatggaatgtttagccatttaaaaattctcttagcttgcgcaattaatacaattttaagcaatttctttttcctgtgttttaaacttccttttcgaaacaactgatatttcgcaatg

SEQ ID NO: 108631 - DNA, 400 bp, Heterodera glycines
tgaattcagtattactgggaagagtggatttttcattttgtttttattaatggtaaagcaggccttttctcggttcttttaaattgacctaagtggttttttgaaggattttttgatttttgcgatcaaacctttgctctcgcaagcccttgtttgacttttaaaaattcaaaaaaaaattctacctttcattatattaccccattctcctgtggcgatctctaccaccagccctcacaaaattcttatggcaacgagaaacctctgatttaattttggttcaaaaataagattcgaaaaagatcaaattaatgcaataaagattcagcccattaggttatacatatctagacggctctatccccttgatctttagtggaaggagcaagcatgaaggatg

SEQ ID NO: 108632 - DNA, 129 bp, Heterodera glycines
  unsure (1)..(129): unsure at all n locations
aaaaattcttcttaaaatttttttgacccaanttcaaaaaaagaaaaaaaatttgcagtcaaaaaaatattcgaattttctcccaattttgtttccataatttcccgaaagttattcggtatcataatg

SEQ ID NO: 108633 - DNA, 248 bp, Heterodera glycines
ggagcacctccttgggagctccgaaacatcatctctggtggaaagggtcagcttggctcacacagtagagccatctttggcccaacgtactctgtttccaagtaacagagtctgaccaacaaatctcggagaatgttggcccgagtggtgcgtttctcgcatacactcacttaaagcagccaaatgagcaggtcttaattgacccctcacgcttcagctcatggaaacgccttatgcgaacaacaatg

SEQ ID NO: 108634 - DNA, 92 bp, Heterodera glycines
tcgcatatcgccgtctcctctcaacgaccaagcgtctgcaatgctctcttgagcttctcgaccgttactccgccgaactgacacggcaaatg

SEQ ID NO: 108635 - DNA, 512 bp, Heterodera glycines
tttatctgaaaaactaacaggtattatcatttattatttaaatattaatcgtaataaaaattacaattatttagggacactttctccgtggcggtattatctctccgttctccgctggaaaattcgtctttttaattctcaccaccaattttattacgtcgggaataaggtattaaaagggtcaaattaagcatttgtaatattattttgttatggggaaatggacaattttgaacacccggaagacccggcgggacaattcgccttttggagtaccaatgaaaagaagcgaaacgcaacaatggcaccgttcatattttggcacacattccaatcggcggtaatgcggggagggggggggggggttcaaagaggaagttgaattaaaaaaagatacggaatttgtgggaattaaattcaaacagaaaataaaggggctcattgatttaaagtgtcaaatgtaatttaatcatttatttaaatgaattttaatttatttagcctacgaaatg

SEQ ID NO: 108636 - DNA, 630 bp, Heterodera glycines
acgagaaacttgccatgccaaaatggatttaaaaagtacaattttgaccagtgactttccccccctccacttttgggccccattagagcgcattataattagtaattgccttttcctcgaactttttgcgcttcatttatttgtttgaatttggcgcgtgccattttcgcttcatttgtttggcacaatgtgcccagcgaccgacgacgccaaccccccgtgaaaaggtcaccttttcatgaccaaattttcatgaatattctctcatcgccccgcgattgggaacatactgagcaggtggcaccagcctaattaggggaattaatcacacatatccatcattaaatatatattcgaggggacgtacggctgactgactcatcatcattagcagcagatcattatcgtcatattaaacatcataatgagttttttggtgccaaagtttcgcgcactctctgtgcccgaccccagcgcgccgttgtgtttggcattttgtgtgacgacggaatgaaatgccaaaaagcgcaattaattaattgggtgaaaggtaataatgagaaaagtaaaaaaaaaaattatttttgcgctactccgaaaagggtataaagcacaacaaaacacagaatg

SEQ ID NO: 108637 - DNA, 333 bp, Heterodera glycines
cctgataacccgagcaaatttctttagctttttcatgcatatttagtcattttgagttttaaagaaatatacataatactaattttgtaatatttaatttttaataaatattgcattttgtatttttattagtgttaattgttaattaatatgatacataacacacatttgtttcatttaacatcttttgtttgttaattgaaatcaaaaaatgattgattttatggtagcaataaaggttaatagatttttttgtcgtaaattaccaaagttggcatttttatgaaactggcacaagtaaattgaccgcttttaaacttttacagtaaaatg

SEQ ID NO: 108638 - DNA, 475 bp, Heterodera glycines
ggtgtgttcaagaaaaaaaatgaaaaaaaaaaagttttttcaccgccgaggtctgaacctgggccaggattaaagtgcgaacaaggaaaagcaccactgcgccattaattttaagtcagctaattcttgctaaagaaccaaatcgaaaatgcaaattaaaaaacaacagtatttgctgagaatgttcggtttggtgccccctccgtgacctcctccctcacgcaaattttccaaaaaaaaaaattactaaatttttcttaaaagccacaaaattaacaatttcttggtgcgaatttctttaaaaaatggaaataaaaattgcaattttccggcggcgcctgtcggcctctctggacctctcctgttgcagaaatgttttttttaaaccgcgtcacaaaaaatggcttgaaaaaggccttctctcataaaaccctgagcctgctggaaacaaaagctttcaaaaccaacagatatg

SEQ ID NO: 108639 - DNA, 1003 bp, Heterodera glycines
ggcatattttgaaaaaacgacccaaatcacgagcccggcaaaacaggattttcaatccttaaatccggtccgggtccttctctgggaaattttgatcatgatctgatccggataagaatgaccaggatcaacgggatttttttcttatttctaccaaaaaacaaaattttttttttaattaatttgtcataattagagctcgcaaaaaaggtgtaggaatttggtggatggcggaggtgtaaaaggtcagcctgcggtgggattcgaacccacgtcccttcctttccgtggaatgctctaaccactgagctacacagggcaccctttacacccttctattgcactttttcatcagtgcaatgagaaactctctgcctcccaggcactttgagagagcccgcactacaaaggcacgaaaatcccgaaaaaggcatgaaaaaaggcatttaaaattttttattaaggatttttagggagtaaaacacgtaaaacttaaccaaaaaccttaattttggtcatttaaatgattattaaatattttataatgttttcgaaaaagtaaaatttttaaaactaaattttttatcaagaaaaaaattaaattattttttgagaaaatttttaaattcttagaggtgtattttctgaaaatattttctggtcatttcttggggtgtattttcccaattttattgcattttaatggaatttttcggtaaaaaacgccaaaaaaggcaccaaacggcaaaatgccaaaaaaggcatttaaggcacgaaaatcccgaaaaaggcaaaaaaaaagaataagctcaattaaaacttttttttgtttttaaaaaaggctcaccccgaaattcgtctaatgtatttatattttatcgaaaatggcacaaagtgggcattttttgatgcaaatttttaagaaacacttagggccaacattttcaatccccccccgggcggcgtctatcggcaccgtcgaacccttccctttacaaaaatg

SEQ ID NO: 108640 - DNA, 137 bp, Heterodera glycines
aactgctcccgttggagcgcatgcgtcagttggtgctcaacttcttcggccggtgagcacgagggggtgggtgggataacaatggaatgtgtgtgtgtgtgtgtgtgtgtgtgtgtatgctacccccgatcaggatg

SEQ ID NO: 108641 - DNA, 413 bp, Heterodera glycines
ttttttcgggtaatatttgtagaggaaatattaatttggaattagctattaagggacggagggccaattaaaaggagcaaaattctgacaaagcatggactggcaaccattgtttttatatcccatttaaaaatgcaaaaaactggacttacttgagtgtctctgattatatttaattgccagttggcctctggcaagccattaataaatttaaaatattaattaatcaaaaaatttatttgcttttttttgtttgtttgtgtgcgctttttaagttagtgtgtctacggttgggccgaaacacccgtaattagttgctttttaaccggaagagaccgtactgacgaggcccactcttccaaaaaattttcttaaaaaataatttttttttattcagaaaccgtccgcaaatg

SEQ ID NO: 108642 - DNA, 233 bp, Heterodera glycines
cagaaaaatttgggtatttttttttaagtttcactaatttaatgttttttgatagttattcaaaatcaaaatttttatattataacttttgtggcaaataattgccaattatgtaattactcgaaactttttattattcatttttaaagtatctatttttagatttatatttacaaacccaaaatttttctgatcccgaatttggtcattacagtatgataagaacaaagatg

SEQ ID NO: 108643 - DNA, 354 bp, Heterodera glycines
gcatacaagaaaggtttgcattcatttttaaatattttaaacttttaaaaaaaagtaataataaatttaataaattcaaattttataataatttaaccctttattatggttttttcttcatttttatttcttattgttttttgcatatttttcaggtgtttgtcaatgtgcgggtcgcctgaagttgagacaaaacgttatgtgccgaggcctttcatgaatcagaattgtagcggtgaaatttccaaagtgataattaccaattaactaatgacttaattatttaataaaaatcatttaaaaacataaatatttattttttggattattttttaggttttgtcctgcgcaatg

SEQ ID NO: 108644 - DNA, 508 bp, Heterodera glycines
tgtatggcaaaaaaaaaattattttggcactttccgctcgaaatgcccttgattgcccccggcgggcatttggcatttttttcgctttgttccttcccttcccccttcccgtcgccgtgggggtgaggacgtggaaaggtacaaacgtttaaatggtcccatggccacccccaaccttcattataaggaatatgtaggccaaaggcggcgaccctgccgctgccagtcctcctcccctatgtggagtccaattccattccattccgtctcctcagtcgctccgctccgtccctatcccccgttgcgcccccccccccctccctccaccggggggggggggggactcaaccaatctcgagactctcgaaacgccgccgcagtcacggcggcggcggtgatgatagatgatgatacagcgcagagcagtagagagaatataaacaaacaccgcctccgcctccaccgccgtcttcccctcccttttgcgcgcctccggggtccggggatg

SEQ ID NO: 108645 - DNA, 184 bp, Heterodera glycines
aaaggatgtgggctcgagcctgaaaatctgatcagccgtcggcggaaaaggcaatttcgtccgttttttggaccacaattgggcaaatgggattcgtttccgatcgtgatcagttttttggaagataaacgtaagttgcctttaaaattgaaagccatttatacaataaattgttttcaaaatg

SEQ ID NO: 108646 - DNA, 283 bp, Heterodera glycines
ttttatgccactgggaaagcaaaatccaattcattaaattgtaaaaaaaatgacgtcatcatggaaagtaaaaaatactccgccccttttcttgttggtcacgcccatttgtttttgttttgctttgctaagaatacgactccgctttttggctttttagtttcttttttccgcctccatttttttttgctatttaaccacaatttttctaaataaaaatcattcgtgttccattttttaaaaaattacatcctccttcgttttttccgatcttcctgcaatg

SEQ ID NO: 108647 - DNA, 325 bp, Heterodera glycines
accgtcgtcgcggccggccgcatcgtccgatgtgtgaagagcggcgcgtgtgcgcccgctgtcgtcaggtggtgtggacccgtcacggcgcgcacgcgtgcgcccacaacaacaacaacaacatcaacgaccgccagcaagcagcacaacagcagtgcgcgcgttgtttcggcattcacgacgcgcagtggaccccccacttcatccagccgaagcgggcgcagtgtcagctgatcgccaacgacgcggagcgcccagccgccccggcgggaaggcctcgaggacgacaacgacgacgacgacgacgacgacgatgataacgatg

SEQ ID NO: 108648 - DNA, 1003 bp, Heterodera glycines
  unsure (1)..(1003): unsure at all n locations
tttcgttgttgacaaaacttaacaaaatggtatcattcgaaaaaattggtaaaatgcggcgttgaaacgccccgcaaaattagccgttgacccccccagactttatgaaaatactcaaaatgttttaaaacctattgacataagaaactaatttttaaaaattaggaattgatcacaaaactattaatatatctaaacatggaatccatctccgaccatgagcctctacaagggaaaaaaattggtcaacaagaaatatagaaatcaatataattcataaaaacaagaaatacactgataaatttatggaaatacacccctaagaattgctcanatattgatcgccaaaatttagtttaattctttcttgaaaaattttttgatttaaaattatccttattcgaaaaaacattattaaaatcagaaaagaaactgagacaattgtttaaaataccgaaatatggagaatgaaagatcaataaaaaggaaaaaaataaaatttttaaattaaaattaaaaatgatagaaatgaataatttaaaaatgaatgatgatgaaaagttaaaacgaaaatttaaattatccgaagcaatttatctttttattgttaatgcacgaatgcattttaattaattattattttttataaaatctaatatttaacagccaataaaattcgctcagtaacaaataatgaattaatagctaaagtatgaaaaaatacctaaatatttagcgaaataattattttaaaaaaattactcataaaccatctttttaaatttaaaattaatcaacaaaactaaagtattcctaacccacttctaatatacagatgttataagagagtataagaaacaaaatattgaacaaaacctacccatatgatttattaacaagtaaataaaataatttattaattattaataaaaaaggattaataatgacaagagaaatttaaagaaaaagtaaaaagcaaaaaaaaagataacaaaaaaacatg

SEQ ID NO: 108649 - DNA, 53 bp, Heterodera glycines
gctaaaagtcaaataggtttgtccaactttctgaaaacggtaaattaagcatg

SEQ ID NO: 108650 - DNA, 177 bp, Heterodera glycines
ggacattagataaaacataattagtgtaatattacctcattaaattatatattacacaaacccattggctcccaacaatttcctgtgtccaatgcattcgatatttcacatacaattcttgcgggaagttgaaatatgtaaaacacatctttctgaacattattttcagatcccatg

SEQ ID NO: 108651 - DNA, 272 bp, Heterodera glycines
tttctgaatgtactgtcccgaaaaacgaaaaagcagcggaaagtacagtaacgctttttgttcctattcgagacccaaaaaaaattctcagtttataaatgttaccaaaaacttacaaaaatttgcactggcagcctcttattcttttggaaagacataaaaagctaagacacaattgttaaaggagtgaattttgaaaaatgttatgattttaaaagaaaaattgaactgaacagacaaaaaatacggtaattaccccaaaaacaaaaatg

SEQ ID NO: 108652 - DNA, 274 bp, Heterodera glycines
ttccaatttctgcttttgatttgaagggatgaaagtgtggatagactctaacaacaagctttaattactgaactttaattgacatatgtatgatgataaggataagtgattctttttcattgtcatttgctaattactttcttttaaaaaaactttttttaaatgttcttctaatgttagtgattctgatttcaaattgtgtcaattctttattgtttcgatttattagttgcagttttgccttccttctcctttagttcagaattgaaaaatg

SEQ ID NO: 108653 - DNA, 771 bp, Heterodera glycines
atgcagaaccaatccctctgctacgacacattcaaagaagtgttgcggtatgcccaaaccggagagtatgagccaataaatgtgatgtacctcaactttttgaaacccgacattaggagtggcggacacgtcacttcaggccccctccaaaaatgttatcgcccatatgtaggtaaagggatagtgggccctaattatgatgttctcaattttggacacactttgtaattgtttttcatttcgttcatcattcattgtatctcacacacacacacacacacgcaccctcatacaccgccatacccacgcatgtacccctttgtttttctctattttatacctaaaattgtgttattttgtcgttttattcacgtttttaataaaaaatacatgcataattaagcaaaggaagacacaatttgtaaattattaagcatttgggaacgtcatttttaggtagaaaagtgcataattaaggagtgaaaatacatgcataattaagcaatggaagacacaatttgtaaattattaagcatttgggaacgtcatttttaggtagaaaaatgcataattaagagcaagaagacacaatttgcaaataattaaggaatggaagatacaatttttaaaaagttaaaaacgaacttgtcgtttttaggtagaaaaatgcataattagtgtttaccaataaacgtaagacggttgactacatacaagactttctcattaattttcgtatttaagtcgcaagggcagacacttcaaaagatg

SEQ ID NO: 108654 - DNA, 262 bp, Heterodera glycines
tccctttttatagagaatttttacacggaattgacgggtaggaaaatgtttgtataaaagggacgatttaagcgcagaaacaatcattcttcatttgtcctttactgacataataagcgtctgtctccttcttcactttgttccccttttgactgcacttcagcaacaatgctcatcagagaatagtgagttgcttttttcatcatcattcttctgacaccttaattaattacgctttccttttttcagtcgcatcgtcatg

SEQ ID NO: 108655 - DNA, 500 bp, Heterodera glycines
tttcttcgctcccattcaaatcaaacatttatctttcttctgaaatgcattttttgccacagcgaggcctatttttgaaaaaaaaagttttgccaggcaaaaaaattcgggtcgccctccccttgaaaatttttctgaccacaggccctttagctttagagacaaataaaaacaattgcacatcgtctgctccttcctgctgtactcgtcgatgttcaacagttccactttttgaggtgccgccgacgctggggaagacgacgtgtccgaccttttttttgaatttgcacccctaattttcaagtttttttgtgcatatttggtgcatattttgcgatttttgtgcatatttcacgactttatttgcatatttatgcgcatattttggccacttttcgtgcatatttttggcagccctaataatgctatataaaaaaaagtaaataaccttttttaatggaatatttttaaacattttttcgatataaattttcaaaatg

SEQ ID NO: 108656 - DNA, 290 bp, Heterodera glycines
ctattaattggtaatggaccaatttgtcggcaacacttgctgaattggcccatttcagcaaatttgtttggattttgctccgttgaaaagcacaatttgtagtgaaattctcgaagtgggaagccgagcagacaatgagcgcaaaagttcaaatttttgctcaattttaatttcttcaaaaattgctttccagtttttttggtcctcggaaagaattcacttgctaaattaccaggaatttgaataattaaattgggttttgctttaatgaatatccttttttaccgatg

SEQ ID NO: 108657 - DNA, 119 bp, Heterodera glycines
cgttggtttatgaagaaggcaggggtgcaggggcgttcggtatataagcaaccatttgttttgtacattttttagtcatttcatctgttaagtgtgccgccgttaagcctgctgaaatg

SEQ ID NO: 108658 - DNA, 311 bp, Heterodera glycines
ttaaaattattaaatttattggttttttattatttaaatttttggtatttctaaaccactcgtgaaaatatttcttttttcattattattttctaaatttctttttaattccaatcatttttctcactaattaaaacatttttttaaactaattattttttattagtaattaattaactaattgcctgattaattgtcccatttttaaggaacgcaccgaagagaagcgcaaaatttttgaattggcgggcggagcaaatcgaaacaaaacgaaagcgtcgacaaaagcggaggatcagcggaagaaaatg

SEQ ID NO: 108659 - DNA, 161 bp, Heterodera glycines
tacggactcaacaggacgaactgctcggggcagtgaggctcagactggcctccctcaccatggtctgcgtgccaaagacggaaagctggctccgatcatactctatctcgacgacggcggtaaagcgatgcccatcggcggggtcatgccgcggcaacatg

SEQ ID NO: 108660 - DNA, 205 bp, Heterodera glycines
atttcattaaaattcttctatgaaacaaatccgtaccaactgcgttaattaaagcgattagtgtttaattcacttttggcgattttatttttcctccgattaaatgcaattacaatttttcctcattcagcagtcattttgccccctcccctgtttagatgatctgtcattttcgatcattgatcaataccagcgtgtgctgatg

SEQ ID NO: 108661 - DNA, 447 bp, Heterodera glycines
ctttttcctctcttcgtttgctttttttaatatttgttttgccttttccgatcggtttcatttttcgctttttctctcattttaatttttttcgctaatttaatttcacttggcccaccatttccatttaagtgcataaaaagtttaagtctctgatgagaaagggcaaacattctctcgtcccccccccctccctcaaattgcattatttcgcttattacgcctacggcatggaaatccaaatgaaatcccagaataaaatatagagccattaggggaagaaaattagcggccatctcaaattgcgtgcaaataaataaataaacgcttttacgatatctccacgccccaaaataaattgaaatttctgataattatctcaaaatggacacttttcagaatgttcccatttggctctttctaatttgttttctcttttcaaagatg

SEQ ID NO: 108662 - DNA, 318 bp, Heterodera glycines
gttgagctaaggttatttgggcacacaacagcataaaaggaccagcctacctgtttagactggtttcaaaaaaaacttataattaaattaaaatatattttaaataaatagtaaatttatgaatttagttggttaggaaaaaattaagataaaagggcgggaagagattctgaaattattccgtgtgattcttgattctcaagtcgggaaataagtcatggataaataaggcaaaaatttatattcacaaaaattttgctaacattcttgacattattaacataaaacaattaaatagcattaatttagaaaattatg

SEQ ID NO: 108663 - DNA, 433 bp, Heterodera glycines
atgaaagtgccaacaaaatcaacagattctgtgattcgaatacaaatgcatatcattgttgttattgttttgtttaattatgattgtgattatacaataaaatgttggaatttaacttccttttttattctatgggcttttccgttgcgcatttttatgccaaaattggagcgtcacaaaggcagtgccaaaagatgaaaagcattgacttttgggtcagcaaaagtgccgcagaattggtgaagtgaacggagttgccaaatgaatgccaactgagcacaatttgcataaactttaagtagacgaccttctccatgatgccgtcgcgtgtgactacttcttccgtttgctatgaaagaggaagaaacagaacgatgctttgacgcaatgggcaaatagaaaacaatgatgaaaatacagatgaacgcaaatg

SEQ ID NO: 108664 - DNA, 188 bp, Heterodera glycines
  unsure (1)..(188): unsure at all n locations
aacgggggaaaatgcattggcacccatcacggcactgcctactgtaactgccccgacggatacggtggagaaaattgtcaggtaatcagaatgacaataattaattaattcanatttaaactgagcatagattgagcagaatatatgtactaagtggacagaaggcgacgagggaatatgcgggaatg

SEQ ID NO: 108665 - DNA, 482 bp, Heterodera glycines
ggtcggtgggcgaggggacgggacgccaaaccgcttatttttcaacaaatttatttatatttactgcgtgctttttttgttgctctcttttatcttacgaatttgttggtttactactataattctggatccatcatccgcacatttcacagtgtcacttatttatctctgactctttttggttgcattctttcccggctttaaccattttttataattatatataatttagtaaaattggttttattcgagtttggtttcgggggtttgaattggcgaaatgaatgtcagatttttgattggcggtcccaaaaaccccgagaagcattttaaagttgcaggcgcccacccatggaattgtccccgtacccgtttaatccaaattctggtgccctcccccttccttttctgtaaatattctattctgctcttcaatttacctttagtggtggccatttgccgagacatttatgatgataatg

SEQ ID NO: 108666 - DNA, 260 bp, Heterodera glycines
  unsure (1)..(260): unsure at all n locations
taaagtaattaactgttattattcccatgtactaataataattagtcaaaaaatnntaattgtttaaaccacttttgaattagtggaatnaaaaatataataatntagttttaaaattaatccgatgaaattaaatttgttttactttatcagcgcaaaagaaagaattattttaacacaacaaaaccactaacaattttgtgctgcttcttctcgcccttttctcagtgcccaacttaaacttcttccatccgcaaatg

SEQ ID NO: 108667 - DNA, 480 bp, Heterodera glycines
ttttattttgtcaaccaaatccaaaactattaggtatcattcaatagccctaagtgtcctctattagcctgcaaaattctgaaaaacctcgttaaggttcaaaaaagttatggttagaagaattcaaaaaacagattttccaagttttttggcttgaactttttttaaacttaatgaatttttttggaatttcgcaggctaatagagcatctgaagggctctcgaacgatacaaagatatttggatttggtttgcaaagaaaaaagttatagtccaaaaacatgtgctcgtacgaaaacgacctggtccgtctcgagacaccccttgtatatgtatgtctcagggtgtttgctatttgtttaccgtagcttttggcttcctataggcgtctatactactagaagtggttttgtccctccgtaccgtaaccttagtgcgccctatttcattactatgatttaagtaatccccgtaataatg

SEQ ID NO: 108668 - DNA, 712 bp, Heterodera glycines
  unsure (1)..(712): unsure at all n locations
tttntaatttcacttcaccatncttttaattcccaccntaanacnnaacatttccaaaatttntaccacattttactncnnanantccaantaccttaattnnacaattacttatcaacnaacacantctcctttnccctcttatataacanaaaannntnnatatcanatnnnntgcgtcccttcctaaaaatttctcttttcgtctaaccatcccacctttttgtgctctatttcattttcaaaattgggaacatttttttgtatgtttttttgaaactaaaatgtaaaaaatttaataattatttttgatttaaataatgcttctgtttcgaatcttttggctttaagtaattaaattgtaaaaattcaaaactaaaaattctccactgaagtttttaacttggctttaccctgcttttaagtcccaccgtgaggcgggacagttccaaaatttgtaccacattttactgtggaaagtccaagtaccttaaggactacagaagagccaatgacgcagtcacctttggacagttattaaaaagaaataaggaaatattcgatggggtgcgatcctttcaagtctaccctccctcgctttttgtgcactgtttcgtttctaaaattggttccgaattttttggcattttgaaattaattgcaaaaattcgaaacaaaatactctgaagatttgtaatttcacttcaccatg

SEQ ID NO: 108669 - DNA, 316 bp, Heterodera glycines
cctgaaaaagggattgtaaaagggatttcttaattggatttttggccttttccgggacaaattccttcccgcattttccttcactttcccatctctttatctccgttcaatcagtcattttcttatccatttcatttccatccttcgccatccgcgttatatccatcattcacttcattttcacatttcgttttattcaccaatacgtgtggtttaattacccaagtttgagatgggagaataaagtaattctggataatatttggtcgccaatgatcctgggagggcccgcccgtttcactggtagcaccggatg

SEQ ID NO: 108670 - DNA, 680 bp, Heterodera glycines
ttgttgaccaaccataacatccatgatatcattcgaaagctctggatgttttgaagatatttgtaagctattaataataaatacacagagctatcgaacaacaccaacaatgcttaatttgattgacaatgaacaaagttatggttcaaaaagtcttccgacgatgtttcggccgacgacgttttgtcctgcttcgtcttacccgcccccccattgaaatattttaaaatttttacgattattttatgtaacaacttttttaaaattatttgaattttctcggaaaaaactgtaaaaattggcaattttacgaaatgcccatagtgcggaacattgcggcgaaagagccaaaaaaaaaatttttttttttttgaaaaagattgtcaaccacacattttagaaaattttcgaacttttcaaaaaattagcgaaattcaagaatttgctttttttttaattttaaaacagaaaatttgggatatattttattcatttcttctcatgggttttttcaattcaggacaactatgaaaaaccaggacacctgtgtgcatttttttacatgttaatatgtttgaacattcgtggcaaaatcaaataaaattaaaaataattatatttaggcatttttgcaattttatttctttatttttaacattataagaaattatagaaaaatg

SEQ ID NO: 108671 - DNA, 292 bp, Heterodera glycines
cggaattccgatttccgacatttttggggccggaattccgatttctgaaaaaattttgatgtcagaattccgatttccgaaatttttgataaaaagtcggacattttcggaaattttttttgaatcttttttctaaaaaaaaccaattttttgttcaatatataccaaaaaacattatttaatcacctttttcttggttaagaattagcctatttaaatatttaggatattttttatatttttctaaaaagccaaaattctttcctctttttagaaacatcgattgataatg

SEQ ID NO: 108672 - DNA, 973 bp, Heterodera glycines
tgaggaatggcattgcaaatgccaaatcggggagtgccaattcgaatgcaaattgccaatggaattgcatgccatttcaaatgccaaattgggaaacgccattgcaaatcccagatttaggaatgctttccctttcgcttttgcgttcgaactaatcattagaattctttttatttcccaaatcgttcagccactctccgcagctggccaatgccccctccctttcgttcggtcgacctctccaacaaatcgcttctccgtcttcaaaagtgcccaaaatgccgatttcctttcgcgacacttctggcgacggagtgctcgtcgtggcgcacgtgccccaacggccgctcaccttcagagagttccgccattatttgtccatttcttcaaaggatcgtcgccagtgcgttttttccgcttgcttccccgcttttcacataccatttcagattcttcttcaaaagttcttgcgaagatgggtctgccccttaccaactgttgctgatcagcgacgacgccgcacttttgcccctttttgagggaaaagtgtcggcggagtgtcgggcgcccctttccgattccgattgaccacattattaatttattcacacgttttatctattctgcataaatgcctttaaaagaattcttttggtggccctcttttttattcgctttgtcccttcttcgtcatgcgctcgtctccatctccaccacccgcactcttcgcgtttcgtccttccgctgctttctctcgccattctctcccgtcggatgcgttttgtatccttttttaattgccactcttttggcgattgcgaagtttcttgcgcggagcattatgaaattgaacaaagtgagcagacaaatcgaagcgaatgaaacagctgcgcccaaaacggtgatcagacggacgactttaaggagggaatgggagagggggaggggagggggactgaccggacagcgaatg

SEQ ID NO: 108673 - DNA, 83 bp, Heterodera glycines
tgtgagtgaaatgaattgaccttttaaagttaatgagtgaattataaactaattatcattttttagttgctctccacacaatg

SEQ ID NO: 108674 - DNA, 275 bp, Heterodera glycines
tctacaaattatttagaaaaaaaatatataaaaaattttgaataaaataaaaagcatgtttttttacggcggattttcttgtgaattaataaacattttataattaaattttaaaataacaataaaattttatttaatcattaatttagcaattggtaaaataatgatttattcagttttttaatcagaaaaaatatcatttaaatgcctcaaaaaatgaattgccatttaattgaagaaaaataaaataaaatcatttcgagacgacaaaaatg

SEQ ID NO: 108675 - DNA, 586 bp, Heterodera glycines
acgcgcttccgcccgcggtgcaatgtcgaaaattttttgccgaccttcgcccgttggaccgaattttggcacgggttgtgcgtccgggtgttgccgtccttcacgtggagttggtgtgcatgttgagccgctttcggcgcactttgctcacctttatgaagggccgattggtgcgtcctttttaaagggaaatgagttgacagaaaggagagagagagacgtcaaattaaataagagtccattttgcctaaagaaggagggagggacatgagagaaggaggaaaaggaagaagcaaaagggtgaatgaaccaataagggggaagaggcggaacggaggggttgacaaaggtggaggaagggggggagaaatgagagacgcgtggagagggagagaaagtgaggatgaagttgtccaaaaaacggaagggaaagagagggggggggataatctctgactgctgattgtgagtgattgttccaaaatgaacgaatttgcgaatctagagctcattattttgaaaattagagttgatcactttgggattgttttgtgttttcttatgaaacatacaaatttagaagatg

SEQ ID NO: 108676 - DNA, 635 bp, Heterodera glycines
ttggaatttaggctacaaatcaattttaaattaaaatcattcagcctcttttctttattgtatgtgctctatattagagaaaaacagaatttatggaacaggagttcattttcgcaatggttcatatgtgtttataaaaaaaggcagaagaaacatgctgatatttattaacatttacaggttttttagagactggtgagttgaaaaaaatttttctttaccgaaaaaagttgaaaatttaaattaaaatcataatgccaaaaatagagcaaaccaagccgattaccgaacagaaacggaaattctcaaaaaatgcaagacggaaactttgtgcaggagtcccgcgtttttcgtgcgaacaaattgttccggtaaaaagtgggggatcggaaattgcttcttgttctttcccgtccgactctccgacactctatgcttaatcttaaatgaagatgggatgcaattttcgtcttaaattttaagtgcaaagttaaggctttgttaacaacattatccttaccacatattaatcatcatatcgcctaattagtattcagatagtttactactttctccattttttgttaaatcttgttgcactcccaattagccatacacaaatagtgtgtaatatg

SEQ ID NO: 108677 - DNA, 413 bp, Heterodera glycines
taattcgttttagtatcaattcatttttttacttcgaaaagttgaactttatgtgatggccaactttttggattccattaatttccccttttaaagcaaaaaatgagtcgaagcaaaacagaaattgtttgcgactttgtgccaatttttaaagaaaaataagggttttgggggtccagcggcgcagataggcgccctggaggaaaaaattggaaattttgaacacagacctattgccgaaactcccatcgattcgacaatgatgtgtttttgacaagaaacacaataaaaaagcagtttcttaccgacttagtttgaaaattaaaaaacaaaaaaagttaatgattattcatgaaataattccaaaaattttaaacttttttccgtaaaattgacatttttcagttcatatg

SEQ ID NO: 108678 - DNA, 708 bp, Heterodera glycines
attaattaattcggaaaagaaaaaagaggaaaaaagttggacgcagaaatttggactctgaaatttgaatttgaatttcaattaaaatttataatttggcctttgaaattgattttcaaattgatggctttatagaaaaaaaaacggggcagttttttgtcgtaaggaaaatgagaataaattcaaaatcaaaaagctcgaatggtaaacggtaaagctccatctgctgaataaactaatccgctctggccaaaaaagctcgtaaaaattcaaaaacaaaattttatctccttggcaaattgtttgtttaaatggcctctgaattttgtctacccaccttttggttggttgttcttttttataatgttaaaaacattttcgtaatcagttaaattgctaataaatattatcataaaaaagattgaggcaaaaaaaaggggcaaaattcgtaaacttcttaggtagaggaggaaaaaggcagtagaacggaaaagaaaattatcaaaaaactttcaaaaaattttttatatggatttttcctgggcctggatttttccctggttttcttggacctgaatttcccctgctttttcctgggctgagtttttctgggtttttcttaggcctggattgccatggatttttatttggccggaatttctctgtggctttgctgggccctatttcccttagttttccctggccatg

SEQ ID NO: 108679 - DNA, 635 bp, Heterodera glycines
aagaattttggcaccgatcttcgtcaatttccttaaatattttgcactttttcatctccccatttcattttcctaaaattacttttttcttatttgattttggactaaaccaaaaaatattacggaaacatttacgattctgcaaatttttattagaaaattactcccaaaatcgtgttgtcctaatcttcatttccttccctgtgtaaaactcgctgtaaaatggaagtttttcaggggtttgtaacatccaatttttgaaattgtcacaaaattgtttggttattgcatttaaaattagattttaactgctttttgccatttatttttgttcggatgtttacattcccgtggttgtgacgatttgttcacttctcactcaacaaaattgtataagaaaacccaaataataattgtgcgtttctctctttgtgtgtttagctttgcttcatttgttcgtcgaagaaaagcaccgaaaatttcaaatgttaagcaaaaaaaggggcaaaaagtgttttagtcactgcgaaaagaaatacataaattactaaatgattttcatgtgatttgaatgtaaagtttaggctcacatttacgtattaatttcgtttgttttgtatccaatcgaagaaatg

SEQ ID NO: 108680 - DNA, 1003 bp, Heterodera glycines
atttaatttataggcgtcgcctggaatttcaaattcgagtcacatttgttaacagattttaagtaaaattgttatttttgaatagggcagtcaaattgtaactctcgcaatattgaactaaattgcaaaatgtagggctttctctattgcagaaagcaactcaatttgggtctgttcgacaatattatttttttaaagaaagaacgccaaaattttaactttaatttggattttgagcgaaatcaaaaatcagaaaacgatcgtatgcattttgtcgacgaaaaggagagtactgtgataatttcataaaaaaatcaacaaaaaaagtcttgctctcccccatgccctttttcctctctctttcattccactcatatgctcaaatacatactatacaactaaatgcttttacattttttttaaacgatggaaagaaagagacgtttgaatacggtcgtccgccacaatttacgataatgtgaagagataggtatatggtggggcaaaaggaaatgacaaacatacaaaacgtaggggggagggagatagaaggtgagatgggagggaaggagagaaaaacagatttgtccaaaaaaaatcaaaatgatcaaaacaaataaatttgaaaaagaggacaatacgtcaaagggaatcgaaacaatgaaatgaatctatttaaaagtaaataattagtgaaaatttaaaaatttgccattcaaaaggatttaaaaaactgatcattataatttcaaatagctcaacctttaactagcgccttttttcctttgaatattaagttctgctccgaataaatggcttctactattacgcacgtggtcttcgaccttgatggtgttctgatcgacactgaacgtcattatacaacggccaacgagcggacgttggagaaatttggagcaaaattcactcgagaaatgtgggagttttgtttgtttaatacgttataataaagcaaaacaacgacaggaagctcaaaatgatg

SEQ ID NO: 108681 - DNA, 310 bp, Heterodera glycines
atataaataaatggcaaaataaacaaaaatattattttaaaataaacagaaaatttttttaaatataaaccgaaacgttttataattattgtcccaaaagtggacttaattgaaaaccgaaaattaaaatgaattttctatcaatattaatttggcacaattctacataatataattttttatttcattggagtaattctatttttattgatagataaaagaagagtatgtaaaaagtgtatttttttctacactatcttttaaaatataatttaacaaatttttattatttacagtacataaacgaatg

SEQ ID NO: 108682 - DNA, 467 bp, Heterodera glycines
cttcttcaccaatttcctactcttttctcgaccagacccccattcttaccagtgcaaatttttaccggcggtaccggtactagacaaaccggtaacggtaatttcatttttgaaaaaaccggtaccggtaccgctagcgccggcacagaaagcaaaaattaccgctcagtaccggtaccggtaccggtaccgctcaaccctattttaaatgccttggactaatttctataacttttcatctttcctctaaatattaaatattctcattctttatactttggaactttgtaaaaaattagtttttatttttaatttctgccaaaatcagtttataaatttctgccctaaatgtttctttaggttcaaagtgccatctcagcacgtcaggcaatggtggtgatcggcacaaaaataaggaacgccataatggcatcgaaattttgattggaaaattaatgcaaaatatg

SEQ ID NO: 108683 - DNA, 1003 bp, Heterodera glycines
gtgtttttcccttttttttcgccgcccgtctctgtcgatgataggggtcaccagtaaaacggcaacaacagaagtgagtccactgccccacagctcacacccattcgccaatccgatccctcccaaaaataatcgtcgaatgttcggatgaatcatcgtccgacggcgggcggcgggtcaccggtccaatgaatgggttcactcactcaaatattcgccattttatacgttacattacccccattcccacaccctttctatccgagcaaatgagtggggcgggggagaggggagggaggggtctcccatatgtgaaaagaaaaaagatccccctccccggacccgcataatcattatctctttggcatgaacagtgccgggtcaatgattgctccctccattcaaatattgcacgcgaacgcctccaatttatcatttacggcaaaacgataaaactatgccgataattaaaagtgagaattgtcagtatatcaaatttctttttgatttttccagcgtattgagagaataaagtgcatagttatcaataaaatattaattaccccctcgccccttctttacaagcgacgtccgattataaaatttaaatagattttgggtgagaaaaaaacctttcatggcttaatactagcatatttttatttccatatattttcaaaaaatgaataaagaataacaaaaatttttatttttaaaatgagtgaactcataagggaattttatggctattaaaattaaccaattaaaataataattggtatttacttagggtgtaacataagtttccgcacaactttttttaaagaatttttttatgaatataaatttaaaaaaccacaatcatgatccgaaatatctgacattattattgagaatgagtttgctatttatcgggcaagggataaatcccattagaaaagtatttaaggagttagagttgataatgtaaaaatggtcattttcgaggtatgtatttttgatg

SEQ ID NO: 108684 - DNA, 208 bp, Heterodera glycines
aaaaccacatacacagacaaatgcagaggagtgtgttgctggtttgtgttagccatttccatcgttgtaagcttccgttttcaatttcaaaaaattaaaattctccgtctccccccaggcgttcgttgcgttgtctgtgtggatgattatacattacttcattgagacaaatgaaactctgccttcccctttagtgactcttgcgatg

SEQ ID NO: 108685 - DNA, 912 bp, Heterodera glycines
attatagcccatgggggattatttttaaacctcctaagaatacaggggataattagagaatgggggataaatagagactgggggattatttttcaacctcctcagaaaggtgggatttggacttcaattcctgatcattgtcccaaaaccccaaaaaatttttttaaaaaatccgagaacctcgagcataataatttatttgaattcccgaaaaaaagtctttatttaatgaatcgaattttctaataaatatacatatcacaaaaaatggatctcttcgcattgaggtattttatacaattatttgaatctttgaaaagaagcttaaaattttaaaaatgcaacaacagagcgctttaaaaataatgaatacaaagcaaaaaaaattattacagacataaattggttgaaaatattaaattaaaaaataaattaaaacagaaagtacaataaatttctttttccgttgtcaatcaattgtttgagtgttgcatttatagttttaataaaattattaaagaaagaacgaaaaagccttaaaaactttaaagatttcgttactttaataaaaacctatgtgaaccattcaaacaaattaaaaataaattgcaactaatgtttataagtcggtctacctcagttgggcgcgcacggttgggcgctcacggttgggcgctcacgtttgaacgcgcacggttgggcgccagcacgtttggacgccgacacatttgggcgccaatattccaacaatttttttaaatttgttttttttattaaaaaaatgttttaaagcgacaataaattccaatttttatgttttaaaatttattaaaaggatataagtaaatattattccgtacggatgcagcagcaaattgaccaaaagaaataggccaaagctagagcacgatg

SEQ ID NO: 108686 - DNA, 105 bp, Heterodera glycines
tgactttttcggactatgcccgaattttcaatttttaaagttgaaataaaccgtttatttctaaatgaataataataattctcagcagttaaaaattccttaatg

SEQ ID NO: 108687 - DNA, 138 bp, Heterodera glycines
attgtggaaaagtgggggtccacgtggcaaacatgttcctacctagttgttatattcctaataagaatcaaccgttccccataaaaaatcaaaaaatgggaggagaaaggcagcagcagcattaagatggagaacatg

SEQ ID NO: 108688 - DNA, 1003 bp, Heterodera glycines
cccaagtcgagaaatttctcgggttttttggggtctcggttctcgtatcgtttccctgggtcatttctcggttctcgtatcatttcccggggtcatttctcggttctcgtatcgtttcccggggtcatttctcggttctcgtatcgtttcccggggtcatttctcggttctcgtatcgtttcccggggtcatttctcggttctcgtatcgtttcccggggtcatttctcggttctcgtatcgtttcccggggtcatttctcggttctcgtatcgtttcccggggtcatttctcggttctcgtatcgtttcccggggtcatttctcggttctcgtatcgtttcccggggtcatttctcggttctcgcatcgtttccctgggtcatagctatacgatgatattttcaatggcaatcaccgaaaaacgacgaaaaagagacattctatgacaaagaactgtttgagacggcaaaagcatccgttttggcactcaatgggaacggcacagacgaagcactaaaaggcataatccaaagaaaatacttttgaaggctaagtttggcattttgacgcaggcatttgcgagtagagaatggcaaatcaacatttttcacttagaaatattttttttgcggagaatcaacctcaatgttgatatttatttaaatcaacaaacattacgccatcaacttaaatatcaacgtaatttttaaaaatttaaaaatgaattccattatttagtatatctcattagctataaaaggaattgaaggaaataaaaataaatatgaaagcaaaaaattatgttgtcaatcaatttgttgtctttcaattgaaacattgactaatctcctattttccgatcgcctacagccgtctctccgtccgttgacaatcatttcgatcgtttacagcgatttcttcgagaatgcttcttcttgttgcttttcctctcttaatttttctacggatttgccttgttaacataataatttagaatttatg

SEQ ID NO: 108689 - DNA, 1003 bp, Heterodera glycines
aacaactgaattctaacaaaaagtcgaaagtatctcttattaaaggattgattttgcacacttgacaatgttacttttaaagaatatattaattttttttcctttgactctaattttcatcactaatttttcactcagacccccattcttaccagtgcttgtttttcccggttgccctaccgggaccgggacctgagcttttcaaaatccgggacctcggatgaccgggaattcccggcccggtcccggtcccgtggcactctactttaaatcttaaacattttttcgaaaaatcctcatttttgcaataaattttaattatatatttctttaaataattttatacaaaaaaatagattttagtttctaaaaatcgcgaaatatttgcatagatagttgctaaaaaactggtaaattcccaaaatagttgctaaaaaagttgccaaaaattggaaataactgcttttttgggtaaaatctgttaacaaatcgtattataaattacaaaatttttcccggcgtcgcctatcggcaccgccggcccccggttccccaaaagttttttggaaaaagcgcagtaaaaatgcgcaacgcagattttttcgcgtccagaaacccgaccgatgaattttcggccgacccgacccaaatcccgacccgatattttttggaaccgcggcaaccctgttataaatgacaagaaattgatgaatttgattgtttcaaacgaaaaatatgacagttgactgattttgttcgcaattttatgatgttttaaaaatgaggattttttatggctgaaatgaggattttcaaaattttgagatcgaaaccctgatttaggcgtttctccgtgccaccactgtgccagtcacattctgtcacttactttacccaactcagcgcaaattgtgccatttgaattggtcaatgaacgaactcgagaaaaactgacactgctgaagaaggaatgaggagacttatcgatatataatagtcaatg

SEQ ID NO: 108690 - DNA, 552 bp, Heterodera glycines
ggttggggtttgtttgtgtgggtggtgtctcgctggggggaagtgtttttgatggggcctttcgctcttacttttattaaacagtttgaagtttgtgcccttcgcggggtcactctttcgtgactaccccccccccccccattttttctctaattccctcctttttccttttccagatcatttggtgcgctatatggaaagttaccatttttgaaaatttttctcactttttttggtaaaattttttttttttatttatttacacataatgatgtatattaagcattaccatcacaattatggtgaatagaaagtatattcacaattttttatctcaaaaaaattttgcaaaacaaaagggtccccccttttgtttttgataaaattaaaaatctgtcactttataactatcgccaaatttcttaatatgcccaaataattgtcatatttatgatcagcgacctctaaaacccccgggtactacttggtgtcatgactttttaaacaaaaaaaaatttaccaaaaaaaagtttgaaaaaattttcaaaaatg

SEQ ID NO: 108691 - DNA, 776 bp, Heterodera glycines
atcgagcaaattgaaaccgaccaaaatttttacctcaaaagtttccccagctcgtccattttttattttcatatgtaaaaataccggtttccaggtacaatttggaaataagtacagttaacatttcccaaccatgtcgaatccgagataattttctctgctaattatttgaaaaaatgtcaaatattgtgtaaaaataagtgtcaaaattattttaggggctaaaatttaaaaatacggatttttaggttcgaacatctaaaataggaattctagggtcgaataggcgcttgaaaaggaagcattttcgcgctacaaatatgtttttcgtgcttttctcattgacttaaagacgcggaaaaataagtaaaagtctaaaaatgaatccgctcccaaacagatgataataatccaattttcattgtctttcagatcaattttgcgccactgctgatgggttggcccataaagataaagtcatccgttccctggtcattactcattacatttctttttttatggaaaaataattctgtgaatgttttttttgtcccactgctgattgatgataatgaataatcaaaattcattttttattgaacataagcattaccattttcataaaataataaatgaattaaattaaataaataataattctgccttaatcccttatataccgtgccgtaatcattcatttccccctttctcggcgggctgtcctcctcgtcttccgccgtgttgttgttctcctcttcctcctccgtttcgccatg

SEQ ID NO: 108692 - DNA, 1003 bp, Heterodera glycines
atgtaaaataaaaagtaagtgactaaattaatgatgtcattggctacaatatgcaaaaaaccgcatgtctctacgacttctgtacgctgagactccggacgattaatatcgaagtgatcaaaactactgtaaaatgcactgtttcttaagaattatacaatacttttttgctgttcgaaattaaacatgtaaattctcagagttcagaagtcgtagcgacatgcggttttttgcaccttatagcaaattttgtgctctttctgtccgccatattcatcttccacgaaaatttttttccagccccctaggaattttttcccaaatttaccccgctttcaagccattttgaggttttcagatcagcccgaaggagtggtctgatcacggtggagcaaaggacttttttgatcagcatgaaaagttatgtttgttaaatggccgaaagatggcgtagcaaaggccaatgtgacaaaaggctgaaaaacaaaaggccgaaatgtaatggaccaaaggccaatgggacaaaaggcctaaatgcaatggatatatgttatttgttttggtcatttgtggtcccaaagctgggggataaaatggataaatgaaatgattgaattattgcaatctgtgcccgttcaaattgggagtttttggtagccgttttacataaaaatggctatttttgaggattttttgtaataaatattggacagaagtggacaaaattgtacagtggacgttattgcagaggcttcttgtaccccaccaaatttgacaaatgaaaaatgtttctatggtaattttaggcgctgatcgagaatttggcgacaaaaggaaaaaacggtattttcaaacaaaaaattagataagggtttaaagaaaatggattcgattttggaatttaaaattccatgttctattatctttgactgacaaaaatatttttttcattggaaaatatttcctccagaaaaggtgcaaaaaaatcagtcaattaaggatg

SEQ ID NO: 108693 - DNA, 478 bp, Heterodera glycines
  unsure (1)..(478): unsure at all n locations
ttttggacgtnntgggccaagtcacgtcattccactagntatatnnttgtgttattatngatnatttnanaagtacttggtggntgaancaatanngaataaatnagnagattntgtagnaaaagtatttgtngaaaaatttttgttattttttggaanganngaaaaaaattnantccgacaaaggaaaggaatttatgaccccctttttaaaagaataaaccaaatttttgggtttgagagggccttttccggctgggtatgacccccaggccaaccggtttgggggaaagagtaaatggagttttgatttaaatattaaaaaagtttccagcaagtaattggacgtgggacgaacgatttttatattcagtttttggttacaatataacgccatccgagtcaacgggtttttcaccatttcttttaatgtttggcagatcagcgaaaatttccgatggataagatcaccgaaatg

SEQ ID NO: 108694 - DNA, 528 bp, Heterodera glycines
ttttgttcaatgcgttcactttaaataggcattttgaatgtgtttttttcgagtgatcattttcaaggacattttgaattctagggataaaccggacgcaaaaaggggcacctgccagaggatccaaaaagggtaaaaacccaactcgttttcagccaactcgtttttaccccaactcgtttttgacccaactcgtttttattaccccaactcgttttttgggtcgaaacccgaaaatcgatgccaaatcgcttaaatttcaaaatgttttgacctaatttaattcgggaatactttttatgtcaaagaccaaaatttaggaaatttgaaaatccgaattttctaactttctttcgaacttagttttttttttgaaaaaaaaatttttttttattacggcctgaaaacatatttccgggggttttaaggttcgctgatcacaaatatgatatctcttgctaaatttacaaaatcaaaagtaattttgtggactattttcagtgtttattcggcaccttttgagttatg

SEQ ID NO: 108695 - DNA, 154 bp, Heterodera glycines
actggattttttgaaatttgttttaaaaagcaaataaatttttgaaaaaatcaattaattgcttgggaacatctaaaaatatctaatttataatagacctggacctggatttcctggacaaaaaatccaggaaaatccaggttgccgaaaaatg

SEQ ID NO: 108696 - DNA, 997 bp, Heterodera glycines
tagtcaattaattggtctgaaaaagctgagggatttgggaaagggaatttttaagaaggaaaataaatgtaaaatttaaaaagaggaattaattttgtattttgaaaaatttgaaatatcatttaatgcttataattagctgcttttttaaaatattattgaggaggggcgatggctttttaattgcctcccctcccctcccccaaccctaatgccagcccttgtataataatttttatgttaaatttgcctgattgtgagcattacatttacgcacgtattattagccatagcaaatgccagcaaattcataattatttaatcatgtgtaatttaactttcattagcattaaacgaatgaatgaatgaaagccaccatcgattattcaccacttaaccacgtcaattatgacagcaatgatggcattgttgcttaatagcaatagtaataaaaaaaaattaattaattcaaagccaaaaaattggataaacgaaaaaagaaacggaaaaaaactgcaaaataatttaatattaatgaatatgcatatagttagtgaggaggcgttgtaaaacttattcattcattttcaaaatttcatctatttcactgaaaatgaatgaaaaaataaagaaaatcagttttcgaattaaagggggaagactcaaagtgaatttaattaatttagaaaataattcacaaaatttggtataatttgcattatcaaatttcttattttaaatctgtaagtttgtcagaattatcagacaaacaaataaataggtgattaataaaattcaattaaaatacattttacattttgaatatttaagcattttccaaattgtctcattttattttatttattcgcagaataaaataagccgtcaacagagggtgaaagagggttgatccccgattctcgggaagagaaagttcgggattgggaaggaaattctcgacgatattgtcggactggctggagaaatttggaaaatg

SEQ ID NO: 108697 - DNA, 1003 bp, Heterodera glycines
tgggtggagccaccgcccaagtccaacgcggccaccgcctttgactctgtttggggggaagaaagccacgggaaaatcttccagaaagcggaaaattttgacgctaaaaaagagagggaaaaatgtaaagggtaaaaaatgaaaaaaaagtaatggctaaaaaatgcaaaagagaaaaaagcatcgccaacggcggtgccaagcagacggcagaaattttttgaaaatttagagaagattttttctaacagagttgccgagaaaatgcaaaaaaacgttatttgggggcatacattaaaaaggggggtgtgggaggtcggccgccgatgaccttttttttgcttttcaaacaccgtttttttcggcgcgctttttccaaaaaacttttcgagaacttggggccggcggtgacgataggcgccgccgggaaaattttttgagctttgggtgtgatttgtcaacagattttcaccaaaaaatggccaatttttgcgattttgagccaattttttaagaaaaaattgggatttttggggtccggtggtgccgatgcgtctgagccaagcataaaacatcataacttttttcattgttgttaaaattttataaatttggcatcattcgaaagctctacatgtttagaagcttttggtaaggtttttctaagcgattgaacaacttataaaaaagttgcaacatgaatactaccaattgcttcaaatctttcactgtgtccatgccattcacttcaacagttattgttttatgggccaaaatgtcttgaatatatgctcatcaggtgtcactgttttctgtaatcagtgcatggtggcatcatcaacagaagaagcattgtcatgagtctagctgaaatgccgccaaaaagaaatgatctgaatgcggaattttccgtttatcttgaatgcgacaacaaaaaattggtgaacaaagtcagcggaaaaataaataaaattgtggggggggggacgaaaacgggggaatg

SEQ ID NO: 108698 - DNA, 944 bp, Heterodera glycines
ttgatcctcaaaaattctgatcaaaactttcttagaaccagcaaaattaagaaaatttaatattattcggtagccctaagtattttcaagttgcctgcaaaaatttaaaaaaattcggccaagcttcaaaaaagctttggacgaaaatgtctgaaaacctgccactttggtacttttggctttaactttgttcaaagttgatgaaatttttttgaaatttggttatctaatagaaaacttttagggatatcgaatgataccaagaatgtttaatttagttgacttagaaaaagttgtgggctgtttttgttgaaaattttcatttgatggttttttatataacgcccttattgatggttttaacatattacgacatagcaccccctcaagcaatcctgtaaaaattcataaaatttagttaattttcaaaaagtgatgaggaaaaggttaaaaaacctagttttttgagtgcgtctgactatgcataagtagcctaagccgaggctaggcctaggccaaatatgctgagatttgatattttactattttaaagcttacatatttctttttacattttaatcgccgaacattttaggacttttaatgaaaaaatatcaatatatataaaatcattattaacataaatgaataaagaaagatccagaccattaacattaaaaaatcgaaatatttaatattaaaaaggggggaaagaaaaagatccggaccaaaaataaagaaaaatgaaaaaatcattaaagaagaaaaataccaacactattaataacgaataaaaaaaatcgactacatgttaaatgattattaacataaaagaataaggaaagatccaaaccattattaacataatagaaaaccgaaatatttattattttataaaatatttttatttattaaaattaaaatgaattccttcgaaagcaatg

SEQ ID NO: 108699 - DNA, 120 bp, Heterodera glycines
  unsure (1)..(120): unsure at all n locations
aagattcatgaaaacgtgctggaatgatctgacccagtttctcaatgacggctttgctgccacatatttgncatactgnncaagcatatcacaacgaaaagtggtcgtgtgacnncaatg

SEQ ID NO: 108700 - DNA, 140 bp, Heterodera glycines
gcgaccacgggggtcatctaccggacgccacgacactcgggcggagttgagcaggtaattaagaataatcactacctactggcttaaatcgcatttcgccttagggccgtctttcgcgcggctcttcgccgttgccaatg

SEQ ID NO: 108701 - DNA, 286 bp, Heterodera glycines
ttcaaagggtcagtcggcttttggggagcgtcatttttgccccttcggaatgcattttgcctacgccacgcaacaatgcacggccaattctcttccggccgaagtgatcagagacagcaacgaattgttccaaattggtaaggcatacatcgatagtttcagtggagtttatgcttggtctggttaagcaattcttaatgggtcgtgtgccaacggggaacggtgcattgggggtacggtatgcgaccggacggaaaggcgttgcctttgtccgtttgggacaatg

SEQ ID NO: 108702 - DNA, 188 bp, Heterodera glycines
ttttttggcattcgcatacgccgtttttgttatttctcattttggtacggagaaagcgaaaattcaagaaaacgcgctgctggctggacttgttgaggaaaattggaaggatacttcgaaattggaccattttctgagggatttgcgcaggaatgttggtgacaaaaagaggtgatggtttggaaatg

SEQ ID NO: 108703 - DNA, 1003 bp, Heterodera glycines
gtggtgattaccatgtattcggtgtcgcaaattatcgcatcgccactcctcggcatttggtcaaatcaaatagggaagctgaagccgcctctgttagtgccgtttcattcgttattcgccaaattattgggaggaaaattgggaaaacataacatgttcaattttggaagtcaaaatgtttcttcaccttctgacttcagaaggtgcttcgtatttgttgcaattcctttttaagttcaaaagcgtagcgaatcaacagaaagtttttcaaaattgaaaattcatctaaaagagaattaaatcggcgctatatgcaaagtgacagattttgaaaattttttcaacttttttttggtctaatttttttttctttatttttatgtaaattgtttttttaacatatggtacgcatttcacgttatttaataattgaaaaaagtgaaaaaaaatttcaaaaagatactttttagactttgggtttttgaattttatcaaaaaccaaagggggacccttttgtttttataaaaatctgcttattgttaaactaccctgatttgttgctcaattcagaatcctttgcaatttgaccatgtttgtcggcaacttgatttactttctgatcgagttgttcccccctgaacatacgcgttatgtgatgctcgtctctcgtttcattgtcggcatcggatgggcacaggtgaaaaccaaatttgtttttgtaaagaaatttagggttttccattggtttaggttggcctgctcaaatccttcgcttcggctgcaagtttgcccgaagacagaaccaaagcaacggcgtacatcaccggcggcgtagcgttgggcgtaatccttggcccaggcaaatcatttaaatggtggaaaaccacaaaaagtgccttctcaaattcagcccttcaaatggtgttcactttcatcggcgacggagtgcttttgttcgaattcagcgaccattctttcctcaaactttccatgttcacaatg

SEQ ID NO: 108704 - DNA, 61 bp, Heterodera glycines
tagttactactctttggttaggtattgattcttcagagttcagcaacggcctgacaaaatg

SEQ ID NO: 108705 - DNA, 240 bp, Heterodera glycines
agattttggatgtcaatcactttttttcacatcaatgatggatcagcattacattaaccacaagtgatatgcatcgaaaacagaattgtgcattgatcccaacccattcattaattcatcatttcattttggagagacaatttatttaattaataaaaaataaaataaattataaaaacgatttaaaataaaaaaaaatttcatttgtttttaaaaaagctaagaaacatcctttaaatg

SEQ ID NO: 108706 - DNA, 167 bp, Heterodera glycines
ggtggtctaagcttggaaaatggcaagtcttgcaattaaaaggccatttcatctgtataaaaataaactgacgtttcaattaaaatattccaaaaccttttaaagtgaattagcaatgatttaggctcaaaaaattggcatcggtcggtgactcatcggaagtgatg

SEQ ID NO: 108707 - DNA, 120 bp, Heterodera glycines
tgtgagtgattaattctgtacaatttttgccgtgccatcttcacattccattccatttgttaaggttacggcgacaaaatgtgcaacaggttgcgtttgctgatcaccgaattgaccatg

SEQ ID NO: 108708 - DNA, 241 bp, Heterodera glycines
accaaattttggcaatcgttgaaatttgtgcaaatatattgagttttagttttaaactaacgaacaaacaaaaaagaaggttggcacaatacgccgatttttatagagaaattgccaaatctcgttcagagaaaacggcaagaaaaaggatacaacaggggagtggtatagccctgggagctgtcttgatacctgtcctgagtgttttagcccaacatttattagaaaaaataacatcatg

SEQ ID NO: 108709 - DNA, 201 bp, Heterodera glycines
aaatggggagtagggggtgagagaatttcaagtaactaattgatttttaccaatagattcgccttcaaccttatggggacggaaatgggcgcaccgggcaattattaattaatttgattcttcgccgcagttcacaccccacattcattatcaaagaggattgtcgcaaaaaaattaataccttattaaaagaaaaagatg

SEQ ID NO: 108710 - DNA, 283 bp, Heterodera glycines
  unsure (1)..(283): unsure at all n locations
tatggacaggtctttaatgattaaaaatctatatgtctcttttaggacagagaaaggnnggctcttggncgaggctctatcttgtccctccaagtctctttgatatttctcgtcgaattgttgcagaaaaaatgatggaagaatttttaaaactgccatcacactttcgaattgctttttataataaatattaattgtgtaatttttttttttgccttagttatagtcgaaatttatttttaattgtttagttttctaaaatttattttagtctcgaaaaatg

SEQ ID NO: 108711 - DNA, 446 bp, Heterodera glycines
gcttattttgaggaggcgctttctctcacccattccctcgttttggtgcacatttcgcctgagatgtggacggtttttgaccatatttacaaggcttttctggaggaaggcacttcatttttctcaggtaaaattgtatagtctttagattattcttccctactcgatgtttgacagtttttcgccaaaaaatgtccaattttgtgcatttttgattttagtggtttggggttttcctcatccacctttgttacggcctttgctgttctaaaattcttattgttactaattgattgaccgttccgtgtttaattaggtcttttcttacatttcttattggcttcttcattcactaagattgtgcaccagtgctccacgcttttttgaccaatgacactgacaattttctgtctgtttttgaccgagtgcaacattttctggcgatg

SEQ ID NO: 108712 - DNA, 128 bp, Heterodera glycines
  unsure (1)..(128): unsure at all n locations
gaaggagctggtcagtcatcagttagaccacgaattanaatttatttcttgtaaaagttgtttcacattaaaatgatgccccattataatttcaacaattttattttttcatttttcagctgacgatg

SEQ ID NO: 108713 - DNA, 188 bp, Heterodera glycines
ttatatttgcacatgctttggcgtaaagtgaaggtctcacacacatacataaagctaacattcgggggcctgggaatggttgcgcatcagtgggaacggtaaaaacccggtttggtgtaccgttttttcgacataaaatctccataataatttttttggtttgaaaagaaaccaaggtccctaaaatg

SEQ ID NO: 108714 - DNA, 294 bp, Heterodera glycines
gaggcttgggcattttgtggcttggacatttcgtgggcttgggcatttcgtggcttggacatttcgttggtcagcgggtatttgtccaaaaaacgattaaattttgcgtcacacttttaaattttctctaaagcaatgacattatgccatatcattccaaaattacgaattaaatacatttggacaattcagtctcgggtctgtaactctgtttagaattggcaccgattgaaaaatttcaggttttcgccaagttttctttagcataacgaatttacactgtcactaaaaatg

SEQ ID NO: 108715 - DNA, 922 bp, Heterodera glycines
ttcttccgcgcattgatgccgcttagatgaaagaaaaatggcggcaaaatcaaaattttagccgaatatgtacaattggcaccataaatttaaacgacaaacgtcaaattaggcattttgtctccgaatttggtcattcattacgagagcttccttttttagccaaatgcctaaaattttgcgcacttgatacgcaaagataagcacgaaaaacgcgttttccgcttggtttgggttgtccacgatgacttttaataatgcctatttttgcctatttcagggtttttgtgcctaaggtgcctattttaggatttttgaaaaaatccttaacaaaaatgcaataaaaacgaaaaaaacaccactaagatccgacccgaaaaaaaatttcagaaaatacacacctaagaattgaaaaaatttttttaaaagaatgatcccaaaatttaatattttttctcaataaaaatttttggtttaaaatttttccttattttggaaaaaactttaaactatttaatatttcttttacaattgaaaaatttaagtttttacgtgttttaatacctaaaaagcgttaataaaaaaattttgtttgcctattttagtgcctattcgaggatttttgtgcctatttaatgcctattttgcgattttttaatgcctttttaggtgcctacgcgattttttgtgcctaaaaaggaagccctagtcattacgacaaaaaattctgtcgtttaaatatggcgtttttaaaaaatctaccgtaaatttgtcgtttggtcgtcacttttcttttggatattggatatgagtttttgaaaaaccgggatccgctccagaaaagccgggattttcggaactccgacctagtgcaaacattaatttcgaatataatttgaaactgcttaagactatgaacatg

SEQ ID NO: 108716 - DNA, 95 bp, Heterodera glycines
ttttcagcattttaccattgaccaatcgttcggtgcttccgtttccggcgctgcctttcaaatgcctttcgacgagtgaaagtgaaaatgaaatg

SEQ ID NO: 108717 - DNA, 74 bp, Heterodera glycines
ttttattggccacttaaataaaataaaattaatttaattaatattttttatcttttggccattcacttcgaatg

SEQ ID NO: 108718 - DNA, 487 bp, Heterodera glycines
cccccttttgagggcccggttgccaggtcaagcagtgtttaggtgttcttgtgttgtctccaattgtgatgacgtcatcatcattttgaggggaaaaattttcccgtttcgactcatccatttctttaaatttaaaaaaaatttaaaattattataaaaaactcaaaaaatgattacttttgttctcaaacaccaattgatcattgatttttctcggggccattacgattaagaaatagtttatgattataattgttaaaagcataaaatgaacctgcgaaaaaaacacgtaattattgattgatagtgagaggggtgttagcgcgcagcgacctccagacgggctgtcccttcttaatcgataggccacgcccatccacaaacacatagacgagagagtagtggttagagaaagatacaaaagggcgccaattcaaacacacagtgaatccccaagccgatttattgattttttttacagattatg

SEQ ID NO: 108719 - DNA, 1003 bp, Heterodera glycines
caaaatttggtgagccgctgatcaattacaaattatttatggacgatcaaattttttgaaattttttaagtgcaaaagtggtgggtgtctgcaaaaaattttcaccgggtttaaaaaatctaggaaaataagtaagcttttgtagtgttccgatacgtatctctgcaaaatttggtgagcccctgatcaattacaaattatttatggacgatcaaattttttgaaatttttttaagtgcaaaagtggtgggtgtctgcaaaaaattttcaccgggtttaataaatctaggaaaataagtaagcatttgtagtgttccgatacgtatctctgcaaaatttagtcagcccctgtcaattacaaattatttatggacgatcaaattttttgaaatttttttaagtgcaaaagtggtgggtgtctgcaaaaaattttcaccgggtttaataaatctaggaaaattagtaagcatttgtagtgctccgatacgtatctctgcaaaatttggtgagccgctgatcaattacaaattatttatggacgatcaaattttttgaaatttttttaagtgcaaaagtggtgggtgtcttacagcttaactaggcccaattaagcttatttccagaaaatctcgcatgaattctcatttttaaattttttatagatttttaaatgtttggattttttttggcttaacaaaacttcatcgaacctggttctttctattctctttcaaatcgccccaaattttttttacagcttaactaggccctattaagcttatttccagaaaatctcgcatgaattctcatttttaaattttttatagatttttaaatatttggattttttttggcttaccaaaacttcatcgaacctggttctttctattctctttcaaatcgccccaaattttttttacagcttaactaggccctattaagcttatttccagaaaatctcgcatgaattctcatttttaaattttttatagatttttaaatg

SEQ ID NO: 108720 - DNA, 192 bp, Heterodera glycines
  unsure (1)..(192): unsure at all n locations
ttttagaaattctatccgtcatatcggctttggaattttaatgagtaaatcaggaaccgtaaatgacattctctgcttctcttgttggatacacggaagaaataatagttagtccttttgttgaatttttagaaattctatccgtcaaatcggcttttggaattntaatgagtaaatcagtaaccgtaaatg

SEQ ID NO: 108721 - DNA, 343 bp, Heterodera glycines
ttagtcaaattagttcaaaacgcccaaacacccgtttttttttgcggatgggattttagtaacgagataaagctgggatttcagttcgggaaaccaacccacttttattgttttcccattctgtcctgcaatgattttttgttggactcgtattctattttaatttaaaacatttagccaaatttttttggcattatttttttctttttgaattcttttggcttcgaagttcaagcaaaacaacagacccaaacaaacaaggagatcaagcatcttaaaattgcactttgtatgtttgttcaaatttttgtcttttaactataatattttttttaaatagatg

SEQ ID NO: 108722 - DNA, 377 bp, Heterodera glycines
tcggtggctgatggaccataaaaacggagtttaagatgcagacaaataactaaaaattatataatatacaacataaaatacataaattaaaatcacaatgaccatattaaaataataaaaggactagaaaacaagaaaaagcgaagggactaacaataagattctttgtgcttcgtacacacataaaaaacaaaaatagttaaacatcaaaattaaaattctattttgattgcagttttataattgtcaattaaaaaagagacaaaatgaaattacgaaaaaatgcctcgtacaattctcaaattttcagccaaaataaaaataagtggataataaattaaaaaattatttgatttttatttacaaaaggttaaatg

SEQ ID NO: 108723 - DNA, 468 bp, Heterodera glycines
tggcaaaaaatatttttatttaattaatgaataaaatttgaattgatgatattttttttgtgttttttctgtgcacttaaataccccctttttctgacttaattaattgacgtggcctttagtagacaaaaacatcaaaaaatcatttttgcggaaattgctgctggttttcttataatctacgctttcacatgaattttcaaagacttaggaaatgtatgcagagaattataaatattaatattttttttaaattattatatttttcataatatttttgaacatgaaatatttcatatgtaatttctcaacaattttaaaaattcgccatttttattgcaaaaatgtatttcggccgaaaaagcaagccaaaaattttatttttttttatcaaaaaactttcttatttcttttctataaataatcaaattaaaatattgatatttagaactgagaatttaagaaatg

SEQ ID NO: 108724 - DNA, 342 bp, Heterodera glycines
catcgaaagggggacaaaatgccatcgaaaaggaggacaaaatgtcatcgaaagggggacaaaatgtcatcgaaaggggggggggacaaaatgccaacaaaatgccatcgaaaagggggacaaaatgtcattgaaaggggagacaaaatgccatcgaaagggggggacaaaatgccatcgaaagggggggggacaaaatgtcatcgaaaggggggacaaaatgccatcgaaaggggagacaaaatgccatcgaaagggggggacaaaatgccatcgaaagggggggggacaaaatgtcatcgaaaggggggacaaaatgccatcgaaaggggggacaaaatg

SEQ ID NO: 108725 - DNA, 116 bp, Heterodera glycines
atgaatatttttgtgccaaatttttgttcccattttcggcactctcgcactttttgacggatgcatcaccggggcaagcaaaaactgtacggcaaatgtgaaaattgattacaatg

SEQ ID NO: 108726 - DNA, 124 bp, Heterodera glycines
  unsure (1)..(124): unsure at all n locations
ttaaaaacggaaaatggaacgggaatcatattggggaaacattttncgggaataaatggagtaatgtacagaaattttcataagtgaaaaagaaaattatgacgaccaaaacgagttcagaatg

SEQ ID NO: 108727 - DNA, 104 bp, Heterodera glycines
atgcatggtcttcttgaagacggaaaatttgggacaaaactctggcagaggcagctctgtcgcgctggccagatcagatgagatggctttttgtgagcatcatg

SEQ ID NO: 108728 - DNA, 994 bp, Heterodera glycines
aataaagaaaaaaataataagaaattttaataaattcaatattcccaaattgaaattagtgaaggtaagctgatgcaaagcgatctgtctcaattggagagaagtcttatttgacataacttttttctttcttttttatagaatttctaacttataataaatataaaagtcagttcaagaattttataccaagaaaattttttatcttgtttcacttccacgctttagttaaccgagagcttaattttttccggcatgtcaaaccaattaaattaacaaacaaaaactaaaatagtttatctttttctcaaaaattgtccgtaatttgctgttattaaaactatgggcccaaaattaaaaatgagcaactacatactatatttatctatggaaactaaacttctttaaaaaatgggttctttcgatgttgattgcaaaaagttgatcgattactcttgaagggcgatgttcaacttggtaaaaatcacaaataaaactacttagtcactcaatttttgaaaaaattattatttttttttgttttttttgacaattcaacccaaaaatagtggtccgcaaatgtcggtccgcaaaagtcggtccgcaaatgtcggctaaccatcattttgtatcgcactgaatttcaaaaagggtattcaaatctatcaacttttcggtatttattttcataagcggttctggatagagctcggagcaggaccggatcctgcgcaggattttgcaggatcccagttcgcaatcctgcattttttggaaaatgcaggatttgcaggattaatccggccggatccggtccggcaaaaaattttgaattccaatccttcaacaggatccgcaaatttgaaatttccgggctctagttctggacacggtcaagattggtaactttttttccggccaaggaatgactagagaggcaaacaacggaaataaaaataaaataaatatttagctaattttagatgaaaacatg

SEQ ID NO: 108729 - DNA, 875 bp, Heterodera glycines
  unsure (1)..(875): unsure at all n locations
agagtgatgatgatgatatttgctatntganccttatcttnnctaattggcatccctatttttcctattttaaagtcttttcgtattacgggctattttttcatatttcgggattaaattcaacaacaattcctgactttcttgattatgtaattattatttaaaggataaatattaaaaaatgatatagactattacttaattgactcatattttatttactgaaaaggaaattgaaaatattttggataaaatatttataatatttttaatttgcaaaatatttgcttaatgttaaaagtgacaaacattcttttcaagttactggttccaacaattttgcatattttcttaaaaatttccatggcgctgcctttcggcagcctccagcctttcataaaatttaaaaaaattaggcctatcataaaaaaaagttgtgacgaagagtaaaagtaaattgcattagctccaattttaattctgatcgctcggatttgcaatgatcttcatttcattcaaaaaaataaattaaattaaatcttcacatttatttcatgcttatttgttttggcacatatcctctcaaaaaaacgattaatttataaacattgatttttagttgattaatttgtggcggaagtaaaaatgaataaaccaaacttgcaaatatgtttgtaaattatataaaaactgaatgaataattattgtaaattaatttattcagaattttttaattcaatttgcttatacatatgaaatagcaatttattttttaatttaataaaaaattatgaatattaattaattatgtaaaaaggaaaaggaaatgtttaagcattctccatttaaatattactcctaataaatgaaaatg

SEQ ID NO: 108730 - DNA, 960 bp, Heterodera glycines
gtcagtgtagtgcttttcgccacttgtttttttttcgtgttggctttggtcgttggagtaatgaattaggagtcgctctgtccacttaattatttaaattagtgatgggtttgttgtagggtttattatgacttttaatttatgtttggctttttatggtgtcctttttcggtttttttaattgggtttggcgatccgtgtgtgtgtgtgtgtttgttttttttaattgggtttgtcaacccttgattttgtatgggcttggtgacccttatacttccggatgacgagcagttggggagcggcgattttgacgtggcacaggtgcagaccgaacaggcagcacagttgaacgaacaggtgcagaccaaacaggcagcacagtgaaggacaagcaagtcaaacgggcacaacaggacgaacaagcacggcaggacaaacgggcagagcggcaggcacggcaggacaaatgggcacagcggagcagacagacacaacagggcgaacgagcacagcgggacgcacggcaggacaaatgggcacagcgggaaaggcacggtcccgggtcgtggcaccaattcttgtcgtggcgacaagaaatttgcttcgaactctgcggggtgaaggggacgggaaggggatgaaatgggcgaggcgcgcagagtagccgttcgggggaatgtagggggtcgggaccgatcggagagcgatgagtcgtgccggttttcgtccaggcaaatagaccaagttgggcacaattttaataagagtatgtttattgtgtcgacctcaaacttgggtaattaaaccgtcccaatcgggacggtgagggaaacgaaaaatgggggacaaacatgataatgtgaacggggaaaagggggcacaaaaacggtgacagtaaataaatcagaaatggaaaaatgtggcaaaatcaaaaggggtcagaacggcgaaacggcgatg

SEQ ID NO: 108731 - DNA, 320 bp, Heterodera glycines
caatagtaaaaatactcacccaaaacaccaccactactgccaccgcaacatccgagaagccagctgaacaaaatttagcagttaaagataatagtattgctgataaaggtgacgcgggtacgccggcatcaagtggattagaacagtccgatgatgctgctacatcaacgactcgagttgaagacggtggaaatttacctgaagcagccgcgttgacctccaataacccaaaaattgttgctaagcaatcaacggtagcgacagagagaaggaaggagaaaataattgaaaagctgatcgacgaacaagtggacagaatg

SEQ ID NO: 108732 - DNA, 95 bp, Heterodera glycines
catatcatccaagggaaggggtgccaactccttgcccaattgtctatcggcatacggatgaagcgcagtcgacatccaaggccgctgagctaatg

SEQ ID NO: 108733 - DNA, 608 bp, Heterodera glycines
aactttataataatttttctaaaatctctttacattgtgaatttattttatttttattgaaaatatgtttattattttcgaatgagctccagtagaaagtaataaaattttatttaatcattaatttaccaattggcaattattttgtcattaagataaaattattattattatttctttgcaattaaacaggatttccttattttattaagtaaaataatgatttattcagttttttaatcagaaaaaaatcatttaaatgcctcaaaaaatgaattgccatttaattgaagaaaaataaaataaaatcttgaaaatgaaattctgtattttattatttttatttttgattgccctaattataccaattgaatcagaaaagaaaaaacttcagcagaaatcatttggcgaaatatttggagaaaaatgggaagaaaaagaagaagaaaacgaaatgaactcaaaaaaagagaaataattggaaaattttataaaataaaagagaaaattaagcaaaaaggaagaaaatactcagcaaaagaatgggataaaattaactcaaaaatagcgaagaaattggggacaaatcgacaatatatttataaatg

SEQ ID NO: 108734 - DNA, 77 bp, Heterodera glycines
ttaattctttccgttaatcaacgaataaattttttaactattatatttttgattttttcaattaaaaaattgaaatg

SEQ ID NO: 108735 - DNA, 217 bp, Heterodera glycines
ttattaattatttatttgcacagttttcattttttaaattttactgtcaaaattccaaaagaatgtgaaaaatattttataaaattcaacgttttatttgctcagcttttgaaaattttgacaaaaagcggaggaaaaagcctttataaagcgaacgcataacacagaaaaatcataaaattaaaagcttaattttaatttataattatcaaaaatg

SEQ ID NO: 108736 - DNA, 202 bp, Heterodera glycines
ttttcaaatgtatttaattttttaaaatcaaaaattattactaggggttataaaaaagggaaatcagcgatacggctgcaaacactgcaatttcaagcatgatcgccctcagtctgtcgctgctcacggtgcgcgagagcacggcgatgagacggcatgcgtggatttgctgtacaactttgagagtcaattgttggcgatg

SEQ ID NO: 108737 - DNA, 442 bp, Heterodera glycines
ttttttcaacctaacctagattttatttaatttcctaatatcagtggacctgccaaaatagtcaaagattgaatccgcgttgttttggaccttgggcaatttaacaacgcaattagtactgattttcagtataaaaacgctgtgtaaccaaattaattaattaattaaaaatgaaattattgtcaaaaatcctttttctgaccaatttatttgttgtgagcaattgccacccaattgctaccctttaccaagccgccaaaacactaaaaactctaaagagtgcgcatattttaacaagcgcgacaatcggtgccctcggtggagcaataactgcacaattaatcgaggacttaatcgagatgctagtcgaaaaatttgaaaataacggtattataatcataaataaacaacattaggttaggtatttgtttcagacgacatg

SEQ ID NO: 108738 - DNA, 915 bp, Heterodera glycines
ctcaacaggaatggaaaatgtaacgaaacacaacccaccgccaccgcaccactcccaacacagccgaggaatgagtggggggggggggggtgacgcgagtgggctcggggggaaaatgaacacaaaatcaaacgaaacgaccaaacaaatcgtggccattggttcacaaaaaacaaaaccaaaaatcacttcattatcattgtcatcttcaccatattcatttaaatgttgtttgtttgctccgcttttcattcattcattataatttccaattgcatttttcactaaattttgtcaaaacgtttgagtgcaaaacgaaccttttcccctccttccaattaaattgcttttgttttacatgtaattatcaacataatcatcagaatcatcagcacattccccgcgggggaggggcggcagaagaacagaggccaatgagcaaaaagtccctccgcccactctcgtcacttttcgctatgcactcacgatttcattctccgcccccctccctccaaacgttttccatttttaaacgcttcataatttttggattgaatttaaatttattaaaaagcaatttaaaaatttcagtgagcttttccatccctacaaattaaattatataaattttattcctcgcgaaacatttggcaaagtctttcaacgcgaaaaccgacaaaaaaacgacctcagaggccatcaaaaacgacaacaataacagggtgaagcttatccatttaaacgcatcgccataagcagaaaatgttctctttgggcgaaccgcccgcggcaactgtctcctcttcgccagcgacagcggtgcggcatcaccaccaccatcaccagccgcatcagcagcaacacaaccactcgcaacagcagcagcaccaattcggctccccgtcgccggcaatg

SEQ ID NO: 108739 - DNA, 1003 bp, Heterodera glycines
tttttgagctcctttcttcaaatcaattgagcaaaaaaaaagttttttcactagaaatcggtgccctacttatatcatacattttttactttttgagatttttatgaattttttaaattttttaaattatgactttttatcgtttttatatggctttttcatactttttgacgatgaattttttaatcgactgttggcaatttttagtgaattaaatacagtcctattaattaattcattttttggatcgctagaaagttgcaaaaaaagctcttttttatcaaaaatgaatagctcccggtcgtttcgacagcaaaggaattttcgacagtaaacataaaaacaaataattcttattaaaataaattatattacttgtcagttttactaaatttcttttaaattaagttactaatatgtattgcttgttaataggaatatgattttacgttttttacctagaaaaacttcagaaaaatacacccttaagaattggcccttaaaattttaaaaacacacccctaacaaaggagggcccccaagtgaatgtggagtttcgggatgaaacttggtgggtgggtagatttaccccggtttgttatgtgaattttttaccgtttttgctgaatggacatgttcgccgagttatgcggcttttccttttttccttccttatataatttgcaaagaaaataaaagcaatgtggttatgcctgtggctttactttttccccaaaaagttcgaatcccacgattttaatttaattttttttgttcacaattaaatattttttatcagatcattatcaaaatacattgttttgatcaaattattatttttttaatttttgctaaagaaattaattcattttttggacgaaaaatgtatgcaaacaaaaatgacctagttcgcttatcagcatggggaaagtgctttcggtggaccttttatatcataattcagaacaaatacctcgagaattccccccccccccccaaaatg

SEQ ID NO: 108740 - DNA, 224 bp, Heterodera glycines
ggtcgataggctctattgcactttatgtttcctatcgacttttctgcggccaacccttttttatgagtactttcaattagatatccctgctttttatacaaaaactgtggtgatgccataagtaaccctgtctcctcgggtttgtaatttagcacaacgtgtaacctttattttcttgtcaacatttcaaggagtactcgaccaacctgaagctgggcgtcatg

SEQ ID NO: 108741 - DNA, 643 bp, Heterodera glycines
ggggatctctagagtctgaattgggctcatttcctccgatattttccacggccgacaattgcgcattttgtctttctctgattgcgatgggccgagttgggcactttggacccaaaacgggcacattgaaaaatgttgtctgagtgcagaaggatttgcaggttgacaaattggcattggagggtcgcgtagaccaagtcggtgaaagggggggaggaacgggaaggggaggggggtgaaaaaaccatttttggatttctcacggttcttttcccacttgaggttatctctgtctgtgcttcctcctccgcttcatcttccccctcttcttcggatgagctgtttctcctctccgccccttccctccatcccctccaacaacgccgtcgcattttccgtctgtctcgtcgctcctccgcccatccttccctcaccatttgctcgcctcctcccaccaacggttattctcttctctttggttacctttacggcactgtcggaagggccgtggacgaattggggcgactaaaggacgccgctgcaggaagcgatggcattgagaagagtaaactgttgccaaaaagttcggaggaactgttaggtcgtctgaaccgggaattggatctttttctgatgggagatg

SEQ ID NO: 108742 - DNA, 154 bp, Heterodera glycines
ttttgctgaggtgcgacttgattttggttggaaattcgtttgaatacaaatggaaacactatttgaaatgcctgtcgatattccgtactaatagtaaaaaaaatattaacataatttttaaattaaataattacaccttgtaaaatataaaatg

SEQ ID NO: 108743 - DNA, 236 bp, Heterodera glycines
taatgaaataattagtggttggttttacgcaaatgatttatgcaaatcactagaagacaaacaacaaaaaatgtataaaaagaaaagattttgaagaaaaagaggcagaatggtgtggattatgcacttgtgaaatggaaagggtatagcgctcgcttcaatagttggattcccgcaaagtcaattaccgataaagatatataaaaaacactatttgtcaaaatttaacaaaaatg

SEQ ID NO: 108744 - DNA, 68 bp, Heterodera glycines
ccttaattaaacaggggaaagcgaattagaaaggcaatgtacaaaaatgaacaaaaaaatgcaccatg

SEQ ID NO: 108745 - DNA, 323 bp, Heterodera glycines
agagaaggcggaggagaagcttagggaggaggaaaaagcaattgggaggagaagtaagctaaaaataaatcgaaaaggaaggaaaagccaaaaaatagggaaatcagaaaacaacggcacgaaagacggaggacagaagagaggcacaaacccagactgaagagccaaacaaagagcaggacaaaaagccaatgccaaacgaagcagggggaacagaacgcagaagtgaggggagaattcggtcggcaccgccttcagcgggaaaagcggcaccgacggcggaatgggagggcaaatggagagaggccgaaatgagagagatg

SEQ ID NO: 108746 - DNA, 747 bp, Heterodera glycines
tcgaaattttgaagtttttttcttaataaaatttattccaggctaaaaaatctttttgtttttttgtaaagcttatagagcatctgaagatctttcgaatgataccaacaatgttggatttggatgcaaaagaaaaaagttatagccaaaaacctaaacttttttgaaaatctggacgcagataaccgacaagtaccaataattgtttatttaacgaaagtaaatgctgaaaattttagcccacgaataggcacttatgtgatcaataaacaaactccgaacaaacaaatttggctttcatcgccagtttctggtccaaaaaggtatcactcactattcattaaacgctaatcccataaaatttatttgaggtacgacctcagcgacaaaggccggtgggtgtataagcatgatggagttacgctacacgaattgctcgagaaagaatttagacacattttcaaaaacgatcaaatttcgttacatcagagttaaagatttatcgttttttataccgatataaattttatttggtgaacagtgttttgctggttcaagttaataaaacaataattattcatttaaattttgaagttatgctcttggttttttattctgatgttttctgcccgttcgtctttcacttttttgcgcattttccaatgctttgcccgtcggtgtcgggcttcgcttgcagggaatgcaactgcagcagcacaagcacagccgtccaatgcaaatcaaatg

SEQ ID NO: 108747 - DNA, 752 bp, Heterodera glycines
tcgcttcttaggggtgtattttttggttttattgcattttgttaaggaattttccaaaaaatgtcgaaatagtgaaaaaatagtgacgatacgccaaaatagtgatttctagtgactgataatgacatcagaatcgaaaaattttaatgcagaaatgcgttttttgagctcctttcttcaaatcaattgagcaaaaaaaaaaagttttttcactaaaagttgcggccctatttattacgtccaattgttcattatcgtgtaaaataatgtctataaatttcaattatgcacttaaaatcctaaataaatgtttgtttccatttcaaacaccggttttatgggcgaaaaaatatcaaaataatggaatacatttcttatttatgtttttttgaaaataaattaaattgaggcaaacattttattcactggtgtcaatttatttctttttttttgagacacatcaatagagctgagatttttatgaaaaaaacacttgattttcccatttttaacacatatttagtatatatttcagtattttttggcacatattttattatatttcagggtttttagcacataaaagtcccagccagcagctctactgatcaacaaaattttttcatcattatttgataagtaaattttattccatagaatattttaatagagcagaattgctatggttatgtgattgatcgtcattataaaataaatttttatgaatttggttacaaaatatttttagaatg

SEQ ID NO: 108748 - DNA, 145 bp, Heterodera glycines
ttattaaagtaaaaaagtcttaataatttattgtgtatacttaggattggccacatatgcctttattacggtaacaaataaatgatttaactctcttttaatacagcgtgcgagatcggcatcgcgccattagatcgaagaaatg

SEQ ID NO: 108749 - DNA, 432 bp, Heterodera glycines
  unsure (1)..(432): unsure at all n locations
tttatcggagattcgatcaattacacttcatgtgaacattnagcggacattattgcacattcatttgatagagacgacattaatggaattcttttatggacattttatgtgagaattagcaatttattccggagaagaataagcttaggtccatttttttatgtgatgcagtgaataatgcgctgatttggcaatattttggttttattttcagcataaaaaaataataaaaatttgcataaattcaccgatttctaaatgtatgccgacaaccctcggggggtcagcaccaactctgcctgcgggcaaaatacagaatttgattggagcaaccccgcctgcgggcaaaatacagatttaaaggtgaaaagtgaggatcaaaatgtagtgatcaatcgacctgtgtggcgcataaacatgctgagccacatg

SEQ ID NO: 108750 - DNA, 111 bp, Heterodera glycines
ttttggccgtaaactcggcctcacattggcacttttttcgccacgtttcaatgttttaattgacaaatatttcgatggcaaaagggaattaatattatttggagaacaatg

SEQ ID NO: 108751 - DNA, 881 bp, Heterodera glycines
tcattttccttcttattgtgacaaccatacctataacaatcaaagttatcaaataaaagaagttatttttgattaaatttaaatatttatttaattttgtttttactataaataatttaaaaaaatgaaaaaattggaaaattaagtgtctttttttgtttaaaaattccaaaaaaaaatttgaaaatattttaagaaatgacatgaaagttgattttaggggtatatttttcaattttcttgtatttttcttacagaatcagagtatatctaattgaagatgaatagaatcaattttattttgcatacgataaatttttttctcgaataatgtaaatgtttagttgaataaatattaatattgtaaatattatttttacttaatgggcgttatttaataaataaaatttttataggttattatagcattttttcaattcgcaatataatatttattttttaaatttaacttctcatttgttagtcatctttatgacaagtagttgtttggttttcatattttttgtttttaagtttataacaaaacattagtttggtatattatttgcataatatttttcgagattttatcgaatattattttaatttgtatattcagttaattttcggattttatcatgcattttcacgcctaaattccttcacattcaagaaattatactgtcttctaggttcttaatgataaataataaaaatcagtttatttaaaaaaaataataatttgcttatttaaaaagatcaaataataagttttagtgaaaagagcaaaattaaaatattttaaaaatagaaaaacaatatttataccttctcatatatacaaaaaagaatattatacattgaactccagattgtacatg

SEQ ID NO: 108752 - DNA, 726 bp, Heterodera glycines
ccattcgaataacctcaacccaaaatttcatttctgaaggagagggaagatagtgatcaaaatgatgaacacgaaattttggaagaaaatgaagtaattaacgaaaatttattaccatgtacaattaccgaaatatttttggagggtgaagtaaaattggcatacacgagctggccagaaccaaatttgattcctttgaattcgtcaatcccaacaaatttcataaaagaacattggaaagtactcacaaacgaatttggaaaaaaatatttaaatgcgtggctttttgggacagaatttgaattgtctttgaacaatgaagctgataaaattttgttgggaattcgtgaacaatttctaattaatgatgagtggacttcgaaaaccaatggggaaaatgagacgtattgggaaaaagttggagaatttaacggccaaattttagaacttcaaagaattcccgaaatattaatctcccgtaatgaaagcaaaattgaaaataaaagggacagtgatcaaaatggggatttaatgcaaaaacagagcataaatgttattactgaaaaagatttgttcatgagtatattcgatttaaatgaagaaattaataatgaaaaaggagaaaaatcagagaacaaaaacgaattaaaaattaatgacaaaaaatctaatgaatgtcataaaaacatggattttataacaaaaagttttagcagcgagacaatg

SEQ ID NO: 108753 - DNA, 358 bp, Heterodera glycines
aatcacaaaaattcaaaatacatttaaaaaaagcctcgttttaaaaatttagcctattgtcctcaaaatggtttgtctaacgtataattttcgattaaaataatgatctatcttttttcaaaaatctaaccccgttatttcattaagctccgctgttctcgactgtctgaattcgtgtcttgaaagtgctgacggtgagcttgttttgccagtgcaacaacatcaacaatcggacatttttcctggtggcacacagttggaggactccaaagttcgacggcatgcaaattttcggtgaaacaaaaaaatgacatttttcaatacttttttgtcattcttcaggatattctttacaatg

SEQ ID NO: 108754 - DNA, 949 bp, Heterodera glycines
aattaacgtaacagaaaatcttaaaatgaatttgaagctttatttcaagttcatttagatcacttaaaaaatttgttttatgaaagataaaatttttaggcaaaattggctaaaacattaattttgccgcagatgaaaattggatttttgggttagatctctaaacagattttaggctgaaaatgtcattttacggtaaaaaaaaatttccagcctctatgaatttttttccacacctaaccctattttttcacagcgatccgtcgacacaaatgtcaatgtcatgaagtgttgctcactaataactcgaaaactagcttaacaacaacaaccgagattttcgtgcttttcaggccatagggagctcaggaaaaaatagtgaaaaaactataaatatcatccctactcatttgtaaggcacgacagatagaaaacccgaaatattaccgccaaattgtcattttaaagattatgtgaaataaaaattaaataaaaaattaacaaccaattgttattttcttattttattaaaattaattaattaatttttaaccaatttggaaacaattattgatggagtggtcgcagattcaaattgaaacgtgaagcgaaccaaaaatagagttaacttcttcagctttgacagctgcataaaagtttgaaatcatttgaaaattttgttccacgtagtttgaagcgaaaaggtaatcaatttgaatatagaccgaaatagaagtgaaactgtcaaaacgcatgcattacgcttcagcaagtcacgaattaattaatcattggttattaaagctaaacaaagattggaaatatctttcaaaacttttctctctctaagttttggcttaaaaggcaaagctttgccatttgtcgacagttaattcaatttttccattcatttatttcccaacaaaattctctccaattccccgtcatg

SEQ ID NO: 108755 - DNA, 850 bp, Heterodera glycines
aacaaaaaaaaaattgtataaaaatgcaaaaatgaaaaattttgaaagatttcaccggagcaaaaaacttacaatttttcttcagagaatcgaaaaaataaataataaatttttattttttattttgcaaaatactgaattaaaatttattttttgacaaaaaattgttgtaatttatgataaaataattttttataaaatttttgaaaatctttttttttggttgatttattataaccaattagattatttagcaccaccaaaatcattattcgaataaattctgaagtccgaatttagccaaaaatgcctgaactaggattttggttgcaccctcggaatactgccaattgttctatattttttttgtgaaaatctctagaatcgtttgaaaatttggctactttaaatcaaaaattctcgcctttttgagtttctctccgttctcgcaaatatgggaggagcaaagttcctattttagtacacattttggcaaatcataagttaattaatatacaaaaaggaattatttttattcctcataaatttgttatattttattttgggtattttttagtaatattgtagaataaaatttactcttaattatgaaaatttgcacatttatcgcttctcatttaataatttacaaattacacacccaaatcaccaatcgtttgtacttcagtttcaatatatcctcaataacagcagcacatcggatccatttttaaagcattacaaatcccacacagaaaaggatgtagaaaacagcggccaaaaaaatggtcacccatccaattaaattgcctttttgaatggacaaataaacggccaatttcagcgcatg

SEQ ID NO: 108756 - DNA, 720 bp, Heterodera glycines
  unsure (1)..(720): unsure at all n locations
gggtgtattttcgctttttcgcattttcttgtgaaatctcncaaaaatgaccaaaatatgctctaaaaatgcaaaaatggcaaaatatgcatntattcttgaaaaccccccaaaatatgcttaatatgcactaaaaactntcaccaaatcaaaaaattttaacgtagaaatgctatttttgagcccctttgttcatagcatatgcgcagaaaaaatatgcaaaatcatacaacttcgaacccctattaattaccatttcaaattgaaaaactaaaaaattaaaatttagcaaaaaatgataaaaattattgcaatttatccacaaatctccaaacattgaatgcactgaattctcaaagaattggtgagcattgaaacgaataatttggataaatattgcattaaaattataaaatataaattatttagccaaaggaaaaaggctaaaaattgttcaatcattggaaaataagcgaccaaatttgacgcataaaactcactttgattacatgaatcagttgaagattatgctggcaaacaaatcggaaattgaaaaagtgcgaaacgcaacaattgctgccctcgggggagaatttgaaaaggaaaaagtatcgtaaaacaaaaataataataaattaaaaaagtgattaaattccacaggaaaatgatgcttattcaatttgcgcattaaatgaagcattaggaaaagccaaagaaatg

SEQ ID NO: 108757 - DNA, 308 bp, Heterodera glycines
ctgggatttttatgttttaacatatttttttgcggcctatttatggcgagagaagcccaaaaatagcattttctccgactatttttgatttagagcgagttataaaaacataaaaacacatattttggcgttttggcacataaaaacatatggcacatatttcggggttttggcacatattttgcacatattttggcatttttgagaaaaatcgtaaaaaaaatacaagaaaatctgaaaatgcaccctaaaaattgactattttacgtttcttaagcatttagaaaatttctttatatatttaaatg

SEQ ID NO: 108758 - DNA, 60 bp, Heterodera glycines
agttttaatttaaaacattgaattttcagaattcacacaattggtcttaaataccggatg

SEQ ID NO: 108759 - DNA, 284 bp, Heterodera glycines
acacaagggtgcaccccaaaatctcgccgtcgaattttataaaaagcctaggcctaacctaattgtaagcctatgtgcgagttggccattacgccgatttttttttcttgaaattttcttataaagaaattttggaactttcttaatttacaatttagaaaaaaaatcggcggcgacattttgtcccgtccccctcacacaatgccatggatttgcatgggcacaattcatgagtatcatggtactataacgtattcccctcttttttcagcgcttggccaatg

SEQ ID NO: 108760 - DNA, 1003 bp, Heterodera glycines
acgcattaaaaaagcaaaaattctcagcgaattttcaaaaattttcgtcctcatacttttcaaaaaaagacaatatgcttacaatcgcttagctacgttaaaattattgtctgttgatgttgaaaagggccaaaaaacaataattagaaaaatttaaataatttttttctttcttgcttatgaaaaacaatttcattaaaaaaatatgtcggaaaattggccaaaatggcacgacaaaaataaaatgccaattttacataaattctcactcaacgacgagagtcttgaataggcacttaaatgatggcacatgataatgccgagaattcggaggggagggatgcaaatttgccgagtgccgtcctcaagagggccatgtaaaaattcaattttgtcacctttcacaaaatttagtggcacataaacacttgatgagatttaaaattatcaaatttataaaaaaagagaaaaaaatctgaatcttcgagaaagacactaaaagcaagaaaagggtttttaaagtatgagttatcataaatctgtgatgatggcattggatagtgccgatgggcgatgccgaattggccgcgggtccttccgctggtgccgcccataatccgggaaaatgagacctcccccgtttaggtgagagggcgggggcggcgtttgtatcaattttcaacctccagtgcccgccgcacttctccgcttggtgggacgacctttttaaattggccattgtgtggtgccaatcggagaaaattgggcacatttttgtgaaaaaatgagtttttgaaattgagaagcatgaaaaaatggcaaggagaatgaaaagcatccatttacacctcaaagtggtgacatcattggctgataagatattagcatattatacaaagttttgagggaaataaatatttattaaaaattctttaatttaaattttcgttaaaagaattttaccgaaaaaagcattttcagagcagagaatttttaaaaaatg

SEQ ID NO: 108761 - DNA, 510 bp, Heterodera glycines
atcagaagagaggcaatgaacactcacccagtggcaaaacgggtttatgacgtcattttgcgatgctttttgggttcccgtcaatcattttcggaaacatttcctgatcctcaaaatcttaaaaaattatgtattaataaaatgttttaaattcattttactaatacaaaatttttcatgttttaaaataaactttaaatattaaaatgaaatttgaaatttgattcccaaataatcaaataaaaaattgtttatttggacagtccgtagtcacacaattacgaaaaaagaaaatattatttattacacaggcaattgaagaaaatattgtttatttgaacattgaaaaaaggcgagaaggccgagcagaaagaaaggcgaacgaacattcattcattcgtacacttttatttggtagcaatttttgaaagttttaaagcattttccgaaaacaaaatcatattttatggaattttttaatttttttttttattaaaaaagcaaaaaatg

SEQ ID NO: 108762 - DNA, 213 bp, Heterodera glycines
tagtgacactgggcttgacccatagtgacgcacttggaaattttttcactttttttgatgtaaatttttgttttgtttttcaagtgggaacccttttcttagcgcccaaaaatttatctcatatggaactggccagacaaactgattgatcactatcgaacaatattctgtataatatatataaattaaagttgatttgattaagcaaaaatg

SEQ ID NO: 108763 - DNA, 71 bp, Heterodera glycines
gtaactttatttcaacttcgttcccaatttagctccagcatgaaaatttggctgtccgaatttgggctatg

SEQ ID NO: 108764 - DNA, 1003 bp, Heterodera glycines
aaaacgaaaaattacccaaatttttaccgtttcattcagtgaaagttcgtgcgctaattggtagcgccggggccgtgaaaggtatttggtctgggcaaattggcgctccaactcggccaactgatgggaggagaaagtggtgcggggacgacgcatgccacggctcaacgtttgccaatgccaaactgaaaaagagtcaatttgtgattttggaccaaagcaaattaacgaaaatgtgccgaagaattcacacaaaaaatcatttgaccgaaaaacttaaaactttggcggaatgaaaaaacaaaacaactaacttttgatgaccatttatttgattggtctcatttcattttcactcttttttctctttttgcaactcacgtgtcaatgccatcagttggtcaattgaaatttgcttctgcgaaatttgcaaagtgccatcatttaaagggggaagggttgtgccattctgctcaattggacgcggtggtggcactgagaagctgaattattggaagtacttagaattcaaaagcatagctcattaatcgccacattatttttaaaaaaccacagattttaaaatgccaaatttaaaagttttacccttttgaattgtcccattttggtgccttttcttccttcccatttattttacaatcaatttgatcagcagcagaaccaatcaaagcactgatcgaatgaaacattggcaagagaaaaagcaaatgccaaaatgggaggacaaagggaaaaggaaatgccaacgaatgaatgcctttctttctttctttgtgttactgtggcaccccttttcccctcccgccacctcaaaaagtgccaaattgcgctcgccaacattttaatccatcattcgtccctcctccctcacattttggcggaattctttcaaattttcccctgggaacagtgcgagaggaggagaagcgaagcattggcgaaatcggcaccctaaaaggcgctaattgaattatgcaatatg

SEQ ID NO: 108765 - DNA, 166 bp, Heterodera glycines; identical to SEQ ID NO: 99009

SEQ ID NO: 108766 - DNA, 100 bp, Heterodera glycines
tttgaggaagtgagcataaacattgaagactggcccaaatataaagaaggtttcggcagtttgcttttccttttttgattcatttctcctctcagaaatg

SEQ ID NO: 108767 - DNA, 179 bp, Heterodera glycines
ttggcaaaaactgtaaattaatcagtaattagtgcttttaaaacttcaataaaattttagaaatttttgtaaggatttcattgatttgcaaatcaatttaaatgaatttttatttcaaaaacgaaaaacacataaatataataagtgcttagaaacgacttgaactgctcgacgagatg

SEQ ID NO: 108768 - DNA, 60 bp, Heterodera glycines
tcggcagcttatctaattaaaaaaaaattagtttaaagaacttatttttagaaaataatg

SEQ ID NO: 108769 - DNA, 586 bp, Heterodera glycines
ggtgaacactttgacaaattgttggatattttttgaggataaaagcaggaaaacgacagcaatgctgaactgattgagcagcacaaaaaagttggcaattcgtctaaaataaaaaaatattaatagataaataatataaacaaataaaattaaattttgaacaaaattattaaaggaaaaaaaaattcatcaaaaatgctatttatagttattaaataatagctgaaattacctattaatataatcactcaagaaaaaaaaaacatattaaattttataaaatttatcaattattatttgttttaacttttaattaaacaataaaaaatttaaaaaaatgataatattattttattttccctcttattaattcaatatttttatttttgataccaaaaacatattatttttcttattgttattatttgttctattcaattggaatggttgtccattctattgaaaaagggtgtgtgtaagagtatataaacgaaacaattttggacaaaaatattatttcaataaaaaggattattatttaaattttttcaattattgtacaaaaaaattttttttagaaaaaatg

SEQ ID NO: 108770 - DNA, 1003 bp, Heterodera glycines
tggttttatttccatcgtctactgatttaagaaatcggttaagtgcagaaaatttggagaagcttctttttttgcatcggaatttaccaatttataatttttcttattgatttttaaacaaattaaaaatttgtcaattgacccgatacccgaaacccggcctttttctcgacccgaaacccgaaacccgacccgatgatttttcggccgacccgacccgaaacccgacccgatgatttttctcgacccggaacaaccctggtgctaaatagtgaaatgaggtgaaaaccaatatgcgacaggtgaaatgtccttcgataattggtaaaagaggtgaaaaacaataggaaataggtgaaatgtcctggtgaaaagagcgaaacacaataggaaacaggttgaaatgtcctgtgataagtggtgaaaagaggtgaaaaacaataggaaacaggtgaaatgtcctgtgataagtggtgaaaagaggtgcaaaaacaataggaaataggtgaaatttttaagctatagatggtgaaaagaggtgaaaaataataggcgacaagtgaaatttactgtgataagtggttaaatgaggtgaaaaacaataggaaatagatgaaatgtcctgtgataagtggtgaaaaaaggtgaaaaacaaaaggaaataggtgaaaggacctatgataagtggtgaaagaagtgaaaaactataggcgacaggtgaaattttcagttctaggtggtgaaaagatgttgaaaattctaagaacattgatgaaattctaaagaagggatgaaaagaggtgaaaactaaaaacggaaataagtgaaatgtttcaaaaacagatgaaatgacaacgaacgacggtgagatcttcgtgagtgacgataggcaaaacaaaacaataattgagatagaagctattttaaactggtgaaaaggcaaagaaataatggaatatgtagaaaaataataaaaaaatttaagagatttaccttaacaatg

SEQ ID NO: 108771 - DNA, 388 bp, Heterodera glycines
acttataattagagaaataatttctgtgttttcccatttccggagaaaatttatgaaaaatattctcatgagatttttaatatattttatgaaatatatgtttttttgaaatttttataaaatcctctggagattattaattattttataatttttaattatttgactgacggggagagaaaaacagtttaacacactctctctctctcattgattgagtgaggcgatcgtttgatgattaaattttgttgtaaaagccaaaattggccgcaatcttcagtcttttcttaatcatttctttacttactttactgataaataattaaataatatttatgattttaaatttaaataatttttttcaaaatttatttaaaaggaaaaaatg

SEQ ID NO: 108772 - DNA, 165 bp, Heterodera glycines
aaaacaccgttttgtacatttttttatttttgtttttatttgcgtattttattttggaaagtgtaaaaattttatttttaaaaatataaaattgcccattttttcccggcgacgcctatcggcaccaattgaaccatgattttttgaaaatgtgagcccaaaatg

SEQ ID NO: 108773 - DNA, 573 bp, Heterodera glycines
agtggaggattagaaggagaagagaaagaatttgtgccacaaaaatacgcccaattttgccttaggaatttcggctccactttaaattaggctcttgagccccccgataccgggctccccaaccttactcgcctttgaggaacgagcaatttttacactgttaaggattggcttcccaaaaacttgagaaaacttttttttcgggtttaaagttatttttttggaaagaagcattgtcaggtttttaactaaaaattacactgaattttgttaaaaaatgttagtttttatagaaaataaaaaaattcaccggctctcaaaaatctataaaaagaacacaaagcggacctaaattttttcaaatgatattttgcgctccccaactccgttctccggataggccctctccgctctccgataaaaatttatgtaattttgcaattttgtaccatgtacaataaaatacttaatgctacagaaccgttattttagaaattctgtatttctgacgcattttccgagagccttttttaaattccatccatttctgccaccgattgtcttaatcaaatg

SEQ ID NO: 108774 - DNA, 56 bp, Heterodera glycines
ttttttaattgaataattttaaataatttattttcgatataaattttgaaaaaatg

SEQ ID NO: 108775 - DNA, 664 bp, Heterodera glycines
  unsure (1)..(664): unsure at all n locations
aaataatttatgtaatattttctcgattttttatgaaaatttacttntctctcccngagggtcggggagaaaccctattgaaaacatttaaatagcaattttaaatcaatttatgaacaaaaataataaaagaaagaaaatgatttaataaatggaatgaaattgtaaatattggactcgggaatgaaaaaagtgaaacttttgcgacagaaaatcaaaatattttttttttgtaaaaatgttactgcgtcgtaattcaccacttgaagaactcacagtaaagacaaaataagaaaattggaaaattgattttgataaaatacagcaacaattaaatttgggtacggatatttcatcattagtgctgctaatttcatttaaattatttttttcctgggttaaataattatgtttgggaacaaaaatttggacttttatttacatatttatttcaaaaattattaatgtactttttttaaatgttgccctaacaataaagctatttgaccacaaatatatttttaacaaagaaagcagagatactaaaatattaagtttaaaaataaataaaaattattttttatgtttacaaaagccgatcatcaggggcttaaaaaaagaatcaagaccgagatcgaataacgtgaggaaatttgcaaaaatg

SEQ ID NO: 108776 - DNA, 993 bp, Heterodera glycines
attattgaggagggttttgtgtttggagactttgtgaggtttacaaaaaatccgcaaggtttttgttgttgaacaatattcggtggaaattttattaattaaattttaaaataacagcacttttacttacatactttaagaagcatttaaaaagaatcatatcgaaattttattctcgtccgagggtaaaaccaaggcgtaatcaaagaaagtgtggtcatttgacttaaattcccattcctaattattattgaaaagcattctatcgaaaataaatcaacaaaacatcgaacgctttttcgtggtttaaaatgcgaaatcttaaaatttatttttcttattcaacggttccccgggtctttcgcttaaatcagtcgtcattagcagggaacggatttttaggttttcacctatttttttttgccggagtaggacaaaacgtcgtcgaacgaatttttcgaccataacttttttctttctcaaccaaattaaacattcttggtattattcgaaagcattcgaaaaatgctattagcctgcaaattttcaaaattttttatttatgcacaaaaaaatcagagcaaaaaaagttcgaattactggggttttgagttccttctggccataacttttttgaaacttaacgaaaatttttgtagattttgcaaattaataataaacacatagagctattgaacaacaccaacaattcttaatttgattgacagtgaacaaagttatggttcaaaaagtcttccgacgacgtttcggccgaagacgttttggggtgcaccgcctgcccacaggggacaaaaactatttttctgtttaaattttgggaccattttttaaaaaccaattcagcaaaaaaaaaacatgacgacacctattgacactgcgggataaaagaaatttccggtttcaaaaaatcacaaaattttcaattttctataaaggcaaccccacatttgggtagaaatcttgctggcaatg

SEQ ID NO: 108777 - DNA, 280 bp, Heterodera glycines
ttggtaacagcagcagaacgccgactgaacgtcaccccccccacccatccacaacttatggaggcgaagtggggccaattcttacaataataatcatcatgaaacagaaacttattttacaaatttatttcatttcctttttagacttttaattgggcaaaaattaatgaagcgccgatttatcaacgaaaaaattgttaaaaagggaaaattgatggaagaaattgatgacggaatgacaatggagggggaggaaccgtttgaaaaggtgccaaagatg

SEQ ID NO: 108778 - DNA, 127 bp, Heterodera glycines
  unsure (1)..(127): unsure at all n locations
aaaatggtgctaacacaaaaaactcgaagcacatagatcaatttncggaaaattaaaaagaagaagaatcaatagctcaaaaaatgaatgaaagaaatttaaatatttttacaaaaaataaattatg

SEQ ID NO: 108779 - DNA, 342 bp, Heterodera glycines
taatccaatattaatttttttaagggatattaggcatctttcatagattgttttgtttttgaatggaaaatagttcatcctaacatttgtcggatggtaccatcccaaatggttctttggtcgatgatcggccaattcattggcttgccagccaactgtttaaggtcgatatattgtttttagcttaatgtgttaaatatttttaactttttttttctttttgctataatttttttaaattttttaaattaaatttataatttttattcacaagcaattcataattcgaaaatctttggtattaacatgtaaattcattaatgtcaattttcaggtcgaatg

SEQ ID NO: 108780 - DNA, 1003 bp, Heterodera glycines
ttcattcattccttttcataattaaggaattgaatttctaataatagcaattttatggtttcgcgttcaaatttgtttgttcttaaggtgaatggtgagctttttatttagggccaaaattaatttacttttttggaagtttttttaatttgctataaatcgctataatttataaaaacaaaaattggcgtttaaaatgaataactttgagcaggtgtgcaatttgaaggacaatttgtaaatgaattggattcatattatttttgttcgtttcttaatcttcattgttaagaattacggctgaatcttgtttcatattttgtggctttttaaataaaattaaagcaaaaactgcgtgccatcgcggttactctccgccaatcattcgtttaacaatgccaatttagtagggtcgtagccgggcgagggggatgaccccggttaagccggggaacggggagagcggggatgacgaaacgggcgatcgccgaaaatggcgactcataaaccggaggacgagaatttcgtgtttcgttttcgtgaaaaataaatattgaattttaaaaagaaaaaaaaatttcacaaatgcactttttaaaggggaccgacgatgccgaaaacgggaccagtaaattgggcaccagacaccaagcggaaaactggacaccaccagaattttgtacaacaaaggaaaattggacaccaaattactctttttaaaaaaaataaacccatgaattaggtgaaatataaatttagtaggataaatgattaatgaattaaggcacttagagtcgatcaggcatttagtaggcacgatcattggacaatgtgccaaaagctcacgaaaaatggcaactctatattcatttttatatccaattgtccaatttatttattttaattttccctgcgatttaaatggaaattttaattactttaaccttcaacttttcctaaataccttaattataatgaattcaattaacaaatgttcaaaatg

SEQ ID NO: 108781 - DNA, 68 bp, Heterodera glycines
gcggcgtatagatttgtaatagacatatttctttccgcttaggagcaaaacaatatgcactaaaaatg

SEQ ID NO: 108782 - DNA, 1003 bp, Heterodera glycines
cgaaaaacaaaggaaaatatgttttgaatctatctttattttaaaagtttgaaataattttcaaaaatattatttaattattttacaaacattcgagtaaataaaaagtaattaatgtaacgcactgcgatacacgagatctttcatattctggaaaacacgtgttgattcaagcagtttacaaatggttttactataataacgagtaaattaatatttatcttaaaataaactataaaataatattatttatttttctttgcgaaaaaattaaaaatctaaagggaaaataattaaaaaagaaagaaaaattatcatttaaagatgaaaataataacaaataaattaatgtgtgtctttttttgaagaaaagtttaaataaccttagacaaaacacatattaatttataaaagtaataaagggctctaattagtgctggaagatttatgttatttttctgattatgcccaaaatattgatttggaaaatgttaccaaaagagacagaacggagaaaaagagaaaggaaaagaatgagagatagtgagagggagaaagaagaaaataatggtgagagaaaaagaggaatgtgagggagtcaaaatcaagagaaatacaaaggaacggggagagaggatgtagagaaaaaagagggagagtgctgtgaggaagagtgacggagagagggagagagagagaaagagatgggtagaaaagaaagagagcgagagagtgaggtgagaagagtgaaaacgagaaaaatggagaggaaaagagacagaacggagaaagagagaaaaggaaaaaaatgtattaaatgcatcagtacgccaaaccctgtttattttacaaccctattcgtgataaaatttaaataaaccatcaaaacatataatattgctcgaaatttacataaaattaagagtacaacaattataattgaaacaaaaataattaaaaacaattagataaatgttttgttataaacgaacaattaacaatg

SEQ ID NO: 108783 - DNA, 533 bp, Heterodera glycines
atcaaacgtattttaaaacgaaaactttaacaatttccgaattcatttgacagttcgggattattaaacaattcgaagtaaactctacgaaagtatgtgccaaacccaatccagacagcctggatctcttacaaatttatccctccccaggatcgagcacctaccgaattttaatttttaagatttaattaaacaatattatgaattttagataatgactcttgtatttgtttctttattgttcttagtctctttgcgtatattttctaaggcaaaaattcctttactactttcccagcagatgggctctattttaacgatccatcggggataggctaatgagggagggaggggtgaaccttaatagagtaattaattagttctattattaaaaattatcattattacattattttctaaaattaattatttattatttttttaaattttctcggcttagagtgaagcggtactcaattggccaatggttcctcagcatgaaaaagaattatattgagataaataaaaaaatg

SEQ ID NO: 108784 - DNA, 443 bp, Heterodera glycines
  unsure (1)..(443): unsure at all n locations
agagtncattttgcaaaaaataaataattaatgaaaaagtcagaatctctaaaaattttaaaaacaacaagcgttggcattttttcagcttaagttagtcctttacaatggagaaggcctgcaacatttggagagattttatcgattttagtgcgctaggttcgatgaaactttttaaaatataagcctaaactttttggcttatttaaaaagcaattaaaatttttaaaaattttattcatctcccttttgatagaaaaagcatcagagagccttatttaacttttaattaacatttggtgcgtttcagagcacgttctaaaaaatatttatgaattaattttgcaaaataataaataattaatgaaaaagtcagaatttcgaaaaattttaaaaacaacaagcgttggcattttttcaggttaagttagtcctttacaatg

SEQ ID NO: 108785 - DNA, 497 bp, Heterodera glycines
ttttgtttggatttttcacaacaaattttacgaccgatgtttcccttcaattgaaaatgccataaagccagacctttgtcgtccaggagcgccagaaagtgagcgagcgaacgggagaaaaaagtgtgagagaaagcatcattttgatgggcatgcccgcggggggagggggatggggggggggtgagatggaaagctgtggaggggaggagaatatgctgagtggagtgaagatgagatagtgtgatagagagaaagagagacggaggggggggggggtaatgctcgtcgctcattatataaaaaaaatgctggtccatcgattgtgatgaccaccgaacgagtcgttggtcatctccccaaccccattttatttatatatattttgttgttcattttttcattgtaataatatttttttttccaatttagcaaaaaaatgaatcaagcctgtgtacaacagaattgtgtcactcccgtggaggcagatccaaatg

SEQ ID NO: 108786 - DNA, 65 bp, Heterodera glycines
tcccagctgatcacgtgtgatgagaagtgggtttatctcaacaacaaaacggcacaaaaacaatg

SEQ ID NO: 108787 - DNA, 458 bp, Heterodera glycines
tcgaaaataatgtcagattcggttatttggcccttaaactctataatacatatttgtatcggtgtttaaaaaaatttcatttttcgaaaatggggggggcaaaccagactattaccggatcccgtcctgcgcgcgccggtctcttcgttttcgggtcactggtcacaaatctagcatccatttcgaacagttccagccccggacccattcgaacaaaaagtccaagattcaaaattttcgaatttcacttctatattataaaaactgtttgatgatcttttattgaagtatgatgactttttgttcgtccgtgtacttaaacaaaattaaatttgtgctgccgtcgaaaaattttaccgaaaatgcctttaagctccctcttctttatcattaattaaaacaagagaaattactcattcctttttcatacattcaattttagtgtaatccgaaaaatg

SEQ ID NO: 108788 - DNA, 321 bp, Heterodera glycines
ataaagagaggaaatgtgtgttaaatcttatttttaatctgaaattcgaagattctcccgatttacttacctaattattttttatactttattaacttttttccggacattttctatccaggtttcctacatttttactgtgattataacgccaattcatggctagcgataataaggtacgttctttttgtcctcgctcctctaaaatgttaatacattcaataatatttaatgggtgttaatttttgggagaaaccgttggggcattaattcaaaattcagaaacaaataagtcgaatagagctgattttggatgacatg

SEQ ID NO: 108789 - DNA, 794 bp, Heterodera glycines
caaacgttcattcaatttgaccttaagaaatttaaagaaaaggttaatccattttttggggcgatattatgcgataaataaaacatgaaaattaaagggaattcggttaaaaggaaaactaaatcaatgataaaatgtttttgtaaaattaataataaaaattcttaattttatatggttaaaatttgtccatgggttgaattttgccttatctggggaaaacaatcaccggcgagttcaatttctggcgaaatcaaatacagacggcgagaaaaagagaaatagttcactggcgaaatcactcactggcgaaatcacacactggcgaaatcacacactggcgaaatcacacactggcgaaatcacacactggcgaaatcccactggcgaaatcaatcactggcgaaatcacctggcgcgtttttattatataggattttttgaaataacgcacaaaacttacgccattaatttatttggcataatgtctaaatatatgaaaaaaaaccgcgaattccccacaatcttgaaaaaccgagttttctacgtctgttcgtgtttcgaatccggtttcgggctcaaaatcagtccattcggaattttgaggttctttgtttgtcacaattagctagataagctgactcgtaaattatgtgtcgtaatttacaccttaatgttttttcaaatttcattcctattaatcaaactttcctatattttgggccttccatttgtccacaatgaatgtgtattaagaaaacagcgtgaaaatttcacgcaaattgaccaaaatg

SEQ ID NO: 108790 - DNA, 295 bp, Heterodera glycines
aaatgtcgatcgatgaccgatttgttgatagtgatgtggatatatgatcatttttttttgggacatttaaaaaattggtgatgaattttgtcaaataaatggtggtgaatattttgaaagggcagaatttaaaattgatttaaataatagttaaatatggcggtgttctcatgttctacaattttattgattggctctaaacactcagtgaggtggggatgaggcctataaaaataaactgaaattgacttccgctcattttccgttttcattcttgaaattttccgctaaaatg

SEQ ID NO: 108791 - DNA, 116 bp, Heterodera glycines
  unsure (1)..(116): unsure at all n locations
tgtgtatataattattttggcaataaaaaaaagagataaaatggtgacaaataattgncattgttatgcaattttttaattatttatgaaaagcaattcgatagttcaacattatg

SEQ ID NO: 108792 - DNA, 547 bp, Heterodera glycines
attgctgccagtttgattcagttagtcacatgtttgagttgatttaagcctcataggccttgatttctccggaaaacttggaaaattcaatacaactctacctaaaaagcagatttcggtctgcaaaacaaacaaaaatatgaacaaatatttgttgtttattatttagcttgttttatctgtttctttttgttagttgttaagattttgttcgtttttaacaagtgtctttatattaatgttacacccctttttcggaaaaaaatcgtaaattttttttcaatcgtcatttcgccttctcgcttttcgaatcttaattttcagaattgctacttacgtaaaatttcagctacgatcggttcatgggaagtggtcaaactcataaaaaatagggtgtatttatattaatgttacacagtgtatacgcgcgttttttctctttttaaaatttgaaggtgcggccgcataaccgaaaagtaccaaagagcttaaaagcttatgtttattttgaattcttttactgtttttagctgcgatttttcaaatg

SEQ ID NO: 108793 - DNA, 1003 bp, Heterodera glycines
gataacattaagttaaaaacacgattatttaaaatcaatagtgaaatgtaaacaatcaataattaatatttatatcataatattgttaaataaaaaaataatttatatagattagcccccaaatgaacatgataaaattaagcattgaaatgtacaattaagcaaagcccaaccccgtggttaaaagtatttttttttaaattttattattactcaataaaaacaaaggacaaaataaattatttaatttttcatttgctttacacgattataaaataataaattcaacaatggaaagaaattatgtcagtaatttttttttgttacgaaacaaatacatttattacattaaatatttaaagataaaaaataaatatactttttaatattcaaataaatgcataaataaatgaactaattaactaaatttaaacgacgattacagctcagtttaatggaaatgaggaatacttatgaaaaatatgatattggaaacaaatgggaaaaaattattttaaagcacaattttatagaaaatgaaaaatgaccaatagaaacaatagacaaataaatttaaaaaacctaatccatatttgaatctttgttttaataatattaaagattgagtatatgacattagtttaaaaattttcatttgattaagcactatttttactattcaattattacacttataattgaaaacaatttaaataataaagaaaaatttacaaaaacaaaattttttgaaaaatcaaaattgcaatattaataaacagcgagttttgagcattttataaataaatttattcaaccctttccctaataaggaaattattaaaaaataaatgaagttagaatttattacaaccaaagtgatgaattctcgaaatatttaaaaaagaacaaatgataataaacagaatttataatagaatctcattgcggtggatgtttgttaaataagctttaaaagaaaacatttatattttagatataaatg

SEQ ID NO: 108794 - DNA, 549 bp, Heterodera glycines
aatttttgagtttttcgattttttcggtttttctcccctggttagaccgattctcttatccggtctctaattaactcaagtaatattatcaaaaaaaacttaattttagtcatttaaatgattttaaatattttgtaattcggataatattttttaatctagaattttttatcaataaaaaaaaataaaattttaactatcaattttgacaaaaattttcaattattagtagcgtattttaccgatttaattgcatttttacttttccattcaacatgcatttgaattttttcaaaaagcaaaaatattatgccaaaccaatacataattttcaagatcaataaatatcgtcgataaaataattaacaaaattttggagatgattttttgaaacatttttcatttctcagggggtgtgtttttgaaaataaacaaatttcttgtatctgaattttaattggataatctgactcaatccaaaaatctctcggttcgcctaaataactgcaattttatgattaattcagattttttaatatttaattaatg

SEQ ID NO: 108795 - DNA, 205 bp, Heterodera glycines
ttgttaaaatgatcagaatccccccaaaaaaaacttttcatggatgccatccattcaggttataatggctaacttaggataaaatttttaaaatttgatcatcaaaaactctattcgaagaccaggctaaaattacaacaattttttttgaagggtcttctatgtgagcagcgtgatttttgcggcaattcattgggtgacaatg

SEQ ID NO: 108796 - DNA, 414 bp, Heterodera glycines
ttttttaccccgtaatcgaatttttgtattatttttttgaccgaatgatatcacgcgacacattcatttatttttgcccaatttatcatcctcccaaatccatttttatcgtctcttctctctcactcaatgacggcgaatattttgttgttcgttcattcattcacacaattattttatttgcacatcgattttttaattaataaatgaattgctccataattagtaggaaccggatttgtataggttttcataatttttaattcgaaaatacaccccttaaaggtcaaaaatttttgaaaaaatccaaatctccaaaattaatggtttagaattttcgaaaataaatatttttgaattttccctaaatcgtccatagattttgactaaatggtccactttctccgcccaatg

SEQ ID NO: 108797 - DNA, 146 bp, Heterodera glycines
cggaaatttctttttttttaattttatttttcaaattacaaaaacgttttgccaattcaaaaagatttattttcgggtgccaaataattaatttttataattttctattttattttcaaatgaaataaactattttcagctcaatg

SEQ ID NO: 108798 - DNA, 248 bp, Heterodera glycines
  unsure (1)..(248): unsure at all n locations
ttttcagaaatcagaataattctncaatgtgcncaatttagnncccnccagccacagccccttgcttctcccagttntaagtcttggatttgtcaaataaattcaagacttcaaaataataatcaaaaattctcttaaaatttttttgaacncaattcaaaaaaggaaaaaaatttgcagtcaaaaaattattcgaatttctccaattttgtttccataatttccgaaagttattcggtatcataatg

SEQ ID NO: 108799 - DNA, 63 bp, Heterodera glycines
tgtgagtgccgtttgaaaccttatgccatcaaaattaagttttgccacaactttttcaggatg

SEQ ID NO: 108800 - DNA, 137 bp, Heterodera glycines
ttaaatcccttaaaatttagtgacaaaatgcatttttcaatgccacttgtaatcagtgcagaaaccatccgaaatcagaggcatttttgtataaccaaaagttgcgccttacatttggcattgtgggcattttcatg

SEQ ID NO: 108801 - DNA, 377 bp, Heterodera glycines
tttcagcacaaaaaatcaccgattaagcactgtaaacatcaccaaattatctcaaaataagtatgaaaaaagcacaaaaaaggcaacagcacaaaaattcgaaaaaaataaaaaaaacacaaaaaagcaaaatcagcacaaaaattggaaaaaacataaaattaagggattaaaggcacaaaaaattgaaaaaaggaagcaaaaaaaaaaactttgttgcttcctgattataaaaacctccaaaatagttgctaaaaatggcaatgagatacacttttcggattgattcttaggggtgtatttttcaattttattgcatatttgttaataaattttttgaaaatcgcttaaaatattttagaaaattcctcaaaatg

SEQ ID NO: 108802 - DNA, 184 bp, Heterodera glycines
gacagctttcatttattcattaatcttaaagtatttaacaggaaaaaatgattaatcaccgcccatctgaactgaaaatgtatataaatgacaaagacaaattacaaattgcaaaaaataaaaatgtttattgcccattcactctaattctgtcaggggccactgggagcggtaaaacccaatg

SEQ ID NO: 108803 - DNA, 600 bp, Heterodera glycines
ttgtgcaagtccccgcccccggccattgtcaattgttgcccaactcttttttatttgctgacattgggtcttttggccaactttagaaatataaaaaataaaaatcactgccgaaacaaatgtaaaaaaataaataaaatagttcacacattaaaaattaatatgttatttttatttttctcttttgatggaactgttggacaaaataaaataacagaatcaaattcaaatccaaagcggacaaaataatcttagccaatttcatttattaaccccaaaaagtttaatgaattttaaaaatccaacttaggaatgctcaaaaatttaataagaaataacaaataaacacaaataattagagtaattattgaattcaaaaacttaatttgttagtgcaatgggacagcccgggggaatggaatgggctgatcactccgccatatgctgaaggagaccgcccaaaggacctttaatcagtggactaataatactgatcactcgattattattttaataattcggagccaataattacccattgaattttttaaatttaattcaatgttttagacatatttttcttattattgttataaaatg

SEQ ID NO: 108804 - DNA, 1003 bp, Heterodera glycines
agaattcttacaaattcgggctatcgaatggcctagagaattaaaatttgcttctttcgagcaaagttatatgaaataatttttaatttgatgataggaaaagaagaaaatttcagaaaatttgactaatttttatttacgcggccggcggccgggcttctaaccattttaaaagttcgtttatttgtttaattaaatttaaaaaggaaaaccttttacttggctgctcaaaaaaaagtccgcataatactaattggttatgtaaagcaacgccaaaattaaaattaattagtgactccgtctggcattttgaaaggccccccccaaccaaggccaggacagcttcttcttttcaaataatttttcatgcaatccatatgtgtgcaattaaatttaatcaaaaccttttctttggtggtttctgtgtgtgtgccaatttaggccataaatttttcatatgaaatcctttaaaaaataaaaataaatttaagataggagtttaataaaatggataataaataaatgtttaatatttttatatattccattttatttcgacctacataccaattagagaacaaaaatttttgaataaattgcctctgaacattggctcaaaggtaatgaatgtcagtcagtcttatgcttggttggatatgctgaatttggcagatacgaagaaaaaaaaatttaatttactctttttatttgagagaaagtttcacattgggcatagaaaaacgaaaatggcatccgaatgtgccaaaaaagagtgccaattgcccataaaattcccataataaaagctcgactactgcccattgtttgtcatttcgtatttatacattcagtgcgcccaacttttgtcattaaaaagcttttggctattcacaaggatattttattcactggaacgcgcctattttctctactcatgacaaatttcaaatgttttataaaattaaggataatcattttttaaatatttccaaatttcgaaatg

SEQ ID NO: 108805 - DNA, 116 bp, Heterodera glycines
aaatgcaaatatattaaatgaaaattttaaaaaaatttagccacaaacaacaataaaattgcggaagaaattcaaaccatggaagggtaaaggcatgaaatcagctgcttattatg

SEQ ID NO: 108806 - DNA, 692 bp, Heterodera glycines
aaaattgagcaaattttccaaaaaattattgatcaaatgctttctctttaaattgttcgtttaatgggtttcgctgataaactgatcaaattttgcaaaatttgctgcagcaaaattttttaaggtttctttgataatgtgaattctttaaattgttcttaatgggttttggcgataaagtgatcaatttttctaattttgtgctttcatgtgattgtgcattggcttgacaattataaaagggttaatttttcttaaaaattatatttttataaaatggctaaattaaaaatttttttttttgcatttttgattttgtcacaaaatttgacaatttcaaaaccaattcgtcgcaaagaaagataactggggactcttgcggctattgcaattatttcggcaattgttctaactccaataatacttggttcggttgcaaccggcattgtatttggttatactttaaaagatggaagtggtcgtgaatgtatgaatataaatttaaatttaaaaataataaataaaatgataattaaaatattaattaataatttaaaaaatcaaaaaatttgttcagataaggagtacctcaaacttttttccccatcaaattttcgtttggcgaccgcgaaatttcaattgatttggaaaactttaacaatgaatttttgtttcgaaaaattggtgaaatg

SEQ ID NO: 108807 - DNA, 205 bp, Heterodera glycines
aaatttcgcaatttattttttatttttttgctcacaagcatacagaagttgcctgatttaaacaaattaatcccctagtcttagtgattttatcccgcaaaatcccaaaaaaatttctgtttttattatggcataaagccgttttgtgcctattatcccactccccttttagcttctcgataagaagacatttcaaggtgagatg

SEQ ID NO: 108808 - DNA, 483 bp, Heterodera glycines
atagctagggctgggatttttatgtgctaaaaatcctgaaatatgtaataaaatatgtactaaaaaacccaaaatatgtgctaaaaaccaaaaaaaggcctaaatatgtgttaaaaaatgcaaaaatatgtgctaaaaattggaaaaaccaatggtatttttgcataaaaattccaaaaaactcattctttatcatttttgcccgcacaattgcaaataaaaaacatttggaggtgtttggggtaaaattagtccttttttgataaattgtttttaaagataatttttccatcagttgagtaccagcaagaaacttcgatatccagtaacgaattaatgaagaattcgattttcggtacacgaaataaataaagaaaattttgaaagagcctataaaaatggcaagaaagttgatttttagtggtgcatttttgaattttttatgtttttcttagatatttttttcaaaaatgccaaaatatg

SEQ ID NO: 108809 - DNA, 144 bp, Heterodera glycines
ttccggagagatcgcgtctcaaggcatcgtcgacgccttccgttgggacgcaacagacgggccaattctttgattatttgtaccggtcaagtgggttaacattgggagaccctttatccgcttcacctttctctcccagaaatg

SEQ ID NO: 108810 - DNA, 224 bp, Heterodera glycines
ttaattttaatgcataatttttaatttaaaaaaaagaaaatattaattttaaaacataatttaataaataaaaacgccaaagagcatacatatactgttcacagattatccaaatattttcaaaaccgaaagattgaagaaatggcattttacataaaaataggttgttatcaatgtagctccatcaaaggaaacatttccgacaaattgttctaccgaaaatg

SEQ ID NO: 108811 - DNA, 326 bp, Heterodera glycines
cctgcaaaaacaaaaaaaaaattaaaaagagttttcagatcgatgccgattttgatgttttaaattaacatattttgccatgaaaaaatttaaaaaataaagccaaaacagcagatttctttatgaaatcataaagtaattaataaatgatttgtttaaaaaagaaaaaatcaagacaaaaaataaatttattataattaaaaaaaagtcttgcactaacttgatcagatcattcctttatggtgattgtacacccaaaaaacattgaaaattgggaaaagtttaggaaaaattcctaacaaaggagaggtacccaagtgaccatg

SEQ ID NO: 108812 - DNA, 54 bp, Heterodera glycines
aatcttaaaaaagaaaagagcaaattacttcgcattaacccattaaatacaatg

SEQ ID NO: 108813 - DNA, 1003 bp, Heterodera glycines
aaatttattatttaaaatgataaaaataaattgatcttaaactgtggtacgtaaatattctttaataatattaagaaacaatcgatgcttagccaatttattaatattttttcaacctatttctgattttattcattaatgtgttttttaaattcaaaaaaagattgttcaattcttaatgtttacgccgtttttgagtcaattaacaaaaaataaagtgacgcattttggggcgtcggcggtgccgaaaggcgccttaatttatctggctattattctgtgcatttcttattactcattatgtatccaattcctaatttttgaactttctaaagaaatggtgatgtaataaaacaatgcgtggaaacattgattaattaatagtgcttgaacattttaaataatttttttttgcttcaatttaattatttgcattattcggacttcatcctagcacggtttgtttgaagcggtgctgggacattaatcaaaaaccatgaaaatgggcgtgagacaaaaaaccatcaaatgggaatttttgattttaaaattggtttcttttgagaaagttataccaaaaaatattttcatttgatgattttttgactaacttcatagcatctttgaagcacccaattatagaaaattatacagttcaaatccgaaatataagtctggtggataagtcagtgcgtaacacggggcagaaatatcgttactttgatcgggattatggccaaaaaaaaggataaggaattttattttttatttccccacaaaaaaagctccaaaattataacccaaatctttaccttaaaaacggaaatatgcttatgtattcgtttctgcttttttttttacaaagcgtggctttttttgccatgtgcaaaattaatcaattcaccattatgaataaaaaattatttacacaatttacaacatttatatttaaatttttattaataattattattacgatttttttagaaatttttgtaaaatg

SEQ ID NO: 108814 - DNA, 221 bp, Heterodera glycines
attaaaaattcagtatataagtcgatacccactgctatccagtggtaccaaatttatacccactttctgacttacagttcgcgaggtttccttgttagctaaaatgagaaattgaataatttaggctaatccttcacatatatttggaaatgaaaacatgaatgtttatttaggcaaagagcgttctccgctttgaacgtgaggttgatcaaattcaaatg

SEQ ID NO: 108815 - DNA, 388 bp, Heterodera glycines
atgccaaattccctcactttctctttttaccgaaaatgccttcgattaccctttttccctgtgctttccttttctgtttaattcatttatcgattgtctttgctcgccttcgttcgtttgtttgtccatctgtcctctttcactgatttcttcttttgaccaacttttgcatacctttcttttcgtttaaatatgttggcataagaaatatgggtatttttgtcattccaaaatgttcttttttgtttaaattgataaattttagggaatttctttgttggtttaaattcaagttaatttttcattgtaccttttcggatttttaattattcgactaattgtaattggagtaaggttaaacgttcccattgcctttccattaaaaatg

SEQ ID NO: 108816 - DNA, 286 bp, Heterodera glycines
ccgttcgccaatggatttctgacaacagcggaaacagtcacagctggcacatcaatgccatcatcagcagaagctgcagcagcagaaagggggacgaacggagggacgaaaaagagacagccgaagggggaggggaaaagtgagcaaaaaaagggggattaaagggaaggcgggattttgattttaaaagccaacgaaagcattgaattgccaaattttgaaagggagcaaaagagcgacgcagagatcggcacaacaacaacagcagcagcaacagcagcaaatg

SEQ ID NO: 108817 - DNA, 585 bp, Heterodera glycines
tgtaggattttgaggaatagtttttttttaaatttttgattcaaatttactattttttttgcaatttcctttggtcgattttcgaaatttctcgggctttcggttttggtttagggcaaagctgaacaagtcaatttgttatatagtatgtagtatctgtgattaggtccaaattaaaattggatccaggattcaaggacgccttccctgaaggcacaaaatctgttgttcacccaaaaactcaaggatttccctgaatgcgtaaaacctattcaccctaaaacaaggaattcactagtggcatgaaatccgttcacctaaattcaaggactttggcaaaaaaacctatccacccaaaactcaagcactttccgggatgaaacctggtcaccctaagggaaaaataaaaatttccaaaaaaaacaacaattttttattttgcacaaaaatagggtttaataaaaatgtcaaaatggcgcagtgatcaaatttaaaaaaaatagactaataaatatcggctcagtttcagtaaatgtgatcggttgccagtcagtgtcttgtgtgatccgcaaatggggcaacatg

SEQ ID NO: 108818 - DNA, 463 bp, Heterodera glycines
tttcaaaatttaaaattttcagttctttttctgcccggcatttaaattctttttcctgctttttgttttggccgacctccagaattttggttgttgacaaacgtgctgagccgaagcgacaaaaatatgggtgtttgtaataattaaatttaattattattttaattttattttccaagtaattaatcataacttagcttaagcttagtcaaattaataaaattaagtatttagcgacagctcgaagcatcctctactatttatgaaattttcaaaaaattagtaaaaatttacaaaaagttgtgactaaaaaagtgcgaaaaattttgactcaacaattttgaccctagctttcttgaaattcaataaaattttttgaaatttagcagaacaatagagtaatctttgggctatctaattatataaacaaaattaaaattgattgttttagaaaaaagttatg

SEQ ID NO: 108819 - DNA, 195 bp, Heterodera glycines
tcagagtcgcgggggcgggggtgagaaatttctcgcccccggggacgggggcgggggtttgtttttaattagctccaaaaaatctcacaaaaatttttttttgaatgatgtgtttggctccacattcctttattcgatgtatcgcctcgattcaattcttttttggtataattgcatagatattgtctaaaaatg

SEQ ID NO: 108820 - DNA, 618 bp, Heterodera glycines
ctagagaccggcgggatcgggactcccgcgggattttacgggagtcctgctcccgactcccgcttttttcggtgaacgggatttttaacgggagcgggattttaacgggattcccgttcgggactcccgtcccgtaaaattttgaactcccgatcccgctcccggaaatttttttttaccggtctctacaccctgcttttcatttatatttgctaaaattgcaaaaatatcaaaagtgctaaaaagtagaaaagatgctaaatttgtactaaaaacccgaaaaaagtgccaaatttgcgctaaaaacccgaaaaaagtgcaaatttttgctgagaaaatgccaactttgtccaaattaattttatcaatgttatccacccagctagaccgcacttttaatgaatagtcggaggacaatcctcggccacaatgtgggcaaaaatgtgcggacggatttgtggacgatttgtgcgactttttcgtgcccttgctcgccgtcgtcgtcgtcatgttttgttgttgttgcgttttttcggtgcccaggagtgccgtcgatgactgtgccggtggcggtggtggtgccgttgagctgcccgtggggccaatctgttgcaaatg

SEQ ID NO: 108821 - DNA, 443 bp, Heterodera glycines
tttcgaacaaaaccgaaatatcacaaggcaatcaccactgaaatagcactgataaaaaagataaaaaattttgtatcgaaaaaatgagagcttttgaccgtaaaaaacataaaaaataacagaaacaaaatgccaaatttaatttatacgagattttctctaaaaaagactggcattgagaaaataggtaaatagttcgccctttgacccattctgtcacttgtacttttcaccatttttttgttatttcctccctttgttatttataaaaattgaaacactaaaaccacaaaaagtcaggatttttgtatatttttattttggtcaacaaagaaaaaagttatgacgctttaaacctggctcagacgcaattggcccgtttcgtgtgccattgctcatctctcaattttatttgattgattagatattttaagatagaaatg

SEQ ID NO: 108822 - DNA, 74 bp, Heterodera glycines
ttcatttttggcttagaatccaaagtgtcgaaaatctgcgagttgccaatggggaagaagcgcaacagcaaatg

SEQ ID NO: 108823 - DNA, 247 bp, Heterodera glycines
  unsure (1)..(247): unsure at all n locations
gccaattttgcaaaaacttacgacagttttttacgatttggatgactcgccggagaatcacgcgtntaaaattaaaaatntaagaaaaatattatccattttcaagaattatttggacaaaataatcaatgccaaaaaggcgaagagtgaccgcgtggtttttgcggaattggcaaaaattattggaagcggcggcgactctctgccggcgaatggcaaggaaacgataaacgacatcaacggaatg

SEQ ID NO: 108824 - DNA, 330 bp, Heterodera glycines
acttaactttttttttaaaaaagaatttcaaaaaatattggagggtcgagggagatttttataaaatttttccattggaattttcttattaaaattttttcaaatttcttgaaaaatttctgtttgaagaattaaaaatatatgcctacttctagaatatcccttccccgtggtaaatgtccgccgagagcgtcccgttttcactgccaattctatccaatccagcgtattaaaggtatatttcacaaatgggttttttagtaatttgttcctcctcttatctcttacctaaaggtgctcaatgattttcgtttttggtcctaccgaatg

SEQ ID NO: 108825 - DNA, 112 bp, Heterodera glycines
  unsure (1)..(112): unsure at all n locations
atagatttatttcaggaatctatatttggatgttcacgctaaaaatccctatnttgagtgctgccccctaaaataatttttcncccttattttggcatttctcnttaaaatg

SEQ ID NO: 108826 - DNA, 231 bp, Heterodera glycines
ggtaaaaggagaacgaggaataacaggaccaagcgaaagacgaggacaaaagggaatcggacattggactgaaaaagagggggccaaaagcagaaaaagaaattctaattcactaattaccccccccccccttatgacgacccttttgttcgcgtgttgtccatcaaacgggccgagtacagtccgctcaatgcccacttggactctcaacgcatcggcagcttcgaaatg

SEQ ID NO: 108827 - DNA, 684 bp, Heterodera glycines
  unsure (1)..(684): unsure at all n locations
tttttcgcttgaaaaaatcattatanttaatctgcttaagttttttcttttggaaaaaatattcttttgttaaaatttttgattaattattaagtaaaaaaaattttcatctctttttctcgtgtttttagggcgtctcgtcctcgttttcgtttttgatttttcttctcgcaacatcccttgaattctattataatttcaaaatttttgattcctgtattgacttttcaaattgcctccagaattcgaaattaatcaaaatgaatgtcatattcttgatcaagggcatcgacagtatattaaacgagaaatattttctaatgtctctcatgcgaaagctttaaaataataaaaaaagaattcatttcattttccaattcatcttcattaagggatgttctgtatttgggacagtgacaatttttttttatggttcataaatcattttttggcatagtgtcaaatttatgtagaatatataaaacgacttttgactacgaagtgcattttgacaagtacttgcgatttttataacaccacacttcgaacaatttaccaatgaacaacagaaaataaatgaaagtttagtcgctgcgtattagaattaattcaagattttttcaaaatcaatttaaattatttaaattcattttataagtttccgtcgacacattcactcaaatg

SEQ ID NO: 108828 - DNA, 52 bp, Heterodera glycines
ttttctttgcccgaattagcccatccaacgaacatttacttcttcacaaatg

SEQ ID NO: 108829 - DNA, 453 bp, Heterodera glycines
gggtccgaagttgtatgcactaaaaaatgctaaatatgcgcataaaaatatgcactaaaaatcccacaaatacgcactaaaaaccgaaaacgccgcaaatatgcagcaaaatatacttaaaaaattgccaaaatgacttttaactaaaaaaatgccaaaaattgtttaaaatttagcttctaaccctagtgataaatagaaagtccgaggcaatagcgggtcctaagccccctctattgtaatatatgaattgaaaagcttaaaatattggagatatcaatttattgctttgtatttctccagactcttcttccccctcaccgccgcccctccccaaaacgcaaccgcccgcttcgacgccgtccagcgctggcacagaggaagaagcggaaacggaggaggaggacgggcacaaagtgcgccgggaacggcacggctcaaacggcaaaaatg

SEQ ID NO: 108830 - DNA, 1003 bp, Heterodera glycines
tccataggtgtcggattatccgctagtgccggattttccataggtgtcggattttccggctcccgggaatttaagtcattaaaaatcttcaaaaagtcataaaaaacgcaaaaaagtcacaaaaagtgcatgttaacttggtaaatcggcactcgacttttaatacaaagagagggttttaatgaaaaaatgtaaaatattaacttactataacataagggtgaaaaatgccaaaacaaatggtaaaagttacagtgcattttttcaatgaaaaaaatcagggctaacaaatgatttcaattgaaaacgaataaattgcattttctttgaatttaagtaaaaactaaaaattgcttacattgttgaaaaaagtttttgtaattatttaagaaaaggttcgatcgccaagaactttatactttagcagaaaatttttataaattttaaaatgacttaaaaacgtgaccggaaaatcggtcagtggaaaatgcgtcagtggaaaatgcgtcattatcattttggacaagaatttttaattccattttataaaaaatgaatttttttgccatactgtaaatcacagttacatggagccagaacgatccacattctacctgagttttctggcattttttaataaaattttaaaaaacaattcttttatttaatttaaaaataatttttattcaatggaataattctctttttggatctttaaaaactttaaataatattttttatgatatatttctcccaatttaagcataaaggatttgtccattgttcttgcccaaaaggtcaacgggaatgggggagggaatgaatgcatcaaaatagcacaataattgagaagcatcgaaatagagcaccggtgaagaggtagagagagtggaaaatggagaggggaaaagtgaggagagaaaggagagggtgacggagtgacgacgaggaggaaagcgttggcgaggaagaggggatgaggaggaaaggaagacgagaaatg

SEQ ID NO: 108831 - DNA, 110 bp, Heterodera glycines
ttgagtgtgagcagaaaaagagatagacgttttttcaaattttcagagccaaactcgcccagaaagaaaatccagaaaaaatcagggtcgtcgctactattccgaaaatg

SEQ ID NO: 108832 - DNA, 129 bp, Heterodera glycines
gaaatgtttctttataaaaaagtgttttgagagtccaataaaaagtttatttaatacctacaaataattatttcttataaattggacactataaatatagcaccaaattttggaactgttcccaccatg

SEQ ID NO: 108833 - DNA, 824 bp, Heterodera glycines
tcagtggcgaaaccgcggacacaagagggcgatggtcggcaactcctcgttggcgcgggcgagcacgacaacaattcgggaacgaatggaatgggcaagacaggggattcggaacggatggataattttgatacttaccgatgaaaatagtttagaaagaaattatatttgacatattttaaatattaattgtaaactcaattaaattttgttgcattttaacattcaacaaaaaaataaaaataaataaataaaatgcaacaaaataattagtaaattgtcggggacaattttctctcaggaggggaatggtatctctataattaattgtacattagatatttcttattttctgactgtctgattttgttagtgcctctgatcactctgatcaactttaactccgccccttctcgtaatgtggcccatttcctagcgatcacctcaattcattcttataaccgggatcacatttaccccgatcccctccccttccgtcctgtacggatcggggtccctttcccctttttactcattacattagcatattgtatttcttggatccgccttcggaataaaggacattattccatgtgtatactattattgtacggggaaattagggcccacaattagaacggacattacatagaaatcaatactaattaaatttttactattttgtttggtttctttttttgtgttttccttattaattaaggtctaattagttctgtccccaaaattagtttcttttatttatgcataaattgtggctttcaaattcgctttgctacctgagcttgtactgctccaaccccatg

SEQ ID NO: 108834 - DNA, 143 bp, Heterodera glycines
tgcgtttcagagcactttctgaaaaaatacttatgccccccctgtgcaaaaaataaataagtaatgaaaaagtcagaactttgaaaaattttaaaaacaacaagcgttggcattttttcaggttaagttagtcctttacaatg

SEQ ID NO: 108835 - DNA, 1003 bp, Heterodera glycines
gtgtagagtgtagtgtagtgagtctctacactatagaacacacctacactctacactatagaacactctacactatagcatctgtaacatagctgcaatggaataatagccaaataatatgcagggaaataatgcatagctgaatggaataatagccaaataataggcagggaaataatgcatagctgaatggaataatagccaaataataggcagggaaatattgcatagctgcaatggaataatagccacatattaggcagggaaataatgcatagctgcatggaataatagccacatattaggcagggaaataatgcatagctgcatggaataatagccacatattaggcagggaaataatgcatagctgcatggaataatagccaaataataggcaagtaattaatatgggatgatcaaatgcgttgtacgtagatggataataccagatttagtagcataaaacccaacatatgaccatataaacatatgcataggttttatgccacaaaaaatgtttttttccatggaggtatttcactccagattcgcagcacacttgagcggcaccagcacctgaagtttaaagtttagggagatttgaaaagtaaagaataaataaatatataattaataatattttccataaaaccccatattaactttaaacatattttgtgcgtgtcttaaaggttagtaatttaaatttaacgccaccctgcccacttgaggaatagtgcactttagaatggtgtcttaaaacagaaaactaaccaacaaaagaaacaaagcgccaacaaaattaccaaaaaaagtaaacaactaaattttaaaatattgaatgatggtggttttaaattatgtcggtttaaacttataaaattttattaaaagcaagtcttagcatttctaatcataaataaaattctgtggcaaaggcaaactcggcaattatcgcaaaccattcttttatatattttttgaatattagaaaaaaatg

SEQ ID NO: 108836 - DNA, 187 bp, Heterodera glycines
tcttgataaataaaaaaaaatcaaattccatcggagaagtctgctagcaataccagaaacctattctctttttaaaacctaacggcccaaaaaaaatctggtccctatttcgagtcacggaaaattttccgtgtccaacaaagtctgtattttgattgaaaaatgttttttacagctctctctgatg

SEQ ID NO: 108837 - DNA, 114 bp, Heterodera glycines
attttccaaatgataaatagggaaatttttttaagcaattttcaagattgttcattgatgactttttgagttaaagcgaaaattccgattcattttcagtaccgaacacacatg

SEQ ID NO: 108838 - DNA, 62 bp, Heterodera glycines
ggcacaaattatgcaaaaagtgaaccaattaatcatttcttccgccccaatttttaggaatg

SEQ ID NO: 108839 - DNA, 370 bp, Heterodera glycines
tcatataaaaaaacaattctataaaatcagttttagtatcttcttcctaataataatacttttcttcacatttgtttcgatttgtgaataaatatgtaataccgtacttcttcgattatagcccccgggggctctattgtttaacccccctcaaaaggggggctttattcgagagggggttctaatcgaggggggggatataatcgaagaaatacggtatttttgataaaattgtttatttgttaattatttgcaaatgttttctgttcatgaagactgaattaggaagagtgaaacattaaataatgaccggggtatttaatgcacacctttttaaaaaaaaagttaattaagctgcagtttcaacatg

SEQ ID NO: 108840 - DNA, 985 bp, Heterodera glycines
  unsure (1)..(985): unsure at all n locations
aaaaaattttaaaattattttttttatggtaaaattgacgttgctcacggatctggcaaaaagattgtttcttttaatctctgactaacatctgcaatgacttctanncatttatacaatagactaatctttgaacagcagcgtcgctgattttatgcctttttcaatgggacttaattttgtatgtcatcgaaatggatccgatttaatctaattaatgcgctttttaaagttttgttttttggatttgtcttgttattttcttttttccatcattagacgattgtcgcaagattgagcatgcgacagcggaggatcgcatgcgaatgcataaccccgaaccggcacgagcagcacaggcaattagcaattacatggacgagccggaaagtgttctgttcgttgcaatgtcagacaaaatgaatttataaatggcaataaatattatgcaaaaatgaagttaaattttaattgattattttggcagtcatttaaaatttaatttaaaaatttagtttttttatcttaacagaacagcatatgatggcagtgccaatgtgattgcgtgttgtcggttgaaattgtgccaaaatggcaacacaataaacggaggaccatttgcgcagattggcccttttgcaacattaataggctaggctggtttcgttgatttgattgtttcaattgaagataattatttaattacactaactaatataaattataaaaatttgtgaagggattttaggtgctaaaaagtaaaaaggtacctaaaaagagctaagaaaacgccaaacagatgctaagaaagtattcacatttttttaattaaatgaattcctgctttactatttctgtaaattaaatttttatttcttttgaaaaaatgaaaaatttccttaaatacaaaatttaaaaaataattattttttctttaaaaaatttctattaaaagccgaatagccaatttagctggtagttaatg

SEQ ID NO: 108841 - DNA, 188 bp, Heterodera glycines
tttctgcgcacctttcaccaaattggaccgtaccatccaccgtattcgagctgacgtatgaatcaggcaaggaaaatagaaaaataaattttatattttttaaatttaattttatttttaaattcttttgttttaaatgtttttccaaatcagaaccattattacacaattaaaactgttcaaaaatg

SEQ ID NO: 108842 - DNA, 608 bp, Heterodera glycines
gaccctctcccctcgcccattcctcagaagttttttgggaaaattacgccgctaaaaaattgcattaaaatttacgatttgctaatttcctccccaaaattgttaaaatcgttaatgggaggtgaaaatataatatttaatacatttttgattgaataaattgtaaaaataactgttttgaagcaatgaagcaaaatgtcctgattttcgacccaaaatctgattttttgggctcgatgttctgattttgaaaaattttcgatcgcatccctgatttaacactttaccaatatttttttcaaaaaaaataactgtttaaaaaattttttatttatattttcgtacatattttaaggtttttatatatatttcttacatatttccggaatttttttacatatttatgtacatattttgaccactttttgtacatatttttgacatccctagacataattgacctcaagactgaaattgagtccgagactttttgagatatttgagagcccgagcccaacagaacagttattaaaaatgcgagcgaaatctcgaaaacagtttgtcagaaagccaaaatttgtgatttccaggacagcgttaagcaaatg

SEQ ID NO: 108843 - DNA, 195 bp, Heterodera glycines
tgttcaatctgcacagtggtccattggtgaagctaacgttgaggacactggttaccgccttgatggattagtcacacgagatccacctgaacgggaccttgccattgagtatatgggctgcttttatcacggtaaaaaaaatgttattattctttttctttaattttcataaaacggtgaaggctgtccaaaatg

SEQ ID NO: 108844 - DNA, 1003 bp, Heterodera glycines
cactcctcccctccccccctttccccctccgccacgccattttctccaaccaaaaaaatttcccacgcaaaaatggttggactcaaaaattcattcattgagctccgtgcttctggcagaatagcatgcgagtgactccgaaaagcttttgagaaatggcaaaaattaaaagtgtcaattttggcatttaacagataaaatcggagtcaaaattggcatgaaattggttaagcaattgaagtagaaaagctgaaaacggcgccacagattttatcagaatccagcaattcttcagcaatacttcaaatgtttttgtttttgtttctgatttgtgccgtccgaatcgggcatttctatgccaacactctcaaaaagcggtgctgctgaaattggatacggctcggcgtccgggccaatttgtgccatggcccttcccactccctttttgccctccccatttcccctcccccgtcagatttaatattccatcccccggccgcaacctctccaaacgagtggtaatttgccccattctgcgcccattcccatcatttacacgcctctttcgcattattctcatgcactcgtcgcctttgtaggattttctcggacggactccgccggcacacaaaacccttaggcagaaacaaaaattgggggggaaggaacgcggcggcattcctccggcggcgcattctttcccccgccccgggggcggcacagttcagcatttgtcgggcacagaatttgacaacctaaaggaattattcgtgcagcaaaatacgtcggaagttctaaatcttcggccagcatcggtccctttccattcgtcggtttttggcgctttttcctttcgctgtaaaataaaatgccattttgggaatgggcagaaaacaggcaaagaattgagtggacacctgattgagaattttgtacattaaggcattccccaattacccttaattactcttaattaccctttcgacccctccccttcaaaatg

SEQ ID NO: 108845 - DNA, 422 bp, Heterodera glycines
aattaattaaaccagatgttgcgtgcttttttgcttcaaattcaattggacaaagtgggcaaagcaaagaaaatgtcatgtttgttactgttgcgtacagagattggtcgagattggaaagtcccgcgacgctcgtgaaagatcagaagggtatgaatatgatttaaggcaataataaacgaaaaaataggtataacaaagcacgaagcaacacaatatcattcacaatctgttcaaatggccgcacattttttcgcaagtttttgagagaaagcgtaaaggaattgacgccattgtcaataatttgcaacatgaacaaattgaacgaaatcggtacggcattaaaattaaattaatgatttgaaataatatattttcattaattttaataattattttatagtgaaatattgcggccaatg

SEQ ID NO: 108846 - DNA, 68 bp, Heterodera glycines
aagaccagccaatccatgtgcgtgtggcagccaaaggggccaaaccatgtgccaccggcttcatcatg

SEQ ID NO: 108847 - DNA, 664 bp, Heterodera glycines
aggcattcactccctttctgccatttgctgacatttattgggtcgttccgcctacgaatctatttgttattattgttttacagtagtgcaatgattgagtctaatgtaagcaattggtaaaaaatagggcatcagtagggtccccaattttcgtaaatatatttttaaactcatcctgactgaatttgaactaaggtcgaaaattccaaaatttgcattttacaccaaagctcaaaaaattgcgaaaattttaacttaaacattttttcttgaaaatgagacaagccctactgtctcggaatattgcattatttttatttcacttggatatttgtgcttttattttttatatttatgagagtacagattaattgaagtgaccttttttgagaaaccaaaattcctgtgtaataagtaacaacaaaatattattattccttaactatattcatttctgtaccctcaatttgcgatttgttgcaaaaattgatagacattttatttatttatttcgaaagagcaggtaagtcatgcttttctttcttttcttcctttccaagtaaaaaacctatatacttttatatttttaaattttatttggctttttcttataattagcttctttcttttttttttttgctttattctgttggctataaagatg

SEQ ID NO: 108848 - DNA, 567 bp, Heterodera glycines
gatagcgacaaccgacgtatattgcgacaccttgggcgttggtcgtttatcttttgtcgttcgtaattgtgattggcccctgctggggtccagtggtgccgaaacacgctgccgggaacacaaatcgtctcacatcaaaacgagattttgtttcggtacgagtttaagagtggaattagcacgaacttagttagaatttcatttgtttcggccttcaacttttattgagcttattgtctctacatagaaatggataaatactataaaatgtcattagagtaagcagacagttaaagtgtcacgcaattttcattttgaatctgataaattatagcacaaaaaaaactcacacgctaaatttctctttttctccgttatccaaatgaaattgccatatcatattttataaaatattttactaaataaatctgtcaatgaaattaattttcgatttggtgcaaaaataatttcaaggacaaaatcaaaaaaaaattgttgcgatttggccaaaaatgctgattttattttttaaaattgtttattagatatttcatctatttgaaaatg

SEQ ID NO: 108849 - DNA, 336 bp, Heterodera glycines
gggcatcgatcaaatcacagatccttatacatataaccggactgcacatttaatcaactcagacatatcttctcgtggtccgccgaagtaataattaagcaataagatgggcttatttactgagtaaatgatccgggtttttagtcttttaatctggggtttgttgttttaatttcgggtttcctggcctttttgcatgcgctttcgatgtatttcgaattagttaattgatcaacatttttatattatttttagctctttttatcgttttaatctttgtaaaaaaatttttttttggttgatagttctttaaaaatttcagtgtaatttacaatg

SEQ ID NO: 108850 - DNA, 226 bp, Heterodera glycines
ccaatgtggcccaaattttaggcccccagccacagccccttgcttctcccagttttaagtcttggatttgtcaaataaattcaagacttcaaattaataatcaaaaattctcttaaaatttttttgaacccaattcaaaaaaggaaaaaaatttgcagtcaaaaaattattcgaatttctccaattttgtttccataatttccgaaagttattcggtatcataatg

SEQ ID NO: 108851 - DNA, 180 bp, Heterodera glycines
ggtgaactccatttctttggttgtcctttttgccatcaaacggacctttttctttaggtgtccaaggccaatcattgctcccgaattgtttggaatgtccttccgcgcttcgctgctgcgattactttttccaaaagaatcggcgcggttggcgagcagcgatcgcagtggtggcgaatg

SEQ ID NO: 108852 - DNA, 156 bp, Heterodera glycines; identical to SEQ ID NO: 106092

SEQ ID NO: 108853 - DNA, 272 bp, Heterodera glycines
tgtaatgactaatcgatttttacttaaatgcctcgttcggtctcaagaaatatgtaaaggataaattaccaagattcttctcttaaattgggagaatattctatgcgtttcccatggaatgattagcaaaatgaggacaaattattataatcagaaaccatttgtctagaaacagatcaattatccccaaagcccaagtcgagagtgtcccactcgctatcgggcattttcattttccgttgctattgtccccaaaagttgccgccccaatg

SEQ ID NO: 108854 - DNA, 78 bp, Heterodera glycines
agtacgaatttaatagtaaaacatttgattgcttctttctgttagcattagtgtcattattaaattttgagagaaatg

SEQ ID NO: 108855 - DNA, 450 bp, Heterodera glycines
tttttgaacagaataattggcttaaaaagagtaatggttttacgcaaatttttataaaagcaatgagcaaaagaaaacccaattctcaagtaattttggatttaaaacgactttttttaaatagccacctaaaagagacacgaaaaaaggcatctaaaatgcatgaaaaggacaaaaagtagggatgtgcgagaagtgatttttactgggaaccgagaaataaccccggaaacgataagagatccaaaaaccgagaaatttctcgactcggaaatcgagaaatttaaatgaaaagaatccaaataaatcaaaaacacattaaaaatggggtagatcaaagggaatttttgcgtagaagtctcagaagtctcaacattaaagtgacagcgttttttgctgttaaaaacgctttttgcacactttttacaaaaaaaaaacttgggaaacatg

SEQ ID NO: 108856 - DNA, 322 bp, Heterodera glycines
aatatcacaatttaaataacattcaaaaattcattctaacggtcacggtcacaattcacggggctattcacgggttttcttcgtaattgtcgcatttttataaaataaataattaaattaattattaaaagcttggaattattgccgtcccacttaagcattggtcgatttcaccagggacttccagtcgttgccgactttccgcgaattggctttgctcaacatcaatgaacacaataaccaggaatacgtaagcaaaatttaattacattttatttattaattactgattatttcttgactacaggtgagtcaggtgatg

SEQ ID NO: 108857 - DNA, 672 bp, Heterodera glycines
tcgactctaatgcacttaatgagtcccaatcaattgaaaataccggctgcttatacaataactttgttcatattcgaacaacccctatctttttggtagcattcgaaagcacaaagtctaacgaagctaaaatatataaaatctcatcgtttaggcaattacgaaaaaagagctgattaattaagtaattgctgattattttcgtttgtaactttcttgaaatgttaaaattctattgttttctcatattattacattattcagactttgtgcttttgagtgctaccaaaatttaggtgttattcgaatatgaaaaaagttattacctttggactcataaaagtcaattagactcacaaagtgcattagagccgaaaaatcatgggagcgtgttctgtgcttgaaccaaaacataaaacacgttggcatccacctttcaggtacgttgaccacactgtgctagcatttctccgttccaatcagcaaatttgggacaaaggcaccaaattggacttgcgcatgtgcccggacgggccttgggatgtttttgtccgccaaatttggcccctttttgaagcaaacattcgcaaattgcacttttggagtggttctcatttggacaatttgcgtcgtctcatttcgcccacaattctctccgacctcaatcccatg

SEQ ID NO: 108858 - DNA, 994 bp, Heterodera glycines
actgattttcagattttgattttttacaacttttttggcttttccttcatttgagttttgaacacatattgaacaaatcaaaattatacaaaaaattattgccaatttaaaatcctttttgatttccattttaacaaaccttaaataaaaaagaagctgcttcattttttcatattattataattaaaataaaatggaaataagaaaaaaattctctaaatggaaattggaatatcaataaaattgatttgcataaatttctttttttatataatatgattattaaataatatttttaatgtcttgtaattatcaggcatggaattattacgcaaatgcctattttagccaattgtttcatcgagagaagcatcattttgtgccaatttttgccaagtgcacctttttgtgcttttcacaaatgcctcaacaaatgaaattttttcgcactaaatttttttttaaatactcttatatttttacagacagaaaatgttttttatttattttattttgaatacaattgaccaattttttgaccgttcttaaattgctgattttgaaatacattattgaattcaaccattttttgtataatattgccattaaaacatggcatttaattcatttatatttaattattggtaattaccataaaaactatgccaattaacgaattatggataattaatggcttttttgcttttcttctcgtttagactttacacctgaacaaacattatgcattccattatttggttttcggagcgattatttgccaacaaaaataataaaaaacgattttttcgctccctccagcagctgccttcaattcatagcagaaacagctaaaaaatcaaacgtacagcagtggccaaaatggtttattaggaaaataattaacacgcgaaaacgtaaaaaaatacaaaaattattttagataaatatttttatttaaattaattttgatttaaaaattgctctaaaacatatg

SEQ ID NO: 108859 - DNA, 183 bp, Heterodera glycines
atagttaattttttttgttcgcaacaataaacaattttggccttcggcttggtagggtgagcaagaagaaattggggattttgtttattgcacagaaaaataatttacaattaatttggtgaagggaactttttgtattgggtgaaaaactgttgctgaacgggggaaattcgacgagaaatg

SEQ ID NO: 108860 - DNA, 88 bp, Heterodera glycines
atagttagtccttttgttgaatttttagaaattttatccatcaaatcggcttttggaattttaatgagtaaatcaggaaccgtaaatg

SEQ ID NO: 108861 - DNA, 138 bp, Heterodera glycines
gaataagccgttcaaggagcgaattcgacacttctacagcatttggatctccaatgaggcggaaaaggagatcacatcagcgggcaatccaaaggcacctgctcttcatgtggtacttgattggatccaccgatcatg

SEQ ID NO: 108862 - DNA, 1002 bp, Heterodera glycines
aaatgattggactttccgctcaaactgcttaacgaaagtatatcaaactttaaaaactgttgtgaatttttgtccccagttatataatgagaaaattatatgtacaaatatttgcagtttaaatgaagtaaaacagtgaaagttttgaaaatagttcagtgtcgaaaatactcagtgtcgaaattacccagtgtcgggattaccggacacgtctaaaagcccggatagcgcccaaaaatatcattgtatattttgttttgttttctcttattaatgcatttcgaaatccaactcgtactgtttttcgcattcgatagcccttaaagtttctatatctgcaggaaaaaaagtcaagaaaattttattgcttttcaaaaaagttatgaacaaaaatcatcgcaaaacgaacccattttcggagggcattcaaaaattgtgccggattataccaagaatatttaaataagtccattagggcaaaactatggcattttttttgtcgaaagacagtacgagttatgtttttccattttggtcaattttcaaaatttgaaaaatgcgaatttaacctttacaaatgaagttggataaaaaattatcagtcgaattgattatttatttggggtaaagtaaaactccccgaaatctcatcatttgcaaaatattctcctatttggtggtcctcttatgtgcgttccctttttcttccgatccgtcgtcattttatgtcaaaatgtttccgcgccttccgtttttggcaatgatttttcgcctcctattggcacttgtccaacccctcgagcccattggcaacagttgaagctgaactggttcaaaattgttttaataaaatgcgattctcgtgtttttctcatcaagtattatccgtaaaaaataggaaaaccctaaaaatccaggctttatccaacgcaattatttttctgctatttgtgtgacatcattcgaaattcaacagcaaattttgctaattgccaaaaaatg

SEQ ID NO: 108863 - DNA, 200 bp, Heterodera glycines
attaattatcgagcattaaataataaatttctacctcaaattaagctttaatttgggagaaaaattgcatcaatttttaattatcttcggtgaaaatcgaattggtgagcaaaaaattggtgaaaaaatatttaattcaaaaaaattaatttgcatttgcagaaaattattcatttaataattcagatgagtgtgccatg

SEQ ID NO: 108864 - DNA, 1003 bp, Heterodera glycines
ggcaaatgcctcaaaatccgagctctagtaataatataaaattcgatagaaagaaaaaaatttccatttacacatatttcttcaatttgattttatttatttgtgtcaattataaatcaaagctggtggatgggatgaagaaagaatgcatgaacggatgggatgacagatcaaaattagaaaaattgaatgaaaaaacgcacaaaaattggaataataattaaaaaaacattcgcacaaaaatgggatgaatgaaaagcggaagaaaaagagagagtcactatcatcagagtcatcgtcatcatcaacagtttggtcctcctcacatacataatacagtatattctccacaccgtatcccatcagcaatcgtaccgtgtgctgtacatattgagggaaattttttaaaataaaattataacaattttcaagttttatccggtgtcaccagttgtacctctaatttccaatggattttaatggaaatttgaatcacataaatccgcaaattggcatttttgtggcataaagtctaactaagatcaccgttgaaaatatcggtgcaaaaaaattttgacaattagacggttcatgaaataaatacccatcacatatcgttttaagttccttaaaccaaatttcgtttcttttttcaatttaccgctttgccgatggctccggtccgatgatggcacagcctccgctgcccgagctgccgtttgctggaagagaacaaaaaaaaattagtgatgagtgaattttttttacctaattgttttttggagcatatggagggacatagaaattaaaaattatacgtagacaactgagcataggtggacaggggggggggtaatttggtaaattgtacggggattcgaggcaatttcctaaaatattcggcgaaaatcgaatagcacagctaaagacggaaatttttttttatgaaattgggaaaaaaaatttaatttttgttccgaaaaaacacattatttttaagatg

SEQ ID NO: 108865 - DNA, 287 bp, Heterodera glycines
tggtgcgcttctgatcagtttctgactttaaagttaagcctaaactttttggcctgtttaaaaaggaattaaaaattttattcatctccctttttgatagaaaaagcatcagagtgcctaaactaacctgtaaataaagttttgtgtgtttcagagcactttctgaaaaaatacttatgaattaattttgcaaaaaataaataattaatgaaaaagtcagaatttcgaaaaattttaaaaacaacaagcgttggcattttttcaggttaagttagtcctttacaatg

SEQ ID NO: 108866 - DNA, 138 bp, Heterodera glycines
accatagtgttagcaaaaacggacgacaaatcctggctcaaaaacaagaatgaatgctaccagttggctaaagcggccaaggcaggctttttcgtctaccaccggcgaaccggtgaatcaagacaattaaccaacatg

SEQ ID NO: 108867 - DNA, 301 bp, Heterodera glycines
aaattcgaattggtcagttattcttgcgcaccagcaaagtgcgtggaaggcattcaagaaggagggcaaaagtgtgggaacgcccggcaatgccagggcggggaatggcacgagttcatctgtgagcacggaatggcatttgtgggcggacgatgcagcgaccgcgtgcgttgccaaagcaaaagtgatcaatgggccaaggggaaataggaacaaattctgatcagacccaccgagcaatggccaatgtgccgagggacacacgcgggcacatggcagagactgctcaaagtatctgatg

SEQ ID NO: 108868 - DNA, 65 bp, Heterodera glycines
aaaagggggagggaaaccgagggcacagcaacaacaaaaaaaggtagaaagggagagcacaaatg

SEQ ID NO: 108869 - DNA, 168 bp, Heterodera glycines
aagagtaacaatgcaagcaaaaatttaccacaacttccagttgcttgcaaacgataccgtaatgaattgttgaaactgatccattcctactgtaaacatacgcaaaaaatatacggtaaattaaattttttaataaattaactctattttttttagcttccaataatg

SEQ ID NO: 108870 - DNA, 244 bp, Heterodera glycines
aacaacaaaattgggacaaaaatatttttgttttcaatataacccaaaaatttacttaaaaaaattaatataaattttgaaaaataaataaaataaaattaaattggaaagaaaacgtggaaaatattcaaacattagaaaaattttaaattgagaaaaagtgggtagccaattttgtaattagtgagtttattgtcttttacttttctaattaatgtttcaattttgcatccccggcaaaatg

SEQ ID NO: 108871 - DNA, 488 bp, Heterodera glycines
tttcgttcaaattccataatgcaccaaaagttggttttcgatttgaagcaaataaagtgtccggacggatgtacggaacagcaaaaaccaaaagaaacaaaaagtgaaagaaagaatcgaaaatgcgatgaacatgaaatgctaacatattttgacctaaaccattaaaaatcgacggtcagccgtaggcggaaactgatcttggaggacaacatccgaaatgggacagcaaatcacaggaacaaaaaaaaaaaattaagctatcttaagacttaagctaaagcaaaaaaaaaaaaatcttctggcgaaatgtattaatttaaaaaaaagttttcaaaattgaaatgcatggcacttaagtgatttaaccagaaattcatctttttattcatgtctgcttttgaattgcattttttagaattctattttattgttttattcgagtttctttggttgttttttgtccatcttttctttttcttccaatg

SEQ ID NO: 108872 - DNA, 205 bp, Heterodera glycines
ggtcgcgtcttttgtttgtggaaagtgcagcacataaaccaagttttagtggttctactggacagcggatgaccattacacgggcgcgtggcgcgaattctctcagctgtcggttgcgcagctgaacaaagctgtcaatgagaagaagacttctgttcgtctgacggttgcccagagcgtttacttcatcgacctgaacgagatg

SEQ ID NO: 108873 - DNA, 352 bp, Heterodera glycines
cctcggattaccacctttttctttctctcaaaactttcttctgggtaggcgcttcactgaagacgccgaggtcgaggaggcggtggggcagtacctgacctcaaagatcggcacagattttttccgtcgcggcattaggaaacttccttctcgttggagaaaggttgttagggtccagggaaactattttgttgagtgatattgtatttacagttgttatgattattatttttgatattttatttataaaattttttttctaaaaaagcgcccttttttatgcaacgacctagtaaaaatcatttctttgttgcttaattttcaattttttagcgacctgttaacagcgatg

SEQ ID NO: 108874 - DNA, 359 bp, Heterodera glycines
aataataatttaatagagccaaaaaataaataaaaattacatttttaaaaaatcaaaaaataaataattaaaaaatattaaataaataaaaaataaaatttaaaaaatcaaaaaaaaaattaaataataattaaagtaaagaaaaaaaagaaataattatttttattaagcaaagcagcaaaaaaaaaacagaaaaaaataaatttaaaaaaataaattaaataataaagaaaaaataaatgtaaataataataattttattaaggattacaaatgcggataaattttgtttgttttatgctttggtggcgtcaaagctttatttggaagtgcatcgaaacatttttaatcgatttatg

SEQ ID NO: 108875 - DNA, 270 bp, Heterodera glycines
taaagtgtcgaatattgttttgtcattgtggaccacgagtgctgcgaggctaaagctgtacgagtacatggagcaggtctacaagaaggaggggtgtaaactgctctattgtgacacaggtgaaaaggaataaaaagaaaataaacaccaaaaatttagattctctagcttttgctcatcggaaggggcggtgtccgttggtggaggggaaatttttagggtaaaacataaattttgaaacgcatttaaattgtggttttaagggagatg

SEQ ID NO: 108876 - DNA, 125 bp, Heterodera glycines
gaaaacgaagaagaaaatgatgaggaggatgaagacgattttgacgaggacgacgatgatgaaccatccgacgaggagacgctgcgcgacattccgctcgacaaaattgacatttgtgcttcatg

SEQ ID NO: 108877 - DNA, 1003 bp, Heterodera glycines
tgctaaaaacccccaaaaatgccaaaatatgtgctaaaatatgtgttaaaaattgaaaaaataagtgtgtttttgcataaaaattcccaaaaatctcattctttatcatttttagcccatacaacgcaaatcaaatacatttcgaagtgtttggggtaaaattgtctttttttgataaatcatttctataaattgaaagttccagcagagaacttcgaaatccaatgacgaattaatgaattcgagatttcattagtttctacaatcgaagaaaaaattttttaatttgaaaattatattaatatttaggaaaaaagtcgatttttagggggtgtatttttcaattttcttgtatttttattgcaatttttctcaaaaatgccaaaatatgtgcaaaatatgtgccaaaccccaaaatatgtgctaacatattttatgtgacaaaacgccaaaatatgtgtttttatgtttttataagtcgctctaaatcaaaaattgttcggagataatgctatttttgggcttctctcgccataactaagccgcaaaaaaaatatgtaaaaacataaaaatccgggccctactcatgaggaataatattttcgatattctttcttccaatttagttaagattttaataattcataattaatggcgccatttcaccctatttggaaaattgggttgtttgagaagagcaaggaaaacgacaaactggcagaatgcgttgaatgcaaagccaaaaaacagccaaaataccaattcaagctttccgacgggacgggactcccgttaaaaatagacgggatttgaacgggatcgggatttttacgggaatcccgttcgggactcccgtcccggaaaatttttttttaccagactctagttataactagggctgccaaccaaaaatatgtacaaaaagtggtgcaaatgtgtacataaatatgtatgaaatcattcattcacgcataatttcaccagttattttgttaccgtaatg

SEQ ID NO: 108878 - DNA, 61 bp, Heterodera glycines
aaaaaagaattgattaataaattaattgctgattattttcgtttgtaactttcctaaaatg

SEQ ID NO: 108879 - DNA, 392 bp, Heterodera glycines
ttatgaaaagtcagagttttgaagtggtattctaaaacaagtgataataagaacatatcgcatgaaaaacatgcaaatttatgagaggaatttactaaaataaatattttttgtaattttactgtacatatcaaagtcaaatattaaataaaaataatgatgaaaggccaaaaaaggacgaatctttgaaaaaaggatttgtgaatttccccttcaaaccaggacaagtcttagaaataaggacaaatctggtggttaccacgctagtaagtgttgtctcattcaaattaaccatgtcgtaacattttgaaaagcatttatagattacctaaatggcaacagcacatcatttagctaaaactcatcaacacacagaacacctgcaagaaatg

SEQ ID NO: 108880 - DNA, 52 bp, Heterodera glycines
aaaattatgcgaagcggacagagaatttgccgaatacgccaacgcgtcaatg

SEQ ID NO: 108881 - DNA, 574 bp, Heterodera glycines
ttgtcaaaaaaaagtagttatgcaccaaaaatgccaaaaaaaatttgcgcgaaaaatccactcaaaatcaaaaaaggaaaaaaataggcatttgtttaggaaatcattattatgatagataaataaataaatgaatgaaattgtcaaaatttatttctttttacattattattttatatatacagaattgcaaaaggctgtgtaaaaatggtaaaagtgaaatttacattttttataatttttgaaaaagcggcaattggccaagctcgacacagcaaaaaaaaaaaatcgacaaaatgaaatgagcaaaagtgaacaatggaaaatagagaataaaattaaaatgaaaaagttgcaaaatagcaatacaaaaaatggacggaataaacagcaaaataaatatacatattggacaattctcgagcaaaaaaagatcagttataaacggcagaatttaaaaaagagataaatgaatgaaggcaaacgatgaggaggggaggagacgatgggcccaaaaaaaaactgaaaacttcaaacatatgaaaccgaaaattgttgcgaacaattaaaaatg

SEQ ID NO: 108882 - DNA, 209 bp, Heterodera glycines
gacaaaatcaaagattttctaaaatctcgcgctccgattcgtaatcagcgtatttttccacctcagagaaaaaaataaaataaaaatttttaagtttatttttcgtcgggaccacaattctacacaatcgccgttttatccctataaacaccgccccgtttaatcggtaaaaacatataattttaggttgaatacacttaaataatatg

SEQ ID NO: 108883 - DNA, 92 bp, Heterodera glycines
ttatgtataattctttaattaattgtttttctccaaatctatttttgttttttactcaatatccaattcgttttttcattatctgaaaaatg

SEQ ID NO: 108884 - DNA, 450 bp, Heterodera glycines
tgtttcccaagttttttttttgtaaaaagtgtgcaaaaagcgtttttaacagcaaaaaacgctgtcactttaatgttgagacttctgagacttctacgcaaaaattccctttgatctaccccatttttaatgtgtttttgatttatttggattcttttcatttaaatttctcgatttccgagtcgagaaatttctcggtttttggatctcttatcgtttccggggttatttctcggttcccagtaaaaatcacttctcgcacatccctactttttgtccttttcatgcattttagatgccttttttcgtgtctcttttaggtggctatttaaaaaaagtcgttttaaatccaaaattacttgagaattgggttttcttttgctcattgcttttataaaaatttgcgtaaaaccattactctttttaagccaattattctgttcaaaaatg

SEQ ID NO: 108885 - DNA, 64 bp, Heterodera glycines
aataaattaaactaatttaaaaaatgtaaaaaaaaaaattaagataatttatttggcacctatg

SEQ ID NO: 108886 - DNA, 178 bp, Heterodera glycines
tttttggtaattgggcagaagcgtaccaaactcttgctgggatactccccggtaatggactaacttacaccgaaacgagcgccgtgctagctcggctcaaaaaaattttcgaaaatctcgagtctttcgtttttctttattttttgcaaaattaattcttaaatcttttttcagaatg

SEQ ID NO: 108887 - DNA, 57 bp, Heterodera glycines
ggtgcgattaaattaatcacactcaaatggacattcgcgcaatgcgtataaaaaatg

SEQ ID NO: 108888 - DNA, 553 bp, Heterodera glycines
tttttcagcaatttttttttgaaattttatgaaatttactgtttttttgaaaaattttcaaaaaaacttagcaaatagttttttttttggaattttcttattaaaaaaatgttctaaaattttttccttgaagaatttctaagtttgaatttttttttgaaatttctgcggcgagatttcggccggcgagatttcagccggcgagatttcggcggcgagattttgtctcggcgagatttcggccggcgagatttcggcggcgagatttcgtcccgtccccggtccggggggggggggagcttcaagttttttattttctgaaatcggaattccgaccccaaaaacgtcgtaagtcggaaatttttgaaaatttccgaattttatcaaaatttcggaaatccgaattctgtgccatccctgctggtgtggctccacatttttggcaaatgactgatttttgttttccaatcaaattgtttagcaatttctccgtgccaatgccatttcttccgtcagttaccaaattcatttttctgttcatgtgccgtcaatg

SEQ ID NO: 108889 - DNA, 123 bp, Heterodera glycines
  unsure (1)..(123): unsure at all n locations
acaagaagtgagactgtctttgtcgtttgtttttatttaattnncattctcaattaggcggaacgactgagggaggaaaagaaatcactcgaattatacgtgtcaaaactgaaagagcagatg

SEQ ID NO: 108890 - DNA, 261 bp, Heterodera glycines
atatttcttctcagcatttttataatttctgtggaataaaaattatattagacacttcatcaccgttttggcataccaatccgtacgcgacctcccgagagaagggtgggtgaaagtgttcgtttattttattgtaactgatttgctcttaaaacaaaggccaggatcagagatcattgtttacaaattagtccaacgatattttaaaaggtgaatcgttcgattgatgactccttcgtaattgaacgtacaacaccaatg

SEQ ID NO: 108891 - DNA, 357 bp, Heterodera glycines
catgaaaacggtggaggaataaagcgatcaatttgatgggctaattagctatgattgctacctaatttgttccttttgtcatttttttgtggaacattcaatgaaataatttgatgttttatcatttttaaattagttattgctttccatttttgatagtccaagttaaatggactcattataagttttttttaatttaattttcaacgctaaaagaaaaaataacaaaaaataatatggaaagcgtttttatttatatttaaaccagtgttcattaaatattcctctgagttccggggttcggaattggacagaccgagttcagaaccctcgaaactgatttttagaccaaaaatg

SEQ ID NO: 108892 - DNA, 150 bp, Heterodera glycines
ttctcccgcctcctcctccccttccccctcatcgtcttcatcattattattatcatcatcatcatcccaaaactgctccaacttctccgactcctccccaagcactttccttttttccgaaccgattttcaatcggcccaagcgccaatg

SEQ ID NO: 108893 - DNA, 256 bp, Heterodera glycines
  unsure (1)..(256): unsure at all n locations
ttccgcgtttgcgtnntgaggtacgtgggtctcggtgagtctatgttgagagagcctcggaattggtctttctgcgacaatggcaaaatgtttgacttgtcgaaacgcatctgtcggcgcattttgcccggggatcggtgtccgttcaatggcgtttgccggtgggttaaataataattgctttcgctaattaaatggtcgttttgccattaattcaaaggggttgggagtggcgaatgagccccgtgggcgaatg

SEQ ID NO: 108894 - DNA, 1003 bp, Heterodera glycines
ctggttttttaaatttatttttccaattattttaaaaaccaaagttttttcgactatactgtaaattatataatatttacaaggaatttacataaaaatggcgaaatatgaaatatttggcgaaaaatgggaagaaaaagaagaagaaatgagtagaaaaaaagagaaataattggcaaattccataaaataaaagaaaaaataaaggaaaaaggaataaaatattcagcaaaaaaatggagaaaaattgatggaaaaatagcgaaaaattggggacaaatcgccaatatattcaaaaatggatcaaggaattggggcttaatcaaaaatttaatctgtcaaaattaaaaacggatgaacaaacatttgaaattgtacaaaaatttattaaaatgaaaaatgaatattagctaaagagaaaatattcagaaaaagaatggaaacaaaattataccgaaatttgtaaacttaattggaaaattttttgttatatatataaaatatatatatatatatatatatatatgtgtaaaaatttctgatttcggttgtggaaacccacaggtgttcaaagcattcaaatattcaagtttctattattttcgtgaacagcaacatttttcggcgctaaaatttcatttttggccattttacaccaattttctgatataatgaaatttcataaaatctctttaatttttctaaaatctctttacattgtgaatttattttatttttattgaaaatatgtttattattttcgaatgagctgtagtagaaagtaataaaattttagttaatcattaatttaccaattggcaattattttgtcattaagataaaattattattattatttctttgaaattaaacaggatttccttattttattaagtaaaataatgatttattcagttttttaatcagaaaaaaaatcatttaaatgcctcaaaaaatgaattgccatttaattgaagaaaaataaaataaaatcttgaaaatg

SEQ ID NO: 108895 - DNA, 515 bp, Heterodera glycines
atcagaaatttccggattcattactctaaaaaagttcaaaattaaggtctacaactaaaatatgtgtgtgacgaataaaatattgcatctttattttaaattggcataatgtcaatatttttccataaaaattctcattcataagctcattttcttattatgaaaagccaaatcattaggggtgtaaaaaagtctcggtctcggtctcgaaaatcgagaccgagacttgaaaacccgagaccgagaccaaaaaaacccgagacttttctcgagtcgagaccgagagtctcgaacagcactaattggctcctacagctcttatgtaattgtgccccttggtgcttcgatgttgcacgaatatcggcacgtctcacatttttcaaattaaattaaaggaaaaaaattctttttttttcattttcagttttttgctgctcttccgtatcgtcgacttctgccaactcttttggtccgtgcaaaagttcgtcgccgacatcttcggcattctcgacatg

SEQ ID NO: 108896 - DNA, 143 bp, Heterodera glycines
aatgatgcaagttattatccgacagaatcttccgccgttttcgacaagttatcccatcaattctcaacgattcttcatcgcttcgtgttttctccatctgctgtgacgatttcttcaccaaattgctggcccatagtgccatg

SEQ ID NO: 108897 - DNA, 588 bp, Heterodera glycines
cctgcaaattttcaaaaatttttatttatgcacaaaaaaatctgagcaaaaaaagttcgaattactgggtttttgagttccttctggccataacttttttaaagcttaacgaaaaattttgaaattttacaaattaataataaacacatagagctatcgaaaaacacccacaatgcttaacatcgcacttgataagaaaagatagcacaaagatttctctattattcagttaaatttcgaaaaattttagtgaatttcaaaaaaaagtaggggttgaagtctaatttttcgagttttttgcttacaactttttgtaaatttttacttatttctaaaattatataagtagtagagggtacgtaaagcaacattttaataccaagattggtaaattagactaagtttaagctaatttatgattaattatttagcaaattaaattaaaataattattaaatttaattattatgaacattgatacttttgtcactttggctcaccacgcttcccttacactccccagaaaaaaaaaaataaatttattgtttgataaaaattataatttttcagcttttcactccaaaaatg

SEQ ID NO: 108898 - DNA, 394 bp, Heterodera glycines
tgttccaaatatgtgaagtgagttttttgtatctcccgccgataaaaaataaaattttctcaatgcctaaggtgtcaaaaaaaatattgtcaaaaaaaaattttcaatagcactatttttcataattttatttcacttaattatacagcacagacaaatgttaaattttgaatgacgaggggtaattagggtaattagacctaattaggccttttcaaatcgaagcctcttatgtatgtgctcaacgatcatcttttttaggccatccgctacatccacagccaaaacatcatccacttggatttgaaggtggtgccaaattcaaaaaagggggctttttgtcggttgtgccaattgccaatactctccatcggttaagcctgagaacataatg

SEQ ID NO: 108899 - DNA, 135 bp, Heterodera glycines
tgtttgggattttcaggccctggtcatttctctcataattttccgattttttgaccactattggcgttttcaccactggatcaaaatttgaatcgattcagatttcttttggaagtgggagcagacccatatatg

SEQ ID NO: 108900 - DNA, 158 bp, Heterodera glycines
aaatatttggtcaaaaatgggacgatggagcagaagaaaacatttgtcgaattgatcaaataatttattgacaaaatgctgatcagaataaccaatttggacaaaatgttcgacaatttgatcatttggaagttaaagaagaagagagtgatgaaatg

SEQ ID NO: 108901 - DNA, 1003 bp, Heterodera glycines
ccgatctcaaattaaaaacttaagtttgataaaataaacttggaatcggtagaggggatcaaaataggaagctatgaaaaatttaaagagaatgagccgaggaaaaatttttgaccaggtgaaaaaaaaattttttttttctctcatattggcgcactattttcatgtatctaactcaaatttttccttcaaaatgagcataaaatggttttatttagtctattattgatcaagttataagctaaaaaatttaataagtaggagggcgaggatttatacatttacaaaaatcatgaaattaagaaaaatgctaaaattcaagaaaatactaataaaaatgaaatttctatccaataaaaaattgaaaattctttttagttttaattaatttggcattttgtttatttttttgtgtctttcattttcattttatttttttttttcactcttcgcccggacttaaaatttgtgatgcggattgtgtgtggtaattttaatggtgcttttaattgttgtgttgtttaaatttaattgatttggattgctgtggctttaagtgattttaacttccttctcattcttctccttcgccccgttttggaattaggcaaaagagcagagaaggaccccggcaaaaaggcggctattttacgacgtggcgctcctggaaaaaggtgacgatcaacgcggtactatccggggcatttgtagactataagtccgacagcgtctccaaaaagtgaaaagtaactcacaagctgcgagattcggaaaagtgaaaagtaaatcacgagttggaaggagtgtaaaagtgaaaagcaaatcacatttggtggagaaaagcggaaagaagttgacagttatcagctcggtaaagtaaaaccgtcaacaaagctgagtttttatcaaaacggtaaagtaattccgctgcttggacaaccgacttggcacttcgaatttgaatttggaagagaaattgaaaaacggcgaagtaaagccaatg

SEQ ID NO: 108902 - DNA, 75 bp, Heterodera glycines
gacccattcaaaatcaaaataccaccagacactttttatgggcttcgaaaactttattattttataggaagtatg

SEQ ID NO: 108903 - DNA, 547 bp, Heterodera glycines
aattttccattttgctgctcccattttgtgtgtttttctttgtctgtttagtcagccaacactttggtcatacaaagccttaagagagagcaatgggcaattgaatgtgccaaacccttcgggcaattttcgcctggcgcctgagggcatggaagcaattaggggcaaatgtgtgttggttggcggatcgaaagttggagagcgataaaagattggatgtttccgccttttcagtgccgagagaattgtacgattcgttttgcttgaggcatttttgataaacttagcaacaaaaaacggaccaaattctgtcgataaaaggtgcacaatcaatcggacttttaaaagcgatgtgtgctgtttaattgcccaccgccaattcaaaatggccacaaatataatcgcaggcgtttcaagcgtaattggcggtatgttttttaattcaaatacaataattaatgtgttttaatgggctgtaaattgaaaacttttgccagaaaggccaaagggatggaaggtcgtgcaaaaatcacttccgcgcattatg

SEQ ID NO: 108904 - DNA, 117 bp, Heterodera glycines
gctacaaaatagtgattgccagcagattttggccaataacaattgcatcagaatcctgcgcatccaacagatgatctccagcatccacacgctgcttggaaacttctcgacgatatg

SEQ ID NO: 108905 - DNA, 467 bp, Heterodera glycines
tcattagatataaagttcaaagtttaaacctactttataaagtgacgaactcagagactataaaaaataataattctttttaaattatcaaaaaaattgattcagtctgcaaaaaaaatccaaaaacaaatatttaaaaaattgaatttttattttgtttcgaaaacatattaaagccacgataagtgccaaatgataattacgtgataatgtgccatcagcagctgaccgactttggcaccacttgcacacaaaattcaatttttggcaccattacagcttaaaagaatcatcgcaaaatgactacaaaaacaaaaatgttgaaatttgaattatttttactgaccaatttcaagcggtctcaaatgtggaaaatgcaacggcataaatcaaaatctggcatttttctcggcgcgtacgcattctgcttacacttaagcactcttgtccaccatcactagaaaatg

SEQ ID NO: 108906 - DNA, 128 bp, Heterodera glycines
agcagtggccgctgttgcatttgtcgttggcggcagaggagctgcaacagctaattgagccatgtcagcaaataaataacaaacaaataaaaatgacggactccaataccctaataaaataaagaatg

SEQ ID NO: 108907 - DNA, 1003 bp, Heterodera glycines
gacaattcgtggcttggacaattcgtggcttggacaatttgtgggggcgcctatataggtcataaaatttgaatctagttgaagggtatttcttcccttcaagaaaatgaaaaacaaaaaaaggtatgccaaagttgacttttctctacttgagacagataatctcgactacttacagaccagcttaaacgtcattaatttcaatattggaagtatttgaaaatttatgaaaatatatgtagattctaatttgttttctttctttttttggcatttcagtcgcaaagtttgatatttcggtccgcaaatgtagcactacgctatttttatgccattattatgctataagaacgatattatgtgtaatagtcatattgaaaacaaagttaaccccatttattcaatgctttattttctcatgagaataatcatagaaactgaaatacaatcagttaaattaatcataaaacttcggtttcgtcacccccctcccctccttaatttataaatctgattttttcatctctaaattctcatcgaatcactcgcaagctttcataaatcccttcccgaataagtcatcctttatatgcttaaattatttaaaatataaatcatcattttgatttttctaataggtaaattaagaaaataaaagccaaattctggcaaacaaattcgctgttgttctttcaaatgcgctttgttcagtcggtggtgccaatatttctattacggagtcaatcaaatgctgtgaaagtgatctttataataaggggatttaaaaaagaagttaaactcgataaagagatcatcaaaataaatccttttaacaaatttagctgaactcaagctattaaaaattctttgaaaaaactaattaattaattgagatttggtcgtttttataattattttcaacggcttttattcggccctacaaaacagcgacgtttttttgctgtccaacgggtgttttggcgcccggcgcttcgtggaaatg

SEQ ID NO: 108908 - DNA, 563 bp, Heterodera glycines
atgagaaaacagaatgcatttgttaataaattttttgttgattgatcgttttatgtaaagggttgagaaaattccctgattcctaaaaatttaagtgacagaattaagttttaggaaaatgttaaacgacacagaaattaatcagaaagaaaataacgaaaaaataattggattggctttgattttagtcatttattcgttttcgtttttgtgtttctgtgccgttatcgttagagaatgccaccgtgtcttttttagctaacaatgccactgccccctgagctattgtttgaaataattgaagccttcccctcctcaaaattgtctacagtcttcttgagcaatcatctcctgtcgtcgtgggctcaaaagcgtctcagagggactttcaattcgctgatgtcacagaaacaagaatggaaaaatctgttaaaaatatctcgtttggtttttgaaagtcacaacggattaaatgtgtaataattggtttttagtttttagtggttttatgctattttattgttaattcttaacgcgtttttaattagttttcagcaaaaatg

SEQ ID NO: 108909 - DNA, 1003 bp, Heterodera glycines
ttaatgataatttttgaaagaaatgttttttgaagcgaattaatatgcaaaatcttaacaagtttcagttaaataggtattcaaatttttctctcggcggtttcttattctcttaaaaaaattagctcaaaagcgtaattttgtcattttttgaacaaaatcgttaagaaatcgcattaaaaattacaagaatttttccggcggcgcctattagagcaggggtgtatctgttcttatttctaagaaatgttctgatttggggtagtgtcttattttcatttaaaagaggaaatttctgaaaaatttggctaattcctaacaaaattcattaaaaattcttaaaattttcccccagcggcgcctatcggcaccgccggccccccaaaactcctatttttcttaaaaattagcccaagatcgcaaattttggtcattttttggacagagctcgttaacaaattgcattaaattttaaaaaaatttccctcggcggcgcctatcggcaccgccgaactctcttccctcacccatacccaaaaatttttcggaaaaatgcgccgaaaaaattgttaaaaatatgtttttttgattctaaatgcactgaaatttaccaattgcttatgtttcgacaaaattgttaaaatcttataattgattttcggaaatgtataaatttctcatttctaagccgaaattgctcagaaaataggttggcggtgagtaatgcttgattttgttgaataaaaaagcgattcaaagttttggaagcgtgttttaaaaaatgtccttatttttgaccctaaaatcttatttttgaccagcgatgctcttatttcgggaaactttcaagggtaaccctgcatttatgggcttaaacactgatattttttagcaaatgatcctataaatttataaattacacaagtaccattttaatttgtcaatttttttttcagtttgcctatttttctaaatttttgtttgattattaattcaaaaaatg

SEQ ID NO: 108910 - DNA, 108 bp, Heterodera glycines
aaaaaattatatgacaaattataacgaaatagacctatcatctcaagattattttgaattctttaaatttattttttagcctcgattttgttcctagtttaatccatg

SEQ ID NO: 108911 - DNA, 993 bp, Heterodera glycines
agtttgtatgcatatttaaatgcacacggcgattcaattttgggctccaagtacaaataagtttattatttatttagtaatcagaacgccaaaactttgcaaaacttaaaatttattggggattttcccttaaaataaacttgaaatcgatagagggggtcaaagtatgggcctatgcaaattttaaagaaaatcccaactgtagaaaaaaaaattcaactagacaaagttttttctttttctctcattttgacgcactatttccatgtctctaacatataaaataacacatggttcatttttttgtcaataaacaattttttttaacttttgactaattaagaaatattcttcagaattttccctccaaaatgagcataaaatggttttatttggtctattattgaaaaagttataagctaaaaaaaaatcataaaatcaagggtaaaataaaatgtttaccttttattgtttgtatttgttcttttggcgttctgtttttattattttttaatttatttgctttaaaaaaatgaaatttatacacaaacacaaagaggatttgaacctgagacccactttttggtgactaactcacagaccactaagacgaaaaaaacaacttaattgtacttggagcccaaaattgggccgctgtgtacagaattgtgtgttatattccttatttgctaatctgaaacaaaaggaaaaaacttttcatagccctttaaaaagcaggagagccttaattaaaagaacttttatgaatgggtcaaacaattcgctttgaaattgcattgttttcccggctctagtgcactttatgagtccaatcgacttttatgagtccaatcaatgggttttatacaataactttgttcatgcacgaacaaaccctgtctttggtatcattcgaaaatacaaagtctaaataatgtaataatacgagaaaacaagaaaattctaacatttcaataaagacaaacgaaaatg

SEQ ID NO: 108912 - DNA, 793 bp, Heterodera glycines
agttcattttctttaaaatatgcataggccatattttgatcacacataggagaataagacaatttaaaaagcgaatggggaggaaaaacggagcaaattcaaatcgaaatgggcaataaaatatcaatgattgcacaaaacgccgaataaaatgccgaaaagaatgatcccttttggttaccccccctcccctttcattttatctgtcacatggacacccaaagggggtccactgcgttttccgatccgatcacttccaccccccccccccgccatccctcgtcattcttccgtcgtccatccctcccctccttcggattttgtatttttagtgttgaatagcttaatcaatgtactatcagattcgaaataatttttttgttcgaattcggaaccggggttcggaattgggtaaatccgagttaagattcgtaatcagcaccctcgaaaaccccataaaattgatttcgagcccaaataaaaaataaattaaggaccacaattctttaccagtgctgcttttttggcaaccaaatttatcagtgagcacagatttaaaatctctgtacttgaaaaaagtacacatttatttaattattgtattttatgccaattcaaaaatttatttttttgatttcactacaagcactttttcttttcttttcgttatttcttagattggtttgcttcgttttgaaatcacattaagccatactttgtaattgttcattttcgtgtttatagagagaaaccgaccatacatacaataattaataaccattgtaccccgatg

SEQ ID NO: 108913 - DNA, 344 bp, Heterodera glycines
taaaaatattgtatcagtatgcattttcactgacgcattttagggtcatgttctctactctatttaggaatgacaaattgacacaatgccaaaaaatttcagtcactacttgtgcttgatggtgatgtaaacgatggcactgtttagcgcaatgccaaaaagtgacaaaatttgctgaatgattgtcacccaaacggtgtacacgtaaatttggtcggactctccaaattcattaacggacgaagatggtgatgaattaccgttattactcatattattcgatggtttatttagaatattatcttatcaaaaaatggcaattcaatttgaattaattaaaaatg

SEQ ID NO: 108914 - DNA, 179 bp, Heterodera glycines
ggaatccccgaaaaaggaaaaatagttggtcccagtggacaaattcattcgtttttggccattactctggtttgaaaaatcttcgatcggaaaagtcgaacgagtgggactcaatcagtgagactggaaaatttgttaagtagcccaattattcggttccacgaaatatgaacaaaatg

SEQ ID NO: 108915 - DNA, 662 bp, Heterodera glycines
aagggctacacctttggtttacaaaacttgaaaacatgtggcagaaaacgttttaaaaaatggaagaatccatacgtatatttttttaaatttaattttatttgagtttggatgtttgagtataaaggaggtaaattaaaaaaacgtcgggatttcttctttccatattcaccaatgttttgacttttggtctttttcgccattaaaattcctagtgattaaattttgagagaaacaacgataattggtgaattttcgattttagaaaaattgacactacaattcggcacaaaacgcatttcgtgatgtcaaaacaattttgattggaactggcactgaacctcaagaagtgccttctccaggacataatcagtgaaaggctttttcatcgcaaagcaatccaggaaatggaaaacatcattcggctggacgtgcttagaatggtatggacgtgccgaagactgagtccactgtttttttgaaaaattctccaaaattatccgtttatctcgtattttaatccatgttttggtgttttttaatcaatataaatcccggcctttaatatatgataatagatttattaaataaaaaattaattaaattaaagattattgtattctttaattaaatttcattataaacctactcacaatcagatg

SEQ ID NO: 108916 - DNA, 1003 bp, Heterodera glycines
tgatttatgctcttccaaatttgaagtttcgttgttttcacttaaattcctaacaattaaatcttttgcattattttttggtaaattgtccatatcacttggcaccatttcatttgtaaatttggttaacacttcatcaaatctgtcaatttttttcaagaaaatttcatccattctttcgtctaacaatgaaaaatttcgttcagatgcagttaaatgcatccctttaaacaaatcaaaatcggcatttttatgagtttttggcgtccttgacaataattgtcgttgtctttgaactgtgatgggttcgccttcactttttggcactgtactcatttggccatttatttttggcactgttttcatttggccatccgattttgtatttaattttgacgtcgttcgaactctgttcaaacttctctctcggctttggtgtccgtaagaaaatgtgtttgtgttttcattattcggaactttcgagagtattcgtcgcattgcccgcggaggttccgatggtgttctgaccgacgtttttttaatgtttggtgttgaatttttaaatgcaaagatttcatttaaataaagaattaacagagtgattgaatatttattcataattttagaatttcgcagcaaaataataaaatgaagaaacaatgattttattagtattttttgtttgcttttttgctacatcaatctgtcaatactatgtctgtgtaataaaataaaataattggatttccggacgcctaatattttcttaaatattagaaaaacaaattgcacaaaacaatattcttcatttctattcacattgaaaaataccagttatgtaatataaattagtgaataacaagcttccctggtgtgctgattttcagatttgtgatttaattgagtcggacagcctttaattcaataattcttaacggggtaaaccaactcatccacaaacaattaatccatgaaaaaaatgccataatgcgaacgcacaatg

SEQ ID NO: 108917 - DNA, 383 bp, Heterodera glycines
tttttgatcacatttacgcacattttaacacctaacaccttttgcgcattgaaccaattacctcccagctcaggtcccaccccaattaaatcagtaaaccaagtaaacccctggttacgaagtacagtatccagtgatttaagacaattaaatatttgtgccttttccgtttctaatactcaagtctcatttatatattttgctgattgaaccattcatatccgccccagatttatccccaattaaatacagcaaaacaaattaaatcctggttattgtgcgatatccagtgattatacacaattaacttttactttatttctttccctttacggtgcgcaagtccagtaccctctctgatacatcccacttcccctatcatg

SEQ ID NO: 108918 - DNA, 468 bp, Heterodera glycines
tttgcaaattaattcttaaatattttttcagaaagggtcctttaacgcaccaaattttatttacatgttagtttaggcactctgatgctttttctatcaaaaagggagatgaataaatttttaaaaatttttaattcctttttaaacaggccaaaaagtttaggcttatcttttttttcagaaacttatcagaagcgccccaaactttgcagggatactgaaaggaaaagaattaacctgttttatcacattagcttgtcatcagtttttataaaaaattttcaaaattctgagtctcctattattttatttatttttcaaaattttgaagggcgggggggggggcgatgggattggaaagatcacgttgacaaagtttgataaaaaaggaaaaaatggtaaaaagttaaattttttgtatatctaataataaaaaaatcagattcttcggtgaagccaactctaatg

SEQ ID NO: 108919 - DNA, 968 bp, Heterodera glycines
aaaaaaaaatttttttggtctaaattttttcaatttttttttggtttaagaagacatgaaacaaagtacaccgggtttttcaaagtcgctgatcacgaatatgacaattatttgggcctatgtttgggcctgagttgtttatatgctcattttaattctaccaaattttcttaataaatttaataattttgaaagtccaattctgggtttatgtttatgtataaaaatccatccctaataattattaacttttaattttcaatttaggtgcttgcttcggagcgtctacgagaagtactcgtcgatgaggcatccaatcaatcggcttgccgaaattatttccattgacaccatgaaaatcgtaaagatttttttacattatcaattgaaaaatgctactttgaattatccacatgggttcagggggcttcggtatgaaatttatgagtggttggatatccaacaagggaacatttcgaactgtaaccacccagatcacttagaaaaatcgataaaaataacaaatttttaaaaattcataaaaacttctaaaataatgatagagcaattaaattaatttaaaatgataagcaaacaattctctatgaaatagcatcataaaataaatttttttaatcggtaaaaaaaaaagaaaaacaaattgacttgggttacttttttctgctcggttcgagttcgtttttatgtaattttattttctatttaaaattgtgtcttttattatcttcccattaaaatctttgacattttttatctcggtacacatgcttatttggcaaatattttaagtccttttcttaagaatccttggtgctctacccacccataaaatttcatacagtaaagccgtgatgtcccactacccagtgcttatgagggaaattagtccagggggccctcttacgcgtccgtaattaggcccctcagggcttggaagggaagggatg

SEQ ID NO: 108920 - DNA, 1003 bp, Heterodera glycines
tttaaaaattcaaaattttggactttcgaaaggccattttttgcataacaaatatgaaaatttatatttgaataagttttagttggaattcatttggatttcaagacagataatttaatagtatctgaaagaacagagaattgtagcacagaaataaattcgacgatcaaactgatcgattttaatggtaacttttgcttaattatcgcagatttaaatcattacttttttattaatatttttattttttgtcgctctgttgctgtatgttttttaaatttatgattatttataaacaactaaaagataattttaatgctattgtattaaagtttgaattaaaattttttattaaattattaaaataaaattaaaataatttttattcaattaaaatcaacttttattaagctttaattttatttccttttaaattaagaatccattcaaaattgtaaaataaacttgttttatttattatttcaaaattttatgaaaaattatattaaaaatatattttattataaaaaatatctcttttagttcaaattaaaaatgttaatttattaaaaaataatatttttattaattctttttattttttcaattaagaatccgttctctatttggatggacaaaaaaagggaaaagttgagaaaaattttaggggttacactaatagttttgctgcgcctgagctgcttcaggttataattttttatttttctttttttttaccacaataaacttattttcgaaattggctaaaattttaaaattagtaaatgcaaaatttttttcctaatttaattttaacaatttaaaatttatttaaaaactatggtcttatcattttagaaatcagctgatgataccgagggttatgttgaggtgactatttcaaaatttgattataaatttaatttaatttaaatattgccctatttttgccaattaaaaataaatttatttttactgtaaatgccaggttaccccaaaaatg

SEQ ID NO: 108921 - DNA, 243 bp, Heterodera glycines
caagaaattggatgggctatatgtggttataaaaaacttttgggtatggaattattttttgaagtgagtcaaaccccttattagtgctttgctgtgccgagacccggcaggcaatggatagctttaaatctgcaagaaattagattggcaataagtggttgtaaaaaacttttgggtaatgaattattttttgaagtgagtcaaacaccctattagtgctttgctgtgccgagaaccggtatg

SEQ ID NO: 108922 - DNA, 712 bp, Heterodera glycines
aaattgccaaaaaatttttattatctatcattaaatttatctttttgaaatttttgactaattacctaattaatataaatttgaaaggtatgccatgcgtaaaccatcacgtctctattcgttttttctcgttttgctgagttcgttgttatttcccggtttcattgttcaagcaattcttcgtttagtgctaaacataccggaacaaaagtaaaaaaatatattttcttggcattatttagttttgagtccaaagaattaaattttcgaaaaaataaataatttgatttttctggcggcgcctatcggcgggtccctcttttccccagaaattttttatgtccacacatttgcgcctcagacatttgcgcctatgtgcaaaatcggattttcaaacataaattttttcaagccctgatagcttaaaatctgtctgggattgaaaaaatttaagtttgaacccgattttggacataggcgcaaatgtggggtaacaacaaaaaatgctgtttgaattgaaaaaatgtctcgattataaaagtcgaaaattgtttattttctatttacaaaagctaatttaaaatttgttttctctaaaaaaaagcaaattttttcgtttttctattgatttagaaaaacctaacaacactatatgtattttatatgaatagaaaattgattaattaattttttcaatttaaggtctgttatg

SEQ ID NO: 108923 - DNA, 96 bp, Heterodera glycines
taaatgaaactaattacctaaataattaaaggtttttttttatttaacacgggtcattcattactatttcattttttcattctacatttgctgatg

SEQ ID NO: 108924 - DNA, 347 bp, Heterodera glycines
ttgggtatttcataataaaaaaatgtaacttttttttaaaaattggaaatttattccaaaaatagtcagaaaaaagaaaacttttcattttttttactcaatttcttcaaaataaatatattttacttttattttgtatttttggttctaaaatgactattcatactatatttagctattttcgagattttatgcttaaattcaacaaatttgaagaaatttataaaattttgccctcaatttggaaaatgtgcatattttgcgattttatgtgcatataattccttggccctatttataaccctattcatcaatattaatgattatatttcgtttgcaaattaatg

SEQ ID NO: 108925 - DNA, 1003 bp, Heterodera glycines
attttaatttccatttattccctaataatacacaaattttatatgcttataattacataattttttgcatttttctgaaaaatttgacccaaaaaggggacccaaactgcattagtaccgattaacccactctaaagttaattagaaataattagcgatcttttaaacccccgcaattctcttttctaacacatgaaaatgcaacatcaataattaataactttgcgattaacgggatatactataaaagttaattagcaataattagccagccatctttaaaccccccgcaattagaaaaaaaagagaaaatacaatggattttaatgagttttctcttagcggcaaagtgcgcaaaaatttaccgcatcaacgcattttttaattttacactgttttgaacattgttgcaatttggttttccgttacgtaacatccgtcaacaattatatcgtctaccataaaaagctcaactcaactcaacgttttccggtgccattgtaagtaaatgtgtagctgatgcggatttcagtcacactttaggaagatggcattttgtgccggtttacgtgtcggtaaacatcaaaaaaaagttggcaaacagagtacccattcatttggtaattttgccagcctctttaattgccaaaaaaagccaaaatatatgtgctattttccgtttacgtaaatccgtcatctggcatttactcgccaccatccactttgctaacccatattttccggtgttaatgccgaacagaattaatccaagaaagctggagatgggatggcattttgtcttccatttcacttaagtgtgtttgcgtgtttgtgtaaataaaaatgagagaaaaactggcatatttttgacattttgccaaacatttaattaagtattttgattttgctaaaatatattttttcatatttttacagatttttttatcattagtattgttatttgtgcataaagcaacgatattacacctcttttgtgcccatg

SEQ ID NO: 108926 - DNA, 77 bp, Heterodera glycines
gttttgttttataaaaatcattcaccgaacatttatgtcatgaatttagcaacgagccatttttttttgttaaaatg

SEQ ID NO: 108927 - DNA, 53 bp, Heterodera glycines
ggtgggtttgattattattattattattatttttttgaaaatttcatgaaatg

SEQ ID NO: 108928 - DNA, 211 bp, Heterodera glycines
attttcgtggacgcctattcaaaatggccgaaagtttggaaaatgaatcgcacgacgagtcaaattacgatttcggtgctgaaatcgatcgtaaaccattccgagagaaatcgtatccgacaatggcacgcaatttcgatcggccgaatttaaggaattttgtgaggaattcggaattcgccacacctttactcctccgtatcacccaatg

SEQ ID NO: 108929 - DNA, 53 bp, Heterodera glycines
ttgagggactgaggacggaattggaagggataaggaccaaattggaaaaaatg

SEQ ID NO: 108930 - DNA, 171 bp, Heterodera glycines
aactgtctgccatttttgttttcacgcaacatttttagctgttatgaaaaagtgttttttgcttgttttaattgcattcattggtatcttagctccaaaagattagattatacttaaattgctaattttttaaaactacagtattttcagtgacaagtcagaaaagggatg

SEQ ID NO: 108931 - DNA, 1003 bp, Heterodera glycines
gtgaactctttcgtttgttctctggcatctttgcctggctatttgttcgctttctttttttgctgtgcttgtggctctgtgctatttctatgctattcttgttttcttttccactttaatttgcctattttcgtatatacgcgcgtagcagggcactttatcaaaattttaagcatttaaaatactgaagagaaatgcacaaaaaaaaatttttatttttttgccgatttcttttaacgccaatatgcataaaattaaaaaatattttgggtattcgtcataaataaaatatttttatctttttaccaatattttaataaatattttttcgttttggaattcatcgcaaaaaattagtgcttttttagacaaaatctgttaacaaatgatcattttatagacttttttttgagtgcgtttgaaataattaaaaaaaggaagcttttaatccaaaaagtttcttttgacagtcctgttaaatatattctaaaaatgtctaaaattcagtcaaaacatcaatttggataaaaggccaaagaaattgaaaaaaaaatcaattaattaattttttctaaataaattacctgaattcattttttgaacaaattatttcactatgtcattttaggtaaattaaaaaatttttttagctttttaaaaaagatttattatttaaattttttccttagttttttcgaaaaattctaacccacaatcgcaaaatgcccacaaccaataataaaaataatgtaaaattgtcgcctattaaagtgaaattttgccaatttttcaaggcacacctccccaagaattcacggtgcaattggacaccgggtccggcgatttttgggtagtggattcggcgtgtggccagaacggttgctacaatggttgcacatcgcacgacgcgcaatggtgcaacgcgcaatgcgacccggaatgttgtggacaaaatggtggctgttgcacgacaacaactgcaacacaaccagtgccaaccatg

SEQ ID NO: 108932 - DNA, 389 bp, Heterodera glycines
aaaaatttttaaatttcagaatttaggggatttaccattcatagcaggtgctttttccttgttttttggatgccctccgcaaaatctggttcggtttgggatcagttttataaaaaaaaaagttaagccttaaaatttttcgcaaaatttaaaaagcaatttaaaaatttttagattttttattcatctccctttttgatagtgaaagcatcagagagccttatttaacttttaattaacatttggtgcgtttcagagcacgttctaaaaaatatttatgaattaattttgcaaaataataaataattaatgaaaaagtcagaatttcgaaaaattttaaaaacaacaagcgttggcattttttcaggttaagttagtcctttacaatg

SEQ ID NO: 108933 - DNA, 120 bp, Heterodera glycines
acagaaaaaagaagacgaaggaacctttgagaagggcgagcgaatgaaacgatgacaataaatgacgtttaagcaggaaaagaagggaaagaggaaaaggagggaggggaaaagagaatg

SEQ ID NO: 108934 - DNA, 209 bp, Heterodera glycines
aaattaatttgcctaattaatttgaaattttttcatcaacaaataaattaattatattaattagctaatttaattaattaaggtgttgtgtaccaaaagcatccaaatggaaatattttctctcatttattccttcctttaaaatcattgtttatttttatatttcgtttttcttattgttatcaactggtattttaattgcaaaaatg

SEQ ID NO: 108935 - DNA, 111 bp, Heterodera glycines
tgttttgcaccaaaacactgactgaaactgaccgtcactgagttgttggcacattcaaagtcaaacagtgggcccggcacttcgccaaccgcaattgtgaatgccacaatg

SEQ ID NO: 108936 - DNA, 304 bp, Heterodera glycines
ataagacagacagaaacctttgaatcaaaagtgatctgctaaaattgtctacaatttattttagtgtgcctttatttgcaagtttttttttttgctttgattagtttttaaagcgctgtcaatattttttttgtgtgtttttccttttagcaaagttaaaaagcgactcatatacacaatgctattttactttatacttttcgttttggttatctcaatttaccattaactttggcatttttctttattcatttgacattgctcaaagcaaatccctttgttttgtctttgccgagcacaaatg

SEQ ID NO: 108937 - DNA, 261 bp, Heterodera glycines
gtttttgcatgctttttttcatattacgctcaaatgtttgtttaatgcgttctctttgagacaacttaaagccttaaactgaaaatgctgccaaaaaaggtggttctaataattgcagcaaatggcttttttcgttattttttggatgcaaaaataaaaattgtttgctgtctggacgtatagactcagtagagcaagcacttaattgcattcatttctttaataaaagttaaatccccttaaacttttcagttcataatg

SEQ ID NO: 108938 - DNA, 132 bp, Heterodera glycines
ggtataattaatgtcaaaaataaaaatacaaaagaataattgaaaagttttaagaagtggccgctcttgcactggcggcgttcacacagatcaaaatgcgcttggcggaggacattgagggccagggaaatg

SEQ ID NO: 108939 - DNA, 95 bp, Heterodera glycines
tcactccgttgcattcggcactgatcagggtttccttgatcgctggtctgatcaatgccgatgatcaccaaaatgggccttaaaaatatgccatg

SEQ ID NO: 108940 - DNA, 674 bp, Heterodera glycines
gaaatggagtgccgagaaacaagacaagaattggcatcgagattcaatgccaaaaacagaaaaagaaatttccgaattaaattcaagactgttgagcagaagataaaatttttaaagtcgcaagtcctcgtttaattcatctttttgtctaatcgctcaattgtgtgaaggacagtttataaatgtttcaaaatcgtaaaaaaaagtaaagtggcgggcggcgttccatagagtcattagtgtaaaacaaattaaaaaagaaagaatgcacagaaaaccaaacaaaaataaaaaaacagaaaaataaatttaaaattctctcttttctctttggttagagaagggaaaggcaaaagagtcgagaaaaggaagaaaagggggcgcgaaaagagaaaagaatgaataataaaacaaattattcatcgccctctccattcattaatggacggaaaaagagaaagcgctatttttttttaatttaaaaattgacattcgtcgaaatatgaaagaaaatggaaatgtgctgcattctcgggaatctcgaaatgaaaaatgttaagggcacgagatcaccttatgatttagcgattttgatgaaaaaattagccaaaaataggcaatattcgagaaaaggtgttcaacttaattattagtttgacttttgctgaaaaatg

SEQ ID NO: 108941 - DNA, 715 bp, Heterodera glycines
  unsure (1)..(715): unsure at all n locations
atgacccggacttaaaccaanagtcgaaagttcaaatttctcgttttataattatttttaattcaaatttaagttaggaagtcggaattggttaaaaaagatgtcagattcgtgatcaaggacccaaaacccccgagaacaagttttcaggagttttttttttcaatttttaggcagcacaaccatacataattaagggccccaaaatttatgttaaaataatattgtgtgaatatttttgtgaatgttaaaaaatgaatgtgcgaatatttttcgctttttgttgcgcatatttttttaaataatttattttattgtgcccttaaatttaataaaaattgtgtaaaaattttaatttatttttactgttattttttaaaattttatttaaatccattctctcgttttcaaccatttcttacggaaattgttttatttaattccttctttttctaaatatcttcttaaatttttataaaattggctacggaagcatgtcttccgtgacttttacttccgctctttttcttgggccataatatattttctttttgtgtgtgtgtgggcaaaacgccaagttggcagtgccattgaaatcaatgattccgaagaaaatatatttcgcctaattttgcgttttgctcaatttttaaatttgatttagcattaagcaaatctattttttctttctttccaggaaataaaaagtccaatg

SEQ ID NO: 108942 - DNA, 806 bp, Heterodera glycines
taatgtcgcaaatatacttaatttaccaactaaaaataattttaaatgcaattacgtcaatacgttagaatcgatcaaataaaaattgcaatatccatagcacagattcaaaaataccaaatcacttataaatattattgaaaagatagcagtataatggacaaaagaaataaacaaaaaattaaatttaaatacaaaaaatcaaaacaaattttcctgttcagaaaaaccctgccaatatcttaacagctgtcgcccaaccctcaacagccaattcacatcataaggtgaatccacataaccttaatttaaagttattaaatgcccaataaaaaaaataaaactcacaatggaaacttaaatatttgtttcctcctccacatctacaaggaaccaaaacacagaacatgtactacgacaaaaaaagttcgcaagattaactaaatacgcacgatcaaaacattttttcatttaaaaaataataaataaaaaccttatttaatcagaaaaattaatttattaatttaattttttaataagttttactcctgctcctgccatagtcaatatggcgcgtactatgccgattaaaaattctgggcgcaaatgcagaagttttgtaaccgaaaagcgccgccgcggtgtagtagaactgctaccgccgctgcttctgctgcgctaattatatgacacttttgtctctgttctattcaaaatttgtgcttacctaatttcatttaaaaagccctttaaaattaaaaatttttcttaaatatttgcaggcgaaaattaattaattttaaatg

SEQ ID NO: 108943 - DNA, 548 bp, Heterodera glycines
aacggattaaaaaaaaaaattttttcgaaaaaaagttcgaatttcgggttaggggttcggaaattcgtccaatagagttcatattcgtgatcagcagccccgaaaacccctagaaacacgtttttatcattagaaacaaaaaattttttttatgtgggtcaaactgtataagtaccgagctgccgccattggaactcagtaagcaaatttgaaaggaataccaccccacattggttaaaaatcatagacaaaatgatggatttagcaaaatctgagttcagattaatgatcagcgcattttttaccctaaaatcattggaaaaaacactcaaagaaaattaaaaaattttgaaaaaaatcaagtacttgatgaaaaatcatagataaaatcaatgatttttcaaaatctgagttcagattaatgatcagcgcatttttttaccccagaaaaattggttttattaactctacgatttttttccgtcgggaccacaattccacaccattcccgtcaaactaaaccaaagtttagccaaaagcaaattatg

SEQ ID NO: 108944 - DNA, 329 bp, Heterodera glycines
cttattttagttgatttttggcaaaaactcgaaaaacagaaaaaatgaagtaaaacgataattttcgaatattttacaaaaaaaaaacaaatatttttaaaaagaactaatattgcaattcctgattttgattacttttatcatttaaggataatttattttattttgttcaaaattcgaatttgaagtagctattcataagcacatttaatttttatgcatttgactcatttcattcaaaaggacaaatcttaaaaatggacagatgcttgaaaatgcccttctttttcaaaatttaattttatttaaattaaaatattaagaaaatg

SEQ ID NO: 108945 - DNA, 205 bp, Heterodera glycines
ttttcttttaaatgtttttttcagtttattaaatagtatgcaatacgttccatgttaaaaaaacaaattctgcataaaaaaattatgcaaaaaaaaagtgaaaaaaatttccaaaaactaaataactgtataataggttcagttttattataaattttaattgtaaaatttagccagaaaaacaaaaattctaaataattcaatg

SEQ ID NO: 108946 - DNA, 85 bp, Heterodera glycines
acgatggacccttgtttagacatttcgccgtgccaccacttctgtcagttacaatattcaattttatcttcgtgtggaaccaatg

SEQ ID NO: 108947 - DNA, 1003 bp, Heterodera glycines
gggcaataaaacagctaaattttgcattagaatgccttaattttgcattcaaattgttttctctaacaatataaaaatttattaagaagaaaatgtaagtgattctatcaattctgaggatgatgaagtgtcaagccaattgtcggaggaagaggaaaaaattttgttgaatttggcaccggaattaaaacaaatttcattcttcaaagcgaaagacagcaaaaattcaaacaaaatggatgaagaaataaagggacggaaaatttcgaaagaattggaaaattaccatgaacttttgttgcgtttatttaagatcaaattcaaacaattgataaatcaaaatgacaaatttgtggaggaaatgttgactaaagagtgggtcattgaattggtgggaaaatatttgcccaaattgacaatgtgaccatgggtgagaatttcggactgctttttgttttgaatacataataccatttctcatttgcagctttgtcgtcaattcaaaaagagaagcattaagaaaaatgactgttaggcaattgattgaattttcaaaaaaactattctgaaattctcattttatctgttgttttttcattataaagatgacattttggagaagtaaaaatttctcattgaaatatgcttcattttatgtaattcctacattttttttgtttattttactaaagtgcgctccttttcgaatgaccaccaatcgtttatttattagattattaatttcttaattgctttggttatttgctcgtctcttttgttggataaatttcttttctttttttttgatctatattttttataataatataatattattgttgctaaattacatatgttctctgcttctgctactgagttttcctttttgctttttccattttttctcctcccatttttctgtccccaatttttgtccgcctcctcactgatcaacgattatccaaatccgttgcgcgaggggcaattcgcaaagtgcaaaatg

SEQ ID NO: 108948 - DNA, 217 bp, Heterodera glycines
tttttaaatttataatttgtgtcgtggcttttcagttggcctttttgtgtgcgcattggcaaagggtggcgatgcattccaacgaaaatcaggtgaaaaaattgcaaaaatcgctcattaaattattcaaatttattttaaattctcttcatttcataaataaagcaactgaataccttttattacagtaacactttttatttcaatcacacagatg

SEQ ID NO: 108949 - DNA, 468 bp, Heterodera glycines
aggcgcattccgctcaaagaagggggaaggaattgtagtgtttaagtggatattttgaattttaaatgcccacatttcccgcccattttactgcccataaatatggaattgtttccccttcctttgctttttccaccattcatttgtcatttaatttatctgcatttattatttgtcctttgacctcccaattttctgtgctttatttatttggaataaatcaatatttcctttaactgttgctcggacacaacagtaaattggcgcagtcagcaaaggaacaaagccagcataaaagcgacacaaacagcaatcaacatttacgaaaattgtttcgtgttaacaattttcgttgggaaattgaataagtctcgtgttgacttttcaatttcgcagattcgccgaaaaaccgaaacactcgtgttgtgtaaggttccgtgatatacggtttaaaacgtcgcagcgatg

SEQ ID NO: 108950 - DNA, 360 bp, Heterodera glycines
aataaaacttgaaaccttttttaaattttcttaaataacgtttttcgttgtacaatattttaattttattaattttaatttttttaaagataaaatgtgttatgactatgaattctggaatgaccgatttaaagagcatgttttaggaataattatattaatcatcttttttagtttgcttgtgtttttttttcttgggatggctttgcggttcataaaatgttctaaaaaatataaaaaccctattggcaagcaaataaattttattatttaaactcatttaattttaatttttgttttcgatcggttaaatactttaaaaaataaatttaatttaacattttaagctatttaaaaatg

SEQ ID NO: 108951 - DNA, 260 bp, Heterodera glycines
  unsure (1)..(260): unsure at all n locations
tcatataaagcaattagttaacattttcatcaccacttatgccttcggttaaaaaatntaattaattagttaattactctaatcgtttcttgcgattaccattcaatctctaatgtgttaatntagtagtgtttcttcataaaataagatttaaataattaatcccaattacctatgtgatttcccatcagtataaaagagaattaaataattattttttaaattaaatttaaatatacttctactaagataaaaaaatg

SEQ ID NO: 108952 - DNA, 246 bp, Heterodera glycines
atttattttgaattttttttctaatcatttttttgatcacttttggcgccgagaaatttacaataaacaaatggaatatgctctatgacgaattatggatgggaggggggattaaattcttttggcccaaaaatggataaaaatgccataaaatttaccaaaaaccctcaaaatcaaagagatttcataaaaatccatgcctttttactagttttgacacaaaaaaaagaaactgactttacaatg

SEQ ID NO: 108953 - DNA, 427 bp, Heterodera glycines
tgcctgaacaaaaaaagtttgtttaaaaaaatttacaaaggaaaaaaaatttttacacctgtagagtgcgttctgctagcgatttgattatttccataggacagtaatagggaatagttaggcaaagtgatgatggatccaaaattcgaccctttttataaacttttcaagtgttcaaagaacgaatttttcttaaaaatttctaactaattaccaacgagaagggaacaactacctatataatgcaatgtgcaggtgcgaaacagctcattctttttacgcatttgtgtgtctttttttcacggacgacaaattcacggaacggacttttgcgtctgtgatttgcaggctcaagcggagacgaaggagggggatttggattccgttaatctttcagtgtgaacattttccttcccttcagaaaatg

SEQ ID NO: 108954 - DNA, 131 bp, Heterodera glycines
tctaaaaaattataatgaatttaaggaaagagagagagagagagacaagttgagtgagttcaaaacaaagtcagaaacaaaatttgaaattttttataaaaatctgaatatctacgtgaatttacagtatg

SEQ ID NO: 108955 - DNA, 129 bp, Heterodera glycines
gctgacgggaattgcttttataattctttatcagttttgcttactggatctgagttgaaagaaaatgctaggattatacgacgcgcgattacagagtatattgaatcagaggtttagcttaacgaaatg

SEQ ID NO: 108956 - DNA, 403 bp, Heterodera glycines
ttcacttcaaaaaaattataattaaatcttggatttaaaaaatttatttaatttcacatcagtagataatattcccaatcaaattatcgattgattttcgatcgataatttgagtgtgtctactttttttctctgacatccccttccacaaacccaaacctattggatggggtcgagagagagaaaatacagtatttgctctaattatcccccagtctccaattatccccagtctatgaggaggttaaaaaataatcccccccccccccaaaaaaaaaaaaggcaaaacctattgtaaggactgtacacaaataatcaataaacccaagcctattgcatatatcatatccgaagctttaagtaaattagcaaaaaactccaattcattaaattgtaaaaaatg

SEQ ID NO: 108957 - DNA, 1003 bp, Heterodera glycines
cagaaataaaacaaaaataataaattgaagaaaaaatggaaaatataaactcgcgaatttacccaacggagttggaaaagaaaatgtgcataaatgaagcaattattgctttattggtcattgttttgtcgcacccatcacaacgattaccacacacataaataaaaatattgttcaaaaataatcagcaaaaatagaaaaaaaaagtggaaaacaaattaaaaacgaaatcccattaattaagggaataaaacaaaatggaaaaaataattaaattatcaaattttaatccggatttaaataccgttactgaaaagcatagattaaataaatgcattcacaaacaaaactaaccccaccaaaaaaggggggaggggagaaaaattcgaacatttgtcggcaaagtacaaagaaatgcattgcgatggagtggccattaattaattaatgagtgcggtaaaatggggccaaatcactgcgcgccgccgcctcctcactaatttcccatcaattctctgctaatgatcccccgaacatataataacaaaaagggggaggagagaatggatgggatgggcaatggacccgtggggtattttcgtttatactttctgagcgtggcggcgccctaaaacgagttttgtgtcccaacattgcgcacctgtttttgttttcctctgcagtgcctggggctgaatttaacaccctctcacttttgcgttatctctcttcccattttattttccgccaaaagtctctttttaaaaaattgctttatattttcaaaaaatgatacaaattttaaaaatagcgttgatattaggttgatggcgtaatgttattttgatttaattaatagtagagttgctcggtaccggtaccggtactggccggtaattaccggtttttttggtaccggtaccggttttttcaaaaatcaaagtatcggtaccggtttgtctagtaccggtaccgccggtaaaaatttgcactggtaagaatg

SEQ ID NO: 108958 - DNA, 782 bp, Heterodera glycines
aaacaatttttggacggttttaagcttttgaatccggagcaagaccgtgaagtaccatctatctttatttataatgaaagtggcattcttgaacccgagcgtttgtctcagaaatctatgacgaattaacatttaaaaattagcggaatttattaaaatcgtaaaatttttactgttatttgattatttatggttataaaatttaaaaaatattttgagtcacattaaatataaataagaaaccatgtgaaggaaactaaatttatttatttaatataattttctgtactgaaatgaccccatccctctgaaagtctctcacttatatttttgtcacttcgcccacactgatgcaaatacggtacctttttaaaaataaaattagatttggggacgaacgacgcaggaacgaaatgacagtgcgcctcaaatattgaacaaataatccatttaatttcaattattgacagtataaatgctgtaaagccataacaattctttgacaattcttcattatccggtcaacaattgatcaaattgatgatttgttcaatctttggttcttttttgaaaaatatgtatgggtactttttatgatcagcgctctggctctggaatatccttagaaactgattttaggaaaatgacctacatttaggtaattttatatacgcatttataaaatttttacaaatttttaatgggtttttggtccaaaaactgggtatataaatgctgactttttcctccctcacaacataatttgtgtcccagcaataatg

SEQ ID NO: 108959 - DNA, 697 bp, Heterodera glycines
ctagtaagtataatttaatatagatgataacttcaattttaagaataaattaaagcaaagttaaggaaactttaaaaaaagaaaaattacttattatatagaatattgaataaatatattcagtgtatataataaacaatagcaaatatacaagaaatttaattcttacattttctaaacataatatgaacattcgacgcacaacacaactgcagccttgcaaatcaatgagcgcgcgcgcgttatcccacctcaacgtttactcacccatcaaaagttattcactctccaagtcgctatgacagatatttgccaaaaatttaaaataaaactatatctaaacagtataattatacaagaaatcgtttacaatattaccaaatctgtcagagattggtgaaaaggttaaataaacgaaacgtaaattaatgtacaaaatataaaaattatttcgtgaaataataagaaatataaatcatgaaaataattagcaaaaacgagttttcaacacccgtttaattcctctttgctttcatatcctaaatccttctaattctttaaggtattttgcaatttgtttccttttttatcaaaaactttattcagtttttgcaatatcaaataaactatggttgtgtctcacagtatgtatttgcataattctagttcgttttatttaattcatttaagtaccatg

SEQ ID NO: 108960 - DNA, 72 bp, Heterodera glycines
  unsure (1)..(72): unsure at all n locations
gaagtgatcagcgtttatcagttcaattcccttccaaatgntcatgggatttccgacggacttttcncaatg

SEQ ID NO: 108961 - DNA, 439 bp, Heterodera glycines
gtgaattaaaagagaaatttaataaattaaaaaataatattcatatttaaatcaaaataaaattggctgaaccctaagaatgcccttcaaaaataacgggtttttaggaaaattcacataaattcatcgtcatagatgtttttctggaaagggtccaatcataaaaatttcaaaagacggcgaaacaaaaaattaaaaaaaaaaaaatttcgttttttacatttttcggtcaaaaaagttccattttttaaaatcaattcattatttaattttatcaatgtgtatccctgtatcaatatgttatttataggtgctaaatgatcatagcggcaaaacattgatccattttgttaattccggttactcagcaatttgcaatttttgtgccaatcggacagcacaattttcaggatgggagcacatttgtgtgtacaacatg

SEQ ID NO: 108962 - DNA, 239 bp, Heterodera glycines
  unsure (1)..(239): unsure at all n locations
tttcggccgacgacgtttntggggtgcaccgcattgcgacgcccgtcgacgactttaaattgttttgttttcaaattgtgcggcttttccgctgtttttgttgtgtgattgttcaacaacattcgccactcaattttttttgttgtttgatttattcaacaacaaattttcgtcaaattcaactcctgttttttgttgtgtgattttaatcaacaacttttcttcaatttcgacaaatg

SEQ ID NO: 108963 - DNA, 100 bp, Heterodera glycines
agtgaatttttaacgatctcatttaactaatacaaatgctaattaagcgggcgattatggcgcattcgaagcggggccatcgaatgatggccaaacgatg

SEQ ID NO: 108964 - DNA, 83 bp, Heterodera glycines
ggtaaaaaaattaactaaaatttaattaattttttatactaaaatgttcataatcaaattatttgagaattaattcatcaatg

SEQ ID NO: 108965 - DNA, 131 bp, Heterodera glycines
ggtgagcaccatttgagagcaaacaattggaagaatatagcagcaaaataaataaataaatcaattcaatgcttggttaccccaaaaaatggaaaaaatttttaaaattgtcggataattagggcaaaatg

SEQ ID NO: 108966 - DNA, 656 bp, Heterodera glycines
tgccacctccaccggttgttgcagcagttgaagcagccgttaacgttgggacatttgtggtggctgttgatggaagaaataattataaaaaaaaaattatttatttaacagtttctaacccaatttttaataattaaaataatcaccgcttagaaaatttatttctgaatacaaaaaacacttagttaccgtatttcatgactaccgtattcccttgggtatgtgtggcgagaaatttcttaatttttttaccgaaaaccgagacacgagaaatgagccagtagtaaatcgaagccgaaaccccccccccccccccccgaaaaactggggacaaatttctcgggaatcgagatttaaaaaaaaaaattccacaattaaaaatagaattaaaaccaattaattttaaaataattctaatctatcctaacaaatttttgccatttctattttgattcaattaatttatcaattcactttaattaaaaacatagtgtggaaggaaatacagtagcaaaaaatattttccattactgtagcccctaattgattaaattaaaaaaaacaactgtcgatgaacacctgtcgttccagcggcggccgtattatctgtcggatggcaactctgtaacatggtgggcatcagcagcaacagaatg

SEQ ID NO: 108967 - DNA, 1003 bp, Heterodera glycines
gattgcggaaacgcaataatttttatttacattttatgcgtgtatttcacatgttaaaatatatgcccgtgggggtcacattatatttgcgccccgagcatttgtgccaatgcccaaaatcgggttcaaactcaaatttttttcaatccaagatggtataaactgcttttaaaaaagcaataaaagtgattttgtatccaacaataagttcgtcagaaaattttgaaaaaataatagattatttaaatccgatctttgggcataggcgaaaatgtccgggtctcaaatgtctgagcacgcctgcgggtgcttaatgttaagaattataataattaaaaactttagaaatatgcaataaatggtggtgaaaaattgattaatagagaaagtagaaatattagaataaaagggctaaaaaatttggaaaaattaattattttcttttaataattttaaattttaattccaattattttatttctttttcgaaaaccttggaaccatatacatatttaagcaatttttcgataaaactttaggaaaatgcttttattcaatttaccgccaaaattgttgtttttctttgctatggcaatgcttttagcgaggaaaagcactcaaaaaatgccaaatgtgaccaaaacacatgcaaaaaatggtaattatttgattcagttaaaccagggctcccaaattaaaattttcaaggccggcgatgggaaaattttgtaatttttaatgagattcttaccaaattttgcgatttaaaccgatttaagaaataataataatttatacgcaaagcgtgacgccgccaaaataaaaacaacaataagataaagcaaaatggtcacatatgagagtggttcataaatgtgtaaaacgaaccaaatcaattgagtcaagaagtttagaaaaaacagttgaattttgtaacctaacttctttaggtaataacctatagaagcgagaagcacgaacaaaaaatgaatggtatctaatg

SEQ ID NO: 108968 - DNA, 1003 bp, Heterodera glycines
aaatacactaaaaataatctttaatcattattaatgaataattaccgctccaaaagcattcaaaaagacattgagcagaaggatgagcttcatatcaatcttgtttcttagcttatctaaaaacaaataaaaaaatatttattttttaaatttttaattatttattattaaatgaataaattcactcttcaaaaaaaatgaatcgaatgaatggttgggtacacaattattatgttttcgatgcatatctcttatgattaataaaatgctgattcatcactgatgagaacaaaaagctaattgacacccaaatcagtaaaaatttatgcataattatttttctgacaaaaaaatcggttttgagataatgaatgataaattatgttattgtttgcataatcgtttaactgaaaccgatattcaaaagtcaaatggcggatcaaaattgccgacaaatcccaaaaatccgcaacccgcaatccgtaactccaaaaaccccgcaatttccgtaatccgcaatccgcaattgcgttcagccctggtagccagcccctttgctaatgtattttctgcaaatttcgcctcgttcaaaaaaaaacaatgaaatggatttacaaaaaacaactttttccattacgatgagtttttttatattaaatgtaaatctttaaacataaagaatttcttttacgcaaagaaaaacatcccaccggaaatcaaattaattaaaaatattattgctttgatatttttattattattaattttaatgtcaatcaatatgaataacaaatttatttacatcaatgaatacaggtgaaataaaaattttacatattatttcaacgataatgatacgtcaatgatgatgtaaaaattattttacctataatattaaatgaaggtaaaagtcgttttataataattatatttgttattcaaataaaattcattatacattttcataaaactctaattcttaaatttgaattaaagcaaaatg

SEQ ID NO: 108969 - DNA, 241 bp, Heterodera glycines
accaaattttggcaatcgttgaaatttgtgcaaatatattgagttttagttttaaactcacgaccaaacaaaaaagaagattggcacaatacgctgatttctatagagaaattgctaaatctcgttcagaaaaaacggcaagaaaaaggatacagcaggggagtggtatagccctgggagctgtcttggtcccggtactaagtgttttagctcaacatttattagaaaaaataacatcatg

SEQ ID NO: 108970 - DNA, 109 bp, Heterodera glycines
  unsure (1)..(109): unsure at all n locations
gcgcaatcantttcgctcaatatgaattgccaaattgttttgaagcgatgaaagtaataatcaaatttgcgctttcataattctaaaatttagaaaatagtcactgatg

SEQ ID NO: 108971 - DNA, 99 bp, Heterodera glycines
cctggacgggcaaaatgggaaatggtaaaatgattttgaattcgaaaaaccttcatagagaaatatgccaaatagaataaaaattttcagaaaactatg

SEQ ID NO: 108972 - DNA, 394 bp, Heterodera glycines
agctttgatcagtgtcctctcgctgtctctcactctctagctgattagagtcggatctatgtgcctctctctcattaagttcaggctcgcccatccacactgatcggagggcaaaaatgaggaacacagagctattggtatttcaatttttaaaaacatttactagcaaaatttgacgcctccttttttcatatttttggtccattttacaagactttgattagtttatttatatccacacacacatacacgcatatcaccaatacatacaatttaagtgatcagatattgattgatacatgatacacacacatcaacgaaatacatatgtacaattcaaaggatcaataggataaatgtcaatttcttatccttcttctgttgttgtgccatg

SEQ ID NO: 108973 - DNA, 62 bp, Heterodera glycines
aatatccgattttgctgaataagcatttgtccgactttttttactacgaaatttcagttatg

SEQ ID NO: 108974 - DNA, 234 bp, Heterodera glycines
ttcttcggctttcaccaccaccaacacccttcggcaccgccagtccatccttccatggaccatcatcattccgcaagtgttcccccgcctttcatgactcatctccatcccccgcccttcggtggacctttgcctttctgtccttttacaattggatttcgtttaggccaccaaatccattcctccgctgtcggagggggccctttcaacgtccctccgcccgtttttccgatg

SEQ ID NO: 108975 - DNA, 79 bp, Heterodera glycines
tgataacaccggtaatcaaagcatactaaataaacattcttcgcccttttccccctccgcaattttcctgcctaaaatg

SEQ ID NO: 108976 - DNA, 318 bp, Heterodera glycines
tcgcatcatcaaaatggcggcaccgaaattggttggactttggaaaattaaacaacacattttgttaattaattgttaattgtcattcccaaatttttggcaattaattaatgtcaattaaagagctactaaattttgaatatgcaaaaaaaaaaaaacacttcattttcggcttggcttttttggtctagaattttcctcttccaattttttcctaaatttttatattttctcccaacagaaaaacggtccccctcctcctcctccacggcacttaactccggcgatttgctgtcagacaacaacgaagcggcaatg

SEQ ID NO: 108977 - DNA, 99 bp, Heterodera glycines
caaattggggcatttatcacgccggactgttcatttgcggaatcggtacccatttttaaaaagatcattagcgctattttttattcattcggattaatg

SEQ ID NO: 108978 - DNA, 266 bp, Heterodera glycines
caagcgagcaaatgaccggctatttatggggctcggggagggcgggtcaatgcggaagcgacgccaagccacaaaattcaaatgcattttttagcgcgcatcttttcgctgcgattcccaaagggatgccacgcccatcccacttagggctatttaaactttaccaatcccccaccttcctcacactgtgttcacggtgaaactctctgcctctctgctgttctttgtgcttcattcacacaaacattttcgctctcttcaaaatg

SEQ ID NO: 108979 - DNA, 196 bp, Heterodera glycines
ccgtcgacgacttaaattgttttgttttcaaattgtgcggcttttccgctgtttttgttgtgtgattgttcaacaacattcgccactcaattttttttgttgtttgatttattcaacaacaaattttcgtcaaattcaactcctgttttttgttgtgtgattttaatcaacaacttttcttcaatttcgacaaatg

SEQ ID NO: 108980 - DNA, 83 bp, Heterodera glycines
gctgaagaaagcttttgatttgcattttattttattttttgaattgtgccgtcctttccctcactgatcgctgcccaaatatg

SEQ ID NO: 108981 - DNA, 728 bp, Heterodera glycines
  unsure (1)..(728): unsure at all n locations
ctaaaataantcttttctcgaaaaaaaaattcaaaaaatcttgtattttttgaaaaaaagggtgggtgctaccantcgggtccactcgcgtttcggcgccggcagtttcggctgccagcatagttatttgtgtctataactttttttctatagtaattcaatatccacacattgtctgatatacattcgaaagcttaacatgtttagaaactttttctaagcgattgcttcgcgattagacaattaccaaaaagttatacatgaaaattgcgaaaaagtcaaaatttacaagttttttcttaataaattttttacaggcttgaaaatctatccgctttttgtaaggctaataaagcatgataagagctttcgaatgataccaagattgttggacttggatgccaaagaaaaaagcttaagtggaaaaacgagctggcgccgaaacgccagcgccgaaacgcgtgggtcccctaccacctaaactattacccaaattttggacaaaacgccaaaataggcaaaaaaagaacctctttcaaatttttttaggctaaataaaagctaaaagcctagaaaaaaagtattaataattcgaaaagtagcttaacagcccaaaaaaacaacatgtttttcgtgtgtttcaggccacggggctcaggaaaaaaataaaaatgttagccctattcatagcattgtaacacatcggcacgtcgttctgatgaggcatg

SEQ ID NO: 108982 - DNA, 596 bp, Heterodera glycines
ttagctgcttctatcacagctgaagcaagaatatatttaataaaacatttaaacatattaaaagattctgtattatattgtgacacagatagtgttgtagtcttaaatgaatctaaacatttatgggaagattgaatagatcctaaagagtatggaaaatgaaaaaatgagggttgttttaattatttttatggtagagaggcaaaagcttattgattaaaaaacagcatagatccgtctaaagacattgtaaagtgtaaaggtgttaataataaattattaaaaaatcagttagattgaaaaagttgaataagtgaaatctctttaaagtttactagtcttcattctaaaaagatagatggaggtgttattattactagagttgaaaaaataattaagctgaaagctcatgcactggtgcttcgtcgtctcgctcgcacacgctgctctcgctcaaccaaaaaggttttgctacagcacggagagggccttccctctattgtggggctcattgcgtcaattgctcttccgcttattatggatgtcattgaaaattataaataaggtgcaacaaagtaaaaaaaaaaagtaaaatg

SEQ ID NO: 108983 - DNA, 215 bp, Heterodera glycines
agttttaaaaattatcgctatgcgttgaaaagaaatctcgagactctcgacactgtttcattgtgcttgaaaattctactcttaaaaatggttttaaaaagcaattttgattaaaaaatgatcctttgtcagcagatgaaagcgccgacaatcggacgggagaacgccgggcaaatgtgacgacgaccaaatcggccactgtcacacaaccaatg

SEQ ID NO: 108984 - DNA, 1003 bp, Heterodera glycines
gaaaatttttaaactaatgtcatatactcaatctttaatattattaaaacaaagattcaaatatggattaggttttttaaatttatttgtctattgtttctattggtcatttttcattttctataaaattgtgctttaaaataattttttcccatttgtttccaatatcatatttttcataagtattcctcatttccattaaactgagctgtaatcgtcgtttaaatttagttaattagttcatttatttatgcatttatttgaatattaaaaagtatatttattttttatctttaaatatttaatgtaataaatgtatttgtttcgtaacaaaaaaaaattactgacataatttctttccattgttgaatttattattttataatcgtgtaaagcaaatgaaaaattaaataatttattttgtcctttgtttttattgagtaataataaaatttaaaaaaaaatacttttaaccacggggttgggctttgcttaattgtacatttcaatgcttaattttatcatgttcatttgggggctaatctatataaattatttttttatttaacaatattatgatataaatattaattattgattgtttacatttcactattgattttaaataatcgtgtttttaacttaatgttatcgtttttattttgtaaaaatcggcgacttaaatacttctcaaggaatatttgttccagaatatttattctaatttgatataataaattagacttgaattgcttcaaagtttttgattttttaagtaaaaatttgacctttaataaacgttaaaatagaatgtaaattatttgaaagttttattttatatttaaaacattacataacttttaaaatttgatgcgtaaaacaatatctcctttttacaaaaattgattttttattaattaatttattaagattatcattttagttctgataatttgaagataccaaattttttcactaattataatataatatttaataaatg

SEQ ID NO: 108985 - DNA, 249 bp, Heterodera glycines
aatttttaaaaattaatgaatttaaatgaattttatttgtttagctaaaagatgttttggaatttggcccacaaattaacagaatttgtcttccaaataaataaccacggagtggaacgacagcaacaatcatcggctggggaaagacaaaactaagtaaatttggattatttttttctaaatattttgtttaaaaaagaatgctctaaaatttttctgcctaaaatttttattttcttagacaatatg

SEQ ID NO: 108986 - DNA, 1003 bp, Heterodera glycines
atttattggtcggcttaattaccagcagcagatggagtcggattaaaatgaatacacaatgcaataatttaatcactttttcgctggagtgatcagcaacagcagttgatcattgagcaaaaatggggaggattaattgtccatcggcggagtgtacaaatatgaaaacggcaacggataaaattatacatgaattattgtacactaatgagatggtaaatgccatttttacattgtggcattccctcccaaaatgccatttgtcatttgtatgcaaatcgatggctgctcatttttcctctgctgctgctggttactcacttttatgaactccttgtaaatgaggagaccctaattgccttaaattacccaataaaattttctagtttgagaagcattcccaaattaattttaggaaaagctaaactataaaaatacataaaaaacaaaagttggattcatttctctgtcctattcaaaacgaagaagtgaaagagagcgagagagatagagaacgcagagacaggcaacgcaaggaaaggcgagagaacgcagagagtgttgccacaggagagaaaaagcgagaacagagaagcaaagacaaaagtgtgcacgttagaagtggaagcagaaaagcgagacagttctacgcaaaacccctcgggcgaggacgaaaagcggccgaatcattgtgaaaggacgaacgcaacgcaaggcatagagaaaataaaaaggagagagagagagagagaaggtgagagatagagatagagagtgaagaggaaaaggcagacaacgcagaagagataaagcaaacggaaaggagagaagaaacggccattccttctgctgctgctactgttactggcgagacgaaacgggccaaaccaagttcaaagtgccaatgtgacgacggcggtttttgttcaatgctaatcagctattgctcactaattaccccaaataacaaaactatgcttctcccaacaatggcccccaaatg

SEQ ID NO: 108987 - DNA, 104 bp, Heterodera glycines
caatcagttccttgtgtacaccttgtgaacgaagagtacgaaaatcagcctgttgttgtagaaggaacacttgatctgataggcgatctgttcttttcaacatg

SEQ ID NO: 108988 - DNA, 190 bp, Heterodera glycines
tttcgaaattcattaatgtgttgtgttaaaacgagtttaaatgagcatttttcgatgatgattttttcacctttttactgtttaggtattcatacaattttacatttagtgttaatttatccaattaataaaatttaataatctattttaattccctaattttttttagacgagagtgaaaaaagtaatg

SEQ ID NO: 108989 - DNA, 116 bp, Heterodera glycines
aatatttgagtttaaaattcagttcatcaaaagacggcaatttaaaggacattaaagagccgacagcagcaccttctcacaaaacaaaggcaaagacaacggtcaatttcgaaatg

SEQ ID NO: 108990 - DNA, 1003 bp, Heterodera glycines
tattatgctgttttaaaattcatttaattaaatataaagaaataataacacggatttttgtagtatattactttttcgtgagttctcatttaaatttgcaaaaaatttaaaaaaataaatgttacaaaatagaaggcgttttaaattttaataatgctaaataaattttaaattttttgtctgttattaatccgttcattttctgaatcttattttcttataaataaatacatttatttattatttaattcaagaaaaattcatttaatttaaatttaaataaattaataattaaacattttcatttttattttatagaaaaattattttaatttttttaaaattgaatttaaaaaataacaaaaataattttgacttaataattagcattaaaaaatagcagaaaataaatttaaaaatgatttacaccgtccggattcgaacctgaatgcctcagaatcccagtttacgcagggattctgaggccttaacgatgtcaaaagtgaaaactgatcacgtatccatgatcagcttcattaaatggccttaaagacatattttttgaagattttgggtgaaaaaatttttacactcaaaaatcctatgctcacccctttggtcccgaatcccaaaatcacttttatttttataacttttttcaaaaaagtgataaaaatgccaaataaaatttatataatagagcaaaaaattgcgcattttatcaatatttttttataccttagcactttgtttggagtgagttattaatttttatgtgaaaaattgaaattttcaagtttttcaggaataacttttattgtttgcaagatagaaatcccaaataaatctcataaaattctccctatttttctctattttttaaactttaaatggactgaattggacctttttgatgggagttatgaattttcaaaatgtagcttaaattttcaagggccaaaaaattctaaaatttcaaaaatttttaaaaaattccaaaatg

SEQ ID NO: 108991 - DNA, 284 bp, Heterodera glycines
ttttggctaaaattagcaaaaatgttcaaagaaaacgaagcgtggaaaagtaattaaattaagataaaataacttttgaaaatgattgaccgaagcacagacacaacttgcttccgactccaaattttggcaaattgccatcccgtaaaaagttcaacaagcaaaatcccgaaggaccaaatgtcagtgcaaaaggacaatttctcccttcgattcaacacacattctggtgcaaaatacctaaattaaaattctaaataactgttgaacaaatattggaaatg

SEQ ID NO: 108992 - DNA, 1003 bp, Heterodera glycines
  unsure (1)..(1003): unsure at all n locations
aagtgagaaacaatgtgatgacattaattgtttgtccatggttataagaaatggtgagaaacaaatattgcgaaaaaatcttatnancaattnaaaagattaaaattccaatttgaaagcggaaataaaaaacaaatcaaactgtgttgttgttctggggaaaacccctgttaattgcccaaagcatgttcaatagcataaaagataaaagcaacaatttgctccaaaatttcctcaaatgcatcgacgttaagtcagtcagttaatgtcttcgcgccagattaactcgcataaatacgagtccatcattttgcgatgatcgaccgcgctttgcttgctatttttttaaagaaataaatttttagcattcctgaaaaaaactgccatatttttgacactttctggcacttttttgtgtttttagaacttctttttgcccttattttgccatttcatgcttttttcgcccttatttcgcgatttttaaattttttcatgtaaaattcacaacttctttaacaaaaatgcattgaaaatttttttgacgtagcttttttggcgacttgtttaaatattcaaaattttttccactaaatttgtttttctttcttgaccaaatttggtttttgaaattttatttattttagaaaaatgtattcaaaaatttcgaatatatttaattatttgcaactgtaatcaatgaataaaatgtgtgccttaatttgataataaaacagtaattttaaaattatacccctaaatttggaactttttcgtgcttattttcgcacttatttcgcgattttttcgcccttatttaaggccttattttggactttttcacgcttaaaaatcccatcgctaatgatcatataatatcaaagttcactcacaaaggagtaggaaaacgaaaagcatcattcaaagcaacacaaaaaaagtcaccacctcttcagtaaaaaacctctttttctaaccaatttaaaaaggctaataccaaatg

SEQ ID NO: 108993 - DNA, 152 bp, Heterodera glycines
ttgtttacaattcattattgatcagatcacatccattttcaaaaatatgtttttgattttgctttttaataatgcttttcctccgttccgtcgcactttttatttgctaattcattttaattgccaatttgtctcatttcttggttgaaatg

SEQ ID NO: 108994 - DNA, 808 bp, Heterodera glycines
aaatgactcatcgatgtaaaaaataattagattttaattttaaatgtatatttttttaatgttttttaatcgacccataactaattgtttattgaaaaagtaattagtagggctgcttaagagtcgaaatttccgagactcgagatcaagacccaacccccgccccaaaaaaaaggccgagaaatttcagtacaagttttttttttgagaatttttagaatgtatataaatattttcccaacaaaacattttttccaccttttcttttattatttttgtgggcaaataattaaataattatcatcattaaatatttcaaaattcataaaaatttaaaaggcctatgctcggcctaacagctaagaccaatccaaagcacccaaaaaaatataaaatattcacaacaaaatgattcatcgatttttaattttaaattaattatttttgaaaatacaagaaaaattttttttttattattattattattattattttcaacttaaatatttataatcaattaaaattagaatagaaaaaaataaacttatagaggcttaaagcaaaaaattgccaaataaatatatccagcctaaaggaaatttgtgcaaaattttaaggattttgtaaaaaaaccaggaatcacttattaattttcaaacatttgcatttaaaattcttttgtaaaaatattatttttatatttacatttactatttttaaatttttaacatcataattttctgtaaaacattttgctagcaaatgcttcaactcaaataaaaattccaaataatttggcactaaaatg

SEQ ID NO: 108995 - DNA, 140 bp, Heterodera glycines
ttttattcaatattatattcaatgcatgaaaacatttaagctaaaatggcaaatttaaaaaaatgcgtcttttgttattgctaaattaaagaatgcaaattgaaaagcataaacaatttaaggacccgccggttggcatg

SEQ ID NO: 108996 - DNA, 229 bp, Heterodera glycines
ttttgggctacttttttgtcttgaaaatccacgccaaaaatggaagaaaaaacagcaaaaaaaaatttgcgagtaaatcacaaagcttgcgcagcattttttgggcgatgtaaaagggaacattgttggtaaaatattggcatattgatcagcttgagaagcatgttttatgttaatttgtgcgcctcttttttgacttttcaaaatttggtattcgatcccaaatatg

SEQ ID NO: 108997 - DNA, 81 bp, Heterodera glycines
tgtaaaatgggcttttgtggttttattcctgttcaattttaggacaatttccaccaattttgccgcgttattagccgaatg

SEQ ID NO: 108998 - DNA, 199 bp, Heterodera glycines
attaattggtccgcttttcgctcactttgctctcctaattgctcactttaatcgatgggtgtgggttgcccgtcacgtaacatttgaaccgtttcgattcgccgggttggccgttccacactttcggctcgacacgtgccgtcggtggctcttcctctgaatattttaattaacaaataaactaaaaatttagtgaatg

SEQ ID NO: 108999 - DNA, 113 bp, Heterodera glycines
ggagaacctttatcagaacatgttatcaccgttgccttaaagctctagctctacccttcagaaagccatctttttgttttcccaaccatttcttaatttcaatttaaaaaatg

SEQ ID NO: 109000 - DNA, 372 bp, Heterodera glycines
gtatcaataaaaagtgccaaaggaaaattttgtgatggttatcgctattacaaacataaaacgaccaagttaaaactttggtgtaaatgtgaacttaattcacatgggtgccagggctgggattttgaaaaggaagggttttttacaatgacgcgccgacacaatcatcatccagacactatattgattgaaatcgaagaggaaataaaatatcataatttttctgcgggggcaaaatgttttttgggtgacaacaagaaatagttgatgatgctaagaaaaatccgagactccaaactgaatttagagatgaatttattgtttgtaaactataaataggatcaagaaaaaaataccaattaaataaaaatg

SEQ ID NO: 109001 - DNA, 187 bp, Heterodera glycines
cctcaatttacaaaatgaaaaaatttggttaggcccttcaggggaatgggagaaactcctgaacctcccgtaatgaaaaaaagattaggaaattgggtaggccatctcccaaccctcgaaacgaaaaaaaaagaaatttattgaaagaaattttgaaaatataaagcaattaaaacattcaaaaatg

SEQ ID NO: 109002 - DNA, 297 bp, Heterodera glycines
ccattgcgctctctattgaaattgttttctctacctcctctttcaaaaatgttttgtatgactgggactgagatccagcactctctcatttttgcgttatctctcgcactaaaattataaaccgctcatataaattttaaaaaattttcgcaaattttaaaaattacgttgatatttgcgttgatggcataatgttagttgatttaattaaatatcaacatttaaattgataccccgcaaaaactaataaaaaggttgatttgccattctctatggagaagccaggaaaaaaatatg

SEQ ID NO: 109003 - DNA, 348 bp, Heterodera glycines
ctcacaaatcagccgccccccctgcctgtgcccttgagggcaggggctcccaacttaaacacctcatcgtagcaggacttttttctttctcatccaaatcaaatattattcgtattgttcgaaagcactcaaaaacacaatgaacctagaaaatttgaattttttgcttaatttgattgacctgacaacgagcaaaattatggtttcaaaaaatttttggacactcgtgagtaagcttaatcaacaaacagccgaagtacctagatgctctcaaaaccaattgataaaagaagataaaaagaataaataataataataaatacatatattccaaattttagtgacatg

SEQ ID NO: 109004 - DNA, 304 bp, Heterodera glycines
  unsure (1)..(304): unsure at all n locations
aaattagctgttttgcacgataaggggcggancctatcttactagggcaactgtgtatatgatttattttcagatagtcctttctgactctttgaataaatgtacgtgacaatttatccaaaattttgctaactgagttagaaatgataatctccacgattcaaaccaattttcgttgctctaattaaccgcgataaaaacattcgaatcaattaaataacttctgagataataaggtttatcataaaatttcatttaaaaataaaccctcaattattggtatgaacgatactttccaaacatg

SEQ ID NO: 109005 - DNA, 149 bp, Heterodera glycines
  unsure (1)..(149): unsure at all n locations
accgatttttgttcatgaccacccacnccctccccttcagaaactgaatttttttcaggttttttttaaatgaaattaacaaacaaatggaccatcgtcatcatctcgaggtcttcgggaaaaataggcgagcccaagttgccgcgatg

SEQ ID NO: 109006 - DNA, 1003 bp, Heterodera glycines
tattttacgtacttttttaccttttctctttttcaaaaactttcttttaattaaatataaatttttttttggggggttttagggaataaatctatattccgctatttttgcgtttttagtccatattttggccatttttggcaaaatttcacaaaaaaaatgcaaaaaaaaaggcgaaaaatacacccttaaagatcgacttttttggaaaagctagaatctaataaaaattggcagtttttagcttaaatacatttttcgtaattttttagggtttaaagcatatattttggcagtttttagtccatattttggtccatatttggtcatttttgacctttttagtccatatttcgggcttttttagtccatattttatgtccatatttgccgttttttagtccataattttattggtctgttttggagtgttttttaaattagtttcggattttttaataaattttttaattattttttataccatttaaaaagggatttttttaaattataaaactataaagtaaaattatttataattttggaatataaaaactcactttttctgtttttctttgttaaatctttagcaatgttttcttttgtacaaaacaattcaattcaaaatgggaaaattactttttgtccaccacaaattcagcaataaatgtcacttttttccagcagatcgtataatgggtaattatgatttgttttgtataaatacaattaaaaataagaccaatttcaataagttttttttcagaagaatcccgcgttaatttattttttgtaaagtgaaaaaatcggctttttctcaaatttctgagtatgtatttttgcatttccgagttgtcacccctgagcctaatcaacgaaattcgaaaaactaataaaagaattaagggctgaaacataaatacggatttcatccataattaattattaaatataaaacatttcatttcctaaattttgttcagttaaattttagacaaaaatg

SEQ ID NO: 109007 - DNA, 301 bp, Heterodera glycines
agtgaggggaggaagaagtgatcggacaaatccaatggaatgaatcgatttcaaaaattttgcgaaaatttttgaaaaattttcccaacggcacctcggcatttttgccacccgtttgttgaaatttttcaaaatttaaatcaaaagtcctcaaaaagttcgacaatggcctgctaggccccgatcaaatgagggtaattaacggattgatgacgatcggttatcgattgaccaaactgattgaactcacacacagtccgacaccagtgaggcggtgggcactgcccgtctggtggccatg

SEQ ID NO: 109008 - DNA, 330 bp, Heterodera glycines
agtagaaaagagagatttcggagaaaaaggagatgaaagactaaagaagagaagaagctgacacttccccgccaaacggcaccaacaaaaacgaattatgaagtgatcaactcgttaaacttgactttgtgtgtttttaagaacaccgtatgccacatgtgggttaatttttttaaatttaaaattgattcaatttttggcattatgccatctccttgcttgttggttcactaaatacaaattatggtttacataaagggagggaacggacagggagaacaaatgagtgcattttatcattacagtattgttttggcttctgtagaaatg

SEQ ID NO: 109009 - DNA, 121 bp, Heterodera glycines
aaaaaatgggaaactgttctggaaaaccaaaaaatatcaaaagaatttgaagaaaacattaagggcatgtgaagaaatcgaaaagaaaaagcaaacattggaaacgaataaacaagaaatg

SEQ ID NO: 109010 - DNA, 187 bp, Heterodera glycines
aaatatatgaaatgaaaaagaaaagagaattaagttatgtgttttatgattaattcttttaaacaattaatttgggaattttttatgtaaaatattaattttcttataattttttgcaaaattctttggaaataaatttgataatctttggttatacggctgcaaaaaatattaattagcaagaatg

SEQ ID NO: 109011 - DNA, 392 bp, Heterodera glycines
ttttaaaattggttccggactttcccggccttttgaaataaattcgtagaaaaatatacgaaaattattttagcttttaattacgcagtacaatgcttttaagccccgccgtgaggcgggacagttccaaaattttgtaccacattttactgtggaaagtccaagtaccttattggacaactacgtgtcaatgagcacagtcgcctttggccagttgtggaacggaaaaatgggaatatcagatggggtgcgctcttttctaaaaattcctcttttcgtctaaccatccctcccttttgtgcactatttcgtttcaaaattgaatcattttttttgtctttttgaaataaattgtgaaaaatatacgaaaattattttcggttttaattatg

SEQ ID NO: 109012 - DNA, 144 bp, Heterodera glycines
tgtccagttccggttttagagcaattattgaatattttataagtatgaaatatgcctactttattattttgtcttctcaattttaaagccctttgtttatttaatcttgcttattatttattatcaccatgaatcctgctgatg

SEQ ID NO: 109013 - DNA, 198 bp, Heterodera glycines
ccgaaagaaaaaaaagtttataagaaaatttttttttccttaaggtagcaacacatcataaaacgccgaaaaaagggcctttacctttttttatgaaaaagtttcaggcggcgagattttaggttcaaacataaattcggtgatctttttttcataagaaattggtgattggacgatgtcaaaatttccttacccatg

SEQ ID NO: 109014 - DNA, 53 bp, Heterodera glycines
caatttccaatgaaaagcgataaattggaaatttgtgagtatttagtccgatg

SEQ ID NO: 109015 - DNA, 562 bp, Heterodera glycines
  unsure (1)..(562): unsure at all n locations
tgttcgggtggacnccgataagacattatttattaaatttgtttcatttccatttattgtttgtgtctgacctttcactgtcagacacattctattgattgtatttgtgaccatttgccctcccctcttttcattcattcagtttatgatatttgtgttcacattttccaattgtctcctccgccgtcctccgacatatttatttgttattttaatttgtcttcaataaatatttatttgttcgtccattcgacatttcggggaccgaacaaattggcgacgccctacatttgagctcagcgcctatttgaataaattgctgagtgcaatttattgaatttgtctgcaaaaaaaggtcggccaggaggcaccattattttcaacaagccaaattcgtcgatccgattaatccgccaggcgcggttaatcgtggaatttctacaaaaaaaaacccagataccaatacggttgcggtttccgccaggcgcggttttattcgacacaaaaaccaagaaacctaggcggttgaggttccgccaggagcggttattcgacgaaaatg

SEQ ID NO: 109016 - DNA, 702 bp, Heterodera glycines
  unsure (1)..(702): unsure at all n locations
gataaagaatgagatttttgggaatttttatgcaaaaacacacttattttttcaattttnaacacatattttagcacatattttggcatttttgggggtttttagcacatatttcagcattttttagcacatattttattacatatttcaggatttttagcacataaaaatcctagccctattaatcaccatttcctaagtgaaaccagcagcagtttccaaatatgtaaaaacaatttgtcataatatgagcgccaaaaaacaattcataattttttttgaacatttctattttttccaaatgcgggttcaaacggagatgcaaattctattttttaaaattataaaaagcgaatttttttgcagaaataagttttgtaacattttgtcaaaaaaattaaaaacaaaatacaaaaagagttattcataataaattttatattttaaacaaagatccgacccatttttatttttacaatgtcttttttttataaaagcactttgctttacctctcgcaataatctccatcgctttcattgtataaaattttggggcattgattttcatttaataaaaattatcattttataataaaaatattttaaaaatagattttaaatttctcttttcatctttatggaatttgcttttctcttcgtatttcgctgaaaaacttcaacagttttggcctcccaaaaatg

SEQ ID NO: 109017 - DNA, 471 bp, Heterodera glycines
acttttttttggtcaaattttttttttgttttttttacacataatgatgaatattaagtattaacagcacaattatggtgaataaaatgtatattcacgatttttatccaaaaaaaaatttacaaaacaaaagggtcccccctatggtttttgataaaattcaaaatctatcactttataactagcgccaaatttgcttaataggcccaaataattgtcatattcgtgatcagcgacctttaaaacacccgggtacttggtttcaggactttttaaacaaaaaaaaaatttgaccaaaaaaaagttgaaaaaattttcaaaagtttcctctttgcaactagcgccaaaaaaaattagggacccccattcttcaggaggattgcggaattgaaatattcagatataaaaaactaaagattagcagttgaccagtgaatcatatttttgcagatcatttcaatgttacctatg

SEQ ID NO: 109018 - DNA, 131 bp, Heterodera glycines
tttttgtacctatccttgtcgcccttctgcattcctatcggtgatcatcttcaattgcagagcaccgagagactcttagtgatgatgcacgtgtgttgttgcccaagtctcggtcactacaacggacaatg

SEQ ID NO: 109019 - DNA, 187 bp, Heterodera glycines
aaaaaatcgtctaggaatatttatctaacaaatttgtcgggaaagctgtataaattatgggaaaaagctttttcaaggaaaagctgaaaaattttcaatcgcatcagaaagcagcctcaaattgttcaacaacataatgtaaaaaaatattacgcaagaaattatttttagatcctttttagaaatg

SEQ ID NO: 109020 - DNA, 199 bp, Heterodera glycines
agtgaataaaactaaattaaaatgattataaaattaatttccaaatattttcagcaaatttaaaaaaagcaaaaaaactcgcttttttattttgttacaatatattacattataaataaaaattaattttaaagatttaaagtccgaaagaaaaaatgattgtcagcgacgtgaaattcttagcaaattttttaaaatg

SEQ ID NO: 109021 - DNA, 296 bp, Heterodera glycines
aatattttataattttttctaataaggaaaatttttaaacctaaaattttatatcaacaaaaaaaaaaaattaattttggcgatcaatttttgagaaaatttttcaattcttattttacaccaataaataattaactaaagtaggatcttggaagaaaaacatgttttcttggactgtttctatctttggtagaatttataaacaagaaaatgacggaaacaatgtttgtttaattaaaaaaaaatttccaattaaaaccctaataattagtgaacagttcaaagcgaaaaaaatg

SEQ ID NO: 109022 - DNA, 361 bp, Heterodera glycines
actaattagtccccgttcagattctctccccgagcattctgtcgggcggtgggggcggaggagaaaaatgaacggaaaaccattttaagagaaatgatcagtcaaaacattgttttctttttttatgtgtcataataattggttatatttacaatgaattaaattcgtttcaaactgaaattgaataatgaatgttcaatcatttatactgtatgacgtaccgttctcatttctcggcttctgaggggaataataataatatttacttaattttcacttttcttttatttgtaccctttgatgttttgccgactatccctgcggcggtttgcccttttgttggaacggactttcgaagatg

SEQ ID NO: 109023 - DNA, 1003 bp, Heterodera glycines
acaaaaaataatcgtggcttaaaaattactaaaaaattaataattaaaaaaaatgcccgacaaatcaaatcgaagtgatcactgatcaaaagtcattaaaataaattcaatacttaataaatttcacaaatcgtctaaaaaattctaaattttttagtaaaattttctttgggttgaattttaagttttgtttcacttatgttcaaaaattctcggcatcattaagccctgcttgcgccggaagaatcttggcacattgcgtctcagttttgcttcagtcccgacaaaagtcgctttattcccctctccctcgccccctaattatccatgtctaatgtggccagggttagcaccgaataatggcaaattaaggctttaattaactctattaatgcgcttcccccacggagcagtacaaaacgttgccggacgaatttttagaccataacttctttttttttctcaaccaaattaaaaaacattcatgatattgttctaaagcacttgagaaactacaaacttgcaaaatcaaaaaaagaaaaattcggacaataccaagaatgcttaatttgattgaaaatgaagaaagttatggccctaaaaaaatcttccggcgatgttttgggggttcaccgcttcccccatcagtacgcctgaaatagcaatgcttgatcaactccctgatcactttttttcatgttcagctgattgcttgttcttgtccaactcggcagctttccaccagcagcagcagcagcaacagtcgcccatggatttgatgtccgtgctccaagcattggccaccgcttcgtccgccgccggtgccttttccgcttcgtctcccaccgttgtgtctgcgtttggtggcaccgctgcttcgcaacattttccgtttggcagtgccggcaccgtcaacgccgccatctctggtgcttctccggtaaccgtaggcggcggcacgtcggcggatgcgggcggctttttgatggcagccgcagcaatg

SEQ ID NO: 109024 - DNA, 133 bp, Heterodera glycines
atgcgaaatactcagatatccaaatgacgttggcaaacggccaaaaatcgcaggtgaaacaagtaaggcacgaaaagaagtcgcacttgacggaggtgcatttgttggtgttgaaattgatgcagaaaaaatg

SEQ ID NO: 109025 - DNA, 155 bp, Heterodera glycines
taaaacatttcataccgcaaaattataatggcccatcgtcaaattgccatcctttttggaacaaaaaccaggcaactttggacactgacaatgagagagaaaaataaatgaaaaaaggcatacagtaataaggaattgggaaacggtagaaaatg

SEQ ID NO: 109026 - DNA, 1003 bp, Heterodera glycines
ttttatttcttataatattacaactctaaagaaagcacaaattcgaaatttcagcaaattccttttcatttttaaattggaatatccaattttattttgctagcaattattttgttgccaatttgtggattttcttctttaattcttaatatttttcatttatcctttctcattacattttccccattcgttgccgaaggtgctaagtatcagttataataaagataattaaatttaaatgttatagtgagtaaatcctataaaattccaattttttatgcatgtttcataaatatttttgcatttttaatacatatttatttacatattttgcaatttttcttacatataaattcaatcaagtaataaacaattcctttacttcttttcgtattttaattcaaacatcgatatcaatttttatgagaaagtattagctagaataagtgtttattattttaaatattatcatcaacgaattttccttcaaaaaattacatttattcggttcttaaattgcaaaatcattatttatttatgtgacataaaatgagtatgtaattgaaactgcttattagataatataattttattagatttactcactttataacatttaaatttaattatttttattataaccgatacttttttaggttcgacctagcaccgtgaaattggaccaattttaattttattattttggcaaaaaataaataaataaaaaagtcacggaaatcataaaaaagcaaaaggaaaagcgaatgaaagaaaagcaaaggcaaagaaaggactcatcacattttgttgtgcggattgaatgatcacaaaaccaaagaaaatgggggggggggggaaagacgggcgaatgaattcgcacaaaaagtgggccgacggaatgtgtcgaagtgtaaacagaaaaaatttgggagacattaacactttgccaagaattggaatgaaaataaataaatgtgaatatcattcagttagtcggtcaatg

SEQ ID NO: 109027 - DNA, 73 bp, Heterodera glycines
tggacagcttttccactaagccactgtcgcgagacacatccaatcccactgattcgcataggatttggacatg

SEQ ID NO: 109028 - DNA, 197 bp, Heterodera glycines
tctttccagtgagcttgcccattttctctagaaaaaatttcccaaccccctagggatttcgaaaatttccccgattttcagtgtattttaggtgccccggtcactaggaaggagtgatctgatcaagttgatataggagacttttttgatcagcaccaaaagttgtgcgagcatgaattatttcaagtttttaaatg

SEQ ID NO: 109029 - DNA, 132 bp, Heterodera glycines
aaagaaaagcacaaaagaaaggaaaagagcagaattatcagaaaatattagaaaaagagtaaaaaaaaggtaaatgaattataagcaaaacataaaatggcattattttgctaaacaattaaaataaatatg

SEQ ID NO: 109030 - DNA, 87 bp, Heterodera glycines
tttgcccctaatttaatatactaattggtcacttttgatgaatccaaagcccacaaaaaaattccaccggaactcctttttgaaatg

SEQ ID NO: 109031 - DNA, 154 bp, Heterodera glycines
cggacatcccggcgagaacgtgacatcccggccagcctggaaaccccggcccgcaaggataccctggcgacggcggaagccccggccaacccggcaaccccggaggcaacggcgagcccggacagcccggagcacagggatccagcggccaatg

SEQ ID NO: 109032 - DNA, 365 bp, Heterodera glycines
ttttggcccctgtctttttgctcccacagcaatttgagctcccacagctattttcgatcagccattacattcccctcctctcatattcgagcgccctcgctcgagagatggcgttgggccgttcccgctatgcaaggatcggcgcgcctccggttcttttgccccagtgccagctgttgtttctggagtgtcgagtggtgtgaagaccaaacgacctggggtgtccgccaagtgtcaccataagccttttcccattggaccgttttctcttttcacgatgatttgcatttgtttgctcctttccacagtatccaaagtccaatttggagccgtctccgtttgtggaggtttcgctgggccgaatg

SEQ ID NO: 109033 - DNA, 813 bp, Heterodera glycines
  unsure (1)..(813): unsure at all n locations
gaaaaatgacttaacacaaattttgagggataatgcacngcattttaccatttaaaaaaacttaaatatttttcgcaaaaatttgaaacagaaattgataaaattggaaattgaagattggtctctttgactccatttactgaggaataaaataggaattgttttcacttacctagttgaaatttcaaagttgcagctatagttaaaatttcagctcgaacagttcacaggaagtgtaaaaatttacgaaaatgggggtatctttatattaatgttagattttttgaaaaaaaattttaaaataatcattcaaattaaaaactaccattatatcattattattcttatttttaattttgatcatatttttaactgtttagaaatcaaaaacataatctttgtaaacatgaatttttatattttaagttttattttattattcataaacaatttaataatcaacgcttcgtctgttcaattgaataaaattaattcaaaaatacggccaatttttgatgaaatatttggccaaaaatgggaaaacatggaaattcaaaatgagcaaaatgatttagcttccattgtcaattatctgaatgccaatcaatgtgatgatcaacaaaaacgcgaaatgttaacaaataccacgcagtaaaagaaggaattaagaaaagcgggaaatattcggcaaaaattaagaataaaattgaacaaaaaatttgtaaaaaattgggaattagtcgaaagaaaattttcaaatggaaaaaagaatttggattcaatataaaaaaagataaaaattattatgaaatg

SEQ ID NO: 109034 - DNA, 166 bp, Heterodera glycines
accgaagaaaccgagtccaaaaggcgactgggaaagtgcattaagccaaaattttgctaaattttatcaatctccgaaacgaaaaaccgcaatttcgcctgtggcaaaaggtttatagctcaaataaattttcgttttttaaaatgaatttttttagtgaaaaatg

SEQ ID NO: 109035 - DNA, 1003 bp, Heterodera glycines
ggtatgaagcgagttattgcagatcaaaataaaaaatacaaaaaagtcatttttcagtgtaaattttgaaataacgcgcaaaaatttacgccaaatgcgctatttggcgttatgagcaattttgtctaacactgggcttgacccatagtgtatctggttttaaattgtgaagctaggatttaataaaagtttggcttttttgagttttttaattttgggatatttttaaagtttgtttaatcaaattgaatatattttggaatttgtgagtgtttaaaacgattttttggcagtttttagtccatatttggcaatcgctttttagtccatgttatttacaaccctatctatgagttaatcactaaaaaatttctaccaagcaggacattctgatacttcgaattattcaaaattaaaattttctttaaaaagcgtgtttaattttttaaaaattgtttaaataattttaaatcacttttattttttgattgttcggaaattctcgttcaatttaccccaaatttccaagggaattccttcaaattttcagttgactaagcgagccatcggccgggtttgaaaattcttagctaatttaaaagttagtgtcaacagaagttcataaaaaattcatttcgaattaagaattcagaaaaacaaatcattgccacaaatcaaatcaaattggacattgttaaaattgttgtcctccgaattttcgtctttcttccgctgaaccttcgcctttgtctcccaaattgggcatcgcttcaatatccaataaaattgggggtaaaactttacaaatttcttcaaatttgttaaatttttgcataaaaatctcgaaaatagctaaatatcgtatgaataatcattttagaaccaaaaatataaaataaaatacccaaaaaatgatatttttgaaaaatttccggtcattagaggcccaaatggccgctttaatatagggggccgttttaatagaggattttgttgaaaaatg

SEQ ID NO: 109036 - DNA, 64 bp, Heterodera glycines
ggaagaagacttgaaggccaacgaaaaactcaccaagttttacggcttcaacatcattggcatg

SEQ ID NO: 109037 - DNA, 109 bp, Heterodera glycines
acgaacaacaaagggaaaagggcgaccgcctgtctccgcacagtcgcatatcttcaaagttaacaacaaccacgacaactactgccttttttacgcgctggaacttatg

SEQ ID NO: 109038 - DNA, 1002 bp, Heterodera glycines
  unsure (1)..(1002): unsure at all n locations
tttccaaactttcgttcatccgaaagaacggaaaatttcaggttgtttttgtccgcatttaatagagtttttagtccctaatattaatacgaatgcagcagtgctaatactcgggactaatatgaagacccgagactaaaatttccccagaatcggggcgnagtctctcaagagcagcaggggcggcgaattgaatttttatattttataattaatacatatgtgtaattgtaactattaaattagaaaatattctataagtgtcttatacatttatagaattaatttaaaaataatctactggtgctttgtataattaaaataaaacaattaataaatcactaaataaggatgataattgacacataatataataaaaatgaaaaaaaattttttttggaatgaaaacaaataaaaattcaagaatttaagaaagcgcagatgactcagccggggaccccaggaaaaacgggggtaaaaaactgagattcacaagaaaataaatatttcctcttgagtaggtgggtgatccaacttaattttccgcatcctattaatcatattcttttatttttctctgatttgaattccgctgtttttcctctcatgagtggcgaaacaaattccaaagttcaattaaaatatatcaatatttcaatttaaaatcacaatttaacaaatcatcgtgttttttcgtcacttttcattttgttggccttttcttctcacaatttctttttcattcggaataataaataatattaaataataatttcataaacagtaaataaaatggaaatatttggcataaatattccgtggatcattttgtttttgttgttatttgttccacatttatttaagcaatcaaaaatctgttgtcaaatacctaaataaaaatgagcctataaataaatgagaaattcaccaattaaaataaccatttccccgttaattttgcatttatttttcattttttaagaagcatttcaattttcaatg

SEQ ID NO: 109039 - DNA, 1003 bp, Heterodera glycines
ccccctgtgaccgtccctggaggaacgatgggggggggggggggaaaatgaagtgcacccaaaaaatttagcctattaaaatatttagaaaatcttattatattttttgaaaaatttccgatttccaatttccgaaaatttttggggcctcaaaatgccatccccggtgacgatgcttttaacggaaacacttgggcaggctcatttttgagagatgagaatctttttggcgtaataaagccgaaaaatgatgccaaatcattgaccctgctattagcccattttttaaatcaacctttagcttcctttctcctcattgcacaacaatcaacaacaaaaaatgacgacaacaaaaacaatggacgcaaagcaacggcgacagtaagtgactaattaaaatggaaaaattaattaaaatatttcttttttgcattcttatcaaatatatttctatacaaattttctttaccattttcttttaattggctttttctcatcaccaattttctaagtgttgctaaagggcaaagtccgattttggcaattttgggccaatttggcaatttgggacgggccaaattcaatcgtcccactataattgagtgagcgacgaagggacacccgatggaaaaaaagacatcgttccgtcatagcattctcaaggggttgccaagcaattccgattcatttgaaaagaaaagcaatttgagggagaagcggcgaacggagaaagaagctaaacatttttaaatggcaatgccaaaaccaacacataaaaggggaaactttttggcattttaatgccaaagaatgacaataaatatttcaattaaaagtaacacctttatctggcacggcacttacatttaacaatttgttgaatttgtatctgtcgtgcttcccgcccccaaaggcttccccctccctctccctccccccttagataattgctaataaaagggaatttgtgcaagttagactcatttttccctttccataaatg

SEQ ID NO: 109040 - DNA, 359 bp, Heterodera glycines
tttgtttagcacaggaatctgagaaatgttacaaatgaaaataaagtgaatcatacgctcaattataggtagttaggaatgcaaaagcaaaagggatattttcctcattacgccacacaataaacattaaatacgccaaattgtggactcctatttggtgagttgctctggtgaatagacattcaatccagataaaaatataaaaaacaattcaaaagtggtgaaatcagtcaaatctgaagtctaacataatgaggaatagagatgagatttttccagagatcgcatcgaaaacttgggttttgggcctacaccacaaaatttggtaatactgacttttactggtcacataaaaaatg

SEQ ID NO: 109041 - DNA, 311 bp, Heterodera glycines
aatctattttagcggtgtggatgcgattggagcgtgcacatacactatgtttttgatcaacgccagaaaactttcaccattgaagagttggaacaaaagctcgttggtcaccaacgtgtggggttgtcagcctcggagaacgtacagaagcaaatgttggaagagcgagggatcatttataaaaaggcattttaaccagtcaaatttcatttgtcgtgagtgatatttgtcaggcggcacatttttgtgtcttcctatcgaaatgggcgctgaagccgtacaacgacagcatggaggcgtacatcaacatg

SEQ ID NO: 109042 - DNA, 395 bp, Heterodera glycines
tgtgaaccatggtcaataattcttccaaattatttgttttgttttttgtaaggtgttgcctagtcatgcaaacttttcttatgtttttaagagtcgcttatcacgaatctgaatcgatcattccgagtgtttaatggagtttgaaacaaaaatttgaaatttgttaaattaatttttcgaaattttgttcgaattaggattcgaaattaaccaaaatggatgtcagattcataatcagcgaccgctaaaactccggtgaataatttttcacgattttttatcacaaaaaattttcaatgattttccactatggtttttgataaaattcaaaatatacactttgcacatatattacttggaattttcaactgatttgtccctttgggtttcagatg

SEQ ID NO: 109043 - DNA, 207 bp, Heterodera glycines
tcgcccggtcaaaatgtattcagtcgctgctacagtaccatcaaaacggcactgcacaacaaaagacggtagaattttcgatcattgatttttatagttaaaattaaaataaataaattcataattaattttattcgcctaaattacgccaagaaaatttgttactaatttattcgtgccactatcaggtataaacaacggcgaatg

SEQ ID NO: 109044 - DNA, 442 bp, Heterodera glycines
aagagatataactttaaccaaaacaacccaaaattaaattcaattggtatggcttcgatatcattagtctttctattggcctataaatttcaaaaaataatcttttttaatataaaagaaaaaaataattttgagcatttttgccaccccttctttaaactttttagaacatatttagagggcttacaaccaaggacgaaattttgaaatttggctctttctgaataaagataagaatttttaatgcccattttagcgggaccggaataaaaaaagtgccaatgtaaacaaaaagccaaaattagcccgttttagtgcaaatttttgaatatttttaacataaaatttgttaattttcattataattgcatttttaaagggaggagcaaaagaagtgttgcacggactgctacaagctattcaaaagttgtttccaagaatg

SEQ ID NO: 109045 - DNA, 401 bp, Heterodera glycines
aggtcttttttactggggtaaaattacaattataatgttttttcaatttttttcatgaacggatcagattttaattaatatataaataatcttttttatttttattattatttgttctggaaggttattctttttatttagtgacattgaatgattgcccaaattcactgaaaaattattgggacggcaatttttgccattcggaactcaaaatcacaaattgtttgactgttcaaaagaatagcaaaaaaacgggtaaaaaatgatgttttatatattttaattatttattttcttcaaaaggcgatcgatctgtcttcgcaaaacatccgattttgctgaacaataataatgacccgtccaatcacattttttactatgaaatttcagtcaggaaaatg

SEQ ID NO: 109046 - DNA, 91 bp, Heterodera glycines
ggtataattaatgtgaaaaatataaatgcaaattaataatttctaagaagtggcagctcttgcactggcggcgttcacacagatcaaaatg

SEQ ID NO: 109047 - DNA, 125 bp, Heterodera glycines
caaagtaaaaaccttattttttcacgtttttttcccatataaagcttcaaccggcttatgcttgttcatatccaactatcttccgcttcatcaacacaatttgatatgagaaaagtcaattgatg

SEQ ID NO: 109048 - DNA, 571 bp, Heterodera glycines
actttaatcaaatgtgacgactgattagtggaatgcgatcaatcaatatttggtttgttggcgatcgaaaatttaatcaaggagaatcggtctgatcaataaatgaatgattgaactttaatcaaatgtgacgactgattagtggaaatgcgatcaatcaatatttggtttgttggcgatcgaaaatttaatcaaggagaatcggtctgatcaataaatgaatgattgaactttaatcaaatgtgacgactgattagtggaaatgcgatcaatcaataatggttggttagtgatcgaaaattgttcaaggaaaagcggtcagataaaaaaaatgtgtgtcagtgaacttaaatcaaaagcgattgatcggcattaaaagtgatcgaccaaaagtaattttttttttaaatatattttgcctgtaaaatttggtgcgattttattaattatagaaagggttaaatttaataaaagttccaggaaacattttttaataaaattgacaaaaatctaaacaaaatttaattacatacatatagctaaatttctcacttttcagaaacgaaaaatg

SEQ ID NO: 109049 - DNA, 811 bp, Heterodera glycines
agagggcgagagcaacactccctcgcctactctttttccttcccccttttcaccatctctcgctctctcgcctctttctctttccacccgactattgcgtattttctacctcctttccttccccctccctctctctttcttcctttcccacctttttcccactcccactccctccctctccatttccttttcctctctccctccttctctctctcccgcctctctttctcccctttccacgctatttcctgtatatgtgtagccaaaaatgcaagaggattccgcttttcgctgtctttctttatgttatgttatgatgggcggccgagtgggtgccgcccttgttgctattttgggcggtcccattaaatccgctccccccattgcctcccttttttccaagcgcccgcctggcggcggtcttccctttgccattgcttcttcttttaagttcataacgaaaaaaaaagtctttgtaaaacagtgaatgaattttattgccaagagaaaataaatcactgtttactccgttggaccgcgcgcgcgtgtgcgttatcccgcgaaaatttacacaccgttctgacactacgccgcgttttggttattattcccccgggcgcgccttttgccatttttgtggtcactcataatttgcaggtgttaagtgcttcctttctcttcgtatttttaataatgacaattaagtaattaattaatttacctacaaatgtcgccaattctttgtcagcaatttatccgaaacaaagacactgattgaattcgttcataccttttccttttttaaaaaatg

SEQ ID NO: 109050 - DNA, 406 bp, Heterodera glycines
tatgcttttaacattttttttgctttgtttttttgaaattcctcttacttaatttgttcacaataactcttatctctgagtaccacaatttccaagccatgaattctttgcaaaataaaaacaggttttaaattggtgtggttggtaattggtctcgctgatcagcaaatgttttgcctttggcaagagagttttattttgtaaatatttacgaaaattgctgaaaatttccttttttgtgtggaatgatttgttgttgtttttgattatttttgtgctattattttgccgggtgcgcatttgaactgccaatttcggtttgcctataaaagtccgcccaaggtgttgaatttctctctctcctcacatttaattgcctttaattaattgtcgacaattaaaaatg

SEQ ID NO: 109051 - DNA, 242 bp, Heterodera glycines
  unsure (1)..(242): unsure at all n locations
aaaaggcgtcgaactgctgactcagcagtgctgatttgtgagtgaattgaaagtacgaggtatatataaagggcaaaatttttattntagtatcattcacacaattattttccttgtcttttgtggtccgcaatgcctcgacaataattcttctgtttctcaaattttcgcatccattttttccatcatcattttttttaaatttgtcggaattccaatttttcgtcctattttttgccatg

SEQ ID NO: 109052 - DNA, 107 bp, Heterodera glycines
ttcccctctttttccattcccctctttttccattcccctctttttccatcaaaaaaattcaaatcgataattcccacaataattatcctcctcaattaactataatg

SEQ ID NO: 109053 - DNA, 160 bp, Heterodera glycines
tttttttccagggatggaggatttcgatatattaaaacactatttgcttcaaaaaagggctccgataatcacttgttcttttttataatgattaattttatctgattagtcggcagaaaaaaaagacatttttctgctttcggcccaaatacgaataatg

SEQ ID NO: 109054 - DNA, 229 bp, Heterodera glycines
aacatttggttgcccaggactttcccaggggaaatcccggtcctagtttttcaaaattaaactatttaattataagacaggcgcagtgtgtgataatcaaaaagatttttgtccgtaattctgtccgggtccttcgggaatacgagccgggttgtctcaaaatgttgagctattaaagttattatgattcttgtgattgatttgatgcgcctcagttgcaattcacatg

SEQ ID NO: 109055 - DNA, 694 bp, Heterodera glycines
tttaattcaaaaatttaattcaccgattttaaaaacttagtcttcactttttgtacagccaaaattaggcaattaattaataaagaaccatattttggaaaaaaatttggaccctttttgagtcgttttctttcttttgaatcttttttgttcataaaataattttattttatatttttgattttaaaaagcttttattttattttaaaattaattggatattgaagagtaaattttaaatgaaaaaacgatttactaatttttataatatttaaaacacttttagaattcgactgaagtccaaaatgaaactttttttataaagcaatttgcgccgcattgttgtaaatacagtgacccagaaaagttggaattcgttcatttttgctcaactaaattgacctttcgcttaagatttggcatttcaaagatcaaagagaaatatttaaaaattgaagtaattaatttaatttattaaatttatttttgtatttttaaaatttattaggcgccatatttacaatcgtacaaattctttgcaaatcgaagaatggaaattcgccaaattttccagtttggacataaactttgcaaaacggtggaccaatcaaaaaggaattatttgggttggcatttaaatttaattactaataaattaaattttaattaaaaataaataaaatttacagagatg

SEQ ID NO: 109056 - DNA, 335 bp, Heterodera glycines
  unsure (1)..(335): unsure at all n locations
atttttggatctaatccgaaaactgatttttnttttattataacataaaattttatgagtgatttatttttaagacatacaaaattagatttattattttttgaaaaaattaatcctctaaatttaaaagttttgtatntaatttcaattcaaaaaaaaattttcttttttcataatacggtacttctgcttgaaattaaatggaattgaggggtcgccaatgccaacaggcgccgctagtgaaaattttttggaattagctgaaagtgtatgaaaaatgattcgttaacactcaaaactaaatgctttattgtataaaaatttttaaaaaaatg

SEQ ID NO: 109057 - DNA, 706 bp, Heterodera glycines
tttcgacatggaatttgtacaactttaataaaataaatactttttttaaatttttaattttattttttgcccattttacttttggtgttgccatgatgaatatttatttgttatttgtgtaaaaataacgaaaataattatatttttaattggaatgctgctaatggaattaaaatgaggtgattttgtttggggtttatttgccaagaaaataattgaaaaaatattttaattttttttaaatggtgcgtattagtgaacaattagcagtttattgataaaattcaattgctctaataaatatgtaaggaaggaaacaaatgaatttttgctgcttgctaatacaaaacaccatagcagacaaaatggcagagaaagcaaatgggaagagagagaaaaaatagtacagaacaaagaaaatagaggaaagaaaagaaaagatagagagagaaatttgagaaatattgtgagaagagagaaaaaaatatggcagagaaagcaaatgcacaaagaaagagaggaaatgggagaggaaagaaaagaaaagatagagagagaaatattgtgagaagagagaaaaaaatatggcagagaaagcatatgcacaaagaaagagaggaaatgagagaggaaagaaaaggaagatagagaaataatatgagaaaaagagaaaaaaaaatgaatgtgttattttgttacacaaatg

SEQ ID NO: 109058 - DNA, 74 bp, Heterodera glycines
cttgacatgactttcccccggcctcggcccatttttatgcgtttggcggcggccctcgcatttgcattggcatg

SEQ ID NO: 109059 - DNA, 1003 bp, Heterodera glycines
agcaaattcaaaaacaatgatgtttataccggtgcatttgtatatttttgacagccctgaaataaaaacacaaattgagaattcatattttcggttgcgtattttcctttcatgttcgggatcgtaaatttccttactaagatccctattggtgagatttagtgattacctgctttatgagataaatatgttaaaaaagaattcccgaaggtatagattcaagtgattccgagaaattaaaaaattcgttaaatatcgtctacaataacattttacacgacgactattaaataataaaatcattgattgattgattgtatgtcgtcatattttagcaattagaattccttccgactacgcataatatataggtaatttgcattttttattttcattcattttataatattattaacacattaacaaaatggttttcatcaattttattgcaattttgccatttcttacaatcttttcggcagttgtgggagcagacaatttaattcagaatggtgggtacgaattcgattcgacacgatttgactgggttttaaaaagaaatagcattttctatttgtaaaatttaggtaacattaattataaatgattgaaaaagaaattgaaaaaataatctaggatctattaaaaatgagaatttttgtgcattatatttttgattttttttaaattttttgattttttaattttaaaataagatgatgatgagctccttgaactgttccaaaaatatgtgttgctgctcaaaaaatcggagccaattttggaaatggaaaaacaattatttaacattgaaacttacaatttcaaaaatgaatttttgctcaccgaaataatgaattttgcgctgaatttaaatgccaaaaatgagacgcaatttgctcggattattaacgaagcgacggccgatttgaccaatttgggattattattaacaaaaaaagaccaaaccgaggaggggcagcaaaacattgtggaaaaaatg

SEQ ID NO: 109060 - DNA, 178 bp, Heterodera glycines
  unsure (1)..(178): unsure at all n locations
ttgggggtgggtcgcctataggaggaactagctccggcccaccccacgtngggtcgncaagtaaagaagaaatatcacacttttctctgacttctctacctcaagcgtaggattcctacactatcaacaacgacctgccccttatgggattgtggtcaacaacgacctgcnccttatg

SEQ ID NO: 109061 - DNA, 493 bp, Heterodera glycines
agtaattagcgaaataaataaaatgtttatcttgaaatgtgcccaaatggcacacccatgcaacatggatggcacggaattccgattttgacatttttaattgttaataaatttgtttaaaatgttttggttttcccccatgaagctgtatttttaaaaataactctggaaaaccaatttttttttgttggcaaagcgaatttgaacacctcttgtgccgtggcaccgcatgaactgccaccactgcacgagctggtgctagccggggcagccggttggacaggggcaacaggttgaacctgttttttgcataatgccaattttttttttaaatttatgattaatataatttctatccaacctgttgtttttgttgtccgcatgttccgctgctgcacgaactgccggtgctaatactggtgccaccaccacttgctgccggggcaacgggttgaacgggttgagcctaacgattttttgccgtatgaaaatg

SEQ ID NO: 109062 - DNA, 51 bp, Heterodera glycines
ggtccgatttattcttttgtattccaaaccaattttcagtttttaggcatg

SEQ ID NO: 109063 - DNA, 491 bp, Heterodera glycines
tatcccaatggggaattgaacccaaaggacagacaacgaaagaaagaaggcttaaccaccagacacatatatgtgtccttcattaacagaaatgaatttattaatttaatttttctcaaataaattatatattacggaaatctacgctgtttttggacccgtgtaataatgttatcccaaatttaaatctagtaaaatccagactgctatcgaaacaaccggcccctaccttttcagaaatttaaaaacattaaaaataaaaattttcccctatcttaatcctgtgacgcttaaataaatgttgatttatattacggatgccaataatacgcacatgaatattttttccaaatttatgtgcatatttgggaattttttcaaaaaatcttattacattaaaacggccccctctgttaaagactttttgacctctaaggatcgaaaaattttcattattttgggtattttcagcaaaaaatttaatagaaatg

SEQ ID NO: 109064 - DNA, 891 bp, Heterodera glycines
cctggcagggtctcaaaaaatggtggttaatggactctcggaaccaatttattatacaactttggctgatattttacaacaaattacgttttaaatatttttgaaaatttcgattcaataagatgattccctaggtatacgtatagtgaaaatataatttatccaaaaattctattttaaaaaataaaatgaaataatagtgaagaattgatttgcccattagtgaaacattgacttaaagataaattaatagtgaggaattgatttacccaataaatatataaaagaataattatagtgaaatacacttgttcatgccatttcaaaagatctaagaaatgaaaaaatttcccaaaagttaattccctaaaatataatttttttttgataaattttgattttcatttgttatattatttcatttacaattgaaatataatcaaaattacgttttaattaattttttttatgtattttggaacataaaatcatttacaaaaattttatttgcctatttttagtgcctacttaatgcctattttgcgattgtttcttctgcctttttaggttccagtattgccgtttttgtgcctaagaattgaaaaccgaatttcggcaagagaaatagaaaaatgcctaggtacttaataggtataaaaactgcaaaattctgtacttactgaattagaccccctcgaataaatacccccttttgagtggggtcgaaaaataaagcccccagggactcgatttcagtaaaacggtaggtattatatatggtagtggatggttcgcccgagtgtcgacaatttgattaattagaaaacttcctccattagtaatgaatcattttcaaattgataattccagctaaatattgaataaaagatg

SEQ ID NO: 109065 - DNA, 367 bp, Heterodera glycines
caaaatgagcaaagaatgcaaatattgtggtgtggtttgggatttgcgtaataatacccaaaatggaagagaggacttaaacaaaaaatatatttctcagtaatgaaattattatttagggtcacaaatgcaatgagcgatggtgcgaaaattgtcaaattttccacgaattcaaacgggggtgtttcattcgaccgctggagttaagcccaaagaacgaagcacgggtgtggagattagtcattttcgaccttgaggcaatgcagcacgaaccagtggatccacaaatccctgagcgacggaaacattaagtcaactttgtcaccgcaaaagttgcttgtcctgactgcatttcaaatggacaatg

SEQ ID NO: 109066 - DNA, 518 bp, Heterodera glycines
tgccgtcgttgtcccgtcaattggcgaaatgtgagaaattgcgcaaaatttgtcacgcacaacaaattcaaacacgcgcaccggcagcgccatcacacacagacagagcagaaagaagcaaaagttgcggaacagctgaacaaagtgaatgtgattcagaattttttttgaaattttctaattgttgtttcaagaaaaaatttttttcgaaaaaacgtaaactcatcataaaattttgaaaaaacgcaaaaaaaaactttcaaaaaatgttttcttaaaaaattagttcgaatttttttgaaaaattttcgacggaaacgactcgttccggaaatagaaatgatgggtggtttggtcagcaaaacatttcagtaacatttctacattaaaatagaatgataaaagtttggagacataaacggttttgaaatttgaattaaaaccgaactcgtttggccaagtgtcgagaccattcccgaaactcgggctgtccatcggacggcgaagcgcaaagaatg

SEQ ID NO: 109067 - DNA, 418 bp, Heterodera glycines
tacgacgtcaagcaaattttccgcttgaacacttcagaagagatcatcaagtcaatgttgttctcaaaagtgttcagctctcatctggaattaaaattcacccatcctttattttgcccggaaattcacctttccgatggcaccctgacatcattcgtcccaatggttcatttgttatttctcgcatttatatttgatggtttaaaataagctctgcggagctactctacatatatatatattcacacaaatttgtctaagctctgcggagctgattaaattaaataaacacaaaaaaaaaacacaacaagtgagaaatgattattaaagggaaaagttcaatacataaattaaaaaaaaaataataataataataataatatttaaattaaataaatgaatgtagtattggtatatg

SEQ ID NO: 109068 - DNA, 92 bp, Heterodera glycines
ggtaaggcggccggctttccctctttttttaatcatgagtttaaggatgtacgtggcacggatgtaagaaatgttacccaaatgacaacatg

SEQ ID NO: 109069 - DNA, 591 bp, Heterodera glycines
ttccgtgccgtctttaatggcatttgaccccacaaaattgcgacgacttctgccaattcgggtaaaaagggcaatcatttgtttttctcgcattattttaattggataattcagttcaaaatttataaatttgaatattttatcatcgttctgtgataggaatgtttttgtcgccactttctgtcatttagtaaattcgttttcattcattcgaattggcattggtgacaatgacaaatgtccacagccaacgaacgctacttgcttataattaatttaataaacaccgccactaatttatcatttcatttcctttcggtggacatgccaccgtttaattcccatgggcttttttggtcattttggaatatgagcgaccaaaaaattattaattaatccgaacaaatgacaaaaaaaacggaaaataccgaaaagaaattttatagggaaaacagaaaatggcaaaagggcgaaaaggcggcaaaaagcaaaagaaaaaaagtgcgataaattggccctttaggaatttttgagcgacgatcaattggcattcgaacgcgcaattcggcaacccgcgggcggcgtcaaatg

SEQ ID NO: 109070 - DNA, 271 bp, Heterodera glycines
tctggaatgatgtgtcggataagcactctgccttataaagctgtcgttctgcccaggtttctcctaaccaggttgaacttgtaatgagcctttgggtatctggtcggggtctgcgcggagatagctcgtgaggagctgttattacattattggttgaacgcttttgggtcgtactgcacagataaatatgagaaaaagttttttacaacatatacctgagctttcaagtcatattgctatgtctgtgcctgcgagaaattatcccaaaatg

SEQ ID NO: 109071 - DNA, 564 bp, Heterodera glycines
ggacatttcattcattcccttccaaaatcaattcaatttctgctgatcagagagcaaattggcgaaagcatcttttaaattaatttatatttatcgtcggtgacgaggaatgctttaataatgtgttttttgttgcagatgaaaatttgtagacaatcacgacgagattagcgacattaaaatgtgttgggttgcatgaatgggaggagaagactaatgaaagaacggacacacactgaactgatcagaggtgaattaaatgagaaacggcggagagcggtgatcagaggagggcactcatttgcatttgattctcgaagtcagtcgagtcgagaagggaatttggacacctaaaacaaaaagcggaaaattggaagaaatctcgactcgaaaaagctcaacaaaaagtgcacagaaaatgggggaggggggaaactaacggaagcgacgattagtgttctaattactcaaatttgaataaatttgaacagtcattggcgtgaacagagaaagaaaggcccacacaaagcgaaagaagtgcaaaagtaacagaacggtgaaatg

SEQ ID NO: 109072 - DNA, 1003 bp, Heterodera glycines
aaattggctattttttcttgtgcctttttaggatttaacgagttttaattatatatatataaagtaaatcaattgattccgctgattctgagctaaagccccgcttatgactagcaattaccgcatcccatttttaaaaatatggtttcactaattgccaaattttatgatgtcttttccgtcatgtccgtatgaacggagtttgccattctgtccaaaatgcaccaagaagtttggcattttggtcaataaaaatggcatctcaatggatacctgttctgtcgagcatcccaataatccccgttccccgtcaattggcaggacctgctcactttatgcacattcgctgcacatggcactcggagcacccgaagaaagcacttggcccctgggacaattggtgaaaaacgtggacttggaccattacgagaacacctgtctgactggtcagtcagtccatttgccgttttggcattttccgaaacattttggcactctgtaagcattggaccgatgcggaagccgtcacctggcctttgttctaatccgaaatgccgaactcgcgggcttctcggtcggtctgggcaaaatgtccgtcagcgagtgcctttcccgctgtttggactcgccgcccgccttttgccgtgccgtccaattccgaacaccgggcaatgagtgctttttgggcacggagcgcccattcgcgccgctgccatccgacgacatggacatcttcgagcccgtctgtctgccggacccgccgcgcacatcaattttggagtgccacggcgaacacgtgttcgaacgggtgggccatcgaacagccaatttggggaaatgttttgagcgtgaccaattactgactttgtgatcacatttcagaaacttaaacgactatcgatcagttttaatcacttttaaataacggaaggattttttgtgctattttgaaatgcgaatattgctttcaaaatattaaaatgaaaagcaggtgccaaacatg

SEQ ID NO: 109073 - DNA, 229 bp, Heterodera glycines
ggagcaagaacgacaacgcaccctggtcttctcccccaaggcggaaagcaatgccattcgcccatcggaacgtcttcaggaagacagggaagccgccacaaaaatcctggaccatcttgaagttgaggcccaaccaaccgccgtctttcgactcggacgttacgacccgcagcgaacaacaccacgcccgctcaaggtggtcatgccaacaaccacacaccaacacatg

SEQ ID NO: 109074 - DNA, 766 bp, Heterodera glycines
attgtgccattacaaatttttaccgtttttaaatactcccaaaaaattagacaaataacagatattttttggtaaaatgtcttttctggatcataataatacaaatgattcaaaataatctcactttctttccacaaacaaatacaacaaattgaatgaaaggtattcttacgagatcaaaaaaggaactcaaacaaattaaaaaataaaataataaaaaataaaacattaaaatgtaaaataaaaataggggtttttaaatttaaacttaatttaaattttttgtaaatgaccaattcgctatttaaaattgctcattcgcctaacgttcataagaattgtcttattattatttaaaatatgtaaacatatgatcaattcttattaatagcttttttattgatatatcttataaattggtgcatttgatataaacatttcatacatttaatatactaaaaaagattttgcattttattgtttattttttgtttatctaaatttcgttgtttaatttgaaaaaatcatagtgatttgatcccgacagggcacgatttttccaaaacccttcctgattttcttatagaaatttcattattttatttattttatatttttaagtttgaattctcatcacggaatttgctaataatacaaggaataataatggtagggggagacagcattaattaataattatgcacttgatatgttaatacacaaaatttaaaaataattttaaattttagactgttaaaattgtatg

SEQ ID NO: 109075 - DNA, 507 bp, Heterodera glycines
aaacagacttttccagtccagtagttcttaaatcatacatttttataagatatcaaattcgattccactcggtctcagctctgctggaggcaaattgggaagagaaataaaaggatgatgtcccccctcccccatttttaaaaaaaactattgaaaatgcttccaagaattttcgaagttgctgattaagaggccggcataaattcagaaaactctgcgctcgaattcggaaaataaactaaaaatttcgcattttttaaaccggtttaaaatagacggaaagattttatgaaacaaaaaatggaaaaggtcgaagaatataaaatattgaaaaccaataaacgttgtaaaaagtttctgttcattttcagtgattataaaaatttaaagtgtttcgtttgttgtttagaaagggatttttcaaagacaattaattacctaatttggcatttattctggcatcaatcaattggaaaacggaaaattgtgataatttcagcaaaaatg

SEQ ID NO: 109076 - DNA, 413 bp, Heterodera glycines
  unsure (1)..(413): unsure at all n locations
aacccatgtaatgtttgaatgattaatnagttgcgctaacccacctaggtctctctctgtgtttttgggnttttcataaataattaatgagccagttaaagcccaatttgctggaattaacacaccggccgatttttcggccgaaaggtcacactgccaacgaaatttttattttcactaatattttcttgcttttttcaatttaaaaaactttgcgcgtcctttttcatttttcaattggttctacccaaaaggtttgcctataaattgggctgtgatggctcagaaaggcattaccaatcggcttcttcttctgctcacttccctcctaatttggtaaattaaatattcaatcgctttccctcattttggctttaatttgtccattttcagtgcttccctttgtccaaatg

SEQ ID NO: 109077 - DNA, 150 bp, Heterodera glycines
gcgaaaagactgcgagaaaaaggctacaacagggaagtggtattgcattaggggcaatattagtacctattcttggtgcactagctcaacacttggtcgaaaaaattacggcctgacaatagcgagtcaatgaaatatacaaaaaagatg

SEQ ID NO: 109078 - DNA, 130 bp, Heterodera glycines
ttgccaaggaaatgtgcggttggaaaagtaatgggctgtgggagagcgggaaaacatatggccaaaagggtaaaagaagtttaataatggcccaattgggggaggacaacaaggaaagggacgggggatg

SEQ ID NO: 109079 - DNA, 499 bp, Heterodera glycines
ttgtatctttcatctgaattgtcgttaattagtctctccccagttttcgatatatttaccatttatcttaaatctaaaaaataaaaatttcagaatggaataaaaatctaacctgtatttgtactatctaattctaaaacttttttttacctgatttgtttgttatatttaatgctaaacaacatttctttatatttttatttaaaaaatttcttcataaacgacatatcctaacgacaaatatatcgttaatagttttcaaaaagggccccagatcaagacatatctctactaatgatccatttcataatgaattaatttgctaattaattaattatccaattaaaccaaagttcagttccaactgatgtgttgacaacggaaaagtgatcagcatttatcagcattattcccatccaaatttaagtgatgtccctgggcttttcccattgaaatttcccacgcaacggcggtacaaaaaggagaaacaattgagatg

SEQ ID NO: 109080 - DNA, 371 bp, Heterodera glycines
tttcgcctactcgacatttcgcctactaagccaaaaacattcatttcgcctactaacccaaaaccggacatttcgcctactgtcatttcgcctactattcatttcgcctactgacatttcgcctactatttatttcgcctaccaaaccaaaaacattcatttcgcctaccaaaccaaaaacattcatttcgcctactaagccagaaacattcatttcgcctattggaaatacataatgccaatgagaaaataaaaagagagaatatacaatatctataatgtttttgcatcaaataaatcattcatttcatttttatgtcatttcaaattttcttcaaaaacaaagaaatttcagattctaataagaaatg

SEQ ID NO: 109081 - DNA, 317 bp, Heterodera glycines
cctgcataaaaaatgagatgattaatttaagaatgaatcaagaaatttggaaagcgttcgttttcactcgcccacatatcttttaaactcgaaaaaaaaatttaaaattttttgtttaaaaatttaaaaaaaaaatgaaactagcgatttttccaaaaatatcttctagaattttcttaaaaataacgtagcgcaacatgaaatttcatcataaaaattgacaattgttcgtttggttggccgagtttttaggatcaaagttattttttgtattctcttacaaatggttaacctgaaatccgatgtcgaacacaatg

SEQ ID NO: 109082 - DNA, 542 bp, Heterodera glycines
tcctgctccaagtcgtcgaccagcagcagccaaaaaagtgccggcattgttttcccaagaaaattttattagtattctcaactctagacattagcaatgatcttttttttatattagatgatcattcttgacattagcacattgatcaatcttcttatttatattgatcaattttggaataagcaatgatcaagcaagttttccattagaattgatcattttttgagaagaactgacaattagcattaatcaaattcctttagcagtgatcaatcactcttaccaccaacacactgatcaatcttgtaattttcattgaccaatttttgaattaagcattgatagagcactttctattgtgccattcgtgactctgatcactcaatcatttatcacccctcctccattcagcagatggtgctgccttcaattttgatcgcatcatttacggtccaattgatcaaatcactgacaaagaggatgaattattttatgacgaaaataatgaaactgatcagagagccaaaattgggccaatgatg

SEQ ID NO: 109083 - DNA, 93 bp, Heterodera glycines
aaatgctctcgaccttgataggaagtgcggcgagcaatcgcacatttaatttcacagagcattttttaatttatgttatatgcaagaaaaatg

SEQ ID NO: 109084 - DNA, 72 bp, Heterodera glycines
tagttggtttcttaaccttagattagttttgagacaaaaaagaaaaggaaagaaatgagaaattgaaaaatg

SEQ ID NO: 109085 - DNA, 447 bp, Heterodera glycines
tcaccaacgagggcacaattcagtaattagtggagaaaatcgcgaatttttgaaccaattgcatgccgatcagttgaaacggttgttgagcccacaacagaggacagataatgataatgataatactgatgaacagaaacaaactgatggtgaagcaaaacaaaataatgaactgagagataaaatcgtgaagcaaattgaatccggtctaaattaacagaatcatatttttttaattattaattaataatttaaatagattttaatttttgaaaatgagctaagaaaagagattgtccagcaaattcgaaatttgtttacttataaaaattttttaattttttaacaaatttgtcgttaatttgcagagttaactcacttctcagttaatttaattttaaaaaatttaaaactaatttgtctgtgttaattataggtataactatg

SEQ ID NO: 109086 - DNA, 176 bp, Heterodera glycines
tttttgttcgtcgctcctctctcttgctctcccttttttgccttgctcttttgcaattgagcttgtgtggcaaatttcttttagccattaaacaattaaaaatgtcaaaaaatctaaaataagttttaataaaaaataagatggaaaattattaaaaccttatagaacattcgatg

SEQ ID NO: 109087 - DNA, 399 bp, Heterodera glycines
agccgaagcaagaaacgagcccagtttttagaagcacgaagcttgaagttttaaaacataaccccacagcgaccaaatttgaagattcaaatagaagcttcttattttaagttttacactttacatattttggattttttcttgttgtatttttctatttttttattaaaatagaaaggatttggcgatgccaccataaatataatctaagatttagattttaaatgttaaatttaattcatatttttgcttctaaatatttaatagtaataaaccgaaggcaaattttcgttaaatgattaaattaaaatattttctaattgtaccaattttattttaattagataaattatttttaaattattttaaaaaatatgtaatataatacatcattaaatg

SEQ ID NO: 109088 - DNA, 337 bp, Heterodera glycines
ggtcttccaaacggcgccggagggggcgttggcattgcgggatgtttgagcgggcaaaacggcggcagtggcacatttttgagacgcaaaagtatcgttgtataacacagagtaaaagtggacttcttcggttcagtgcacactccgttgattaggggcggccctttctgttacgggacgcaccagcggaacggcgcgggcgctgccgtaatggtaaattaatggacatatcagtgtcaatttcgctgactaattcactttctgataggtccccgcttcgcacggcaacggacaccttcccctccgtgtccccttgaggtcagaaaacagccgaatg

SEQ ID NO: 109089 - DNA, 142 bp, Heterodera glycines
gcttgaaaaggccattgaagcgaagcgcaaatttattgaaaaaagtgcaaaaaatgaaattgcagaaaaaaacaattggaaaaaatttaatggaaaatggaaggaatttgtcggcataaaattggacaaattcgaaacgatg

SEQ ID NO: 109090 - DNA, 542 bp, Heterodera glycines
ttactctctctttggaggaaggcaaatcaacacttttttaaaattagttttttgaggagaattgccattacttttgtacccaaaatctcaatatatatcccactcaatttgggtcattctgctcatttgtaagtgccattgttttatgcccttgcaattcccttcccaataataatttcactgacccatccaaaatgctctgagattgtttgttataatattgatccaatcattcccacggtttatgctgcgttttattttttccattcgttttcttataataagtccttctcctagaaaggggtaattccaaataatctaaagccttaaatccggaggtttgatgggtcggcaacaataaaatctatttgcacaaataattttaataaacaattattatgtaatatttttgttttgctttattctataaaaagtcaatttttaaacaaaaatacatgtttatttttgcttaattatatttaatttcctagtctttaaagaataaattctgctcctctattataagcattactattgctatg

SEQ ID NO: 109091 - DNA, 672 bp, Heterodera glycines
tcatttaatctccatttattccaatccattttttcccattttttttaaaaattgcataaagaaaatttgctcatttattagtaaattgtttttgatttaaatacataaatatttttgagacaattttaaacaaaactttttaacagtttttgtccaaaaatggttgaaaaatttaactattctcggcggtacgaaaagagtagtcgagataccttttttattctaatttgacaacttttttaaaattacgaaatggttaaatttggaacctttgatataaattttttgaaaattctattcgcaattggttcgattgtgccgatatgaactataatttttggcaaccttatgcaatttattagaaaattcttggcgctatatggaaagtcaccatttttgttcaatgggggtttttggggtccatgatctcgaattagatgtcagattcgtgatcagcaacctctaaaagcccggataacataattttcatggttttttatcacaaaaaaattttgcaaaacaaaaggcccccccctccctttactttttgataaaattcaaaagtggtgactttccatatagcgacaaattctttgtatggaaagaaatttttttaggaaaatttatttatttttttattaatgatctttttataggaaataaaaaaatatg

SEQ ID NO: 109092 - DNA, 56 bp, Heterodera glycines
ccgaaatttatgaccccaaaaatgccatgagctgaataataacgaatattggaatg

SEQ ID NO: 109093 - DNA, 122 bp, Heterodera glycines
ggtaaaacaaattgcaatcagtgatcagtccaatcaatcaatgctcatcataccgtaataatttcataccgtaccgtaccctaaccaatgaaagctgttaattccggctttagcaagtgatg

SEQ ID NO: 109094 - DNA, 301 bp, Heterodera glycines
aattttgtgaaaataaatatttaagtataatgtaaatttagctccaaaagtgccgccggtgctcagagcgtttctctccaattgctcaacgtcgaccgtttcattttccaatcgccacgttccgccgaattagcccttctgatcaaccaaatgctgcatcatttacgccagaaatcgctgtacgccattgcgttgcaaaattcatgtcccgaaaacggtaattaccatattttacgaagtgcgaaagtctcccgcttgtggtttcgtgtcagtgtctttggccatttccccgctgacaatg

SEQ ID NO: 109095 - DNA, 847 bp, Heterodera glycines
atttttagttggtcatgattgttgatgacttttatagtttgaaaatttacaaaaatatttagtcgaaactctaaaaagtcattttttattcttttaaaatgcaactaaattttttcctaattttacataaaaagatttttttcgaaagttggttcttatgagcaacagattgtgaaaccaaattaaacaaaactatttataaaataaatcttgattaaatcaattgactcttttaaaacagtctatgtttgtggacaagttcatcacttttttagaaaaaactttggggaaaatgggaaaggtccagtggtgggggacgggacataatttcgccgccgaaatttcgccggccgaaatttcgccgggacaaaatttcgccgcaaaagatccaaattaataaaaaaaaaaaaaattcgttcgcttcccagcaacaatacagagaagattagcatggcccctgcgcaaggatgacacgcaaattcgtgaagcgttccaaattttttgggcgcgtcctgcgctttgttcataggtttaattacccaagtttgagatcgcattgagtttgagaacacaaattattcaatgtcgcagtcctctgattctctattccccagaacttcttcactcttaaccaacccaaataagcgccttgccaacatcaccccgccacagacaaaaaaacaacatctctctgataaactggcggcggcacaaacaatcatcggtggacttcaacttggacagtcggacggtgcacctcaatgggccaactccctccttggcttctgtgctgagatggtgggaatctgccgcgagcttctctccatggtcaaagagcagcagaatg

SEQ ID NO: 109096 - DNA, 407 bp, Heterodera glycines
  unsure (1)..(407): unsure at all n locations
tgtaaagaagccatacccaaattcataacacaaagataccaaaaatgaaaaaaagtcataataaaagattaaaaatttcaaaatattaattgtttctaaaactaaaaatttcgtccataattgtcgataattttttataccgcataatttttgggattttttagttcctgttacaattcattcccattttggacatggacgacaaactttttttttattacaaaatttaattaatttcgcaaatctcattttcttaataaattttattcatttatttttttagtgtatatttttttatctaaaagtntaaggaacatttcacaacaattagtgaagaagaattttttgaacatgtaaaaaagtgcaacgaaaagaaggaatattccgcagatatagcgcaaaaaatg

SEQ ID NO: 109097 - DNA, 1003 bp, Heterodera glycines
tttggtcttggtctcgattttcgtgactcgagaccgagactttttcacacccctaatgcttggcttttttgtaaatctaaaattaattttttgttaactttttgcttaacttttttaattcatatccgtgggctagtgggttatgctcctggttatgttcttcatttttgctttagatcagttccgcttcataagaaaattttttcgaaaaagtctcggggttttttggtctcggggctttgggtctcgctctcgagtctcggtctcgggaaattttaggtctcggacagcattagtttttatatagcgactcagcaccattccgacctctaaaattattaaattgttgaaagttagatttgttgttgattaataaattcacaaatggcaaaattattatgcgaatttatttgttttatctagggagtccaaaaatatggatataaaatcgcgaaatatggccataaaatggtaaaatatggacataatttttttcaaatagagggtataatttctctaaattttttcaaattcgtaaacgcaaagtaaacccttcaaaaatggcaaaatattgtattaaaatcattttagaagaaaaaaacacgatgcagcttaaaatttactaatttcagcggaaaatcaacctgaaaagcgaaattttcccttttttgcttatttttgacataaattaaccaatttttaagaaaatttaaatttaatcaatattttcgacaaattttgaaaaagtgtctttttcggaaatttcttcggtcttaagggttcaaaaaggccaatttacccgatgggggccgttctaatagggggtttttggaaaaataccaaaatatggacataacatatggacttaaatgccaaaatatggacataaatcgcgaaatttggaaaaatatggatatagaaatccatcctagaagcttcaaacaaagctaaaaacatgtttttcatgcgtttcaggcctcccacagtccaggaaaaaaatatg

SEQ ID NO: 109098 - DNA, 593 bp, Heterodera glycines
  unsure (1)..(593): unsure at all n locations
cttnaaattttgcatagcgatagagaaaaattttctgcatcgaataatatagattttgcaaaaataaggctcactaaaaagttatccaaaaaaacaattttcgaacgctcttatctttttctaaatcgttaaaccgcttaacattgctttagaaaaagcttctcctcatcaagagctttcgaatgataccaagattgtccaatttggttggcgaaaaccttcaaaaataacaaatcttttttggtacaacagctcagtttccggacggtgtgcttagaaaatattttctcttcacgagtgacgagtctacgaatgacaccaacattgtctaatttagttgccaaaaattcaaaattttttttttattgcaaatcgctattttttgacgaaaaataaataaaaagttactgtcatgtgtcgaattcgaactccaactcccgcccttttccctttattatgtatcttataaaaaccaatgattgcgcgagccactcaatgcaaatccttaatattgatacaggagttcatttttgtcaaactagtaaaatatacctaaatttttcaggtaatgtattaaccaaagcttaaaaatg

SEQ ID NO: 109099 - DNA, 122 bp, Heterodera glycines
gagattttgaaaattgattttcaaaatatttttagtagagatcgacattttgaaaaaagcctggacctggatttcctgaataaaaatccaggtccaggaaaaatccaggttgccgaaaaatg

SEQ ID NO: 109100 - DNA, 130 bp, Heterodera glycines
atttttcaaaaaatactctaatttcatcccattcaaacaaaaaatttaaaattgtcaaattaacaaatcatttaataaatgtttaaatatatctttaaatataatttaggtgttggccaagcctggcatg

SEQ ID NO: 109101 - DNA, 587 bp, Heterodera glycines
aacgacatgtcgggggtcgggtcgggggattggtccaaaaaacgtctcgggtcgggtcgggggccggggggctcggggtcggggcttaaccctaatacaaagaaccaaattttgtaaattttcaaggaaaaaaatgatttatatggtcgagcagcgccgacaggcgccgctggggaaaaattggaaaatttggccatatttcttaacatatttccacaaaaattgccaattattgggtcaaattttgtaaattttaagcaattttgtaccaaactaaaagaaataagcaaaaaataagaacccatgttgcgcaataaaatggaattttataaaataaatttttgaaatatataaattttggaaaaatagttcggttcttttacaattttactagaaatttttctttaataaaaattcttctcaagtgatgatatttatactttaattggtaggccgtcccatttttgaaaaaaaaatttcaaatttcttctgacggcgcctaccgatactccggtccaaaaaatcatttatttatttttttaaatgttaacaacgaaaaatctttcgtgagaatttccttaatcatg

SEQ ID NO: 109102 - DNA, 776 bp, Heterodera glycines
gtcaacaataacaacagataataataggacagctaataaaagacaactcggactggctatgtgctttggcgagagtccggctagctatcctttgaggataggccgcagtgaattaagccttatgaaagcatgagatatgaaaatgttgagaaaatgcaaaaacatatgacaattcagcgtcccgggccaaccgaactccataggcacaggagtccggctagctatcctttgaggataggccgcggtgaattaagccatatgaatacatgagatatgaaaaggtttgagaaaaatgcaaaaacatgtgccaattcagcttcccgggccaaccgaactccataggcacaggagtccggctagctatcctttgaggataggccgcggtgaattaagccatatgaatgcatgagatatgaaaatgttaagaaaatgcaaaaacatatgacaattcagcgttccgggccaaccgaactccatagacacaggagtccggctagctatcctttgaggataggccgcataaaaaagcaccaaaagaaatgagaaattttagaattgatcgagactgatgaataataataataataataaattgactcaataaaatgagaaattacgaggcaaaaacgccccatcatccgctgtcgacagaggcggattaatttgcctttggaaaattacataaaaaagaatgaattcatatataaaaaataaagaattcattcaattattatctaaataaataaattcaattataataataatttagcattatg

SEQ ID NO: 109103 - DNA, 421 bp, Heterodera glycines
ttttcaaaatggttaagctttcaaacatttggaaaaattttcgtgggggacatcagaaattatttctgtcaatttgttatggtgtgtttgcttgagcaattctgtgccatttatgaaaagagtatttcttgcttttggccttatggacaaatgttccatttttgcaagtttcatttgtaatatttgatcatttccaatatctcccagcatttgtctctttcacgcttttgtccatgttttgaacacagacgatgcctttcactcactcagaattaaatttttaataaatcagattctcgacttacaattagctgtttagaaagtttgacaacacactcattatgggattttaaatttgctaatttaacacatattttcgcaattttgttcctttcggaaatgtcgtctgggggcgaccatg

SEQ ID NO: 109104 - DNA, 1003 bp, Heterodera glycines
agccaaaatccgatgcatttttgtgtatacgccgcccccaccctcccaccacacacttttccatccgatgcatccgtctgatgcggaaaagcaatcatttggctttatctatctatgtgctcaacatttattgatcaaaactgaggggggaagggggcggggcgttgcaaaaacattaagagaaatgccgaacttaaattactaattttaaatcaaaattgttattttccattttttttcgtactttcagcttgaattttgtttttctttctattttatttacacagcggcccaattttgggctccaagtacaattatgctggatttttcgtcttagtggtctgtgagttagtcaccaaaaggggggtcccaggttcaagtcctccctatgttgtgtgttaatttcaatttcttcttttaaagtcaatttcttcttttaaagaagaaggcagaattattttttcattaataaaagttttcgtggcaataaaaaatcatattcaaaaagcgttggttacgtacaacatcgacaattttatgaaatttttttagcttataacttggtgaatactagagcaaataaaaccattttatgctcattttgaagggaaaattctggagaatattgtaaattttatttggtttggccttaaattgtggacttggctaaaaaagaattaaaattattgaaatttttgccctgggaaaaaattttttcctgtgggtaacttttttttgaaattttgtataggcccatattttggccccctctagcgaatcacagtttattttttagctgtctagtttttaactcgagatcggctcttctatttttacaagggaaaatccccaaaaaattttaagttttgcaaagttttggcgttctgattactaaataaataataaacctatatgcactgagagcacaaaattgggccgctgtgtttaataattcattttaggataataattattcaaaatccatttccgtttataatccatg

SEQ ID NO: 109105 - DNA, 108 bp, Heterodera glycines
  unsure (1)..(108): unsure at all n locations
aaattgcttggcatcgcggctcttncaggctttttgataatggcagtcatttttccgctctctntcatctcttccttttttactcgcacttggctgaccacacaaatg

SEQ ID NO: 109106 - DNA, 62 bp, Heterodera glycines
ttttacaatataattaactaattgaatttcaaaaaataaaattaaatttttattaaaaaatg

SEQ ID NO: 109107 - DNA, 81 bp, Heterodera glycines
atctttaatgtccagataattattgatattatgatcgatgacagggaagggactgataaatcgacggaatgtggtcccatg

SEQ ID NO: 109108 - DNA, 351 bp, Heterodera glycines
aaagatgctgttttgaacgaataaagggtatagttattttgaaaaagtgtcaaagaacatgcagcaataagcctgcaaaatctaataagtggaaaatacatgagtatagaatttattttcagaaagtgtcaacagacttttggaaaaatatatttgcaatttatcaacaattttgagaagtgagttagaaatgataaacttcacgattcaaaccaattttcggtgctctaattaaccgcgataaaaacatccgaatcaattaaatagcttctgagataataaggtttatcataaaatttcatttaaaaataaaccctcaattattggtatgaacgatactttccaaacatg

SEQ ID NO: 109109 - DNA, 646 bp, Heterodera glycines
tttttttggtagtactataatttttaggggaacgggtcgttttggcgccgccgttttggcgccagccttagtttttttattataactttttttcttgttgaccaaatctaacaattttggtatcattcgaaagcccttcacaagctctattagccttacaaaaaaaaaaaaaaaaaaattagcttgtaaaaaagttattaggaaaaaacttccaaaattttggtttttttgttatttcatgttataacttttttggtaacctaatcgctaagcaatatattataaaaagcttctaaacatataaagctttcaaatgataccaagattattagatttggtcaacaatgaaaaaagttgtagtccaaaacttggactggcaccgaaacggcgggcaccgaaccgtcccctatcgcaattagtgcaataagaaatacaaaaactgacccgataactctctttgttgaaaaaattgtccatgacctaaacaacttttgaaactgacatatgtgtaatttcaatgttgagtttttaaagcactaacttctggcttatcattgatctagtttttccacggaccaatgaatgcattttctgtttcttattctatgtaagtatcaacaacatccttcctaaaatcaacaaaatg

SEQ ID NO: 109110 - DNA, 347 bp, Heterodera glycines
accattcattcattgatttttcgttaaaatgagtaactctttctttgtaattttgcccagcaatacgccgggatttgtcggcaataaaacgaataaattcaaagtacacttgccaaagaaattagtgtttgatgggccgggatggatggtgggcatgtctggcataatatatcccaacaggtgggtgggtttgtacagttctcattgcccttgtacagtttagctgggcgactgtagggaccctggagaggcaatacgtagtggtgcacctgcgcggtggtcgcaagttccggttcagagtgccaaggggcagcttcctttcgcctcagcagcttgaacggggaatg

SEQ ID NO: 109111 - DNA, 168 bp, Heterodera glycines
ttgacaaaattcaattatgaatcgcaggcccgtagccagaaaaaatttcagaggtggaggggggggggaggaatctgtgcatctcttaatgtcttacgtctgtctgctcattggcttaagataatgacttagaaataattttataattattttacagcgactaagatg

SEQ ID NO: 109112 - DNA, 1003 bp, Heterodera glycines
atagcatttttatgtaaaatcttttgatttattgaaggtttttggtccatatacacagcgtccgggaaatgagctcctgtgccagaaaagatttgcatgtgtggctcagtggtttttgtaagatagtaaagggacaaagggtggtggttcgagtccgttgtgcaacatgaatattttcatttatttttgtcaaaatattaaaaaatcacgatatttgggaattatttttgaaggtttttgtcagccaaattggataagcttggtatctttcgaaagctcttgataaggagaagctttttctaagcaaatgctaagcgatttggtgtaccagagaaaagttatgaggctttaaaattttgtttttcttataacttttgaaatagagcattaacaaaaataaattcagcattaatcgatgcagaatttttttctctaacgatatgcaaaatttcctatggatctaacatatagaaaagaagctaaacatagcgaagtaaatgttgtttttcctagtaataaaaatattagatagtacgccaaaaggagacaaaaaattagaggaaaaaagataatgtttttctctggcactctctatttattggtacacatctcgttttttcggacggtgtgtttatccgttattaaatgtgtcttttgtttctgttagactccaacaaaagcttcgaggccgtccatcccacaagaggacaaattcgatcgccgccagaccggcgacagtagctcagccccggcgctgattcttcagagtttctaccgtaaacatggcgtaaatacgaccagtactcagcccgtacgcctcggtgacttacacaaggcattcgcctccattcagccgagtttcggtgaataagcagagagagggattaaccaatcgatcgctccaattgatcatatcatttattgattaatcatagattttttactgtttacgactcattcccccattgaagtgatcacttcgctgcacaacgcaatcacaatg

SEQ ID NO: 109113 - DNA, 194 bp, Heterodera glycines
tttgagcaattggaacagttttcgtctgtcaaaacgagttaaaatttatacatttttggttcctttgcccttccacctttttctttttttcctttttgggtggatttagccaatgcggcggcacaatcggatgcgggtcgggcaatcccaactcccgcgccttcagttgctcttgcattccttcaggccaaatg

SEQ ID NO: 109114 - DNA, 842 bp, Heterodera glycines
gttcaatcatcgaaatcactcctcataatttataaatagcatttgaaggggaaagaaacgacatcgactcgaaaaaatcaagctcataatgtcaaagaattgacattacttttctcaatgcgttagaaaatgtttttttcctccgaatgcggccaaatgccataatattttttgtatataataggacttttaatttagttacataatttcgacattgatattatcatgaataaacccatgacaaatcatctatcattttgaggagctcattcgggttggggcatacaagcgggtaaataaactggatgggatgtttattctacaaaggtaataaggaaagtaataaaggaattgatcatttaaaagcaatacaaacaggaggacgaaatttacagaacgttctacgactttttcaaattcctaggggctggaaaaatccaataggctcattaaaaagagcacaaaattcttcatatacttttgtacctactgtacatggactacctttcctactattttgaatttacgcaataatttaataataacgccaaatagcgcactaatttaaaaaattattattgtcgaggccgagtgagcatattgtgtctatttttgatcaaatcatgttcatcgtacccaaaactattatagggaatgaaatctttttgatcggctgtaagaagctctatagctttattgcactttgtgtacatttagttacgttttacttgaaagtatctttgactccttaatgttagaagttttcgacataattgtcatttgacagagttttcgattaacgacaaaaaattattttcagtttttgatttgctttcaaaatg

SEQ ID NO: 109115 - DNA, 1003 bp, Heterodera glycines
acattaaatttgcaattttactgtaaaaaatttattcagttaatggaaccacacacacacacacacacacatcatacacaggaccctacaacatgaacgaaaaaatgaaacgtaatatgttaaaaaagccgaattgtaaaaaaaaaaactcataagttctgtcataattgaaattattttcaaaaattacttaacaatggttaaaaaaacaaaaaaatataaaatttaataaaattaatggtttttgaaaattttatgcaaattataaaaatatatattttaaaaaccaaatatttttccaaataaaaatttatctattacgacagaacttaataaaatttgatattgggcactttttatttttaattttctttgaataaaaataatccctctgaaataattgtttccatttataagtttttttttttatatttaatttttaaaatatgttctaatttttttttgtcttgataatttaaaatgaatgaattattaagcatgtggctattttacctatttacataaattgaaaatttggaaaaatcatcctagaatttatttataagttaaaattttatttttagcacactaaattctggaagttatttagtctacaattaaaataaaaaaaaggtgcatttttttcacaaaaatctaaaaaattcatttattcacatttaatttcaattaattagagattttctggtttttagtgtttaaatatctacagggtgatcttgcacctttaaattgagcatatcttttgatcaacttctcttttattatgtttaaatactcatttgaaagcttattttatttgcaataatacccagtaacagtcaattaataatcgccctgcaccaaagcggaatgacgccttcaaaaattgcaccactttttgacaccactaaaagcactgttagctgaattataaaaaaagatttcctttaaaaaaaagcgatgaaaaaatttaaatcatacagggaacatggcacaacccatg

SEQ ID NO: 109116 - DNA, 464 bp, Heterodera glycines
ttttttgttatatatcttcctaagtttttttccttttcaatttctttaaaatactttgctacacccaagtctaagtttcatatctctgagcaaacatatttatattttttcctatatcccgtcctggacaatttttttttttggtcaaaattgtgataaagacaaaatttctaaaaaattttccaaggtggtgcctataggcaacgccggtgctaaaaaaatatggaagaaaattcattttggagaaaaacaactgaattgaataaaaatgttaccctttttattcttttgataactcagtagatacaatcctggttttactttaaaatagaaaaaaaagcttttttgagtgaataagtgcataaatttgtttaataattattttgtacctatttagccctattattataataagtttccaataaatttaatataatttttcctatagaaaccaaaaaaaaatg

SEQ ID NO: 109117 - DNA, 117 bp, Heterodera glycines
gttaattaattaaattatcgtttataaagagctattcaaaaatgaatttattttattgcactgaaaccggaattttccatttcaaacggtgactcaatttcaatttatgacgccatg

SEQ ID NO: 109118 - DNA, 209 bp, Heterodera glycines
tacttaaatgccgacccagcagtaaaagtgtcgtcatcattttatttcgccattgttttgctccaaacactaatcacattacaacaacagatcgtctcaaacgcagcaaggcaaaattattgaaaatttaaaaactttttaaaagatatattttaagtacatccatcgatgatggaacaaaaagcgccgaatatccgctggaacaaatg

SEQ ID NO: 109119 - DNA, 551 bp, Heterodera glycines
aattccgaacctctgacccggattcgaacaaaagtcgaaaattaatttttcaccaaaatccacctttatgttcccaaaattaatttaaatctgctaataaaaatgcaacaatccataaattcaagttcgcacgtaacatataaaagattagcagatttaaatcaattttggaacataaaagtggatttggtgaaaaattaattttcgacttttggttgaatccgggcccggggttcggaatcagtcgaaatggatgtcatattcgtgatcagcgatcccaaaaacctcatggttacattttatatgtcttgtaaaaaaaaaaaaaattatgtggcctaaactgtataagtaccgcttggctaaaaactcgccacaattttcgcatggattgccccccccctttgcctttggccaattgtcacttttctctttcttttctcaattttcggtctttttctgattctcaacatttcctttcccttttgcttattatttttcttcattacctcacttttcttcccctcacttttctcttttcattcttcccaatg

SEQ ID NO: 109120 - DNA, 490 bp, Heterodera glycines
tttccgcgtcagtgtcttttcgaattttgattggtctccaaattaccaatttgcttttgccatcgaaatgtttgtccactaaaacatcaaaacgtggcgaaagcaatgccaatttgaggccgagttcggcatggtcaaaaaagggaacatatccatccaaacacccgtaaaatccaactgaaatgcggggaaaataactagggcaccgatttatagtgaaaaaactctggcccacaaaaaaggaatttaccagtgtaaattttaaattagtgcgcaaaaaattacgtcagttacgctatttggcgaaatgataattttgtctaacactgcactggacttgacccatagtgaaaacggaaataatgtatataaaaggagcgcatttgcattgttccatcacataattcattgcccacatattattgttattatatattgctcatcgtctgcaactttaatcccacgaagcgacgtgcccggcgcaacaatg

SEQ ID NO: 109121 - DNA, 1003 bp, Heterodera glycines
ttcatcatttaaacgcattacagtatcgatacagaaggactctgtttcctcttcctaattttattttttgtttttatttgcgaatattattttttataattaataacttttattcaacccatttaagtcaaatgatctaccgtatcctcctgcaacctttattttcctctttatttttaatttattattagtttgtccatttcaaataaactgtcctaccgtaaactccccaccatttctcttaattatagtattttttatttttttgtatgggtattaatttctttttttaaaatataacttttattcgatttcatatttctcgtccaccatatcctaaagattcttagtggttttaatgtctaatctttaatcgaccatatcttacattttttcctttatttaatatttccttcctttttttgcattttagtcattgaattttcatgttttttatttttatatgatttttttggactttttaatccgataattaataatccaaaataataaattaacggtaataaaatgttaaaaagaaaatgaataatcgatcgacctaccgtatccttcatctttccttgcattttcatcagatttttatttatttttcatggttattatttcccatttttatgtgtttttttaattttttaattccattttaaacaattttaattatttaaataaataatattactctaaataggctcaaaatgcaaaaacaattaggattaatttaccgtatgctccaccattttcttttcttatttttgtattttataagatttttttgaactttcatgttaattttttcttgttttattattatttccttgattttacatttcatttgaaatggataacaaatcaaaataaataataattatctctaataaaatgataaataagaaaactgctattcggttaatctaccttatcactatttcctatagtctttcttatttctaatgcattaatttagtgtgtttttgtagaaatg

SEQ ID NO: 109122 - DNA, 82 bp, Heterodera glycines
ggtgagtcgaaaaagagggattatcgattgatcagaaaagcctgatcggcacaaattgtttagcctgcgggatgccaagatg

SEQ ID NO: 109123 - DNA, 489 bp, Heterodera glycines
aactcacatgacgtcctgcgggtctcacttctctccttttcttcaatcagcacggtatgtctttcggtcattttttttattattaattagttgggtaattttcctttttgacccctatcatttaagcactttattttctttcattttctctgcactcacaagctttttgatttcacccctccttagcttccgatgttcgcaccatttacactgtgatacaatcagtaaggacactttcccaccgcattacggttttaatagatttccgctattttttctcaaagcgatttttttttacactagttccgataacaaaatattgtaacactggaatgccagccacgcccattatcaagggcctttaatctaagcatttcacattcattcattcattcttccattctctcgttttactatcctctattttagatattcttgcacaattccactgctaattctcatctcacattcccattccctctcattatg

SEQ ID NO: 109124 - DNA, 263 bp, Heterodera glycines
ttagtccattaattgtcctctacgaattaatgtgtctgaaaatgaaccgttttcactttttgtcgaccaatttaaaggcactgaaagagacaatttaatggtatgaatttatttttatcccaattttattttttcgaatatttagttctttaacattgatgagcaaagaacgaacaatggacgcttaattggaaggcaattctttaattttaattattattatctaattattaattattattttataatttagcggtcaaatg

SEQ ID NO: 109125 - DNA, 676 bp, Heterodera glycines
actttgcttttttgtccatttattccaatcgactagtgctttaaggttttgtctttgactttgcttttttgtccatttattccaatcgaccacgttaattcattctctatacatttagtgtcttatttcatgaaattatatataatttaattttaaataaagaggcaaatttttacagaaaataaatagacgctgactaattagctaacatttataaagaaagtagaaatttgattaaatgcatatacaaaatattacttttttaaaatttgtataaagttcctagtcgtatgtgctttgcgttggttggttggcgtgggtgagtgtggtggttggaccgtttttgcgatattgtggctggaaaaaagatgcgatttcgctatggggagcgcggccgtctgggttcaagtgcttgcttgcgcttgtgctcggcattgaacggtgatggctgctgctggggtgccacctttgtcgtggcctcagtttccccagcgattggcagctgtcgaaatgaataaaacatgcagctcgtctgtgtgttaaagaaatttggcgagttaattgacttgtgtaaatgtggcctaaggcacaaatgctgtggggaactcagcactggggatgctgaacctaaagttggtggtggtgttggtatacgagtgagtggcgtattgccatg

SEQ ID NO: 109126 - DNA, 111 bp, Heterodera glycines
gactatgatcaatattttcctaaatcgtgaaagcccgcttccggatcaggaaaacgaattttgcataacgttttcacttaaattaataaattttctcgcttttagaaaatg

SEQ ID NO: 109127 - DNA, 559 bp, Heterodera glycines
ttttgtataaaatatagctgaaattattgcataaaattttaatattattaatgatatatgcaaaaaaatatgctggcggatttataaaacgcactagcaccaattgttggaaggtaaaaatgttttgtcaaaaagctttaggcttaaatatgaccccatgagtagcttttatttttcagtgaaaattttggattttccaaaaaatgtgatcgtgtcaaaaaaaaatcttttttaattgcaattttgttcaataatttgtgaattttataagaaaaattttaaaaatcgcgaaataaaggcgaacataaggatgaaacgccaaaatatgggcaaaaacttattttaagggcgaacatctaaaatatggatttttaagggcgaatacccaatataaggaattctaaggtcgaataagggcgataaaacgcaaaattttcgaacaaaatatgtgtttttcgtacatttctcttcgagttaaagccacagaaaaaataagtaaaaacttagaaatccgatccctacttattactgactagccaaaaggtcgggtgccgtgatg

SEQ ID NO: 109128 - DNA, 353 bp, Heterodera glycines
tgtgtcgcaccaatatgattcgctgacaggtccttcggggcatttgtcgcaccaaaaatggtcgctggacctaccccttcgggggattgtggttcgcaccaaaaatagtggctggtcctgcccttttgggttatggaccggacatttttgcatctgcattcttaatgggatgtgtgagccctgactgatggatttcagcacaggaagactacactccacggcgaagaatgatgacagaataacctttttgcgcaattttaaataaatatttttattttctgtgcatcatatggttattttcctcatactttgtgccacatttgtaacactttctgatttattatttcagaatg

SEQ ID NO: 109129 - DNA, 68 bp, Heterodera glycines; identical to SEQ ID NO: 99057

SEQ ID NO: 109130 - DNA, 60 bp, Heterodera glycines
ggtttttttaaaatatggttaattttgtttatttaaataattcaggtaactccgaaaatg

SEQ ID NO: 109131 - DNA, 68 bp, Heterodera glycines
aaatctttgaaatacaggatgaagcccaagtggcgacgaaggaattgcaaaaaatgttaagaaaaatg

SEQ ID NO: 109132 - DNA, 121 bp, Heterodera glycines
agtgagtgaaaaagggaaaacgtgaaatattttaaattaattttattttaatttctctattaaaaattgactaaaattgggttttcaacacgttcagagtggacatggtctgcaacaaatg

SEQ ID NO: 109133 - DNA, 69 bp, Heterodera glycines
ggtacaagtttacggaaaatttaaaattttcgcgttttttgatttggttttttcagttggtttgtgatg

SEQ ID NO: 109134 - DNA, 557 bp, Heterodera glycines
ggaatgacagccggtaattcttcaattaggctcttttggccaagatattttgcgggcactttttaaaaaaccttttgggaacagaaaagcgtccgccgaaaggctcacaatcaatcagccggataatgaaattcagttagggttttttttatgaaaataagaagtttatagtctgtcgaaccaatataaatcacgcgggaaaattgctaatttaacgaatttcttagaaaatctgttctaaatttaactattttcccattcccccctttttcacgtgtgatttgttatccaaaaggacgagtgcttgaacccttttttatgcttacaatagtttttgtgttttttttctcgaaatttagaaaaaaggccgatgcattattattagtaattagtattaattgattgggttttcatttagtgatccacgaccatcaaagccaaacttacaaagaaccgtcaaataaaaaatgtaagcatttgttggtgaaaatgaaagaattaaccataaaaatttagcaaaagaaaagttaaacgcttcgattgcattgacaaaaatg

SEQ ID NO: 109135 - DNA, 162 bp, Heterodera glycines
gtttttatctttctttattccaaattcaatcattcaataaatgttgtcacaatgctaaacaaatttttgaaatatgtttttatcattggggatatttccttttaaatatttaaaaaagtttgttacctttttgtgccaaattctatttgtacaagaaaaatg

SEQ ID NO: 109136 - DNA, 369 bp, Heterodera glycines
aaagaggctgaggagatcatgctcagaaggatgccgaggctaaagccaagaaagacgcattagagaaggctaaaaaggatgccgaggctaaagccaagaaagacgcagaagagaaggctaaaaaggatgccgaggctaaagccaataaagacgcagaagcaaagaaaaaggaggaagaaatgaagcaaaaggctaagcccgaagaaaagcctgaggcacctgccgaaggcgtggccgtagtgccggaagcgaagaaggcggaagagacaaaggaaaagctgaaacaggaagagaaaccaatggaagtgccaccatctccagcagaaaagaagagaaaagaggctgaggagaagaaggctcagaagtatg

SEQ ID NO: 109137 - DNA, 330 bp, Heterodera glycines
attttaatttttttaagttttgaatatcgcacggcatttcaaaaagaatttgcatttttgttcaaattaatttgcgttcataattcttcagcggttgtgccattgcagtgaaggaaaaaaaatctaaattaatttgtgattaataatcaaattttagatttgtcatattttatttatccaatttgcaattttattcattttcaaactgaatgaacaaatggccaaatttttagaaaataacaaactttatgctatttaaataatactagcggggtcagcgccttcggcgcatccccccgctaggcagtacgattgtgttatagaattatg

SEQ ID NO: 109138 - DNA, 210 bp, Heterodera glycines
tgtgattcattattttgcaccagttcctcactctctcggtgcaaaggcgtaaggatggactaaaaatagttttattttcaaaagaaatgaaatttattaaggttttaattaattaattaactttcgatatattttatttttaaattgaattatttgattcttttttcaaatatttgtaatataatcaatcagctgcccggatgatcaatg

SEQ ID NO: 109139 - DNA, 133 bp, Heterodera glycines
atcatcaaaaattctcaataaactttcataaaacaaaaaattaacaatttaaaatttagttgcttttgagcaaagatttgtggtgaatattttataatacccatttcaggactttgcataattcattgcaatg

SEQ ID NO: 109140 - DNA, 223 bp, Heterodera glycines
ttttaaaggaactttttatcattaatatttttcttttaaattattatcacatttttgtgaatgtccattttttttctaataattcattattatttttgttttaatcgttttttgatataatttttttgaatttcataattttttaaggtgtttttaatcttttatgaaatgctctcaatagctataaaaatatattcaaaaattattttttagatttgcaatg

SEQ ID NO: 109141 - DNA, 53 bp, Heterodera glycines
ttcggactcgaaaaacttgaaatttttgctttccaaaatacctcccaaaaatg

SEQ ID NO: 109142 - DNA, 133 bp, Heterodera glycines
cttggggcaatgaaagttaaaatgataggctcacggaggaggttgaggaagaggcggagcaggtcgcctcgatgcgctcccaactgcccccggcgctgctcaactcgcccgccgaggaggaggaagagtgatg

SEQ ID NO: 109143 - DNA, 732 bp, Heterodera glycines
atcagtttaagtgggatttccattcttcatttcataataatcatttaatttgctcattttttgttcatcggtgaatcgaattggacctacgaatataataaaatttaattgttaaattactttgaaaaattaaaattaaaatttatcgatttcaatgccaaattcttttttccattttcggaatgtttttatgcgaatgcctttcacaaaatgtttctgttttccatttttggacattcttttaaactcatcaattcgttcaacaaattcttgttttttcatttgataataatgttttagtccattgtttttcggaaataaatccatcatatttcgccattttgtgggtttagagttggttatttttggcaaaaaaactcattgtaaaaaaattaaaaataaacgaaaagtttttagcatttaaaaaataatcaagaaaaaacttcaaaaattttgacttatttaatgggtcgtaattacgaaatatcatgtgaaattatgatgaaattcatggctttcaattctttaatcttatttactaatattttataaattctacttacatatgttcagatacatttattgatcgcatttttgccaatgcttctctatattcattaaaatttaaataaaaattattttctgatgaattaacttagtttttaatataaatatatttaataaaatattaaaaaataattaattaattatttataactttttttagtgatg

SEQ ID NO: 109144 - DNA, 1003 bp, Heterodera glycines
  unsure (1)..(1003): unsure at all n locations
tcgggtcgggattcgaatcgtgggacaattgacaaatcccacccccctcccgactccttcatgggataaacacaaagccggattagtcattgcctaaaagcatgccatgatccattgaaatcccaacacaaggtgggacaagacatcaggaaactgccattttggttcagcgagtaagcggagtgattaatggggctaaataaaacggaagtgacttgcccagggaagaagaagcacccgctaacagtgatgggatggatgactcatcggcggttaagagccttggccaaaataaccaccaaggcgggggggggggggaggggcacggtggtggttagacgagagcaaccttgcacgctcgctataagagctccatttttaaaaaattgaaatggcatgtgattttttaaaagttgagaatttaaaaaaaaattttttttttttctttgtgcactaacaaataagttccaccgagtttttgaaaaattttccagcggtttttttaaaaattttataaaggattactgttttctcgaaaatttttccaaaatttttttttctaattctttattcggtacttatgtnatatgttatctgtgtacagattttcaaaaatgtttatgttttggcaataacttatttctttggcatccaaatccaacattttgttgttatcattcgaaagcttaacatgtttagaaactatttctaagttatcgcttcgcgatcagacaattaccaaaaaagttatatgtacatgaaaattgcgaaaagatcgaaattagtcgaattttgatgccaaagaaaaaagttagccaaaaaacctaactcgtacgtccccgactagtaccttttcgacaaaaaaaaatatcatagctttggtggcatttaagtccatatcccggcccggtcccgctctactatagtttaaaggaatctcagttttgctaagccaattttaaatctgtcgagaattgtcataattatttggctcaacaaaatg

SEQ ID NO: 109145 - DNA, 1003 bp, Heterodera glycines
gtagcgggtggtgattgatgggttgcggtttctttgaaggtgccgccgtgattaatgagtgcgggaatgagtctatgcctatggggggggggtaattaattagcgtgggtgcctgagggggtagtttttgcgggaaaatttcccgcatttgtgggggagaaaacttttttttgtgaatttttttaaacgtttattaattatgtggtaattaagggtgtgcctgtgggggtagttttttgcgggaaaatttcgcgcatttgtgagaggtgtcatttggggggggggacgaaattaatatgcattgtgaaggggagggcgccgcagcatgtgtgagagaaaagtcagagagaatataaatcaaagagaatgtgagatagttagagaaaattatgagagagaaggggggggagtaaaaatgtgtccttttcgtgtcatacgccgggggggggggtgaaaaagtaaaaaggtatggagcaaaactttttggccaattacatagatcagataaatattttgtttatgtttttgatcaagaggatgtgtgtttattgggaatggaaaatgaatgaaaaagaaattatgcatgaagttggagggggggggatggtgaagttaggttatcctgtgggccattttcatttctcatcaacaacaaaaaatggagtggctcaactatagctgtacttcttacccggggggggtgctttgcaaccgcccccggggctacacaaaacccgttctctgtgtgcattggtccattggcaatttcacgcaatttctgcgtgagtgcgttcaagtggcggcagcgccaaatgccacggaggcaacgacgacgacgacgacaaattgcccaaatttgtcaaatttgatcatcgccagcgccgctctgattttggtgctcttcattgtccaggtgtgtttttttttattttttgttttatttcaaaaatgcaacccccccttcccatacagatggtgcttttggcgctgaaattgcgccatg

SEQ ID NO: 109146 - DNA, 337 bp, Heterodera glycines
caggcaaagcaatttgtgcgcaaaggttcttcagtgattcatcatttttatgggaatattattcaattttccttaattatttcgtgcgtttaaatgaataaaaaaattgcgggccgataataaacaaattcaaaaattttaaaattattttcaaaacactcaaatggattaacaaaaaatggaaaattatacagtagaatgactgttcattcgttctgttcccgtccaatttaaggtcggcggagactccgtctcctttattgaagaggcaccgcctgaatttgctcacctcgtggccgacgagttgcgcgtggtccacgagttgcgcttgagcatg

SEQ ID NO: 109147 - DNA, 199 bp, Heterodera glycines
  unsure (1)..(199): unsure at all n locations
aaaatgatttcagaaattgctattgaactattcattaatcccaaaaaaatgctcttgtaaattttgattaagtataattttagtgcttatatgtggaaaatttgtttnaaaaaataaaaatcaataaagttaaattttatgggagattttatgaggaggcgcacgcggccaaattgtatatggcgtagcaagaggaatg

SEQ ID NO: 109148 - DNA, 413 bp, Heterodera glycines
tgtcataattttttctgaacttttagaccagggtgacatcatactgcccattacaccaattacgtcaaacgtcgtggacgccgttttcaaccagtttgtaaaagtggagcagagcaaatcgaaacacgtcaacttatatggcgctccctttataattaccgtcactgtcctaaacaccaatggactaccgcgacaacggacaacaaagggaaaagggcgaccgcctgtctcctcacaatcgcacattttcaaagtcaacaacaacgacaactactgtcttttttacgcgctggaactgatgcgctactactcattatatatcaggggagtaatttcaaggaaacaatttagatggctcaaagataaccaaacaacggttttacgacaaaaggtgctgcaactactccgcgatg

SEQ ID NO: 109149 - DNA, 217 bp, Heterodera glycines
acctcaattgcatattcttatttgacttaaaattacatatatgtatttcgtgttgtttatgtaaatgcatcataaatcataagcagtaaacactcaaattctaagatttcttgcgaattaagccacaaacttattttgtttctccttattccccttctctcttctttccatggcttcagaatgttgtatacaggtcgttccttcgtttatttaaatg

SEQ ID NO: 109150 - DNA, 108 bp, Heterodera glycines
  unsure (1)..(108): unsure at all n locations
ttgatcagatttgctaataaagctcataaaacagctntaaagaatctgaagcaattgttttgaaaaaaaaattatgcttgtatgaaataggcaaaaaacgaaataatg

SEQ ID NO: 109151 - DNA, 131 bp, Heterodera glycines
gcgaaatgtatgttttaacattagtaggcgaaatgtcgagtaggcgaaatgtcatgtagccagggcaatcgcatcataatttccaaagacagcgttttgatcaaacaccgccctccgctattcatccaatg

SEQ ID NO: 109152 - DNA, 631 bp, Heterodera glycines
aatttctggtaaatgaagggaccaatggtaccttgagtttacaatttggaaagcattattttttttcatcctaaaaattaaaaaaaaaatttttttttgctcttttcagcgtgcattcgcttcttcgcctatctgtgcaccaccgatgacaacgcattgaccaaatttcccaaattcacggccgatgttttcgacgcggtgttcaggtggaaaggcgaccgatcacacaatttgtttttttcccaaaaacctccaccaatcgtttggtagtctttctttttaaataattagccatccaaaacgattcataaataattagccatccaaaacgattcactctgtcggctggtccgaacccatgacaaattaaaattagggcgcaaaagtccatcattaactaaaaagggaatcaaattttattttcttggccacagatttgatgcattcgacgtcacgcgtcgtcagttggccttcgaaacgttggcagtgatcagttcgaccagcggggccaagcagatattctcgcagaacgaaagtccgttttttggatcaattggactttttcttctagctcactactaatggtttcggtccttttatacttcccaaactttcagctctctacaacatg

SEQ ID NO: 109153 - DNA, 684 bp, Heterodera glycines
ttctattaattttcaaatattttgtttagcctccgggggcgtgtgtttgaggagcatgaactgcccgcatatttcatggcacaaagtcgttgttttcgcctggaggcgccttcaaatcagcaggactcgggcctctaccgcgtgcatgagttcaacaaagtgtgttttgcaagggaaaatatttcgaaattttcggcccaaaaaattcacaaatgaatggccccaggtgtccgtgggatttccaaatgaaatttggtggtggatagagcatcaccgtttacaagtgtgcaatggtatagtggtagtgcgttaggcgaaaattttttgcgtcccaggttcaaatcctctacatgcaaatccattttagaattttatttttgcttttttatacaaaagtcaattataaaaaattttttataaaacaaatcttttatttttaattttatttcattaacaaaaaatttattaaagataataatgtaataaatatctttaagttcataaaatctaatttttgtctaatactttttgagtaacttatgtgtcaaaatgggttaaaaataagaattttatatcaaaacattttttggataaaattgactttgatatgtataaaaaacaaaaaaataattaaaaaatgaatttacatgtaggggacccgaacctagtgtttaaaaaacgatg

SEQ ID NO: 109154 - DNA, 184 bp, Heterodera glycines
cattttttacgaaacaacccagccactaattaaaagttccttgttcatttaattcggttaccctttttaaaatttgacaaaagaagatcataatttgttcttttcccatttcagcgacaaagggaaagcgcgcaaatcgttgccgaaatttgagcccggacagtcctccgtaggacaacaaatg

SEQ ID NO: 109155 - DNA, 901 bp, Heterodera glycines
aaatttgtaagaaaattggagttagccataacacagttagaagatggaagaaacaattgggcattctctgtaaaataataacaaaggaacaaagaatggaaaaaatgaaaatatattgggaaataaaaagagaaaatccaaaaatgagtgaaaaggaaattgcaaaaactatgaaaattcaccaaaatagcattagaaaatggaaaaacaatttggaaaagatgaaataatggaagattaattagtaaaaacttaaattttttttaaaaagctatgtatgatgatggattttattgattcgaaaagattaatgtattttttaaattctttttaaaatgtaagggtatatatttccgctaaatttactcatgtttacaatttatatatgtcgatttgttagttgcttctagctagataatatttggccattttttcattatatttattaagaataattcgctttttatatttttattttttcgataattcaaaaacagaagcttaaaaaacatggacaacaaaaaccaaaaaataaaaaattttgaatttagtaattattgtcataatgtcacttttacgagaattttttaatccaggaaaaaacgcaccaatttatataaaaatttagaaaatatttatttttgcaaaattacaataacgatggatttaagcgttatctatagcctgcaaaatttcaaaaaattatattaggttaaaacaaaacacatggtttgcgacgccaaaatggctaaaaaattcaacattgagtttctaggccataagtttaaaattttttgaaattttgtatactaatagggattatcaagcgcttttaaatcataccatgtttatttaatttgggtgacaaatagaaaatgctatagcatttggcgccaaaatg

SEQ ID NO: 109156 - DNA, 111 bp, Heterodera glycines
gttgacgaaaatcagctaaaacagcagcagcagcaacattgcccctcaccattagccacaacagaagcggcaaaagtgccaaattcgatggcaccaacaacgacgacaatg

SEQ ID NO: 109157 - DNA, 369 bp, Heterodera glycines
gaaataattgatcaaagaattgtaaagttcgccatcgagaaaatggtatttgtcgttaactttaattaaattcggtatatgtagatcaatgcgtttttggtgaagcatatttctaagttttagaaaattttttggtttaaactctctaatataaattttgtcttttttggtgatcgaaaagctcccattaattttaaattcaatcatgtggtgatctgatgttgaaaaactttctgtaacattcgtgtcataaactaattgcttaggatttgaaagcactaaatctaaaatgttgttaccacgtgttatttgttttacatgttgaaccaattgtttttgtgctataaaatcaataaataatttcgaatg

SEQ ID NO: 109158 - DNA, 619 bp, Heterodera glycines
tgttgacaaatctaacaatcttggtattattcgaaaggcattcacaagctctattagccttgcaaaaaacaaacaaaaattttagcttctaaaaaagttattaggaaaaaacctcaaaattttcgacttttttgcaatttcatgttataacttttttggtaattgtctaatcgcgaagcaatagcttagaaatatcttctaaccatgttaagctttcgaatgataccaagattgttagatttggtcaacaagaaaaaaaagttataacccaaaaacttgggctggcgccaaaacggcggcgccaaaacgatacagactcctatttagcctatcttataggttcatggctcctccaaaacataaatataaatttcatgctgattacgagcgtgaatttcaaggcataaaaagaagtaaaaagggcgatgaatatgcgaattgtgtgtcgtgcagtgtgggcgtaccatatctgcaagcacgcacaatccttcaagtccgcggactgtgtatcctctgacggactgttcaggacgatgttttctgattaagcggttgcaagaaaatagtgaaaagtctggtgcaagtgaaagtgaattttgatcaaaaatgttcggaaatg

SEQ ID NO: 109159 - DNA, 1003 bp, Heterodera glycines
ccataataaaacaaagctaaaatttctagtaaataatgaagcaaaaatttaactgagattttattaaatttatttttattcaaataaggttgaaacacttaaaagcaaacattttctatttaatgcctgatcaaaatgcttcatgatatgcagagcaagatctgaaaaaaaatgtggaatggcatcagcaaaaaatacaaagcaatttagtttaatacaagcttcatgacttggttgacacttctttctgtttttgtagttgtctaataattagcaattaattttttatgtttttttctctttgccctgaagacaagtcttaggtatggtacttggttgattagagactgtatttttttaagcaaattttaggttatctttaaatgggtaaaaatattttttataacattcttttttaaaagcttaaaatgaaattattttttagaatgacgaataaaaactaataattaatatttaatttatttttaaacaaatgggttttttgaaaataaaatatgagtaatattttcttataatatttttttaaattgttattttaattttatggattcatcgatatatttgcatacaaaaatttatctgttcgcattatttcaaattttagagttttaattatttaatatattttaatttctctttttttggttattttcatgaagttcattttatagctttttctcgggaaccacatgaaactgcattcaaggatatttcctttcggtatcacagtcatcttcatttgttattttaatttttggattcaacgagaatatttgcatattaaaaatttatctgttcgcattatttcaaatatttagaatattttattttatataattaccaatgagatcgatgttattcttagaataaataaaaatttatttttatttctctgcaacttttattatttattatattttaatttctgttttttgttattttcatgaattttattttatagctttttcatggaaaccaaatg

SEQ ID NO: 109160 - DNA, 1003 bp, Heterodera glycines
tatgagttacttaaaaccaccataaaattaaaaaatttgagtttttatttaaattttccgacaaataaacatttgatatcgaagaaatataaatgagtgttctattagcaaatattaaagtaattttaaattttattaatttcatagatatttaaagaaaaaattacccaattaatttggttttttaatccgtttcatttatgtttagcgtgtcgtgctgcttgagcttgggcggcatgcaatcagtgccggcgtattgacacaaaagccatcattaccgtacagctttttccccacactttgcgcggttggcaacagcagcaaaaatggcacacaaaaagtggtgacttgtggtgccaatgcatttaatgagcatcaaacgcatgggtggcaattgaagaggccaattgaggcataattataataaatgaagaatttaacattgtaaaatcccatttgaatcaaattgggccgtggtgagccgaagtgacaaaagtatcaatgttcataatatttaaatttaattaataattttaatctatttgctaaataataaatcttaacttatcttaaacttagccaaattaaaaaaaaacttgagctagctctacatagtctcaatatattatatatatatatatatattttttttaattagaaaaatttaacaaaaaatttgtaaccaaaacttccaaaaaatttagatttctgaacaatcttgaccctaacttttttagaactcattaagatttttgaaatttcatataataataggtaaatttttgggctatctaatcatataagggtgttatgaatgatgtttgaacaattttcatgcatataaacaatcttatatttttatataaccataaaaatttgacacatttaattctttctaactttttttcggatattatattaaattttaaaaatcttattgagttttaaaaaagttagcgtcaaaaatgttcagtctaaaatttaactattacgcacattgatg

SEQ ID NO: 109161 - DNA, 99 bp, Heterodera glycines
tttttgcttgtcgacgacagcacacacagccgaaaagcgcttcttctcatcgccttcgccttcaaaacttagaagcaccaatcccaaccagaaaaaatg

SEQ ID NO: 109162 - DNA, 293 bp, Heterodera glycines
tgatgaagtgatgagttgtcgcgacgaaatgtgtagatgagcttggcgcgcactggtgttgatgttgcgttgagttgaaggctggctggcactggtgaaaagtgaagaaaaccgtcgccttttatacacttttttttgctgcatgaatttttgcacccgaattttgtatataaggaggtggattttgcacattctcctcactcagcagcagcaacacttcaagcaacgctctcaacgatcacacatcaagcacccacaaagccagcccgacaacagcgacaacaacagcaatg

SEQ ID NO: 109163 - DNA, 673 bp, Heterodera glycines
ttttttggcatgtttccggcccttttgaatcaaaaagatatttaacaggatggacaaaatttttaaaatcatcatctgttgtgttcaaatacccccctttgtgccatgcataacggagaaactggataaattttggtgaagagatttgtcgatgaaccaaaccagctgaacaacagaccgaaaggacatagatttttaatccaacgcttgaacagggaaaaagaaattttaaaattcttcccacatctaaaccaatcgcagcagtccggagagggagttaagagacgtagagccaagaataaaaatttcttagcccttgttcgcacccctataaaaacaccgggactacacagaacagcctatgccgataaactaaatgcaaaatcttctccaaaacaacaacaacagcaaaaatttacgtttaagccagcaatatgggcaaaactgtagagaaactgctagagcaaatctattatgaccttcgctccacggcaagctacgcaggagttcttaaggtctggcaagaagcaaaaaagtataacaaaacaattggtattggtgatgtttaaaaatttttgcatgatcagcgaacatacactctgtttaaaccgcgtcggaataagttcccgcgtctaaagactattccaagcggtcttcacactgactggcaatg

SEQ ID NO: 109164 - DNA, 453 bp, Heterodera glycines
cggtccgcggtcccaggtagaataacagggagctcgggaaaatttgccattattaggttaaaatttaaattttgactaaaaaccctaaaaaaagcttttctgacaataaacaccaaaatgcgtatttatccagttcgttttttctgattaaccccttttccactgatgaaagtttttgctaccggtcttggtattggttttcctaaccctcttttgcacaaaactttttttaaatttctaaactctcaccaaaattaaggaattttcggacaagttgaaaatctaagtaaattatcagttttttgaaccaaggtaccgaaaaaggtcgggaattggggatgagagctcggggtcagggatttctatcgaaaattaagtggatttaaatttagtaatattttatttaataatgttttctcctttatttttataattattttagccctttggatg

SEQ ID NO: 109165 - DNA, 960 bp, Heterodera glycines
tttgcggacggtcggagtcgttgtggtcgtcggcacagtgaacacaacacaaaaagcgggtggtacagaacagcagcacagagaggtgagtttcagcaaaggcgctgaaagagaatggaagtggaacggaacagcatcaacagcaaatgaagaaaagagagtaatgtgaaatggcgtccattttgacaaatttcgaacttccgggccggaattcgaacagaaagtgaaatttcaaatttttcgagtttcgcatttttggttgaaaatcggtttggattttctgaaacaaactgaatcatcatagacaaaaatgcgaaactcgagaaatttgaattctcgacttttggttcgaatcttggcccaaggtgcggaattggttgaaatggatgcctgtttcgtgatcagtatgatcagcgtccccaaatgttgaataaacttacaatgaaaaggaagtgacgaaacagtgaatggaaatgcaatgattgtcagccaaaattgtccccttttatacccctgtaaattcaggcaaaatgatcgaaaagttaaaaattgaaaagcaaacgattgccaaattctctataaaagggaccattttttaaaaaattctctcattttaatttctcccaacaacgcctctctctatttttgaattctcttcagctgctgctccattctattttttaattcttaggctaagcgtcgttttctgttgttcattgttcagaaaatgtcttaaacttttgtttttcattctccaaaaaatccttttatgtttttcaaaatccggcaaaatccatttgaaaaatttggacactgactcagcgtttcttgatccggcagaggttacaaaaaccggactcggccaaccctacttcaaatctccccctgtcctttttcctaacaaaaatttcaaataaaaattaatttaattcatttgctttctctttttaagcgaaaatg

SEQ ID NO: 109166 - DNA, 1003 bp, Heterodera glycines
attttcataatgatggttttttaaataacgccctttatgatgtttttttaaataacgactccgccccggtcattacgcccaaatgcctattttgtctcaaaactcataatcaaaactgcattaaaaatattttaaaaaataataaaaaagcacagaactcgcaaaacttgtctaaaattcttaaccaaaacgcaataatatcctaagcgtcagagatcgtaaatgtctttcgtgttttaattattttgtgtatttattgtattttatgtttttggtgaataacattccattctttctaattactactaaattttgaacatcgctctctctctttttttttgtattcgttttaattagctgcgtgtgtgtgaagttttccgtgtacaataaatatttccatttaacaactttagggaaaattacgacttaaaatattatcatcgtgatattttcatttttacatattttaaggtttttgcgaattttgaattttctgaaaatttacccctactaaaaacgattctttcgaaaattttgaattcaaaaaacaatgtttaaaaacactaaaacctctatgactaattatctctattttgacatttgttccctctttcatccttttctatgaatttaatttcatattatataaaatcgtttgcatgaatgttagaaaacaaaaaacaaatatctatctcaattttaacaattcaacaattattcgaaattaattatttttctaatttttttttatatcaaaaatagataaattgtaaagttttctagaattccaattttggtgagatctgttttcgccactttatttttccaaattttttttgctgaatagaagatgtcgtaggtgctttaaggcgtcgtcgggaaaaaggataaatcgatgaaagactggaggtttaaccaatagtctaaatgttttttgtgatttaaaaaggatagctcaaattcttatttaaatatttaattttcaaattattattaaacaatg

SEQ ID NO: 109167 - DNA, 695 bp, Heterodera glycines
taaaatgatgaaatttcttttctttgtttttaattacaaaaaatgaaagtttttaaaaaaatatttgcattagtaattaattatttacttacttatttatacatttagcatgcgaattcggtgaattgcatgaacctctctgaggttgttaaattattaaatgaattgacgaccaacaaaatgttgctgctaataaatgggaaaattttaccggaaattttagaaaaaagagaaaattttcggcattttttgtgtcacgaaataaaagaagaaaaaaactttatcaaagtgaaaatatttttgaatgggatggtcaaaagtgaatgttttgtcaatttggagaacaaattccccgagattttacgcgttggtaagcttaagaaaattaaaaaaatgaaataaatttattaaattaaatcatcaaaatttatttaaaaatagaaacaaaataagaaagtttataataataaattaaaattaatattgaagcaattttatttatataatataattagtgtagtttttcgaccatcggggagagattaaatgccggggatcgggggcaaaaatcctaccaaatttgtcgggaatggctgtgaaatttcattaaaaaacgagaatttcatacgcacaaaaatcttggaaacctcattttaaagaaagaaaattgcaaaatttaatttccagaattaatg

SEQ ID NO: 109168 - DNA, 204 bp, Heterodera glycines
attagttaggatttgaggacatcaatgattaaattggctcaaaaatcgcaactctgcggattaaacatttatccaaaataattcttttttaaatttgtttatattcacagacaaatgatttaaaaattaaaatgaacataaaaaagatttaattgttaaaaaaaaggttttttttctatttatttttttatttaggattatatg

SEQ ID NO: 109169 - DNA, 441 bp, Heterodera glycines
tgttttctctttatttctctttctatctctctctcgtgcattactctttctctgattgctccatcccaaaatgttgctattgtccccgcccccgcccctttccccaatcgctctaatcagatttaaggggagtgatgttgggatttgagtcagttgttgatcactcggccattttgatcattcaccatttcccttgccttttgctacacattctggtcaataaaccttttgttattggcttgacattttggggagcagcattttgggggagggatgcgctctcccacatttcaggttctgcctgaaatgctgggagggcccaacatccctcgcgtatttccccgcttattatggcgctcctgggtggatgtggaccattacaccgtaccattcccatatatagaaaataatattaatattttacaatttatcagaaatatg

SEQ ID NO: 109170 - DNA, 91 bp, Heterodera glycines
agtaagtaaatattatttttttttttttgaaaattttacatttatttttcccacttttttcagttacaacgaaagtttccaattcaaaatg

SEQ ID NO: 109171 - DNA, 148 bp, Heterodera glycines
tttttaaattgaaaaattttaaaataatttggttttaatagcggggaaacaaaggcgcttgttttggcgcaatttgggcggggcttaacacaaagataatgagttcacccgtcgttttacgacaatcatttgcaattttttaaaaatg

SEQ ID NO: 109172 - DNA, 172 bp, Heterodera glycines
  unsure (1)..(172): unsure at all n locations
gtgatttccttttgcataatgncgcttctttcttcattcgctgtctccctttttgctctttttcctcctttgtcctccttttctcccaccgtttgtccattctttcgccggtttcttttttttctttttccattttattcctttcttttacatttttcctttttcagcgatg

SEQ ID NO: 109173 - DNA, 193 bp, Heterodera glycines
aatcagaatcataactaatgattaaaccctttattgatttattcaattttttcgtaatcttactattaacttaaaatactttttatcataaatatctttcactatatcaaaaaatcatcaaaattttatttatttatcgcttatatattactacgtttcttatagtataattattataatcttcttgcagatg

SEQ ID NO: 109174 - DNA, 569 bp, Heterodera glycines; identical to SEQ ID NO: 102598

SEQ ID NO: 109175 - DNA, 55 bp, Heterodera glycines
agcatactgtaaaaatgatacggtttttagctgtgacaatgagacacagaaaatg

SEQ ID NO: 109176 - DNA, 107 bp, Heterodera glycines
tattttcgttaaattgtttttgttttaccaattttgtttagacatttcgccgtgccaccacttctgtcagttacaatattcaactttttttttgggtggaaccaatg

SEQ ID NO: 109177 - DNA, 91 bp, Heterodera glycines
tggggcaattatgccgggatgtgttacttgtttttaaataagctgaagaaattaattatttaattaaattaagaatgagaagaagggaatg

SEQ ID NO: 109178 - DNA, 630 bp, Heterodera glycines
cgtcattttccagtacagtaccattgactaccgtatctgtctggccactctcacgggcgctaccatagcctcgtacgcctcaataatcggcaatgtttctgatttccgtggagcgattgctcgatcattctcgtacccgatcaggtgactctttatatatcgtatagttggaatatataaattttatcgtattattgtagaatgaattcgatcaaaaaaacgacagtttgccaatgttcgtttgcttctgccattctatgtactcttttttgcttggtcatgaatttggaagtgttcaatgtttggacaattatcaacatctcttacgataggcgattaacatttgaaataaattaaaattagttttgaaatttttcaattttattacgatattcagatgggtttactgtaacagtgggctttattcggatgttctgaactccgtccccgcttttgtcgtcctttcactgtgctccttaaattacgcggcaatttttggcctaattttgtggcgcaattttcaaacgaaaagaaagaatcaaacgaattcacaaagtttggcaattttttaaatttcaattttactctcattttggtcatttagctgctgatcagtcagtgcgcaggatg

SEQ ID NO: 109179 - DNA, 1003 bp, Heterodera glycines
tttactaaaactataagccatcgacaaaaataactaattgaaaattcgaaaaaattactagtcataaagattgacattcaattttttaaccattaaaatcttaacattgaataggttcatcaaagatatgaaaaaatgattaagaatacaaactaacaaaaaactgaaaaaaagaattttctgtagaaaccccattatttttttgcttcgaaaaaagaatgaaattcaattcctttgtaattaattttctcaataagttattttcatcgattttaatttaatttcattgaaaaaacgcactgattttcaattttcgctcctattttaccatttttcgcattatttcgcaatttttatgcccttatttatttacctatttttttcgcttaaaatccgccgcttaatgatcaggcaatacgaaggcttgttatcgcatatggtcccaatgaaaaccaaaatgatcaagatttgatcaatcattacgtgcacttcaatatggaattgacatgaaaggcttcgaaaaaggaattaataatgaatatctatcaattcttattctataaagcacataaatttattttaatcagagcgcaaatgtcttttttcgctgtacggcgcaaatgtcgcggcgcaaatgtcgtttttgttaggcggcgcaagtgtcgcggcgcaaatggcacggcgcaaatgtccgcggcgcaagagtcttttttgctgagcggcgcaagtgtcgcggcgcaaatggcgcggcgcaaatgtctgcggcgcaaaagtcggctaaccatttagacctcattttgtgtggccaccgcagcccaagaagcaatcgcaactgaggcaaaagcgccgctcactttcaccgcgggggttttagtgactgtttgcgcttcgatgcttatcagtttctttgagatcatgtgagcgataattatcatttgtgatttatcggattcacattaaggctttctctcttctgatcactcacaatttgaaacttttcatg

SEQ ID NO: 109180 - DNA, 135 bp, Heterodera glycines
aataaaattattaaaatttaattattaatctgagtaaattacctaatccaaacattggaatcattaaaatcttttcgcaaaacgatactcaatgaaattttgtcccgaaaatgctgtataaacaaacaaaaaatg

SEQ ID NO: 109181 - DNA, 117 bp, Heterodera glycines
acgaacttactcccgtccttgactggtaaattgacaatctcacaaattgtttactatttattgttctttaattgtttaataggttcgtcatgaactacacgggtcgtcttaagcatg

SEQ ID NO: 109182 - DNA, 768 bp, Heterodera glycines
  unsure (1)..(768): unsure at all n locations
attaatagtacattttttaaactataattatcaacactttaaaacaaaaaaaaaatttgcaaaagtntaggtatcattttctttgtacaaaaaaatttctttgacaataatntattactagggtgngagaaagtatggatttctatatttttctgagtgtttattttaggctaataagcatataatagtatttgtagtttagtttgaaggttctaggacatattttttatttccatattccatatttttgtccatatttcacagttttgtccatattttatccatatttcaacatttttttcggaaagtatctaaaaaaattcccaacttaatcaattttttcaattttcaaaatgcataatttcttaataatgccaaaaaaacgtcaaaataacactaaaacctcgagatgtatttgatctgtcaacaagagaaggaaaattattgattttttgattcaaaataaatgtttttatgtaattttacccatgaattttacataaatattttggcaatttcgtccatatttttagagttcttcgtccatataatccatatttttaatcgtttttgtaatccaggaaaagtttgagatgctttgatctgtctataagagaagaaaaaaagttaattattttattgaaataaatatttaaaatgagtctacttgtccatatttcctagaactctatttattacttatattaatgcataaaaaaatttttgatctaaatataattttaggataaacagcactttccccatatg

SEQ ID NO: 109183 - DNA, 362 bp, Heterodera glycines
  unsure (1)..(362): unsure at all n locations
cagttagcaagtgcttttctatcgcaaaaccttctccgatttctcnnttccttccaatcactcgcctttctctgctgatcactctcaaatgccgcctttccctttccttttgcttntcctttgatcaattttccccccccccccccctttccttcgattgatccgtccatgggttttcctcgcttttccatgctttgatcgccaactgtttgtccttatcatagcgtgccatggctcgatggaattattccaaaactaatgaaagcatcaaaagcctccaagttgaagagcatcaccggcagaatgactttggtactgtccctccttcctcttttcctcgtcttcttccatccctgccaatg

SEQ ID NO: 109184 - DNA, 1003 bp, Heterodera glycines
ttgtcgaaacaataaaaggggtcgcaataatcttgcttatattgtatttttttttatgttttttttaaaaatttatttccataaatttataactgtttcattaaacttcgaagacaacctttttttacatatttgggagtttttatacatattaaaatataaccctttaaaataaaggagcgcgtccgtgcgcggtggggcgtgctggcattgggacactggggtttccaaattggggagggataggacactcataaactcccgaaggaaaggccccatggggtgatcaagcccagcagggatcccatcccgcctttgatggaaacacttactgggataagtggcattattccggagtgactggagtgattacagagaaaaatggcgaacattaaatacaaatgaaagtgaaatgtgattgatcaattatcgtcgggaaggggcggtacattaagcaaaaaggaaattaaatgtgagataaattaaatgtgtaaatgttaaatcctagcgcttcggcagttaaacgaataatccaaatctcttacaaatccagactcttacaataattttatttacatattttgagtttttgtacatatttcatgattttttttacatattcatgtatatattttgaccactagaacgaggcggtggagcctggtaaaaatgagttaaagtcgtatggtggtaatttggaacaaggaagtgaagagcaacccagcggtttaatccgccacttttaaattatttttcagaatttttaataaatataaaaaaattaaaagtggcaaaacaattacacgattttgtcgattatgtcggaggaaatcagaaaaatatatgaaaattaataataacatcaacaaatcggaaaccaatttgttttccaacgagacaagcaaaagagagcaaatgtatataaatactgtccatatgttaactgaaaatcatccaaatcaacgcggcacagtaataaaatattaaaagatccgaaaaaatg

SEQ ID NO: 109185 - DNA, 335 bp, Heterodera glycines
gctgaaattttacgggagtccagggcgggagcgagagttaattaaagactaacaaaaatatttttaatgcacaaatttgaaggacaatcctttattaaagaaaaaatagacagaaaaatttagtaagcagaaatttgaaattaaaaaaatcatatttttgtgtcgaaaatcagaaatttttcaaatttcttcaaataaaattttttaataatttatttgttgactcccttcaatagagccaaaaaataatcaaaccaatataatttttaccaacaaacggtaaaaaataaaccagatttaagatttaccaaatttctaattcgcataaaataatg

SEQ ID NO: 109186 - DNA, 313 bp, Heterodera glycines
aattttatccgtcaaatcggcttttgaaattttaatgagtaaatcaggaaccgtaaagacattctatgcttctcttgtggatacacgggaagaaataatagttagtccttttgttgaatttttagaaattttatccgtcaaatcggctttgggaattttaatgagtaaatcaggaaccgtaaatgacattctatgcttctcttgttggatacacgggaagaaataatagttagtccttttgttgaatttttagaaattttatccgtcaaatcggcttttggaattttaatgagtaaatcagtaaccgtaaatg

SEQ ID NO: 109187 - DNA, 373 bp, Heterodera glycines
tcaattccttaattgcccataatcgattaataaggaataaaattaaatggccaactcacggcaaaagtaataaaattagggaaaccccaccagctgtttttattgttaaaaatatggtcacaaaaagtcccagtggaattatccgccgctttcttttgcgagacaattcgaaaagtggccgaacgaacacagcagcgccaaattgagtcttaatgccattaattgtcgctgttcattagcactaatgagcagttaattagcaccttcttctgaagcatcgcacaaaaggtaaaagcccaagcatttctcattgtcagtgcttcccatctttgtatttattttggcatatattctccatggaagtccatttatg

SEQ ID NO: 109188 - DNA, 697 bp, Heterodera glycines
atcgctgcgatggtggcaatgcccattcagaagagagaggcggaatagaaaaatgaaattaggttatgatggcagcattgttggatttttgtttatttctgtaatgtatggttttcgataaaagtctggacagcgacttcctttgtctaaaaataaagggccagaattgttccttaaattgtttgagttttttatgttcctttttattcacttcaatcaggagcttacttatgctcactcatcggaaataccgtctcttgcaatttgcatccgtttctggtcgggcactaacaataagtccggaattcaggcagctcagttctgtttcgtccatcccatctaattcgcataaaacctcaaagtcagatggaaaggcgcccaaatcgagcactctttgggtcagtcatttgttgtcgtgctttccagcagatcttttgttgtaatttcagcttaatttgccctccaatgctgaagaggatgtgcgaacacgtgttcggagctctttcttcggcacttacgtcgctttggtacattttcgttcctacttttttcatataaaactagtgttggtatcctaccttttttcgatttaataattgtgtttcattcatcggcaactggcatttttcgtccattaatttgcataatttccccagttattcccagccgccacttttgctttgggttgttggcaatg

SEQ ID NO: 109189 - DNA, 412 bp, Heterodera glycines
  unsure (1)..(412): unsure at all n locations
ttctgctgtacctaattaattctgtgacaaatgttttgctgatcactgtgtttggaatttgattggggaatgtccacatttaaaaatgggtaaacattaagcgaaatgaacacgcagcataagcaataaattgagcgaatttcatccattaaacaaaatttattgaaaaatcaaatcgaatcaaaacaattagcgacgattaataaatgcgattagcaattaatagaatctctcaccaatntacacaatttttgccttttcccctctttttatttgtgcaattatttgttattttgtcggctttttatttttcccaattttccatttcttccttcattttgccaaataaacattttattccatctttctttcgcttttttcgaagttttcactgttttttgtccacaaaatg

SEQ ID NO: 109190 - DNA, 99 bp, Heterodera glycines
  unsure (1)..(99): unsure at all n locations
ggtaattgagttaattatttttcaccattattataaaatgggcaattntaaggctgcacgtggcatgggtgcaaaaagtgctacccaaacgacaacatg

SEQ ID NO: 109191 - DNA, 328 bp, Heterodera glycines
ggggacctctagagtccttcaccacacccctttgcatgtatctcctagcagccatccccacggttcaatttgcttatatctaatttttggagattttctattttaaatttttcaaaattaaaaaagcgagattttgcgggatttatccctgcgggtcccgtcccgcaaaaattttgacttctattgaaatttccggtctctatcacagacgtcgcaaatacaatttttggttgcccttttagcgccgctcgtcgtcccaaagtttcacttcgatgactctgtgctcaatgaacacattttggttaatgtgatcaacagtttgagcatg

SEQ ID NO: 109192 - DNA, 825 bp, Heterodera glycines
taaagttgagtgtctgtatgtatgtacggatttttgaatttgtgtggcgttttgttattattttgcgttaaaaaatgatttgaaaatgaaaatgtttttgttttgttttgcgttaaaaaagcatttgaaaaatgaaaatgtttggttttgatttttcaatttgttttgcaataaacattcttaaaattatacctatttatttgcttttttatgtatgttcatagtttattaagttatttgtcatataaatttgttttttgtaaacgaaaaaatttatcagtatattgtttgagtttgatttagtggttgttgtttgtttgtttgtttgtttgtttattttgtttttgtgttctttacgtgaaataattatgcttatgcttaatgttatttgaacttttaatgaatagaaatgcatatctttggtttgttctgtgactttagtgtgagacactaatgtgtgtcatgcttttgataaaacattagtggtttgttctgtgaccttagtgtgagacactaatgtgtgtcatgcttttgaaaaaacattagtggtttgtgtgaccttagtgtgagacactaatgtgtgtcgtgttgtgccataaggaaatgccaaaaaacaagaagagatgatgaaaatgcaaagaatgttgtgccataaggaaatgccacaagaaacaagaagagatgatgaaaatgccaagaatgttgtgccataaggaaatgccacaagaaataagaaaagataagaacaagaagagatgatgaaaatgccaagaatgttgtgccataaggaaatgccacaagaaataagaaaagacgaggaaaatg

SEQ ID NO: 109193 - DNA, 124 bp, Heterodera glycines
aaacgaattgctaaaaacaaaaggtgtttatttaatgggctttaattgaaattaaattaaatcaattaattaagaatttgatgatgaaaatttcatttttggagtgtataaaaaatattttatg

SEQ ID NO: 109194 - DNA, 712 bp, Heterodera glycines
gaaaatggcaccgaattaggcaaatggcgaacaaaatgggtccatcgaattcaacctgtacaattattggataaaaaaattggttgatgaacaacatgaagaaattgaaagaattcaaagtaatttcaattattatacagtttgacatggcggcctttaaaaaatttttgaattcaccagggattttatgtgaatattttttcgggaattttcaccccgatccgagacttttatatcctcgaataacggtgatgaaacaagattaaaaaaattaaaaaattaatgccaggattgattttgtgtgaatgttgtgaatgttttgtcgggaaaatttatcaccgatccatgacttttctctcccaatgtcggggatgaaatctaagttaaaaaaattaatacccggatttatgtgaatattttgtcgggatttttctccccaatccgtgacttttatctccccgaataacggggaagaaccctaaaaaaaaattgttatgaaaattctataaaaaaatttataaaataaagtagtttgttattcaaaactcgaaaatagggacagtcatagaaattttaggcatttgggaagctctgctcttaaatttttaaaattaatttacaattaaaaacaaattatttaaaaatagtttttttatgcattgaaaaagatgatttaaaaatcgcaaaagcgcaacaaattggaataaaaatg

SEQ ID NO: 109195 - DNA, 192 bp, Heterodera glycines
tagagaccaatatttgagaagtgagttagaaatgataatcttcacgattcctttacaagttcgatgctctaattaaccgcgataaaaacatcctaatcaattaaatagcttctgagataataaggtttatcataaaatttcttttaaaaataaaccctcaattattggaatgaacgctactttccaaacatg

SEQ ID NO: 109196 - DNA, 285 bp, Heterodera glycines
tcttagaagtcaatggatttatttagtgaaaataaaaaaggttttcatcattcaaatcttacgtatatccccaggcgttacctaccagcaccgccaagataccattatttagccattcaaatttcgaccgaaatcgtgaaacaaccaccattaataaattatcaatttttttaaaaagatgaatattttagtagcgaaaaaaacccaaattgaattagcagttagaataaatatatttatgttttaaataggtatatttatattagataactaaaatatttaatg

SEQ ID NO: 109197 - DNA, 102 bp, Heterodera glycines
actaaaagggtaaaaaagggaatgaaacaacggaattgctgaaccaatggagtagccgctgagggcaaaagagtacgacacggggtgaaagtgcaaaaaatg

SEQ ID NO: 109198 - DNA, 444 bp, Heterodera glycines
atttagaacaacaattatgatgaaacgcttgacatgaaaaatgctattcaggctaatgaatgttcaattgcccttgagacattcaatagtgaaaaagaaacaatgaaattacatgacgattatcaagtttaattaccaattaataattgtctaattaattaattgttaatgaaccttttagcatatttttcacaatgattgtatcatcaaatggtaatacatacataattaaagttgtttaaaaacaaatgcatatgaattttagggttaaacaacaacaactaattcgatgccctctttgtaacagagaagcaaaattcataaaggtacaataaaatatggaaaaatttaattagtcgcgtaattaaagcgaattttttttttttacaaaaatgcaaataaaaatttaatatcaatttgttacctttcatcctttttagaatg

SEQ ID NO: 109199 - DNA, 68 bp, Heterodera glycines
ggtacggtacaatcgacacagcacacggtgcctttttggttacggtaataccgtagtgtgttcagatg

SEQ ID NO: 109200 - DNA, 974 bp, Heterodera glycines
ttattaccgtatcacactttgataaggaatgaaaacctggaaaattttatattttataaaataattccgcgtgaatttttcaataattttatttaaaacttagaggattattagattctgctggattatcccaggcgaatgggatttaacaaatcccaatcgtctcatttgtccgccaatttttgtggttttcattcacaaatgtcaaatttaattttgtaaaaatgggcgaagaacggcagcgacagacaaaaagtgctgaatcaccaaatggattattttagggcgaaattgactaaaattgccttaattgagtctaattgacatttaatttgcgttttgcaatgatcaaaatttgagtgtcctcccttttgccccaatttagtccgttttatttatttagtggttaaatttaactaattaacaataattaatcaatgcaagggtgattaaaaagaagtaatatgatgttgctcaaattgttggatcatctgcaacgcagcaggtagcagcagcagaatgaccaaatttggcaacgggttatttttaaagatttttatagtcaattaagtaaatggtttttggtctaattaaaactggaattgctgcccgcaggcaagagggggagaggggcaattttccggtcccaaaacaaaaacaataaatagagaaaaatcggcaattttcgagaacctttcattatttcttgttggaaacaatttttataatttttaaaagaaaaatctatgggaatgaaaattgtgcatttaattaattgaatttattttttgaaaaatgcatttttggctttttggaaattgaattctttttttaaatacgaataaatgaatggataatttaacgattaaaatgattttgtttatttcaattatataatttttaaaaaaaaatatatttttgagaaataaaaataaataaaatgatgtttccaaaaaataaattgtctcaaaatg

SEQ ID NO: 109201 - DNA, 677 bp, Heterodera glycines
ttttttgacaaaaatcggtgctttactgtaatctgtgcggagattcacaaaaaaaaattaattaagaattgtcttggggtttttagggtcgggaaaaccttctggtatctaatttgtcccaattcgaaccccgaaccagattcaaaccaaaagtagtaaattcaaatttttcagatttcgaatttttgttcaagtccggttggctgtacttttgttgacaaatgaattttctacttttttcgagttttgttcgaaactgggttcggggggtatatgaggaggaggggggggggctttaatagagcaaatacgatacggttttttacaattgccggccagcgacagcgccatgaacaacggcatgggcaaaagcaacaactgctggcccacacgcacaccaccaatggcacccgacttggcagtcggcttcccggtcggaggcgctggtgttttagcaggatcaaaaaaggcactgcacttccaactgttgtcgaacagagccatcagcaaaaacaccacaattaaagggcacacaaaacggggaaacattttaagtataactaaattaggtatagtttgattatttatttgtacacggacgggggtggctgtatttgaaaaaaatgtattaggtactttatttttaaaaaaatgccaacaaatgggggagcaaaatg

SEQ ID NO: 109202 - DNA, 293 bp, Heterodera glycines
gcaagcaaataaaacagaaaaacaaatttaatttacaaaaaaatgtcaatcaaaaagtaataattattcctaatttgtgccaagtctcgttttgtaaaactgccataagaaacaaaaacaatttaatcaaaagaaattcagattttgattcaaattcaagcaaagtttttatggcttaaactttatatgtcttaaaaaaataaaataaattttcctcttttaaatataattcaaatttaagaattgactttttaaataaaatttaatttaagaaatcgccaatttcgttaatg

SEQ ID NO: 109203 - DNA, 218 bp, Heterodera glycines
tctcattttttgccgggccgaatggcaataattccgtccgggctgtaccccgaggccacaatgcgttccaccagcttttccaacgatcgtcgcgtcagtgccgatggatgcaacatcagccgcttctgtcggtgatcgtctacagcatcttcaaaggcaattaaattcttttaaattttttaaaattttattactctgcaaattcctcggcacggatg

SEQ ID NO: 109204 - DNA, 1003 bp, Heterodera glycines
aatttttacaattaaaagcaatgaatgcttcctgaatcatctaagtgtactccgttaagataacattgctgtgataaacggacaattttcgccaaatgttggggatcactttgttaagataaaataagaaaaaaataatccattgataaattaaattcaataaattatcgggtctaaaatagtcctaacaaattcataaaagcggcaaagtccaatgagttttactctgttgacaacttcacgaacaatttaatgccactgaaagtaatcatttattatgcgattgcgatacatttgatgtcatctctgttgtcttcataatccaaagttcagaacataaaaatccgaaatatccaaatttcgtagcaaataatccggattttctggagagttgaggtctgacgacaatgctatgcgtttccgaagaatagaatccgttttcggtttacatatagttataggcataatttatctatgtcaaaatggtcaataaatttctaaattacttttaacttttttgagccgatcccatcatccctaaagcaaatcccctccccccccccccaccaccacaaaaactcataatattttttggctgtgccgcatgacaattctccgtttcaatataaaatatttagtcagttgtactgcaccaatttcttgttgatcggttccaatttcgaacctgcgaagcttttgataggcgccaagtaaaatgctttttttctctctttttgtatgctcaattccgtttgtttcacgaggaaaattaaattattatgaaattaatttaccaaagaaaaaaagcattaacgagaaaaagagacaaacaaaagcttaattaattggatgtttgaccaggcgatggcaggcaaaaagttaagcaaaaaaggcgaagcgctcaaaaattggaacgcataaaaggcgagcgaaaattgtgaaaagacaaataattcattaaagtaaaatcctattgtgaattggcatttctctgtttaaaatg

SEQ ID NO: 109205 - DNA, 863 bp, Heterodera glycines
tttctgcgggtattagtgtcttgatcatgccggtgccgaaagagtagcgagtactagtgattagtgacgctacggaatccgacttccggtttcggatatttttagggtcggaattccgatttccccgaacaattcccatttcggaaatttttgataaaaaagtcagaaaattttaaaacctttaaaaaaaaatttttttaccatttcaaaatcagggacatcaactgaaaattttcaaaatcagtattggcctaaaaaataatcattaggggtcaaaagccagcatttagaaaaattttatttcaaatgaaaaaaaccaataaaaatgttttttagcagcaagttttttttccaaaaaaactattttcaaacagggggcaggtggataagaattgttccccatggatttgggttttcatcaaaaatgtgaaattttttctctcatcggtggacatgttttgaacgaatttcttaatgtccaaagggctcgcgtaatttaaattattattttttattggactattccatatatttaaattaatcttcaaattttcaacataaattcttgcactatgggtcaactccactgtgcagagaaaagcctagtactatctcgtcgttactctttttctttgtaatttctctcactttggcgtactatctcttcaattttaatggtgtaaaaacaacatttacttttctatgtctagctttttttctctatgttaaatccgcaccaaattttgcatagcgatagagaaaaaaattacgaacatttttaacgctcgaattattttttttacgctcagatctaaaattataagccaaaaacaagtaataatttatttttctaaatttagatg

SEQ ID NO: 109206 - DNA, 445 bp, Heterodera glycines
cagttaaatagtaatttttgtctttcggcctcgtatgggtctgggttttcagtaccggtctcaggtctcgagaaattcggtctcgagcatcacattacggcattcatttcccaatacccaaaatgcttaagtggtccaaatttggattcaatcgccttagattaatttcgaatccaccgaaaaatttgtttctcagctcaacggtttattttatgtttggccaacgctttttttgcatcgagaattgagataagggggaaattgtgtgagaacgaagcggagacggcttgtggagggtgaatcgaatgaaagaatgaataaatggaagtgaatcatcgccaacgccaaagcggggaggggggggggggaaggcttatcgatggaaaatatttttaaaagaatttccaattttgtattgattttaggatttaaaaaaaaaattatg

SEQ ID NO: 109207 - DNA, 173 bp, Heterodera glycines
cgtaatttttgcaacttttttttaaatttatgacctttgaaatcaaacttttgaccatgggaaggcaatcggttataaattactttcaatttcagcagaaggcattccaagaagaccacgagaaaaaattgatggaacaaattgtgaatttgcagacgaaagttgacaaaatg

SEQ ID NO: 109208 - DNA, 112 bp, Heterodera glycines
tctttgtatttattttggcatatattctccatggaagtccatttatgtacaaagttttgctgtatcgactgctctcaacttcctctcgtgaaatttggacacttttccaatg

SEQ ID NO: 109209 - DNA, 463 bp, Heterodera glycines
  unsure (1)..(463): unsure at all n locations
cttttcacannttctttttgaatttaaaaaaagcattggctaataaggaaatgttatttttcatgctttttgaaataaaaaatttgtcattctgatacatttcctcgtgaattatttaatgaattatcgtgttttaaaatttcaattttaattgataaatattattatttaagcggttttaaaaaaagaaattcctttttcggtgaaaaagtccattttacgtaaggctatttttaggagcacaatttcgagaaatcctaactgcttttgttaggttacttttcgagttcaaatctaccactaaaaatttttatataaaagttttttttacaaataatttagaatttttcaataaaaacagccaaaaaaatgttcagaatattaaaccaattagttcatccttgtaaatattaatcattttcactaaattagttcatatttttgtatttttagactttaaatg

SEQ ID NO: 109210 - DNA, 64 bp, Heterodera glycines
cctaaaaaggaaaggaaaaatggcacacattcggagaaggcacttcacgtacatataagggatg

SEQ ID NO: 109211 - DNA, 385 bp, Heterodera glycines
tatttttcaaaattctccagaaaaaataattgtttaaattttttgagttttttataatgataataaataattaaaattaaacatttgttgtttcctattaaacatttttttaattttaggagacaacggtaattttttatcaacatttcaaattccggtgtaatacggtgtttttttatttttttaaattgaattaattaactccacaaaaaaagccgccgccccgccaattgactgagctcgctgaatgcgaaagtgcgaggcagaaatgcccttatcgtgaatacgcttgtcttccggaaattggcgctgccgggcaatcgtgctgtggggccggccataagttcacatgcatggaggtgggcaaaaatacagtaaaaaaatg

SEQ ID NO: 109212 - DNA, 662 bp, Heterodera glycines
aacagctgagcccattgactccaccggcagcaaaaattgtgccatcaaatgatcagaaacaaaaggagccggttgtcattattattgatgatgatgccaataccaataatcatcagaaacggatgaaccgcggaatggccgtggcaacaaataaggggaagaagccggccgaatcaccatttagtaattaggcgttgatctaatcacgacaaaaaacgccaaatctttccaacaaagacgggaccgaattctgaaatctctgcttgcttatcaattcattcagttccggtctctctaattaatttctcttgcgtttagttggtcgcagcgatgccattgtgccatcgtcgaaactcactcccattgtgccatcgccgcaacttcgttccgccgctggcatcggagtaccaccagcaaaactcgatttgtccacgttgccgcgcacactcccacccgtgtcacccatgaaaggaatatcgccgcgcaccgccgccgcttttccgattgcgcggaaacgacgcccgccgctgccaccgattcgggtgcccagccagacgaatcagtcccacggccaatccatcgtcgcaccgctgaatttcaggcaaatcatttccgaatcagaccgattttatttaagagctttttttgcatatgtcataatg

SEQ ID NO: 109213 - DNA, 477 bp, Heterodera glycines
  unsure (1)..(477): unsure at all n locations
caatcaaaattaaatttanttttgctcataatatatagctttttttttaaagaatcggttttttaaatattaaaaatgattttatagccccggaattctgaggcaccgctggtgaaattttttttgaaaaactaggctcaatttgataacacattttctcaaaaattaccaaatcttgtgtaaacttaaaaaaattatgaagaatcatggggccggcggtgtagtaaattaatttactagtaattgatttgttcaatatagaaaaattatatttacttaaaaattacattatgtaaaagaaatttaattattgttgaggaaatgaaacagtgcgaaagtatttgaaaagccagaagctttgccactaggccatttgaaaaaaaagttgtaaatttacaggagaatataattttttttcagcgttgtctaaatctaactacacaaaaaaattaaaaagaataaatagccccaaaaatg

SEQ ID NO: 109214 - DNA, 614 bp, Heterodera glycines
ttgcttttctacatttctattctggcaattatggcatcattaaaattttttaattgaaatttaaaaaattaataaatttaatttttatcctgagttatgaatattgttaaatttaaaatctttttttttctattacgcttttgaattttccattttaattccaataaaattatccacgtataatttcagtggatttggtgagcgattttgacataatgaaaaaaaattcgcctaaaattttgctgagcaaataaaattccgttgaacttttaaatttcggagtgagtttaacaaatgtttgaactatatccacgtaaatttcaataaatcgaacgatgtgaatagataaatcacaaaaattcgctcagaaaattttactgatcaaataaattttgaaaatttgtggggcacctgaaaaaactgtacaaataatgcatttgaatatgccgacggaagtcaactttcaacattgcactactgttcaaagcatataaaagggcttagtgaatttggagtgtaagcatttaatttaattttaaaatttaattattatttcgaaaaatttatttaaatttccaaaaaaagtttggggttttcagtaatttcaaaaaatg

SEQ ID NO: 109215 - DNA, 732 bp, Heterodera glycines
ttttggcatgtaaactatttgtttttgttcatatatatttgttcgaaggcggatctcttccggagtctctgggtgcatgtccaccaaaaggtagccaaaaattttcgcgcatgcgtcccggtaggcctcaataaaatgggcagtccttgacgggaagaggtggttggcgattggcatatctgcaaagcccccgcagggtttcgcattaacactagatagtgcgaatttgtgcgcgccacacgcagctctttgttgaacaggtgttgagtcaccaaaattacgctgacgccccaattgtgtgagccacgggtgaagagtgcgtctaaatattgctgactcatccccaccaccaaatcatccagcaccagtaaggttttttcttttttggcgcactcccgcacttgttccgctcgtgggacgccgctgtgtacagtgactggcacattgccaactttgccggcgcgctgtaaattcactacatttgtgttcagctcgccatagctataaataacgcgttcaatgggggtagagatcattttgtccacatttcgcaacagacgcattatccactctgacttcccactgcctgtgctcccagacacaatcattgtgaatggatgacgaaattgtccatcctcccttttaaattgttggaaggcgtccattttatttttttttaatggaattttctttttatttatagttttacattttaatagatttaaaaaaatg

SEQ ID NO: 109216 - DNA, 212 bp, Heterodera glycines
aacaatttatttttgaatctcttatatggatcttcataatgttgttttttgtctagatttatctcgattttattttttaaattattttattttgatttttaatcgcatttttacaagtttcccccatttgtcatagtattcatttgatattccaatcattttaacttttttttccatgccgtcatttttaacaaatttatcgaataacgatg

SEQ ID NO: 109217 - DNA, 382 bp, Heterodera glycines
tttttttcttcagttgtgcctttgttgcgaatgttgagagcggatttgtgaagcgaccgttagaagtaaaaaattttggtatttaaaaaaatctaaaattacacaaaaaaggtgaaagatgctcatatttttgagcaaaagccaacatttgtccgacacgacagaaatataatcaggtaggcccgacataaataaatactgaaaagtacaaatttgtcactgaaaatttattaaataaatgatgtttttaaacatttattcgttttttttttttgtctttttacatcgaaattcattttttcaatgtttattttttgaagttttcggtgtgaatcctcaaaaataaaatgaattttggtgcaacttagaattgaacgagatg

SEQ ID NO: 109218 - DNA, 111 bp, Heterodera glycines
aacccgctttacacggtagacaacgagacatatctccacctttttcgagaaaatttgctcgaaataatccatcaagcccaagaaaattcaaaagttaacagggaaaagatg

SEQ ID NO: 109219 - DNA, 421 bp, Heterodera glycines
tttttctggttgggggaacaaattttcgaaaatttttcaatttgcagagaacccttgtgcacctcgggaaaatccaaaaattttcaaaagtcccttttttcttctttctcaaactaaattatgaaatttaggccagagcccattgtcaccgaatgacctggatgagctagaggagcgtgtcaacgattttaaatcttttttgtctgcccaggagcgaatgcgcgtgtttctctcaaagaagcccaaggcacatcttttgttgagccattttgttcccttcgctcgcgagcacaaatttcttggccttttagatgaacagggttgtggtgaaaaatgttttctatcccattaatctgaatttaaaggtgacgaggcgctccattcagtttggcgccgacttgagcaactgtggaagtgtatg

SEQ ID NO: 109220 - DNA, 277 bp, Heterodera glycines
ggtaattagtgctaattagtgtgctaattaattaattaataggaatagcaaattattataccatttgttgaaattttacccccgtccctccataccattttacttgattttttacacacataatttttattgcctctgggttttcgagttttgggttgctttttgatttggctcgtaacagaaagccaaaaatatttttaaatttaaaaattggaaattttaaatgtgaaaggggcaattttttaaaaataagtagagatcggaattctcaaaaatg

SEQ ID NO: 109221 - DNA, 982 bp, Heterodera glycines
agaaggttcaataaaattaaatttagtgaaaaaacttaaaatgctggcaatcgtgaagaatgggagtcccaaatttgaatttattatttttaaaccaaaaaacgaatcttggggtttttgataattgataaaaatttgattttttgccagaatgctctcatttcaattggaattcaattttagtaactcggaattttcgtttgtgtctgtttgggtattttaaaatttctttgcttaatttccatttaaattgtttaggctgggcccactgaactggtccaacttcacgaatcaagtgcacaattttttgaccaattttgaagccatggaggaggagtggcgacaacgacagcaagaagtgaattattgtgggacggggaatgtgtgtgtcctgttaaccacgcttaaatcggcccacggttttgctaaagttcccgagaattctccctgctgttcgaggcactgaagcagtattctcatttataagttcctcggaagattttcaaagatggcataaaatctcacaaatcttcaaaaattttcgaatttcttaccgggaacgattgggctgacaatgacaagggaaccactcgaactgtaaatcggaaaatgggtatgaaaatgcacgattggcaaatcgactctgtcctatgcaaccgtaccatttgcatgcctttttccaacttacagttcgatgcttcccttgtgaacactaatttgtgagtaaagtggcctggctaatctatcgtttttccttttattttttggaaatgtcattatttgttgcgtcttctttaagctcaaccaacagatcaaacagtacagtcaggacagaccagcgtgggaacaacactacgaaacgtacaaaaacaatgcggtaagaagtttatacgccaaattcattgtaaataaaagcatttttggccgatagacaatcgaccaggacaaaaggagcaacattgagcatttgtacaagcaaatg

SEQ ID NO: 109222 - DNA, 90 bp, Heterodera glycines
tgcaacagaaattgaagacgttcaaacgacaaaactaagaggcggtgagaaggaaaagggcggagagaaaaagaaaagggaaaggaaatg

SEQ ID NO: 109223 - DNA, 408 bp, Heterodera glycines
tggtttacttatcttaaccgcggttaagaacttaaccctttgacgggaataaggcccccgatgtttgccttcttctcaatattttttatttgacgaaatttatttttctccaattttgcaagcaaaccctaacaaattgcaaaaccgcttaatccaataatgctttagcttaatgcatcgagctggagcagtacatacttagttaacagaacacagctttaatgaaatgttcggcaaaacatatttttgaatgtgaaatgtatataatggaaattttatgcaatgaatgaaaaaacggcaaaaaaataggaaaatggacacaaacatttttatgaaaatatttgaaataaagaattatgatacatctttagctaatttatcttaaaattttttaagcatttgaaaatg

SEQ ID NO: 109224 - DNA, 117 bp, Heterodera glycines
cgtacgtttatttaatgacatgcttgttctattagacggttttatgcttttttaggtgagggcagaatatccgatgcattagttgaggcatttttagaattggacgagcaaatgatg

SEQ ID NO: 109225 - DNA, 123 bp, Heterodera glycines
  unsure (1)..(123): unsure at all n locations
gatagttntataaattaaattttcacttactagtactattaacttataagcttattccaaaatatctagagcttttgatacccgctataaactaactaatccttcaaaaaaaaacaggtaatg

SEQ ID NO: 109226 - DNA, 995 bp, Heterodera glycines
gctataaaatggcgccaaatttaggcattatatatatttttaatttttctaaaaattttaatggttctgccaatataaaatcaaattaaatatgcttacgaggcgattttttaataatgagatttttacagaaaattttaaagctgttcgttaatttcaattaaatttttttttttaatttttattcgtaatttaatttattttaaatatatttgatttaaaataattttcttttaaaatttattgttaaaagtttctaactaattaatcagtcccttttatttttaattaatgcgtcaccaacaattttttacggcggcgcttttttatgtaaaaggcggtgattgttaattgactggatggagtcatccaactggttaactatataaaatggcttttatgagacagatgaggataaaacatgaattaattattcattttttattttttaattgaaattcaattttttctaattaaattttttcctaattaaaattataattaatttttaagccattctttgtttagctgtatttggttaagaattatatttaatcgtctactaccttttttaataaataaacaatgtaatttataaatgatttttttaaatttaaataaattaaaaatcaaaatgttgggtattttacaattcatattttttgatgttaaaaaatcaattattttacctttgccgttctttattcttaatgacataagcaacaaaggcagctgacttactaaatattttgttaaaaatttttattccgtaaacttgaaatttaatatttcattacttaaatcaataataggaaattcaatctttaaaatttgtgttcaaattttttttgatcaaaaatttaatgttttaattctaaatttattaacaaaataatttaattgggttttaatataaattttcacaaataaataaataataactgttatttctaaattctcaaaataatttagaatttttacagttatttataatg

SEQ ID NO: 109227 - DNA, 119 bp, Heterodera glycines
cgtagcttttttccaaggaatgccgtagaagttccagaggaggaaatccgaccattcaggccagacgacttttacgacgcaaggatgttatggccaggtggctaaacgaagacacgatg

SEQ ID NO: 109228 - DNA, 561 bp, Heterodera glycines
gtttgttttgctatttcagacacatcaaatatgttcgtcgtcatcaactccattctgctgccgggcgtattgatgcattcagttggagatacaattgaggcgaacttcgaaccaaattagcaattgcctaaaccatgaacaaatcatactaagatcggaattaaatttcacaattgtaatttttcaagaaaatccaaacattggataaattctttattggcaaatgcagttcgccttttctttattaaaaaaacatcgaaatttcgatgctttctatctttgctagcgaattttagatttatgagtaaattttttcaaaataaagaaggcttttatggtccggctaatcgaaaattttatacgttaaaccgtccttggttctgtaaagtaataacacacagtactgtacaatttttgtggcaactttctcaaaatttctaaaacaggactaaagtggcccattttatatgctgatcagtgtcaataatgtacaccaattttcgggttcgcctaatcatgcataagacaatcaaatatcagcttgataaagagtgattgatg

SEQ ID NO: 109229 - DNA, 217 bp, Heterodera glycines
aaggaggcggtggagacgacgacggagaagatggaggaggaggcggcgaactgaggagagtgaaaggaagagggaaaagtgggagagaagggagaaatgagtaattttccattttgttcatcgtaattccctccccccctgtccaccgcagggtcgaaaaagccgaaggaggctggaccgccaccgccacagccaggcgagtattgtaagtggtatg

SEQ ID NO: 109230 - DNA, 410 bp, Heterodera glycines
ttgtcgaaatgaaatgaattataaaaaataaaaattttgttaatttgaaaaatgaccaaaattcaaaattaaaacggatcgaaaagagttagaaacaaataataattatgatccaaagagggagagaactgatcagaaaagtgggggggggggcagagaaggaagtgatcaacgacggatcagtggcgaatgagagcaaattgatcggactttgctgagcatttaatattattatattacgcacaaaaagagttttatgaattgggagactctgcccctttaactaacgatttgtttattcataaaattcgacaacaaaacaaaccgttgatggcctcgcatttttgtttgggcaattgtataaacgaaactgagaaaagcaaaaatgataaaaaaggggaagaaaaatg

SEQ ID NO: 109231 - DNA, 364 bp, Heterodera glycines
tttttaaaatattctcaaatattttgattatttaatgggacaaacaaattttagtttgatttcaagcataaatattataatattagacatctttcatttttcaatataatatctggtaaaaaattaattatttttatacttatttacaagcttgctcatgtgcttcggccactttcgtagacagaaattatctaatattttaattttggcttttctttttataaaaataaaaattacatttaatttatatacataacataaaaaaagctaaatttaaaaaatcggaaaaatgtttaaatttttagaatgatatcacataaataaaaagtaaaagtgaaaatgtgtgtaaatgttgaagaaaatg

SEQ ID NO: 109232 - DNA, 107 bp, Heterodera glycines
ttttgtgatttttgtttttccatcaaattgtttaccattttctccgtgccaatgccatttcttccgtcagttacgaaattcatttttatgtgcaagtgtcgtcaatg

SEQ ID NO: 109233 - DNA, 116 bp, Heterodera glycines
ggtttttcatctggaatcatatcccggaatccgatcccgattttttcaaaattctcggctctaagaccaactgaacatttaatttttttaaatttctaatttaaggtgacagaatg

SEQ ID NO: 109234 - DNA, 233 bp, Heterodera glycines
tgtttggccaaattgtcaagcttttgcgcaaaccctcatacaactacagagtgcttgctacggcatccaccggctgtgcagctattttgctgccatatgggaaaacggcccattccaccttccgtctgggcagagacgtgtctctcgaaaaacttccaagcattccgctggagagtttcttcgccagacggattcgtgaagcacaactgatcattattgatgagattacgatg

SEQ ID NO: 109235 - DNA, 306 bp, Heterodera glycines
atcattgggaaaagcattttttgtttaaccttagatgggccaactccgtctcagccaagtttaagaagccataactcttggccatctaacaagatggcatcatttgcaatattatcatctatcagtttctcgaataaattatggatcaaatctcaaaaaaattgagctatttgacactgattttgattttccaaacaaatctcaaaattttggcattctaggttttcggcactttaattcggacggcatttctatcattgtttgatcatttttgattacagttgttgtccgatcggtgccgaaatg

SEQ ID NO: 109236 - DNA, 63 bp, Heterodera glycines
agtaagtttcaaaaataatttaattaattaatttagatttatttttatttaatattctagatg

SEQ ID NO: 109237 - DNA, 313 bp, Heterodera glycines
cttcccccaaaagcatttaaatgacatcaatttaatagagttattttatttttttaaagtttacaaaaattaattttaaaaaaggatatacccataaaaacgaaaaaaatgaactaaaaagccaaaaatattcatgaaaaaaccgaaattaagcaccataaaggcaaataatatgcataaaatgcaaaaaaaaatcaaaaaaatttgccaagaattgcattatacataaatcacttgacatccttatttactaatttttaaaataattattttaaaattataacggattaagcaaaatttatttgttaaaatg

SEQ ID NO: 109238 - DNA, 106 bp, Heterodera glycines
ggtgggaaatggggagattacaacaaaatcattcacttggatcctctaatcacaggtccaagaacatcgtacgggtggcgatgccgtggctgtctcccgcgacatg

SEQ ID NO: 109239 - DNA, 588 bp, Heterodera glycines
ctggagaagttaattggggggcaaattactgaatatgctttggaagaccaatgaagccccagcaaagttcatggatgagaattgtaagttaacgaaacgggaagaaataatatgccgtatttataatgagtggctccgaatttcggaatcccgatttttttttgggaggggggggggggggggggaaatgccggagttttatgtaaattacttaatttttatttaagttatgcttgatgaaattttttttcgaaatttcaaaaatcccacaatcccgcgcatgatcccataaattttaaatatgggatttgtaagctttatccacgggatcccgtcccgcaaaaaatattctgagttccaatcccgtagcgggattcgcaaatttcaaatttccggttctaattagtacagctttggaaaataatacagtatttgatatgacatactgaacggcttagctacagtatgtgattggcatactgtgtgtgtcaacagcaataaaataattataaatttttttcatttttcttcgacaaaaaccgactcgtggatcattacaccagcgctctgctggtgagtgccaacatg

SEQ ID NO: 109240 - DNA, 137 bp, Heterodera glycines
aaattgggcacacttttttcctggttgttgtcatttcgggcacaaattttgtcagtttgctcactgctgacttaattatgacggtatattttgaatttttcaaatttaattttaaatgttccaatttttagccaatg

SEQ ID NO: 109241 - DNA, 91 bp, Heterodera glycines; identical to SEQ ID NO: 100405

SEQ ID NO: 109242 - DNA, 397 bp, Heterodera glycines
agtcccttttcattcgccccgcctttgaccacaaaacaattgacgaagtgctgtcggatttactagtggacggagaaaacaatcagtaaaattgagcgtaatttgaagaataattagaattttattaaattaaattgtttgtctaatctttcccccttttgtcccacgcaatttaaaaccgccatttggcttatttacgttttttggttaatgctttattatcagttgaaattgaattatgcgaagaataaacggaatgttttattttatttctctgtgaattttcaaacgccaattgcatttggcgaatgaatttccttctcccatcgatcggtcctttaatcatttcaccaacaacaacgttcttttgacaaaatttcttttattttcataaatg

SEQ ID NO: 109243 - DNA, 496 bp, Heterodera glycines
atataattatatttcttagggcttaattttttaggtagtaactataaaacacaaggtttaaaatgctgttttaggtaagggaaattatattaaaatcccgaaatattaaataaatttttacgaaaaaatgccgaaatattggaaaaaatttaagaaattgaaaaattttgtgatgtaaaaaaataattaactgctcataacactaaaaaaaatttcttcattgattacaattgctaataattatatttttgaggtttttaatgcatttttccaaaataattaaaattaaaaaaacaaaaattttggtcaagaaagaaaaaaaaattacaaaaatcaaaattttgtcaagaaaaaaaaacaaactaccaaaaatggaaaaaaatttttaaaaaacgcctatgtatttacaaaagttcaagcaaaaaatttatttttaaaactgtaactaataattacatttctttttgaattttagcaaatctggaaaaagcaaatg

SEQ ID NO: 109244 - DNA, 377 bp, Heterodera glycines
aaatgaattttcttaaatttataaatgcagcagtgtggtgcatttctttaattgaactgataaacttatattttttaattaaattagaacgtaagttttgtttgtcaaacaaaacttcttcttatgttttgacagattgagccttaaaatgatcaattatataataaaatcaattctctatcttgaaaaccttttagttcttaaactaattaaacaataaaaggaaaaagtgcgcttgtttttctcccatttgattcagtcgattagtctcgtttttatttaatgcattttcatacggaattttattcaaaaattttgagacctgtgaaaattatattcaagagattaaattaaattaaaaattttcagaaatcatg

SEQ ID NO: 109245 - DNA, 236 bp, Heterodera glycines
ttccggatttataaaacatttaattgtttgtaaatgcttttattcaataaattcctctctcttaaaatggtgccgccatttgcattttctaaaaaatgttttccatatttttgaaggtttttacattttaaataccataaaagttttgaaaaatttgttttgttttaaaattttttttctatattcaaagttaattgaattcataaaattcgttttaaagttaaagtaattcaatg

SEQ ID NO: 109246 - DNA, 375 bp, Heterodera glycines
attgtagggctttttaaatggtatagaatggtgtaatacatattggaaaattttcaagggttttcgagataggcaacctagaaaatttaagaaatttttttttgggttaaaaaaggggggtgaagaattttttttctgtggtattttgaaatgctgaatacgaatatgacctttgtttttcgtatcataattgttagaattttttaagaattcgaaaatattttgcaatttattggccctcagaaatttggtcgcatattcaaaaattcatatctagcctaagggttgaacaattttcgaggaataaaacctttaaaatagagaaaaatcaggagaattttatgggttttatttggattttcttccataaatatg

SEQ ID NO: 109247 - DNA, 1003 bp, Heterodera glycines
gaccatgcacaggaaacaatggtgtgaactaaaaaattaaaaactaagtttgttttatttgcttatcttgatccgtattttgaaaaaataccctctcgatacataaaattaattttattggattacttttgtcaaaaattaaatcattaaaaaattaattgctttaccattttggttagaagacacatttgattagctttcgctcacaaaacggctggtcactgaagtgtccaaattgtcaaaattaattactggcattccgtccagcaggtcacgtggcctagcccaaagaatcaatggacattattttattttgaactaattaaatgacgaggcttattttatgaaaataagtgccaaaaattttatatgccaatttggataatgtcatacgtgttaaaccggtatttctttaaaatacggtttagaataatcaggcactaaaattcgggaaaaataagattttgattaagtatttatcatttcttttattagcaaatggcaagatttcgtcaattaagcattttcataaaaaaacaaaattaattctaatggaaataatatagttaaaaatgtcttgaggagggtacgtaccccgcgtatgccctcccccctcccctctggctggggccgtccttgtccttggcctgagacaacctctgtttatggatgatttaaaaatttctattttaaaaaaaatattttttctgaaaaggattgatgaatacgaatttccaaaattttttcgtaaatatgagtgaacgcccatttaaaaaacgggttttatttttattttttaaaaaatgtcatttaaatattggacgtttttaattttttaaagtatttgcttaatgattaaattaattaatcataattgaaaaataacgcttttatattgaaaaacttaaataatttgttgtactattaaattaaatcaattcgttaattaaatttataaaattcgccttttataaaaaatggtaaacaaacaacaatcaaaatg

SEQ ID NO: 109248 - DNA, 422 bp, Heterodera glycines
ttttttgatttaatccgtctattccataataaaaattctcaaaaatttcaaataaaatctgttttctcctcagatttttctcgatttggaagattcaatttgcgcggacattgctttggttaaaaaatatttttaaatttattccatttaatttataaaactttggtcaccataagcaaacgatgtttttataaatttaatttaatttaaatatttttcagatttttttgcccccaaaagtgactggaatttttggcactgccaaattcacaaaattcacagagagcgaatggtccaataaaagtgactccgacagtaaaatttacgcacttggctatggaataactgaacgtttgtcaaaacactcttcttgggtccattaaattgcataatttctgtttatttgttaagttcaccgtatg

SEQ ID NO: 109249 - DNA, 145 bp, Heterodera glycines
attcagtcccaaaaagtgccaccatttccactgcaccagcgcaggggttcatcaaaaaatgaatattgcttattttttcccttaattacaaatttctccgcacagttccgccgccgcttccacctcatcgctcatcactcttatg

SEQ ID NO: 109250 - DNA, 251 bp, Heterodera glycines
tttccatataatccatatttccatatttcgctatgttgaaacttctaggacaacttttttttgtccatattttccatataatccatatttccatatttcgccatgtttgaaacttctaggacaacttttttttgtccatattttccatataatccatatttttccatatttcactttttcgtccatatttgttccatattcgcaatttttagggaaacaaaatttatccaaatatttttagcaatataatg

SEQ ID NO: 109251 - DNA, 147 bp, Heterodera glycines
tttgggaaattatggataggaaatcttaagacttttttttattcgccccaatttgttaaagttaatttttttttaaacaaattgcgaaatttacagaaaaaatttttacttaaatgtttttcatttaaatgaaagcctctataaatg

SEQ ID NO: 109252 - DNA, 565 bp, Heterodera glycines
ttcgaatgttttgtgttcaaggtttctgcagttcgcactaattatcgcagttggctgcgttcttcatcgatccacgagccgagtgatccaccgataagactagaattcattcttcaacagaagtgtaaaaaaataatgaaaaaaagaaaaagctggcggtgcccgagctgacactcattgagtcttaagccacgtgctaggccaagcacgggccctaccgcgtcgtctcatcacggccacggacgtagcagcaagcacaaacacaccgctagttacggcacgtaagaccgggaacgaaaccaccatccccagtcagtgtgttatgtgcctgccacaacaaccgctcaacgacgcacagacgccagcacagccgttaggtcgccccacgagcgtgcatcccacattggcgcagcgaaccaaccaagcgaggcggcccgccaccgacacattgccacgcagcagccatacacaggctttcacatgtgcagcactgagcggtataccacagctccaacgtatggaagcaccccaaaagcatggctcgtgaggcagctgccccgtaatg

SEQ ID NO: 109253 - DNA, 480 bp, Heterodera glycines
gttgttgtataacattaatcagttgcgcctcaattccattcaaaaattcgccaaattcgttgagaattatcaatctcaaagacaaaaaaaaaaagaccatttcttttttgaaattaaaataaattaatttctgtcagttttgttcccccaatttgtcgaagaaaaaaataaataaattgaaaacctgttcgttaaatttcgcagctgactttgttttaatggaacacccaaacacacaatataaaaaaggtcaaatttcctaacgacagacaattccaaatcactttataaatttaatttttgatttgtcattggccaaaaatgaaatttaatgccttcaaaaacactaaaaaaattttactaaatttaatttctttaaaataattttttaacttttactataatttgttttaattttcagattaattttgtaaattaaaaacaaaaaccatagccttgcccaaattaaatcacaaaatg

SEQ ID NO: 109254 - DNA, 494 bp, Heterodera glycines
ttgtcagcagcggaaaaggtggacacagcgccaacaaatgagaattaataattattaattttaaagaagcaattgtcagcggaggtcagcattcaccgaatggcaacctttatgaacgagacaaataacgaacaggaatggtcatttctaaaaaagttattaggaaaaaacctcaaaattttcgacttttttgcaatttcatgttataacttttttggtaattgtctaatcgcgaagcaatagcttagaaatatcttctaaacatgttaagctttcgaataataccaagattattggatttggttaacaaataaaaaagttatagtccgaaaacttgggctggcgccaaaacggcggcgccaaaacgatacagacccgaagcggagtccaaaattgacttgctgtgaaaagggaaaaaaatttaattctcaaaagcctttttttacatcggcagcctacaaatgtattccggcggtgggagacgttcgtcaatg

SEQ ID NO: 109255 - DNA, 773 bp, Heterodera glycines
aaaaaaaatattaaaagtcgatttatctttaaaaaactcatttaattacatgttttattgcccatttttgtgaatgttgaaaattcaaacaataaattgtatttcctttcttaaaagcaattatttattcaatagcgcacttcgttaagtccaaacgaggccacaacaagcttgtttatcaaggttttgtctattagcatcatcttacgcacaatgatgcgagctattggttttgcgagctgaagaagacggccacaaactgtccagggcgcgcaatttaccgtgatggaattgtcactgtttctgccgcacacaaagatcacgcaccgtcagccataaatgtacaggttcaaaacgtacggtcgaatatgcgggcaaataacacgcgtgacgctccgcgcacggtggtaaatgaatgcctggcgggtgctagcaatgaagtaattgctaatttgccgaaaatcgcaacattggagcaggcaattagtagaaagcgtaagaggcaggggtccagttgaacataccgcacacacttgccgatgttttctttcccgaagaacttcgctacacccgaacgcatttggcagaaaattatgttcttgccgacaccggagcagaagaccaacaaagaattattctttttggctctgcgacggatgttgaacgcctcacacgatgtgacacttggcttgccgacggaagtttccgctgcgcgccggaaattatttttcaggtttcgagaatattttttcagagaatatatagcaaaaatg

SEQ ID NO: 109256 - DNA, 423 bp, Heterodera glycines
tgaattcaccgcaacagccattaacaggtcagcaaattgacagcctttattatgttgggacgccaagcactgaattccttggctcggctagcttcaatcacaacgcgcgacgagaagaagtaaaaactattaattttaatccattaatatggcattatggtagggtatttactaaaagcatccaattgtaatcaaaaagtttgaagagattaaaaaataaaggaagttaaagtaattttttgactttttccgagggttttagagtcagaaatgtcttttttcccataattcacattttcgaggcttttcaactttcctctcatgtgtaaaatgtatattgaataattttagccacaaaaaacggtagctgattggtcgaatccatcaaactacaattatgatttaattatgcaccaacaaatg

SEQ ID NO: 109257 - DNA, 102 bp, Heterodera glycines
aattcccccccccctcatttgtcagggttttctgcgatgcattcctttggcattttgtccaatcctttccccaattataaatggcactgaccatccaaaatg

SEQ ID NO: 109258 - DNA, 263 bp, Heterodera glycines
agaggtacaaccagtgattaaaataggtataacagtgatcagaagaggtacaaccgtgattaaaataggtataacagtgatcagaagaggtacaacggtgattagaagaggtacaaagtcattagaagaggtacaatggtgattaaaagtgctacaacagtgatcagaagaggtacaacagtgattagaagaggtacaacagagattagaagaggtacaacagtgattagaagaggtacaaagtcattagaagaggtacaatg

SEQ ID NO: 109259 - DNA, 164 bp, Heterodera glycines
ccttaaacaatcgttgaattctttcgattgcaatcaaactcaccgaactgtccttcaccacgatgcgtttgtgctgaaccaaaagtgcctccaacggacgaattattctccgcaaataactttcgtctttgtgctggtcgtacaaatactgtgcgtccataatg

SEQ ID NO: 109260 - DNA, 281 bp, Heterodera glycines
ctctgggactcaaacctccggcattccaaacactgggaactcaacacaccagtatttcaatctctgggactcaattctccggcatttcaatctctgggactcaaatctccggcattccaaacactgggactcaacccaccaactttcaatgacattccaatctctgggactcaatccaccagcatttcaatctctgagactcaattctccggcattccaaacaatgggactcaaatctcccgcattccaaacactgggactcaacccaccaactttcaatg

SEQ ID NO: 109261 - DNA, 65 bp, Heterodera glycines
cctttaaattacaaaatttttaaatgcattttgcttttgcattgtttgctcacaaaagttaaatg

SEQ ID NO: 109262 - DNA, 824 bp, Heterodera glycines
tccctggtctcatggtattatagttgtcctaataactaagagaaaactattttttttgtcaggtatttagtaaagtttttaactataaatttcgttgttaaacctaaggttatcatgacaacttatacacaggcaactcgaacaatggcttattgttagactaggcctaagcttaggcttttgtaaatttttttcttatattagttgaatttctgttgacatcattaagtgtgcttagaattgcttttgcacatttcgatgatcaaagtatacaaacaagaacaattagactattcggaaggtataaagtttccgattgacggttcgaaaaacattttttgacgcgtaaattatgatgggacgcgtaaagtgttgttgggacgcgtaaagtgtgatgggacgcgtaaattatgatgggacgcgtaaagtgttgttgggacgcgtaaagtgtgatgggacgcgtaaattatgatgggacgcgtaaagtgttgttgggacgcgtaaagtgtcatgggacgcgtaaaatgtcatgggacgcgtaaagtgttgttgggacgcgtaaagtgtgatgggacgcgtaaaatgtcatgggacgcgtaaagtgttgttgggacgcgtaaagtgtgatgggacgcgtaaaatgtcatgggacgcgtaaagtgttgttgggacgcgtaaagtgtgatgggacgcgtaaaatgtcatgggacgcgtaaagtgtgatgggacgcgtaaaatgtcatgggacgcgtaaaaccgactagaaccattaactttttgtttaaggataaaaggacatatatttcctttttgtcttctcaatg

SEQ ID NO: 109263 - DNA, 103 bp, Heterodera glycines
ggtggtcttgggtttgaatggacacagagttttggcatttttaatgtaaagtttgttaaaaaaaatagggcatggtgtgatcatcacgacggcacaaaaaatg

SEQ ID NO: 109264 - DNA, 134 bp, Heterodera glycines
  unsure (1)..(134): unsure at all n locations
taaaggactaatttacactgaaatgagcgccgagctatctcctnaggaaaaaagtttngaaaagnngagagaggaattatttttttatttttttanaaaattaattaataagtatttttatagaaattgatatg

SEQ ID NO: 109265 - DNA, 256 bp, Heterodera glycines
aatggctatctatttttttgagaaattttctatgcaacaaacgctctcgaacatgaaacgaagtgcggtgcgccgtggccattttatttttcaaataatttttaaatttaatacatattccagaaaaatggctatctatttttttgagaaattttctatgcaacaaacgctctcgaacatgaaacgaagtgcggtgcgccgtggccattttatttttcaaataatttttaaatttaatacatattccagaaaaatg

SEQ ID NO: 109266 - DNA, 234 bp, Heterodera glycines
cgatttgaatgtgtcaatttgacggcacattctcgcgtacaacacaaaaagcaatttcggtggagaagagcgtgcaggagagaacaatttatttttccgtctaaaacaacaaaatgaatgattgattggtgtgggatgtgtgtgccatgttttgcacaatgcggcaaaaaggcaacggataatttgagaattgaaggaaaagcaatggacattgaggctgtgatttttaaaatg

SEQ ID NO: 109267 - DNA, 69 bp, Heterodera glycines
cagctgctgctgcagcgattacatcttcaatgacattattgcctgttctatactctacaagcaacaatg

SEQ ID NO: 109268 - DNA, 218 bp, Heterodera glycines
tttcatataaatttttttggaaaattttttgttaaaaatcttagtgaaaaattgattgcattgctcagaattacgcgacaatttaatgttggaaaagatttattatgagaaaataaataataaaataaatattgatatttaaaagcaaataaaacactaaacatattcatttactgcaatatctttaaattttataaatattctaaacactaaacatg

SEQ ID NO: 109269 - DNA, 376 bp, Heterodera glycines
  unsure (1)..(376): unsure at all n locations
ctgaaatgtccattttaactgagactcagttgtcccagtgctcatatggcttcgtatcgacttcattgcaagatttttaggcttaactcatcaagagctttcgaatgataccaaatttgtctgggtttgacccttttaaaaggtcaggaaccccctttttccctcaatttcgagttttgatccggttcaaaaaccggtttaatgcttttctgctcccaattttaagctgttctatcgttctcagcgcctaagaaaaccctcttaanagggtttttatgcgattttgtgttggtaccgtattcggcaattttacccattttttgtatggggcctaaaactgttcaacttctacatcgtaaaaattaaggaaataatg

SEQ ID NO: 109270 - DNA, 937 bp, Heterodera glycines
  unsure (1)..(937): unsure at all n locations
tgattagacagtgagtgattttgacagtnaactatttagcttttttcattgtctacgcgtaattttgacaatgaatgaatttgacaaataatgatttggacagtatcaaattgtgatttcgacagtaccgataagtttttttttaagacgaatatattaaaaagtgtatcgaaaaataaaggtgaatgaccacgcccaaaaaaatattgtaaatcaaagaattacggttttcaaaatcttcgacgaggacttgcaaattattatctaggcgaaagtttttacaattagcaatattcttgtggccgaaagtacggtgttcgttaaggttccaaaaagttacggcaaaaatttttcgaaatctgattttttgtattcttcgggccataattttttcgaaccttaacgagatttttcgaaattttgcaggctaatagagaacacttagggctttcaaatgataccaacaatgttaggtttggttggcaaagaaaaaagtatagtccaaaaactgggctggcgcccaaacgagcggcgcccaaacgaggtggacccatttaagaaacacgccagcacggtttgcaagttttacatctggggcctattcaaattagcatcgtatcaacgatgcgatgatacgatgatcatatgcgtgttcaaattaaagactttcgccatatgatgagctgtcgtttgcagctcatcatacgctgaactttgaaaaaattctacccaaaaagataacttaattcttggacgaagattatatttgattgtctgtcaatcttcatatactttcatattcatttaattttttaaaatttatcggtactgtcgaaaatcaatcattgtcgaattcaaataaatttttgataactgtcgaaatcgctcgttgtcgaaatgctcctgtcaaccacgatgccctctctaacttcaaatg

SEQ ID NO: 109271 - DNA, 835 bp, Heterodera glycines
taatttcaaaaaatttgatcaattttgaacaaagttatggccaaaagtacacatgtggcctggttttttgaattcttctagtcataatttttttgagcattaacgaaattttttgaaacttagcaggctaatagagaacacttagggctttcgaatgataccaataatgttagatttggttgacaaagaaaaaagttatagtccaaaaactgggcaggcgccgaaacgagcggcgccgaaacgagggtgtcccgtgtcggagagtggtcgacggtcaattgataatgggaagaaatagaagattggcctctgcggtgccgataggtgcgccgggtaaatttttaaaaaatttccccgatttcttagcaaactgcaaaaaaattactaaatttttatataaaaaaatatgcaatcctgaaattttcaattttatccagtgtaaattattcacggcggaaaacccgtgagttgaccccgtgaatcgtgaccgtgacggaaaaaaacgtgaaattcacggtaaccgtgaccgtgagtcacgccgcacctctaacaattaccatgagttcttatggaagtttccatcttttcaatttaaatccaaattacgatttttttaaataattatttatatacatatttaaatttatttctctaaattaatcaatttttgtaatatttgcaatataattgtttctttattttccattgtcaattcccttacatgcgtgtgatttgtcatgccacaaataacgtggaattatacccttttttattaatatttatttgctaaatatgtcacccattaattcatatcccaccattttccaattccatg

SEQ ID NO: 109272 - DNA, 305 bp, Heterodera glycines
tttttgttggcaagaaattgattcaattcccgtgccggggtacacccgaagagtttatttaaaaaaaattttttttttttgttgctccgactcaaaaattttctgtccggtgtaattttcctaactttttggtttaatatgaaaaaacgggaatttttagtcattttcaacgaattgacgtcggaggaacattttacggtaatttttcaaaatgccgagtgaatcttaaatttgttagtgggtattaaatttttcaaaaatttgcatttttggaaaaaacatcaataactctttggcaaaccatg

SEQ ID NO: 109273 - DNA, 1003 bp, Heterodera glycines
gacaattctgcaaaatttttggtatttaattcattgattagaatgtacattttcgattttattaattctgcgacctcaaaacatgttttgattttggtcgtttcatgctctccctgctgctcactccccctctttaaaattgtacaaacatcggcggacggatggtgatgactcatcctccctccgctccagccaattatttacgactttttacatttatttgatccatttcaaaagcaaattcgcttcaaaattttctgtttacacagctcttcccctcccccccccccaccttattcgccctattcatttgatttccttgctattactaataggggcaattaacaattaattgcctggcattgcttaataccgcccgcctccttcgatcttttcggtcgaaaaccactcattcgtcgatgttctccgactgaataacaatttatttattctatccccccataagataatttctccccaaaatagatgatgctgatgatcggatgagtttattgatccatccgcctgctgtcatcccttttttccgtttatcccaattttattccaaataaatttaattcaaaaattttctatttaagccttttttttagcaagaatatacaaaaccgaaaaataaacctccaaattatcctctcacttctatttttttctttttaaaaaatgaataaaataactgaattttagctaaaacccataatcacttgacccttttatatcctatggtcattgggatcctcccttcccgatcaatgatcactttttaagcctgttgtttcccctccacaattgttcatcccacgattcatcattcctgagcattcaattatccagagacgatcaggaagaagttcttccaaagtcgacttttttatatttacatttctcggcgattaatttttacatatttttgcgtttattgcctttttaaatttttttgtccatttaggcctaatcttaaaaacctgctcattggtaaaaaatg

SEQ ID NO: 109274 - DNA, 85 bp, Heterodera glycines
cctaataagaaaaaaagaattttattccataaacggattttaattaggttttgaacccgctgaaaaagaaaatgaccaaatcatg

SEQ ID NO: 109275 - DNA, 603 bp, Heterodera glycines
ttatcagttttatagatgataacttttttctttctaaattaataaattatttaaaatattaattatcatgtaactaaactaattcggtctcgagatttgggactttattttcgagaatcgtgacaaaaagtattcgtttttttgaaaatctttacataaataaaaaccttggctgactttggcactaagacaaaacaaaattaaagccaatgggaattttttttgatattattatgtaatgcttccaaacaggaaaaaagactaattgatggttacatttcgtcattaattataagaaattgaatttttacgcctaatttaaatagtcattttccgttaattaatgggcatgcctttcatatgaattaaagctaattactgcattttcttcttctatttttatgctttacatcgtaattaattgatggactggttccgttgtgtgattatatttacgttttgttgaagaaaaaattataaaaaatgatttaataggcgaataaaatttcgttgaattacttaagcatattcattttttgttaattaatgtgtttttcatgtgaattacatttgatgattacacgcactaattaacaaagtatg

SEQ ID NO: 109276 - DNA, 177 bp, Heterodera glycines
ggtttcgcccgattcatagctgttgtgtcagactgtaaccacgcttaattgttttcaacaactcccggtccggggttagaattcgagcaaaaatgaggtcatattcagggtcatggcctaggaatttttaccctaaatcatttttaaaaattaaaaaaaaatttttcgggaccaatg

SEQ ID NO: 109277 - DNA, 232 bp, Heterodera glycines
gcattccaaacactgggactcaaccccaccaactttcaaaggcattccaatctctgggactcaacccaccagcatttcaatctctgggactcaacccaccagcatttcaatctctgagactcaattctcaggctttccaatcgctggggactcaacccaccagcatttcaatctctgggactcaaatctcctgcattccagacactgggactcaacccaccaactttcaatg

SEQ ID NO: 109278 - DNA, 1003 bp, Heterodera glycines
ctctccctcccgccgcccgttccgtcgccccgcgcgatggtcattaatcgttacatgttaatgacgcataattaaaattaaaaaaaagacaaatagaaggaaacttgtgaaaaatttataaatttaaaaacaattttaaatatgcaattaatataggaaatttaaatatttataaacatatttaccccccctccccaacccctcccccgcgtgaaggtcaaatgtttgtgagtgaaaactaccgaatttttagtagtgcatttggaatgtaatttaagtacatgttataaggtcataataaaagaattttacctaacaatttcgtaattctttttgttttgacgattgcgaaatatttttttgcatgactctttttttttgcccatttaaaataaatggtcaaagctgtcaaaaaaaaaatgattgatgactcaagaaataaggcattaaattatgcataaaaaatttcgccaggcgattttttttgcaccgttttgaataaaactgtcaataaaaaatgattgattggttccttatttcgcaatttccaccctttattttgtaatgtgcacgtgacttttagtttttggaccaactatttcacaatatgcgcattatttgggtcaactgtcacaaaaaaaatgattgacgactttcgaaataaagaatatccagacgatttttttgcagtttttgaataaaatgtgacagttgtctactaaaatgattgatgaccctctaaattaaggtagacccagacagtcacgtgactagacccctcccctttcccccaattcgtacacccggcccaaatcgtaaatcattcaactaaatagttggatttcattaaactctctttgcgctctaatttattttactccgctctattttttctacattttatttccaatctactattatttttctgccgtctattttctttaaatctctctgctcttttctattactcttcttcaatttcgcgttttggtttttaaaaatg

SEQ ID NO: 109279 - DNA, 385 bp, Heterodera glycines
tccttgttataaaaaatggattaaataaaaatagttgacacctgcaacaaaacgtttgaagccatgccaagggctttttgttgttcacaaaaagactttcggaaattggcactccggttaaattcttattgttttgcagttaaaatcattaaattatttagaataactcaatactatcttcgttcatctattttttgattgaaattaattggatattcaaatttttaatattattattgaaatcgagtttaaaaatataaaaatgatataatagaaactaaatttactcaactggaatatagaaaaattaataaaatttcttaattgacatgtaaaaatgctaataattacaataaaaaattaattgtagttcatcatcagaatg

SEQ ID NO: 109280 - DNA, 204 bp, Heterodera glycines
ctttagtgagaattgcggctactattgcatttattttcccccccttatgtgctcattaggaggaagaaattatgagagtaactttgaaaaaataacaaaaaagttgataggagaagataatccagatttgtttgtcgtgaattttgttaagaaactgataaaaagtatttaaaagaatttatcattaactcatttataaaaatg

SEQ ID NO: 109281 - DNA, 96 bp, Heterodera glycines
ataacactgtgcccgcaacgccgaccatggtttcgtgaaagcgatcacatacaatcggaggaaacaacaacagttgccacaacaacagtcggcatg

SEQ ID NO: 109282 - DNA, 220 bp, Heterodera glycines
  unsure (1)..(220): unsure at all n locations
aagcgctttgtgaggtataaatttctcaaaaaaagagatagccattttctgggatagagtataaatntaaaaattccctcaaaaataaaaggtctattgcgcaccgccctcccctatcatgctcgagagcatttgtatgtgtataaaatttatcaaaaaaagagatagccatttttctgggataacctctaaatataaaaatcctctgtgaaataaaatg

SEQ ID NO: 109283 - DNA, 1003 bp, Heterodera glycines
cttattcctggggcttttctaggtcgctgatcatgaatctgacatttatttcaaccaattcctaacccgaactcgaaaggtcgaattttcgggttttgttcaatcatcatgaaatgtaaatcaaaaaattttagaggtattaaaagtcatttagtacaatttttcccatttttaaacttatttttgggattttaatcgacatttctatcgaaattatcctcatctcgatgaggatagtgattttaatctgcagataggtagctgctaccctatctttagcattgtgcatatgtagcctagctgcagctgacgctaaggattatttgtaaaagaaactctcattgtgcatgcggattttaatccttagcattgtgcatacggatttatctgcggataacgatttatctgcagatagttagcattgtgcataccagcatgagactaaaagccataacttttttctatgttgaccaaatcaaaaatattggtatcattcggaagctcttaataagctctatcagctaacaaaaattcgtaatgattcgtaaagaactaaaacagtttaaaataaaaatatacaaaaattcggagttttttgcaattttcaagctttaactgtttatgcgtagcttaatcgcttagaaaatgcttataaatatcttctaaacatatagagctttcgaatgaaaccaagtttgtttgatttggccaacaacgaaaaaagttatggcttcttaaacttgtctcagacgcagttggccagaagcaagttgacccctaccgcgcctagctcagtcggttagaggattttcaccatacggtatggaaaggccgtgggttcaattcccaccgggggcgcgtgcaatgcaaccttttatgtttcaaacatcatttcttaacaattatttgtgtatgtatgcacacgtaggtgttcgaagtgtactactccaacatcggtgcacgttttatgaacaaatttagcaaagccattgttaacttaatg

SEQ ID NO: 109284 - DNA, 494 bp, Heterodera glycines
cggctgtcgttaatccgttccacccccgttctatcccgtctaattgagctttttttgagaacgcacagctgcatttgagcagctccgtgttctcgctctagacgagcacaaatcaattaattaattaataattagtacactaattgatcacctgcagttttaatgaccgtgcaaaaaatcgaatgtttccgtttaccgacggcaacaatttttattttaatgattagcattgacctttccttgaaaaacattgattcctccttgaaaagattctcctccgtaattgatcagaaaaaaaaactcattgatcacctgatgaaaaagccctcggctaaaaatgatcagattagcccattctaggtcccgatcaattcgaagaaatatattattattttaattaccaataataacaaaaatattacttttataaatatttataaaaagataaatactaaaattttgtctttttttgagaattttctaaattattaatg

SEQ ID NO: 109285 - DNA, 85 bp, Heterodera glycines
taacgaaggtagcggatataagaaagtccaatacgagttcctttattcaattgcaactaagcaataaagccgtgcccttcacatg

SEQ ID NO: 109286 - DNA, 174 bp, Heterodera glycines
gtttaaatgctaacctatatagctggggttgtcagttaaccaaacaaaaaaaggaattttaaaaaacttttttttttcaaactccacaaaaaagtgtccattgataattccctgcttaaaattataagttaacaaatagaccacacctttcatattgatcgatttccagacatg

SEQ ID NO: 109287 - DNA, 87 bp, Heterodera glycines
tgtgtgttccatatctttttttgtgttcttaattccatgcttaagaaatcaatgtaaaacgaatacatttataggcatttaaaaatg

SEQ ID NO: 109288 - DNA, 515 bp, Heterodera glycines
gaaaaagttatggtgcattaaagttttacaattatttatagtcgtaatagagccggtcaaactgcctaaatttttgggtctctagtaccgtggaagaatgctgttcccccttttcttatcactcaccagccaaacattttccgccataaaagaggtgctttgaaaaaaaattttattaccacaatcatcatcattaacaaattgtctcttcgcaacgaccaattaatcaatgataggaaatgcaaaaagtgatcaaaatgataacagcgaatatacaaaacatttctttgtctctccttgttccacactgccttttgcccgaggcaacgagttgtctgtgattgatcactttgcattttgtttaaggcaaaaacacgagcacttattattttttccctaaaaaacgatcggattggctgatattattattcattgcctgaggcaattatcaataatatacggatcaattaataaccgagagaaaacgataggaaaattcggaaatttttcatatg

SEQ ID NO: 109289 - DNA, 272 bp, Heterodera glycines
  unsure (1)..(272): unsure at all n locations
ttttaatatttaaaaattacaaaatttatgaattattaattcaagaatataattaaaaatatgaataatcatnttccaaaaattcctaaaatntaaggaacctattgaaatgaaaaaaaaaatttgtaataccgaaaaaaattgcttagccatttcggaccaaaattttttgaatctcttcaagattgtctataaaacacatcattctcgaaataaatgtttgatcagtttaattttagcatacataataatatttggaataatcttcaatg

SEQ ID NO: 109290 - DNA, 169 bp, Heterodera glycines
atgcgctgaactgagtgtgtcagcagcgggtctttgcatggaacggtcggtcatttacaagcaaacaaaatcattcaattcatgcattcattcatttaattaatcatttaataattaattaattagcaactaattaagatgccctaaatgcaattgtgctgttgagatg

SEQ ID NO: 109291 - DNA, 738 bp, Heterodera glycines
tcgcttttccgagttcttcccatccctaacaaaaacaaatgcacaggcagacgccctctcattgatcacttgcattgagcagtgcggagcgatcggtggcacgcgggcaaatgaaaaagttggggaaaggaaatccgggagggggggggggaaggaagtgggagggggcgcaccccaaaatgtcgccggaagattccaaatctaaaaaatttctttaaattaaaaaaaaattatggcgccgaaggaactcaaaaacccagcttttcgaatttttgccatgatttcaaaatttgcagattaatagagtttttcaagtctttcgaacataccaagaatttttaattttttgaaaaaaaagttacagtccaaaaattcttccggacattttgtcctgctaccggctgggggggggggggaggttggtccaaaccccaaagcccaagcccatcaatgggcttgtattaatttccatgacaccccaatccaaatccatcgacttcgctgaaaggaatttcaaaaagccttttcctctgatcattccaatccgatcactaaccttcaaaggaaggcaatgacattgcgcatttgttgaacattcttcgcgcccgcggtgccatcgacggcggactccgttacgcgcccaccaatggcatgatcagtgccatggcagctgatcaaatttcttctcaaatgcgctccattgagccggttggcatttaagcagattggcacacaatg

SEQ ID NO: 109292 - DNA, 282 bp, Heterodera glycines
gaaagaacggacggacggataataaaaggatgccttaggcaccaatttcttataattatgtagaaatttgaaaattattttaataataatgtattagaaaagaaaagctccaatttcttttacacaacaatattttttactgttcaatcggcatgtatctgaattcaagctgcaattattattattatttcatgaatgtttagggccctaaaggcacaaaaaagcgtcaactgtccgtttttgtttacgttcacaggaaaaaatttttctgctggagcgatg

SEQ ID NO: 109293 - DNA, 1003 bp, Heterodera glycines
cggtagcaattaattaattatgagttatttaaaaaatttcgattacaaaaaactaaattatagcaaaaatactcaaaaaaaaagttctttagtttttaggtctatattttttttaaattaaggaatttgttgaaaaattttttatttgattgttttgaataaaatattgattttcttaatttttggtgtaattataaattttacatcctggagtttttcaataatatgcccaaacatcactcgaacactatataagcaaatttctcaaaattaataacacaaaaaatcataaaataaataaaaattcacttggattccatttataagaatttaaaatgcttttaagaacctttagaattaaaaaaattcaaaaaataaatttaaaaaacaagaaaaaatttttaaatttatattttatgggataaatatatgaataaataaaatataaaataatatttggaataatatggtaggttttaagaaccaaacttattttctcctataatatgattgaacaaaaaaattgagaatttcttctataacctcaataaattggaatggaaaattagtaaaaattaattaattaaaaataataaaaaaatcaacaatttttttaatataaaattcatataaaatatatataataactcatatattagtagtttattacttatttgaaacgcggttaaaaaaataataaaaattattccatgaaaatctaaatagctccaaaccatttgcgtgtcatgtttttaaatggcataaattccatgttttatataaaaagcaatcaatcaatgtctacccgcaaatgccacactatgggtcaattacattaatgtatctttgacgcataatttctattttgttgaaaattgagtcttcaaattttacgtcgcgcaaatttattttttgaagaaaattgaatttagagtggagatttccgacgagcggtagggcaggaggcacaaaagttagtggtggttaggactgtgcgcaaatg

SEQ ID NO: 109294 - DNA, 219 bp, Heterodera glycines
agtgcttgctgaatttgatgcatccgatgtccgatttggacagcctttctgttcagttccttctgtccatgctcaaatgggcttattctgtcacagtaactttcttttcatttttcttttgtttttgtgttttgtggtcatttttcttttttgttaatggatttttaaaacatttattttttgtctttagcaaatccggaagtggcgcccgcttcgatg

SEQ ID NO: 109295 - DNA, 380 bp, Heterodera glycines
aaatcctttggtggcttgtattcatatttggacttttgcggtttaggccccccgaaaaaccataaaggggactcttttggctttcaatagagctcggtattttggaaaaagcctgtacctgtatttcccaattggcctgtacctgtattttttggaacttcttttaaaaatcaaacaaaggtttgaaaaaatcaattaattgcttaggaacatcttaaaatatctaatttactataattatgtctctttaaatatatttgatcatttttgaaaaattgaaaaaaacatcgatcacttgaaataataaattctaaaattttgtacaggaaaatccaggttttttcgtatttagcctgtacctgtactaaattccaaaaatg

SEQ ID NO: 109296 - DNA, 330 bp, Heterodera glycines
aaagggtctaactgattttacaaggaaacaccgctttgtccctactgcaatgcacttctcttgccatctgagtcgacaggcccaaaggcttattctaaatgttgtgccaaaggacgggtcaatctcctacaacgctttaaaaaattgcaagagcggcctggagagcttgaaaacatcctccggaacccagctgagcagtacaaaagctggagggcttcgttatttcaacacacactggcctacaacagccagttagcttttggacacgtcaacatcaacagaacgaccgagaagatcgacattcatcgaattatcaagtgcaacaacatg

SEQ ID NO: 109297 - DNA, 161 bp, Heterodera glycines
aggaaaagggtaaataccgtaataaatatttcaaatactctttattagtgccaccaccctctaataaagcccccacaaatagcatggggttgaaaatcgggtacattatcatttatctcccgcgacaaataatttatcaaaaaaaaacatttttagaaatg

SEQ ID NO: 109298 - DNA, 536 bp, Heterodera glycines
ataagaacacagtcttttaaaggggaaggtgttcgggatgggcctgattatttgatttatttattatgttggcattccgtcccatttagttttatgccccatcccttctttgaccactcagtcttttgcataaatagcctccccgtcctccctcagttcgttcttctccattcattcatttattttgttcccttattttcccaatcaatatttgaccctgttcgcccttgtccttttcttttgaataaatattattttattcctcttcggactttggggcgtaacaattggcgacgcctcgacaaaatcgaactttgtgcagccaaaacaattttgatttgtggcttgcggattcttttgaaatcagagcattttttgcgctgctgtttatagtatctaggcgatacttattcagctcatccacgcgcacccacttgattagtagcttggcgctgctaacaataagtggtgaacgacacttcacttaaaacgagtactctagctgaggggaaagtccacgagctgtggttaatatg

SEQ ID NO: 109299 - DNA, 278 bp, Heterodera glycines
ttatgactagggcttatatttatttgaatattttaacagttttcatttttgtgagaatatccacaataactcgtttttggtcggaacaatcttctttttaacgttaatattcgtaaatacaaaaattttttgtacttttataaataaaatgttgtagaaaatacagcgttaagaaaaactgttgaaaaaattcgaaactggtagaaaatttttaaaatttaaaattaaaattaaaaaagattttaaaatagccatatttacattttacgcgccaaatg

SEQ ID NO: 109300 - DNA, 210 bp, Heterodera glycines
ttggcgctatactaaaagtgggcctttttgaaaatttttaaaaaaagtcatgaaaatacatttccgggggttttcggggccgctgatcacgaatatgacattcatttcgaccaatttcgaacccaggacccggattcgaacaaaaagtcgaaaatcgtaaattttcactttttataaatgataattattttaattcctttttagcaaatg

SEQ ID NO: 109301 - DNA, 944 bp, Heterodera glycines
aaatgcccttagatttttgatgccataacttaacaaaattaattgaaagatgcttaatctgagaaaattaattaatcaattggaggaattatgaaataaatttcattgaaaactttcaattttgtcttgatccaaaatcaataaaaggaaggataaaaactaaatattaaaaaaacaatgctgaatccgactgtaagacttggacagaatgtaaaaacgagaaaaaattaattaatttttattaaaattttttaatttcctctaattaattttgtgctttttgttgtactgttttccgattttaaattgtcaatatagccatttatggcatttttcaataaaaaattttaagggccctccattcgacttgcaacattttgatcgcaatttatgccttttccatctcatttattctgatcggaaattcggtcacatttttcattttccttttcggcatcaatttcatcagtctccaattgtgcttttacatccaaattattccactcctttttacctcattcgctattctattacaattatgcatcggaattgaccgtctgtttggtgttagcttcccaatttggtaaattttccaattaaaaaacgaattgcttaattaaataattgctttttaattaggtatcaaatgggtggccgcttcaaacttttcaaaatttttattgccatctgttgtgcaagaactgtatttatcaacatttattattatcattatggcagctcaaagcattggggaaagtttgtgtgaaattaaatatgccaattataaataaaattaaagtaattttaaaaaagttatttccctaattttgaggtctattaaatgtataaatttgcccccttaaaattaaaaataattttggtatcttaattaaggtcattataatttaagataaattttatgcccctaattaagaccagtgatg

SEQ ID NO: 109302 - DNA, 430 bp, Heterodera glycines
tgcgaataaaatcatttaacgtgcttcaacattaacattttgagctgggggctttttatgggtgaatgatcagaatctctttttccgatcattctttcccattttccccatttctcatccactttacagctctaaaaccctccatcagactatgttctgatcaaaggcatggatcagtttaagccttagaaaaaataactgaaccagacaagcctcaaaatgcactcactgtccggcttttttgacccaaaacaaccgacttcatatagaaggggaattgaaagtttataccaccgctaaaaatggtggataaatcataaattgaatttttcctaatttaattttttgttaaaaattgctgcgagtgccaataattttttccctaaaaataaataaataaaaatgtattcaattgtaaattacttagatg

SEQ ID NO: 109303 - DNA, 1003 bp, Heterodera glycines
aatcacatctgacaacgactctgccggccaattgcccaacatcaacaactgacaaaacactccaacacattgacaacatcaacagcagatcgtcagcaaacaaacgacaaccttggggcacaaaaatcagtgagaaaagaaaaattatttaattttaaacatttatttcttggacaaatttaaatatattttgactttattagctccaagactttggtcagtacaacattgactactaaatacaaatcgttcatctgctgtggacaagcgtgccatataaacgccaaccacacaacagacagcggtgaggtagaaagaataagggaaaattttaaatttttaaacaaattttactatacataaaaaccctacatctaaaatgttttttaatttttaaaatttctttaaaatttcatttaaatatttgaatttttaaattaatttaagttctttttcggattttttttcacttttggtcatttttaattcccccaaaaggctgaaattatgccaatattcgtcaatattttgtcgttttacatccccaaaaggctgaaattatgccaatatttccccataatttcgaaattttttctaatatttgtcactttgacacccaaaaggctgaaattatgccaatattcgtcaatattttaaacctattgcaagggtgcagaccatctgagcgcctgaccaacgattttttttttgcttcattttttattttacactacctaaggctgaaattatgccaatatttgacattatttttgtcattttaaaccccaaaaggttgaaattataccaatattcgtaccattacgaaaaaatttttttttctatatgtcttttaacacgccctaaacgttgaaattatgccaatattcgtcatcatttgaactttttgttaatatttgttcttttgaaccccctaaagcctgattgtctttttatttttaatccatattttagacatttcttttgcatcaaatttaaaagcatg

SEQ ID NO: 109304 - DNA, 845 bp, Heterodera glycines
tcagcacctgatcagggcgcaaaatttaaaatatgaaaaattcgaaaattttccttaaagaaaacccgaaaattctgaaaatgagggcataaaggcccttaccaagccgtggaagagtccccagatggcaaccagtgagatggttttgacgaacacgagcgggatgtaattctgaagcaaatttccgcttttcgagatttatcgaaacaagcaccctctctctgattgtaagaaacaaattgaattaccaactaataaaaaatttaaaaataccatccaatttctgtgggattttgtgccaaattcaatcactacgtaatgtaccctatttgttggagatgccagaaattggatgttagaaattcatatggcctagggttgctcgagaaatgcttttttcgggacttgagataaatttgcgaaacagggacagaaatgcgatgggataagtgccgacgaaacggccaaaaatgcggaacattgtgcacagtgtgaactgctccaaaaagctgagaaatttggccgtctttgggcctaaagaaatgaaatttgagccaaatatttgggaatagaaagagccctcagacttaaatttaaaagaaaaggaaactaaaaatttaaggcattttctttaaatttcactaatatttccaaacaatttccccaacaagcattaaatttcttagatttttttcaaattttgccctcaaaatccataaatttgccatttaagcaaattattttcaagcctgtgttacattgttacatctgaaaaattgcacggttggaaaaactaaggattgatcagtcgctgggccaaaaagtgatcagcaatagaagatatg

SEQ ID NO: 109305 - DNA, 371 bp, Heterodera glycines
tttgcgatccgccacttcaaattgcaaacaaaatccgtttcgcccaccgaaaccgtgtaaaacagtattccgataatgcacgttaattacatattctttctttgtccaataaaacgaatcaccttcagttggaatgttgagttctgttcgttgtcaagcgaaagaggctcgttaaaaccttctctgtatctcaatgaaaaatttttagacgtcttttgccaccctacatatactttgatttggcttaatgttgtaagttcctgtcgcgcgcatcaaactttcaacgttattcgtggcttccttccactttaatggcgtactcttcgccgttgtaagctattctaaatttaatatcaatcttttcagcaatg

SEQ ID NO: 109306 - DNA, 1003 bp, Heterodera glycines
gattcaggtttttagcgaaaaagagtaaaaacaatgggatacaacaaaatgaaaattaaccccaagagacgacatatttataaggtttttttggttcagaggtgtgctctatgggtcaactccgctgtgcagagaaaagcctagcacatactatctcgtagttgctttttttctttgtaatttctctcactttggtgtactatctctttgttttaattatgtaaaaataaaatttttttttttttctgcttgttacataaatccacaacaaattttgcatataggtaatagagaaaaaaaattctgaattatttatttatttactatccaattttaaagttatggggtgatgaataaataagatacatgtgtatttttccaaaaaatttttatgtggggtctaccattttcaccagaaaaatcagcttctctgtacattggcaaggataattttaaagttccctgccaatttaatggaaaaattattaaagagacccaaacaatccgagatcttggaatcctaattgacagcaaactgagcctctctctgataattttgataaatgataataaatgttccccccacaaagcgaaaaatgacggggggggggacgattgaggcactatgattagttacaaaataagaaaaaaaaatttgtcaaatttttttttgaaattttactggcctagcaggggctatttgatatttcaggaattataaaatgaaattcagaattgacccagcaggatttttacgaaaaatttcagctccaacggtcccgccaattttctcaccaaattcgatagagaattactttttaatctttaagaaaaatacgtaatacatatctatctttattttatttttctaggacttttgaaaatgtttctatcgcccatcattttgtttttccaataatttttttaccttgataatggtggtggtagttaagaaactgaaaaagtgccgaaaactgtcttaataatttgctgcaacaaaatg

SEQ ID NO: 109307 - DNA, 163 bp, Heterodera glycines
ggtaaaataacattgaaattccagtgttgaaatttatttttattatttttttggtgcaggtgttttcaatcagtcgttgaatgctacggcgcccactgccgcagttgtgtcacacaacacggactcgtccgactgcgggtccagctccggactgggcggaatg

SEQ ID NO: 109308 - DNA, 274 bp, Heterodera glycines
ttttttacgccggcgtgctccttaccacttcccctttctcaaatttcagccgttctttacgattagtgcccaaaatagctgcttctcctccctcgtcgtcgttttgtgcgtttttttcccgtccatttcaaaaactgctgactttttcgtttgctttttcggctcgacaacctttcccccccccccccccgcttattttatgcttttgctgtcgtcattcatccgcttccttctcagcatcttcgtgtctccctcctattcgctgtccccaatg

SEQ ID NO: 109309 - DNA, 244 bp, Heterodera glycines
tacgaattgcctttcttcaacattgtgcaagtttctcttctggaggagttgccattgcttatagggtttataatgagttaatggtttttcgaaaactttccaaaaaacgctcaaaaaaattttgcatttttttacaaaaaaaaatttttaaattttctggggaggggggagttgctcccgggggaggcaggtctccaaaaaatttaaacaaaattaaaacatttccacaacgtatattcagatg

SEQ ID NO: 109310 - DNA, 178 bp, Heterodera glycines
ggtgttacacccgccgtgacgaagaatttgcgtagcggactaatcgcagtgcggtcggcacgggaccaaatcgaaagagcagcgggcactcttgccgcgcgaatcgtcgaagcgcgggagctgatggacgacgattacacaagggggcgaagcgctcgaccacgccgctcggatgatg

SEQ ID NO: 109311 - DNA, 63 bp, Heterodera glycines
aaaatcgatttaagccaaataaaattttggatctctcaaaaatttcatcaaattaaaaaaatg

SEQ ID NO: 109312 - DNA, 220 bp, Heterodera glycines
ttaaaaaacattaataatttgtcgaaattttcttctaaattttcttttttttttttgaaatttctgtgattgaaaattacaggggcatggctcttcccactccactctgaaaaaaaactataaaagttgaagcagagtaatctcctttttcacacacattcatcccacctcacgcacagcatgtggacaacacggacctggtgcgggacatgaacaaatg

SEQ ID NO: 109313 - DNA, 368 bp, Heterodera glycines
tgtaagaaaaataattaacaaaccaattaattgttttgactgaccagcaccaaaattaattgattgtcgaaactttgatgggatgccaattcaatagttctttatgacctctctattttgtcaatgtttggcatttcggaaatgtttgaattggcatagtgaaaataaacatttcgcttcagtcgccggcccttcgttgttctcctcgcccagcaacaaggccgacttcgaggtggagttggacgtgcaccaattcgcgcccaacgaaattgacgtgaaagtgtccggtgatgacgtggtcgtccattgtgcgcacgagtcaaagggtactgtaaccatatgcctgggcattacagtcaacacaaatg

SEQ ID NO: 109314 - DNA, 68 bp, Heterodera glycines
  unsure (1)..(68): unsure at all n locations
tttcttacaggaaaaagctagcgtaaccattgaacatttttatatantttttgagcaaaataaaaatg

SEQ ID NO: 109315 - DNA, 972 bp, Heterodera glycines
tgacgaactgaatagtgacgaaacaatcggtgctaggactcttcacaaaaagtgcaaaaatccgaaatctggtttttcctatgattttttatcaatcaacattttatggtaatcccatctttaattaacaaataaatagctataacataatggaatatttattatctaataaaaaaattgttaatattgaatggaattgattttagtattgataacaatttagctttgcccacgaatttattccctagatttatccaaagaatattattttatggaaatatttatttgtattatataatatgtaaaaaatatttctaaaaatattttattctttcatttttttaatcagaaatttcaatttattacaaaatgaagacttttgaaacaatgttttacgctcaagcatttatttatttattattttctttattcttcatatttataacttcaactagatacgaacaatttgttgaaaatgctgaagtaatgacttggtaaaaaaaaatataagcacaaagaaatcaaaacaattcctgatctgcactctcgataaaaaagataaaggaatcaatttgagcttgagaacccttaaaacatattttgtaaaatattaatagtaatttcacaaaaaatgaacctatttagggttcatctgatccaataattgaattaaaacttgaagcatgctattcggttaagcttaaagaatccatttatataattggataaatgatacttggctaaatatgtgaaaacaaatcagtaccaaaatgccatttatctttcatgtgataaatgccattctataaaatataaaaataaaatccttgatttcaaagttccaagcgttatacttagagatggaaaacctgacatggcaaagaaaccgaacatcattctgaatgtaaaccagaagagattgaagaaattcgcgcagaacagattgatagaaagcaaagagactaaataatg

SEQ ID NO: 109316 - DNA, 511 bp, Heterodera glycines
ttaaaaaattttattttttaaatttaattttaattttataatttcttaattctttgcgtaaattacgcaacaaatctcaggtttttcgtaacaacattaacgcattcgcgttcaagctttttcaagaggagcctttccgagcagcatttcggggtatttttaaaagaaaaattataattaggaaattaatttatcgaaagaaaaaggtgaaaagatattaatttcgttataatttattctttcaatttaatatcaaaatgatttaatatagcaaaaaaaaaaacggtgaaaaacttataagcattttttatcgaaaaaaatataaatattcaaaaaattttgaactattgaaaaaatatttattgtaaaaatccaacacaaaaacaataaatattaaatgaatttcttttttccaattagcgcaccgatgccgaactaatttatcaaaaacatcggccaaaagtgagcttgcccgctttggctatgaggtcaaattcgacacagcaaaatg

SEQ ID NO: 109317 - DNA, 145 bp, Heterodera glycines
tatgacataaatattaatattttattgttttagttccgattgtaaattcaaaaaatggcgaaaacgaatcggcgaattgggggaacggcagaagcaaaatcattgtgattaaatatatttaattaaatgagttaattaagcaatg

SEQ ID NO: 109318 - DNA, 495 bp, Heterodera glycines
caacaggaacagcaacaaaagactgctgcaaccgaacaaattgcacttgagcctggcacgttgtacagggtgagccgtaatgatttactaaccagtcaattatggtcttataatcgttcaatgaaaattcaatatttgataggtgttatgtggtgataccctccttcaccttagattttttgtaatttttttctgctgtattgtaaaaaaaaatgaaaatttgaaccttcattatcatcgtcttaaatatcgaagaaaaaaaataggggagccgggtcacaaaagaagcaagagcaagtatgaaaattaaaaaaaaaattttgctttatctcgaaatagaaaaaaattacggggttgctgacctaataaattttcttaaaagatcaattaatgtattcatttggctaaattggccaaatgtgtacggctcggcctttacattttttaaaattagattcgtgttcgggcaatcaattcggtgggctgcagtgcatg

SEQ ID NO: 109319 - DNA, 1003 bp, Heterodera glycines
gtacgtttcaagaatgatagtgatggtgtccaaaatggcacaaaaagaggacaaaaaaatgcaatcgccgggaaaaggcaatttgaagcagcgaattgaaagggttcgggggacaaaacaacgattattaaagcggaggattaagcaagaaaaattttaaaagcatttgaatattcattcattcctttgtcaatttattttcttttaaatttttctaagttcaactaattacttttttatttcggaaattcgaaaatggcaccatttaaatggcgcttgtcttgtgaaagcgatttgcatttgaatggatataaacgaaaacacaaaagaaagatggccaacaaagataataaatgaatgaatggccaaatgggacttcccttccaaagtcagaagagtccgtctttcttcaattccttcccattttgatcacttctgctgctgtttggtaagaaacaatgaatgaggggggtgggaatgaaggatttccatacaaatggcataaataaaaataataaataaaaaaaataaaaatgtgtgggaaaaggcagcggaaaaaggggacaaataaaaatagaaatgattggacaaatgtgaagtgattgtgatcagcaacaacagaagcgaagatggaggaggaagaaggaaaaggaaagtttattttgagaaacactaaaacggaggaacaaaaaataaataaggattaaattaaaaataacttaaatacctttttgatttaaatggaactgaaatgcaaattatttatcgtaccgtaatcggacgaccgttcgtccattacaataattaattacccgttcttcttcctctgcttttccaccaattttcccacactttttaattcgatagttttcagaattaaattgttgcagccttttaatccggcattttcttcctgcccacacctttgcattggcatttcccaattaattgctcattgtctgctaatatgtgttagcttcttccgcttctctccttccccatg

SEQ ID NO: 109320 - DNA, 525 bp, Heterodera glycines
  unsure (1)..(525): unsure at all n locations
tcaggatccaaaaaacgaatttgaaatttnaactaaatataatctactgaaagaggaattgcgaaaagaaaatgtttataaaaatatgacttgggttaaatttgaatgtgaaattgcaaaaaaattgggcacaaagcgaaaaaatatttatgaaatgaaaagaaaattaggacaaatacgaaagagaaaaacagtggttgttgaagatagggacacaaaaatggaactgatcaaaaaatttgatcaattgagaaatcaaaaaatttccggatttaattatgacgcgaaaaaacgggaaaaaattgcaaaagaaattgcgaataatttgggataaatgttgagataattcgcgaatggaaaaaggaattaggtaagatataaaccgtgacaaaatcaattattattactaattattatttatttttaggcataataaagaatttttcaaaaaagcaaaaaattaagaaaattaaacaatttgaaagattaaaagaagagtttattaaaaagtttaatttgaaaatg

SEQ ID NO: 109321 - DNA, 818 bp, Heterodera glycines
agtattacaaaaaatggtactttccaattgaaaatttttttgacattttttgatttactatttttccaaaaaaattgctgaatttttttatttaaatgcttttccgtttgtttctttaaagaaaagagaaaaccaaaataatcattagtgtgggagttctctcgacaccacagggtccaaaattcaaaaaattgacaaaaaaaatcctagaaaatcaccgacttcggcctgtccaaacgctatggccaactgcgcacaatgttcggcacaccaaccttcatggcaacgtaatttttttctttaaaattggaaatgcggtacgcccaaaacgacttaaaatttttttttgtatagcctagtccaaaatttccctaccattggaaaaatttttggcaatgctaaagaattgtggtccctaatttaacttttttattttcggctcaagatcagtttcccggggttttcgagggtgttgattacgcatttgaacttggatttgcccaattccgaaccccggacccgaattcgaacaaaaagttggaaatttttttttcaaaatataagttaaaactggtcaaattttaaatcttgataaaatttaacgctttaatttattttcattagggaccaaattctttaccattgcccaatgaaaaaatcgcaacaatgcactgcaaattataattagtgcagtcttgaattttacgataattaatgaaattcactgaaataaaaaataacaatttttttttataaaaaagcaaattttgaaaattgcactcatttttcttaattcataaatccacaaattctcgatg

SEQ ID NO: 109322 - DNA, 827 bp, Heterodera glycines
  unsure (1)..(827): unsure at all n locations
attttttaaaaattcaaaaatatttggcaattttttgaccctcaggattttgggctaaaattgaanaattcataactcaatggaggaccggtcaatttaagtgaattaaagctttaaaaatagcaaaaaatcgggagaattttataggatttatttgggatttctatcttctaaagaaaaaaagttattccagaaattctggaaattttagatttttcagaaaaaaattcagaactcggttctgaaaagtcactcttgaaaagtaaaatactacaaaaatccgcattttttttctctattaaataaactttgttttacatttttatctcttttttgcgaattgttataaaaataaaagtgatttttggtttcgggaccataggggggtgaccaggatttttgggtggaaaaattttttcaccgaaaatattccaaaaacatgtctttaggggttatttgggccgctgatcacgaatatgcaatcagattttacttttgagatcattaagccctcagaatccctgtgtgattggggattctgagtcatcttctgggggggggggggggcggcaggttcgaatccggccggtgtacattatttttctatgcatttttgggttattttgactttttttaattaatttgaagatttcttttaaattatttaaatttattttttttaaattaaagaatttcattattttttttgaatttgtaaaaaaattaatttaatttcaaattaaataaatattcaattaataatttccaacgttgtttttaattaataaaagagtattttattataaaaaaatttttaaattaaaatg

SEQ ID NO: 109323 - DNA, 772 bp, Heterodera glycines
atcaaaaaataaattgtgataatatttgttaattctatttaattgtgataataacttgatatttaacctgtgataaactaataattcacctgtaatcaattgaatttcaagttaaatttacaacaatagttcacttaattattttaaattcgcttttctaagcaaaatttcaaactgtgtcctaaaaatataatcgatttaaattcaattgactcgttaaatcaacccgatcagttaaatccgatcgagaattttgaaatattaccagaatttgaagaaccaataataattgagaacgaaaatcaaaatatcgaaatctttgaacctaacgaaactgaagaaataataaaccaagacgatttaatctttgaaaatttctacggggctttaatcactgaaccattgtcaaattattttaccattaatcaagattttattattaaagtcaaaaaatttaaacttaatccttctaaatatacatttaaaattactattgccctcacagtacattcacacagaaatttgtctcaccgtaatataaaaaatttttgtcagacaatttctgaagaaataactagcagtattttatcagattttttacataaccaatcttaattggctcaatcgaaacagaccaaagaaaaattaaattaacaaaatttctcaagagaatagaaattcgaacatctaaccagattaaaaaacagtggggtccatattgctatcatccaattcttgtactttcaactcataagtatattttttaaatatg

SEQ ID NO: 109324 - DNA, 376 bp, Heterodera glycines
aaaacgagagatgaaccaataaatagagagtgcagagaaagaaacatctctctttttggcgtactatttctttatctctgttaatagagaaaacccgaatttacttcatcctgtttaacgttttttttctgcttgttagacctacaccaaattttgcataccgattgagaaaaattttgcgcatagaataatacgtttttattttttgtttatacgttagttcaaatgttataagaaaaacaaattttcgaagactcatatcttttttctaactcaccaattgtttagcatttgcttagaaaaagattctcctcatcagcagctttcgaatgataccaagattgtccagtttggttggcaaaaactctcaaaaatg

SEQ ID NO: 109325 - DNA, 293 bp, Heterodera glycines
tgatgaagtgatgagttgtcgcgacgaaatgtgtagacgagcttggcgcgcactggtgttgatgttgcgttgagttgaaggctggctggcactggtgaaaagtgaagaaaaccgtcgccttttatacacttttttttgatgcatgaatttttgcacccgaattttgtatataaggaggtggattttgcacattctcctcactcagcagcagcaacacttcaagcaacgctctcaacgatcacacatcaagcacccacaaagccagcccgacaacagcgacaacaacagcaatg

SEQ ID NO: 109326 - DNA, 158 bp, Heterodera glycines
  unsure (1)..(158): unsure at all n locations
cgcaaagcgatggttgatcaataccttaaaaagaaataaaacaaggagagagttgtggaaaaactagaaganaatggtgtcgacctaagcntaagggcgttagatagacacctttcaannaataagaagtagaatcggaaggaattcaagaggacatg

SEQ ID NO: 109327 - DNA, 1003 bp, Heterodera glycines
gctaattgtgctcagaaaattaattatatcttgtcaaaataattttttttttattaattttacttagaaagtaataatataattttaatgataattcttaagcaaagagtaatatgaatatattataatatttttaataaaaatgtgaaattattatttgctattgccggagaaataaaatattataaatcgataaacaatacgttttaattgattttccaatcatcattgttcatcgtttttggatttctttatttattcatagctagtagtagatgtttattacatgcacataaaatcgtaaaatttcccataaaaccgtaaaaaatatgcaaatatctttatgaaaataaatgggtaatttctcagagtgcaaaaaataaaaagttggaagaacctcctttattttattactaaaggagttattcctaaaacttgttagatcatcaatagaattatgcaaatcttataaaattggaaaatttaattaaaaataatgtatttaaaaataatttaaaaaatctttaataaaaaaatactttttttaaataaaattgatctaaacaaacctaaaaacccataaaatgcccaaatatgcactaaatttgccataaaaatcgccaaaaatgtcatttaccgatcaaaaattgtgtaacaattcacaattgactctcaaaacgtcaaatgccaatttaatttgaactagaaaatgtgcagacataataaaagaaggaatgaaaattaattgaaaaaatagttaggacaacagggatacgataggaagttcgtttcccggccgttgtgtcgcaactcgcacctcctttcctttcactttggaaccgaataatgggacaaacgcgaattgaaatgattgtttttccccagattttttctttcctgttcttcccttccaaatttgaacttcctttattactcaaattcaaccaagagaataacacaacaactttatttgacgatttgcttctcgataagggcgaagatg

SEQ ID NO: 109328 - DNA, 856 bp, Heterodera glycines
atttttatataaaatattttgtgccattttcccaccaaattgcgcacccccctccccatttggtgccgcgcgcgaaaatggctttttcccaccgagacaccaccgtccccattttttgttttacaccccttcgttttgtgaaaaacctcactttatatgttttcccaagctttaaccgtttggcatttccacttatgtgcgcatgaggccctaaatttggagaaaaaaaaactaaggcattgagcagcagaaagcacagtatatgtaggggtaatatataaatttcccccaagcctattggcttaatcactcagaagccattaaaattaaacccaccggcaccactctctccaccgtaattaaatcccaacaaaatcccctccttttcgtttttatacaataattccgccttttgccgctttttgtcccaaaaactgtgctacagtatttttccgaagctggcacaactcggcatagctgctgaactgcttgcatttgtggccaagaaaccaccctccaaacaaattattcaactttttaaaacgcaccaaaagcgagtcctgcattggtcaccgaacaaatccgaaaggattatgaagcggataaacatcattctcacataaaggaaaggatgatgttccatgaagaaagggcaatgagtcggcggggtcatgacggaagtaatcatcatggatggcaacaaaagcacaactgctgtccacgacgccgccattctccagcagagaatgatgccatcatctacctccactcagaaataaagcgacaaaccggcaccgacaaaatgccaccaacagaaagaaggcaactgaagctaaagagcgcaccgggcaaaatg

SEQ ID NO: 109329 - DNA, 1003 bp, Heterodera glycines
tggctgtgaagcgtggaccaccgacgcctcccccttcccccccccttcccccacgcctttcactcaattcaaatcattatccgttcactccctctcattacctcacaaatcattggattcaaaaaacattccattttctctcactcaactcatcattccgtgttcgttgagtgaccgttcatttttgtctcatttttgactgggattttccgggaccattttttatttctgttttgtacttcatattcctggttttagaattcattttctaacctgttaacatcagcaccgtataggtaatggatgaacaccagcagcagcaggtaaaccacccgttatttaattaaattccttgaatttttggtcgggttttcaagaccaacagtaaaatttggttgtatgcaaatatgagtcccgaataggcctaatcaacaagccaaatgccgaaaataaatgttcggtgttgaagtctttaaattgaaaaattcacaattttctccttttggcataatgcacgtgttccgtttcccaccattctcgaactcattcccatgcataaattgtcccctgccaatatcctttggccaaatccataaaaagtgccaaaaaattattccctaaaatggccccgacgaccaaaaaaaaatgtaaacgcctgccactagagcttttgtatgagacggttctttacgtatatcccaagccggatttgtcgaatcttttcaattcttcttcgatactcagaaaatttatgagtttccgagtccaaagatgggaggaaatacggaaattagtatgttaattcaaatttggaaatgtttaattgtccggcaatttccctactatttccattaagaaacgagcaattcttgaagcactttatgagtgttttcgagaacgtaggccatggagaaccttcgaatcgtacacagcaaacgaccaaaatgcccaaagtttccttgtttcgctcacagaatttttggtgagcacaatttaagaaatg

SEQ ID NO: 109330 - DNA, 516 bp, Heterodera glycines
ggcgataatatttcacaaaatttcagaaaatcaaaattagattttcgttaatttgcagtttaggtcctttttagagcaatttgactttgtttcagggtctttagaaaagttatctttatcaaaacaaagtaaaacgtaatggtagaaggagtaaaaaaaggtcgctaaatacgataatggtgaagactcagaagagaaacagtgaaatttttgggtacaataagaagtttttcaaaaaatacgagaaccttttcgcaccctgtatatattatgtattttatagtttgtgggggcatccgttatgttattgtatgtatatgtataatttaattattatatgaatatgcaatacccatgcttaatattctatacaatgtattgattatgcttatacgtttattacacgtggacaaatttcagaaaagagaatatgaaggaattattagcagctacttatctattttcttattactttttttttataaaaaaaatattctctttattttagctaaaatg

SEQ ID NO: 109331 - DNA, 247 bp, Heterodera glycines
atggttggggaattggcggcacttggaggaattgatggtccagcaaaattttttagttgtctttgtcattgatgattttttttttgaaaaatttaataaaagttgaaaaagggtgatttctgcaaatcaatggcttcttttcctgattgaatttttttttgacattttttcctacatttatgtatttcatttccatttattgtatcatttttgcaaggtgccaatccctcccctcccaaaaagaatg

SEQ ID NO: 109332 - DNA, 237 bp, Heterodera glycines
attcatcaaatttttcgcattatttggataattttgactaccaataaacatttttaaatttgaagtgcagaagcagatgtggggagtgggagggttcatgatcgcgcgcctcctcttccattggtcacgccattccgcataaactgctcatttcaattatattcccaaatccacaaaaatgtccccatgccgtcgttttaaatctcgcccccagaaaaaaaattccgaatataaatg

SEQ ID NO: 109333 - DNA, 322 bp, Heterodera glycines
ttaaaaaatcaaatacttagggtggaacataatttttgatacccaaattttttccaatttttaaaaattcataattccgttatttctgagcctatttaaatgattctttttttattttgttcttcatggtgtcctcttttatatcttactatcgtttcactttttattcgattgatagatttttctgccttttttcccgaccatgccaaaattgaaaattggtccactaatttttctcgaattttttatggtcaaaaaccaaagctgatataacaaaatcttagtttttctatacaatttagaccagtagaatccgaatatg

SEQ ID NO: 109334 - DNA, 244 bp, Heterodera glycines
acatgtgggccgctgcattcttaagacgttttttgatttgtgatcatgccctaactcatattttagtgatcagatttgatacattgtttgcatagttaccttttaactactttgttatcaatattatctttttacatattacaactacttatcaaaatatccacatccttgtagagacacatgatactttataatgttgcctgcctccttttctcttcaaaagtgtttaatttagtaaaaaatg

SEQ ID NO: 109335 - DNA, 1003 bp, Heterodera glycines
ctttcggcggaaccgcatttcctttatctgacagctgatcagcgcattatctttcggcggaaccgcgtttagagtatataaaagcaaaaacattttttgattaaaaacatatttttacttaaactattattagaatcatatcttttttcattttcattttaaagttcgtttatttaagcctatacaatatgtagtttttaagatgaagctaataaccatactaattttcattatttttctttctgttgaaatcattgctagagttcatatcccacggccaaatttaaatttgggaagactcttccgtgaagttcggctattaaaaaaatctgagctcttaattggcggagctggggcattagtcggtttaatagtggacgatttatttgatgttttaaacgaaggtcttattttttattaaaaagaaatacatttcgccttaagaatcatctataactgccacgtttttcccactcaaattctctgtaacggatacagaattttttgtaagccaagacgaatttcgcgttgaagatttgttcaaaaaaatcgcttcttatatggaccgtgagtcacttaaggaaatatgttttttcggtaataattgtataggaaatataaatatagaatagctattaagggaccgatggacaaataaaaagagcaaaatctgacaagcatggactgacaacattgtttttatatgccattcaaaatgacaaaaaacttgacctacttgagtgtctctgattatatttaaattgccagttgggcctttggcaagccattaataaatttaaaatattaattaatcaaaaaatttatttgctttgcttttttttgtttgtttgtgtgcgctttttaagttagtgtgtctacggttgggccgaaacacacgtaattagttgctttttaaccggaagagaccgtactgacaaggcccactcttccaaaaaattttcttaaaaaataattttttttattcagaaaccgtccgcaaatg

SEQ ID NO: 109336 - DNA, 332 bp, Heterodera glycines
ttccaaaatatgtcttccttaattgtatttcccttatcagctgatcaatctgacggaatttatctgctattgttgcatttatgcctcctcattagtgttacgcgcgcgcgccttgccttgtttattttgcgcgtcctttttgttgatttaaatttttgggtgtggcctaaaaacaggaaagtacccaaaataggactttccgtcaagaaccctgaacaaaatgttcatgtcggaaatccaggggcctcgcccaggttttatttcaaaattcaggtcccctctattttatttttgaattcaatccgtccgccaccgattgccttggccaaatg

SEQ ID NO: 109337 - DNA, 328 bp, Heterodera glycines
tttggtcagtttttaaactgataataataattgttttaattgtcataataaagaaatattaattatcttatttacttaatttgttttaggtatagaaaaagaaatgccaaattttattctgccgttctcttgattctttctgtgctttatccgttatacacaatctatttgttgtacacaaatctactggcgcaaccaaacgagtaattacctaattaattaatttcttaattaattaacaatattaaatttattttcaactttttaatgcaatattaaaaatcattgattattttatttcatttctttcatttttagtaaaacaatg

SEQ ID NO: 109338 - DNA, 129 bp, Heterodera glycines
cccccgttgaatatcctatgaagccacaagattttctccttttgtatattttgtaggattatgttttataattttatttttagcatcacggtcataattttttaaaagtctccaattatctgcaacatg

SEQ ID NO: 109339 - DNA, 863 bp, Heterodera glycines
gaaaggcgtcgtctttgagttgcgcccgcgtctccccttgtttctctccttgtttattctccaagtgcatttttcgctggtaaaattgtaattttaataaaaaagcgcaaataaatttaatttttgtttcggcagctttgtccgatgagtattttatggagaaaagcggtatatgcgccgaattttgttgggtccgtagtctgtgcagcttttttagggttttgccaaatccgcgtttattattttccactcattaaaattgaaaaacatttcgccagaaattaaaaaacacgaattagaatttcgggacctaaaattttggcaaaaccgggaccggtacttgctggtaaaaaaagcgggaccgggaaccgggaccaaaatcagaaaatttcaaaaactttaatcattcgagatttagaaatcaaatgaaaaaaacaaacataactttaaaaaaaattttttactattttttcttaaaattttctaaaagtctaggaaatatttggttttttttggtggcaccttatttgttaaggtttttttttgatacttaaaactttcgaataaacaaattaaacctaaaactttttatcaagaaaaaaaatgaaattttgattcttaggggtgtattttctgaaattttttcaagtcatttcttaggggtatattttcccgattttatttgttatttatgcttaatatatcggaactagtgcgcagaaaaaaggcatatgcctcaaaagtcggtctctctctatttattggcgattagactaattttttatctacatatttattggtttttattggtttttattatttaaattgcaatccctcctaattattttcaaaatttagacatg

SEQ ID NO: 109340 - DNA, 1003 bp, Heterodera glycines
atggcctaaaaatatgtaaagaaatgtggggggggggggagtgtgtgccgggcccgagaaatgatgcaaattgtccgaattttggaaccgtctggaatttccgaaatttgttcctaatttgcccagcccacttaattattccaaaattcactttaagtgccctcctcccctctcgattgcttccgtgcagtgcccttccccattttattctcatttcattttctctttttcctttaaataaatttattgttgggctgtatggcagggcttccatcgaaaatttttcaaactcagaacatcgggccctaaaaaatcagattttggggtcgaaacccagaacaattcgcgaaattgcttcaaaacaattattttttatcctatcaaaaatgtattaattattatatttttcgcttccaattatcgattttaacaattttaggggaggaaataagtaaatcgtatatttaagtgctatcaggctcaaaacatcagattgatttttaagaattttttgcggcgtttatttccaaaaaaaaaaattttgggggaatgggcggcgggggtgtgggtccggcgcggtgcagataggcgccgccgggcaaattttggaaaatttgagtgcaatttgttaacagattttgaccaaaaaactgcctaaatttttgcaattttaagccatgtgacgactttttttgtttctaaaaaacggtttttttacggcgcggggttttttttgtgatttttctaattgtttttccccacagctttgccccaatttggaccgtccaccgccgtgccggcgcattatgtccaatcgtgcccatttgttccgacatacccctcctacccaccgcagcatcaatattccgaaccgattatggtcataaaaaagcattattgtattactgtatgagtgccttcgttacccctccccatgcatcagaaaaatggaaatttcgtgttttttcctaaattttttaaagatttttctagtgaaaaaatg

SEQ ID NO: 109341 - DNA, 148 bp, Heterodera glycines
ggaggtacggcggcgagagggtacagtagggacaagtcccgggatttcggtttggaaatggtaccgaaaagaaaaaataaaggtttttttaaaattcttttgttccttcgccccctcctttgtttcagggactggcattgcttgtatg

SEQ ID NO: 109342 - DNA, 63 bp, Heterodera glycines
atttatttgttgtatcgctcgcttacacccacaatgatgcctccttttttgtttcagccgatg

SEQ ID NO: 109343 - DNA, 509 bp, Heterodera glycines
tctagagtcccaaacaaaaataattaaaacaatggtgtgtaaaacaagacttttactttttaataacggtttttatgttcactatcaattcaaaacctaaacccggacccagttggtgtcgctggcggttagaatctgttgttaaaatgaagcccacagatgatcccaaaacacggactatcacatgagccaaattaactaagagtttaaaaaaagcagaacttaaattaaacataattttttatttaaataaattttggcattacattttaaatattattcaaaattttaaatttaatgcactcaaattccaaatgatgattttcaaattttaatttgtttttctcttaatccttgaattttttattcattaccaaattaaattatcaataccaatctaaattagtcttgccttaatgaaaaagatgatttaaaaaaccaaattttgtcatttgatgatcataaaaccaaggagaacaaataattttttttacttttgctctaagatg

SEQ ID NO: 109344 - DNA, 101 bp, Heterodera glycines
gtctccccataaatctgggcgcatcggttcggggggactgccccgaaaacaaaaaaaatcgattttttcaagtgtccgtttggggtactcaaacaattatg

SEQ ID NO: 109345 - DNA, 676 bp, Heterodera glycines
aataaggaacgcaaaaaaggaacggtccggccaaaaattagggtcacagaaacgcgtcctatggacttttaagtgtcccatcaaaattttgcgagtccatgcgattttagctaattgtatgtaagaacatcagatccaatacaatttcctgggttttttttggactgttgtaaattcatttgtcaaaagacagagtctgtaaagagaaaaatatcacaaatttttctgcaatttgaaaaaaatgccgacaaatttttcattttttttcgcttaattttttattcaaatgatagtcaaaattattttgttcattgaaacttatgaaatgttatggtccaggaaacccaaaggaatgccaattttattgggttttttcaacaaaattgccatttgagcgaaaacaaaattaaaattgtgaaaaattaattttttttttcaatttttaccctccgttttttaaggcgactttcgcttgtccaccagcttcgcaaggacgacaacggaggctattccaaacacattctcaaggtttcatcaaaaaaaaagaagcaatttctgtagattttctaacttttgcgggtccaaactgaaaaaatgcccggcctttgtatatgaaaaactgccccccccctttgaagttggcactgcactcggactatcgcaaggacgtcgcatg

SEQ ID NO: 109346 - DNA, 311 bp, Heterodera glycines
attaaatgcctaattaattagcatttaattgatcatatttttttaggtttcggtgatatttctttgttgaaagaattaaagcaaagcgtcgcttttgctttgcttttcgtggcaaaacgtcgccgaattcagctgaataaatacggagagaagaaacaatttgatttaagcaaagaaagcgtaaaatatttaatggaagaattaattggattttcggacaaagtaattaattcaaatttaggaagttaattaaaatattttctaatttattataattattattacctagccaaaaaatcgttaccgaaatg

SEQ ID NO: 109347 - DNA, 338 bp, Heterodera glycines
gcaaatgtcttgacacgattcatattgtgtcagttgtttcaacaataaaaattttatgtccttttgcaaaaaaaaatcgaggacttgaatcatgtgataacgaaattgacttgggaacaagaaacaaaaacgaccgagacacaaaagccaatgttttggcacggcacaaattctcgagcagcatgaaacttgagccaaatcgaatcaaaatcttgtttgaataatttagatttgataaggtacataaaattcagaataataaaatttagctaatatttgaaattttacttttatttttgttcctcaaaggcacttttgcttgcatggccggcaatatg

SEQ ID NO: 109348 - DNA, 422 bp, Heterodera glycines
  unsure (1)..(422): unsure at all n locations
aaaattggtgcgtaaattncaattggtttgagaaaataaacttttgttttttggaaagacaataaaaatttttttctaaatgtgtcactaaaatcaaagaaaatttttaaagaaaatttgaatttaaaaaaaagtcatgttattttttgagacataaatttctaagttaagagagtacaatgcaaattttttttcaaaaaacatagtaatcatcataaaattttaaaaaatatagaaaatttttttccaaaaatattttttctaagaatttttttttaatttctaagtattgaaaatttatgaactcgttctttaatagatttctaatgcacaataaagaaatattacactttcaattttttaagccttcgacagcgtgcggacgcggcggaagcggaatttcccggcatgcgtgagcaatg

SEQ ID NO: 109349 - DNA, 138 bp, Heterodera glycines
ttgggtctagaattttcctcttccatttttttcttaactccccatgtttttctcccaacagaaaaacggtccccctcctccttctccacggcacttaactccggcgatttgatgtcagacaacaacgaagcggcaatg

SEQ ID NO: 109350 - DNA, 60 bp, Heterodera glycines
  unsure (1)..(60): unsure at all n locations
attgatttgcactgtcaataacaccgtcngactgttcgagtgacgcccgagangggaatg

SEQ ID NO: 109351 - DNA, 90 bp, Heterodera glycines
ttttaaaggtatcccaacaaagaccaattaggcatggtgccggaccaattcaacgaatgttattttggcgcacagacagtgccacggatg

SEQ ID NO: 109352 - DNA, 220 bp, Heterodera glycines
aaaaacgaaatgataataaaataatgatttttagtttacaatctttcagaaaatttgtaaaacatatttgaaaaaaacattttttgactaaaatttatttaaaaataaattaatatttattaaaaaagttttgaattgtagaaggaaattgttttaagcagagttttgaacaaattttggcattttttttttgtttttagcacataacaaaactgaaatg

SEQ ID NO: 109353 - DNA, 56 bp, Heterodera glycines
ttccttttctgcttattgaccttacatttttataattaaatttaagaataaaaatg

SEQ ID NO: 109354 - DNA, 152 bp, Heterodera glycines
atcatctcgacgaccaaagcgcctgctgcgatgggctacaggtggagcaaacaatggatgcgcatcataagcaaaaaatttttgtttttttttacagccaggcggtgctcgtcagcaaccagacgctgtacgtgagtggccagatcggaatg

SEQ ID NO: 109355 - DNA, 145 bp, Heterodera glycines
aaattatcagagtgccgaaaatcgcatgtgatctaagcctagaaaaaaatggtcaagtaaaaatcgtaattacgctcaaaaagcttctcaaacaattttagcgcttccaattccttctacaatcgcctttatacatcccattatg

SEQ ID NO: 109356 - DNA, 903 bp, Heterodera glycines
gctgaaaattatgtcactattttggcactttttcctcactattttagttgttgtttgttagatctatcaccagtaaaaatgtgacattggataatgtgttaaaaagtaatatttgataataaaaaaaaatataaacgaaaaacttaatatatataaaatccgagctcagattcgggatcaacgcattttctctcacaaaaaatgtgtttcttcgtagaaatcacaaaactgcacaattaccatcaaaattgtaaaaagttaaataagtgtcattggtttaattgcttagaaatggatatttttggacgtctgagtcacgaaacaataaatgaaaaccactagggagatatgaacttctggaaaaactaaaaaacaattttctttgggtgaaaagttatcttttctaataattttgttttctttctttatctttatacgaaatagcaaagcaatagggtggaaatattgactattaaagaagttttaataattttttattactttttgaaatttgttttagaaacgctttttcggcccttcacagcgttggcttccgctttggatgggctttttgcgtctgtccacctatgtgaactattacaaagcgtggaaggctggctttgccggcaacaccgagggagaaggccgactgttagggggttggaaaaataataatttattaaattaaaattggtttaaaaactaagaagcctagatgaaaccgcggtagaaaattagaacattgcctatggtatctaccattttttctgaatttttttgtattttcaaaaacaacattaactaatttaggacttttcggggttgctaaagtatgaatttggcatccatttagccaaattcttagcttttacgaattgatgacgaaaagtagtgctcaaaatg

SEQ ID NO: 109357 - DNA, 1003 bp, Heterodera glycines
gacgaatgacgtcaaaaagggagcgaaaatggcccaaaaaatacaataggtgctaaaaatttcaacaattctcagaaatttgacagggaaaaaaaaatttggtcggggatttttgtccccgacatttttctgtcccccgaaggtcgcgggggaacggaccttaattaaaaatccaattccctttttccattcccgaaattcattttgatatttaatccttaaacccccgcggcgtttgtttgttttatgtgcacagactttgcgctcgaaatgtttaccgccgccggcgccgcttcgcttcgcttcgcggcgggggcgaatcaaagggaaggcgccgcccgaggcaaataggcgtcaaaaaacagactaattaagtgctcgaagccgttaatcggattgccctttaattgggacgcgcaacgaatgagtgaccttttaagcgtaatcccatcacagaatgccaatgtttgttttttaattacttcctaatcggatttgcatgagaagaaaaagaaaggcacttttataatattttaaatttgaaaaacggaaaatgccgataaaaatggaattgatcaaaacgcagaacaatggaaaataagatgatcaaacacaagaatggaaaactgaacaaaataatgaagaaacaaattaaaattgactatccgactgatcactagcggaatgattaagccaaaacgaagtgccgatgaatcaaataaacggagcgactgatttgtaagtaactctgcttttggcgtcgttttatctctttataatatttaaatggagcaggaaaaaacttcaggtcgaaacagtccaaaaaattaccaaaataaaataaaaactgatttttctgactatcatttccatatacttttgtatctttttgaaattttgcagaataatattaaatagagctaccgaacaaaacaatattaacaacatttggcacagttcgtcccattttcccgcattttttggctgtaattacgaaaaaatg

SEQ ID NO: 109358 - DNA, 312 bp, Heterodera glycines
gtgagaaccacttactttgacgactattcaggtaaataatgtgtcgtagagtaagttacaaaatatatggatgatcacaggaattaaaaaaagacaaaaatgtgaaaataattaaattaataaattgaggtcaaagtcaaatgaggtcgaaatataaaaataccaaatcacttaggaatttgttataattttagcttttccggtcttacatatttaattcttactcctgatggcaaagcatcaggaagatcgttaatatagatcaaaaataataaagggcccaggacagagccctggggaacgccaaagatg

SEQ ID NO: 109359 - DNA, 242 bp, Heterodera glycines
cgccaacggtcttttccccggcggaattccttttccggtgttcggcataaacatcgaccaggtcaaaaagcaccttaggcgcatattcattccgttttttggcattttgctttgttcacaattaccatttaaattagccttttccacttaattcgacacttcattttcagattctcaaaacctgcaaacagcttgaagattcgaaaaattatgaccaattggcccactttctcaacaaaatg

SEQ ID NO: 109360 - DNA, 121 bp, Heterodera glycines
  unsure (1)..(121): unsure at all n locations
caaaagcctgctgctgatctgctgataacccctcccccctctgttccncctcctcctccctctccctctcatttccattgcattccttcaacttttctcgtcctttgcccctttcgctatg

SEQ ID NO: 109361 - DNA, 244 bp, Heterodera glycines
ttagcagcagttttaaattttattactattattatgatttaattgggcttttcagccaatatttaaacgccataatcattaatccacaggttaagcgttggcaaaatgcattgacgcgcgcggccgaatggatttgctcatcttcctcctcaaaaaaaaaatttgcttgcttacccaataggaaaagcctctattctctaaagatatacatcgtatcatattggcatttttcatggcaaaaatg

SEQ ID NO: 109362 - DNA, 1003 bp, Heterodera glycines
gacacccatcctctgcctccctttccttctctaatacgatttagccttgggttttatccttcagatgttttttcaattatttacctcttctgggattggatatatttattataggtgttttttaaaggtttaaatttggtactgaaacgtccctttccactgggactgaaatggcggggctgaaatacaaccccgaaaatctggtggagtaactactgttatcaaaagaataaaaagggtaacatttttattcaattcagttgtttttctccaaaatgaattttcttccatatttttagcaccggcgttgcctataggcaccaccttggaaaattttttagaaattttgtctttatcacaattttgaccaaaaaatcttttcatttagcgatttttgacaatattttttcagtatttttgcagattttggacataaatttaaaaggcattttggtccggatgcgacgacaggcgtcgtcaggaaaaaattggagttttttctgtgaaattgttaaaaattggttaaaaatagtaaagttctttaaggaacacctaaatagaattccaaaaaattcaaaaatctcatggaagggaattattaatatttaggcaaactgctgatttttaagcacgtcctttcaaattaggactgatacggtttaggtacaagtgcgatttttaaagacatccttcacaaataaagaccttgaagaaaacgtaataaatgcaaaacaagaaagtatttttgaaaaaacaatgaaaaaacatacgttcaggtatttgaattttagaaggtggagtattttgaaaattttatttattttcacggtgttgaagtttttttttggtaagaaaattcggaataaaaaattgtccaggacgggatataggaaaaaatataaatatgtttgctcagagatacgaaacttagacttgggtgtagcaaagtattttaaagaaattgaaaaggaaaaaaacttaagaagatatataacaaaaaatg

SEQ ID NO: 109363 - DNA, 659 bp, Heterodera glycines
caaataatggaaaaggtgagcaaatttttgttaacaaaaaaagttgttttagcttatcaaaaaaatgcatttgataaaatttgtgtataaatcttaacaagtaaatttttttattattttcatattcgtaaaatattaatagttaatcctttaattatttaaattttttattactttttcatattcgtaaagtagattttttattaaatttgttttataaaaaaattaaacgagtcgataaaacaccatttttacattttttttttgaaataaaatcaaaaaaccgattgaaaacatgtgaatgcgcctattttcattgtttgaagtatccaaattaatatttttccattaatattacttttttaatattcacaaagtaggttttttaaataaatttgctaagaaaaaaaaatcaatgagtcacaaaaaatattaaaaatttttttttttgcttttaaggcctgtaaagccaacaaattctcattttacgataatcttattgggagtgttaaaaatgattattgctaatttgacatttcttatcacagtcatttggacccactccttcccaaccgtttttagcggcaaaagtgacgccaaaaaatggtaaaattaaaaaaataataatttataaatctaatttttttttatattttatg

SEQ ID NO: 109364 - DNA, 216 bp, Heterodera glycines
taaagatttttaggctgttcgtgtgggtggctaaacaacccccccccccccaaaaaaaaaattaaattttcaacaaaaaaacattttgttaattttcagcgattttgaaaatattccgaagtgattttaattaaagtattctgagcggttcaaaactgattatttatttgttttttaaaatttctttgagatttttctagtaaaattttcaaaatg

SEQ ID NO: 109365 - DNA, 906 bp, Heterodera glycines
aaccatttgatcagtgattttatttgatcatgattttgatgaattatataaggataatttgaaaatttacaaaaatttatggttataaaaatcagccaaaaaaagataaaaagcccaaataaaatttataaaatagagaaaaatctctctccgctatcaaatagtaggggggggggggggtcgacccgactccatacgaacgaagtccaggggggagtcgacgggagtcggagaccaaaattttcgaagtactccagtcatgtaaatcaactttttttttttttgcttttcaaaacggctttttttggggcgcgctttttccaaaaaaaacttttggggaactggaggggggagtccggtggtgccgatagacgacgccgggaaaatttttaaaaattcgagtgcgatttgttaacagatttatgccaaaaaattatcaaattttgcaatttcaagctaaatttttgaattaaaaaacgaaattctatttcgtataaaattacgatatgttactcaatttcgtaaattttttgaattttttataagcaatgattaaattttaaaagattttgttaaattgtttaaattctttttgcctttacaaagtcgcctctctcttaccccttcgtctccgacctttcccaacatttttcacatttttgtcccaaccaatatgaagtcccctcctcttttgggcccctcatatgaacgaagtcaggggggtcgacccccatgatttctctattttgccttggctttcgccattccttcggtcgccgccttggccatttttttcgttgcctcaataaataataatttttaatttctaatcaattaatttagtcaaagcaatatattctgaaataaaaattattttcccatacaaataattcctaatttgaaatg

SEQ ID NO: 109366 - DNA, 157 bp, Heterodera glycines
gtttttgcgattataagctcaattgtaggattttcattaaaaaatgataaaatatgtatcatttaaaaaaaaactatgagggatcatatttctttataggaaccccacgagttatcaaaaaaaaaattaaaaataatctaatttctgtagagggatg

SEQ ID NO: 109367 - DNA, 558 bp, Heterodera glycines
  unsure (1)..(558): unsure at all n locations
ttccttttcncctcccttttctggtcccncattatcccatcaatttccgttctgtgcatgcgatcagcgccaaacgggccaactgggcaatgtgaagccgctgctccttcgcattcacaagtgggtgaattgacgaatttggcccattttaatgcaaggtagagagtgtcggtgcacctaaaacgttgccgttgaaataaagtttttaagagaaagttctaaagttttctacaaaattcaacaaattaacctctatttgacaaaaatctatntaagcaaaatttttttaacaaaagaagaagtatagtatttccggtactagttgcgtttgtatccacatttttggtcaaatttttttttcaatttttttttcttttttattatcagaaatgatttaaataacaaataaaaggtgatttatgtgcttattgggtacaattccgcgatttgggtccacaaattataaaaaatttccggtcctccaaattgcttacgccacaaaaaatcagaaatgtatgtggaaaaaagtgatctgtgtgtgccaaatctcgtcttatg

SEQ ID NO: 109368 - DNA, 590 bp, Heterodera glycines
tccctggcctgcacccttgcaataggtttgggaccaagccaataccttttggcttgggtgacgtcactactgtaatccggtgtaattgtatgctataataataacaaattatttaagtaaaaaatagatttgggtaatcctactgatgatcataatttcaaaacaattttttgctccgtttataaggctgtgttactttccatttttcattttcataattacgttattcattaagcaatcccctttttattaaaaactaactatatcgaataaaaaatatttttaaataattttttatctaaataagttgaaactaaaaattaaatcgttttaatttttattttttaagggaaaacataatgttcttttctttttttgtaataccttttcttattatttattaattattttttaattcatatttcaaatgctatgccagcagtgagttaataaattagagtaattagtttgtctaatcattttaattacggagacgacaaaatgctaattgcatttctcaaaggagagataaagaaatccaaatcagtgaatattcaatgcaaaaatatgaggcataccttggcataatg

SEQ ID NO: 109369 - DNA, 347 bp, Heterodera glycines
ttttttcaaacactaaaaattaaaaaaatatataaatcaaaatatttaatgaatttatttgagaaaatttgtcaaatttatatgcaaaattcatacagaaatttgtttaaattacatcagactaattcaacttccgttctttattataatatgaaaaacataaaaacaaaataaattcacgtgaatttttttatcaatttcatttcatttccgtaaggaaatgaatagaaaattgagtaagtttaaattcatgttggcatttttcagtcatattttgccattttctgtttttgccggaattaaccaaagtgttgtcctctgtgagctgagattatggttggaaaatg

SEQ ID NO: 109370 - DNA, 443 bp, Heterodera glycines
agtcagcaatcgttgcttacttgccagatcggacgggtgcgcatgattccactgttccaagcaccccaccaaaagcaaaacgatataaccaaaatataaggaaaaatttttttaaaaaaatttttctccatctccctttttgatagaaaaagcatcagagtgcctaaactaacatgtaaataaaatttggtgcgctttagagcactttctgaaaaaatatttatgaaataaaaaaatcgatttattcaagtgtccgtttggggtactcaaacaattatggggagcaaaaatccaacgcagaattaaagtacagactatagggaagctaatcccgaaggattcggtctccccataaatctgggcgcatcggttcggggggactgccccgaaaacaaaaaaatcgattttttcaagtgtccgtttggggtactcaaacaattatg

SEQ ID NO: 109371 - DNA, 273 bp, Heterodera glycines
gcctgtactttaattctgcgttggatttttgctccccataaatgtttgagtaccccaaacggacacttgaaaaaatcgatttttttgtttcataaatatttttttcagaaagtgctctaaagcgcaccaaattttatttacaacttaattttagcactctgatgctttagtatcaaaaaggaagatggagaaaaaattttttaaaaaatttttccttatattttggttatatcgttttgcttttggtggggtgcttggaacagtggaatcatg

SEQ ID NO: 109372 - DNA, 1003 bp, Heterodera glycines
gcctcaaaaaatgctgcaaattaattttgtgacatttttcttcatatttctaatcctattaagcatacaccgttaaggatcgactttttaggaattagtcatcggggtctaccttaatagtgtatatttttactttaatagaatagctttctacctttatatagttctatttttctttttttttctagaatgtgtttttgcaaatcataccgatgaacagggcagggcgcacatttaagagctagtttttagcacataaataaagaattttttagggtttgcatatatatatatatatatatatattgaaatccgtgaaaaaatgaaaataattagcaagtactcagttttttaatgcattaataatatctaattgccgatagtaaattaaccaaatttatataatgaatattaggacctaggaatgatttactgataaatagagaaatcgtgaaaaggttatttgccgaatttcttaatcaatctatagttttaagactatttttttaatttttcaacaattttttcgtttatccaacaattggtttcctttttcatttttaatattaaaatttttggctttatgtctcccattccctaagattattttgttgtaagaattgttattcaccatttttctttgtataattattctcgccactgtttttaaaagttgaaagaaataaatcaatttaaaaaatcatacgcagaaacagaagatgtcaaaatagaaaaaataattatataggcataatttttgctaaaatcaaattgattttggctttttttaataaatatttattattaaagaattttattgtataaattacatttttacgtttttacgaaatttttgctcaataattttatggaatatagaggcttttgcgcaaaagtgtgaagtttttggcaaaataatcttcattttgacaattctctttagattttggcaaaattaattttataactttttctttaattgatttataatttttagaaaatg

SEQ ID NO: 109373 - DNA, 53 bp, Heterodera glycines
atttttggacaaattaattggttgccaaaaatgaaattttatccaaaaatatg

SEQ ID NO: 109374 - DNA, 485 bp, Heterodera glycines
  unsure (1)..(485): unsure at all n locations
aatttgtatctttttcatgccttttctaaatgaataattttaggataaaatggtaaaaaaaatttaatctttggttaatatttttttttactaaaagcattggtcacattcacaaaaaaaaattgacaaataaaaaaagcttttgcttctgtggcttcatctcctacgcttgcttctgaatgttaagtgttgttttggcggccgatcagtgcctccccgttgatcaatccccgagtgcgtcacgaaccgcctaccatcatggtaaaaaaaccatgttaaatgactacgtggtcgggaggggtcggtttagtctggccgttttagtcagagggttggtttagtctggccgttttagtcagggggtcgttttagtctggttagctgttttcacccacaaanttaattactttttataaatttcttttgtttgtcaatcatatacataaacataactttaaaatgtctgtttagctacaaatcaaatg

SEQ ID NO: 109375 - DNA, 434 bp, Heterodera glycines
atggcattttacaaaaaataaattaattaattaattaaaggcttttacgctgtgagcaggaagtaatcgtttttcgttatgcccccgacaatttctctgctgcttttgctggattggtaagcaaaaacttcgcctgacttttgttctcggcttctcccatcgaattatttaattaatttgccaaattttgaaaataaatttattattttggacaatttgccaacacacagaaagacggtagcattttggcatgggatttgcttgccgacgagcgaagtccgcagcgaatgatcctcggcaagggggcaacggcaacgccaccatcggaatcaggcaagcacactctcgagacgaaaaaattaaagggacaaaaatgccgaaatcagtcgagattaaacaacggagaatatttaccgtgagatggtggcacaatg

SEQ ID NO: 109376 - DNA, 223 bp, Heterodera glycines
gtccatgaggggcaatttggcactcttttttccgatttttttccttcccaaatatggcagggtgggatccgcaactgacggaataaattaaaaaatatcatttccggatattttgccgtcagcagtgttgaccggtattgttgatgccataaatctgacggtccaacacgatggaaatagctgcgggtacttcgtgtgcctgtatgccgaatcctggcttatg

SEQ ID NO: 109377 - DNA, 1003 bp, Heterodera glycines
tttactaattttgcttccttcaataaactcggatatttttttcatgccaacttttctggagccgatgttcgttggaattgcaaaagaatcaacgaaaacactgggattgttcaacgacttcgtgaacagaacggtcctcaaatgagcgcggatctatattccaaaagacataaaaataaacattttacgaaatgattattttcaatattatccaaacaaatagatttaggtgaattgcatcgcgatttgctcttctctctgcgtcggcttgggcaatggggcgggacggaccaatcgcaagagacatttcccccctccaatggtcctcttttgtcagtctctttgactgcccttttccctctctttcgttagatgcctttgctcacttcgttttggtaaaaaaacatttgacttcgatggcgcctataatcccccgagaacaagctcaatgtctgcaaaatgtcttcaaacatttcgcacactttgaaattaatagcgcaaccaaagattggactcaggaaggtggacattactgtagtataattataattacagtccattcactgtaaacattactgtcattttcagaattgcgtctttacaaacgcttgtttctcggcctgcggctttgcactttgacttttcctcctcaattgttacgcaatttgcaaattcttttcaaatgcatccgccaattttgtttcaatgccaaattaatgcgagaaaattgttggtcagcaaatttaaggatctcaaatgaggagaattcactctcaatctgtgaaattaatgaccagcgcattgagagagttcgagaataagtattgtgtttaaacctaaactttaaattaaggttcttcgagaattattcgttttattttttccgcaaaaaaatttggaatgtccaaaatcattttcgctgtttaaacttttggtggaacatgttacgccgtgtcttatccaaacgccaaaatggttggccgatgaagtgcaaaaagaaatg

SEQ ID NO: 109378 - DNA, 68 bp, Heterodera glycines
tctacaatataattaattttggtgtattaaatttatttcttttttaggtgctcacccgacggcgaatg

SEQ ID NO: 109379 - DNA, 1003 bp, Heterodera glycines
cagctcagaatagtgaaaaatatatgataacaacatttggggtttttatttatttagcttttataattctgataattttcctatgtgtgagggtattatttttgcgataatttgattaaatatttagaacaactctttttcatttacaaattgttttttcataaaaaatatttttctcatgtattccttaatttttatttaaacagcatgtcaaaagacaaattatgggaggaggtgatacgtgtttacgatgagcgtcggaaatttagacaaaattggtttgtagaattcgaaaaaaagtagaccagacaacaaatagaggataaggcgaagaaacttagacgaaaaattttgaagactaataaataaatacaccaaataaatctttgtattgttttttttgttatttcctcgtgctaatgggctatttacccggaaaactactgagatttttcttgaaatttatcttaaatagcgtatattttttaaattcattattcgggtattaaatgtcggataccctgttaaaatattttcaaaacgaatttaggaaggtatagataatttatccattatttctaatcttactatttaggaaccttggaaggaaatagagaaagcctgaaaaagcgcctagccaaattggaaaacaattttttaggagtttatattgacactgaggatgcctacccctatatggaatgggtcgatcgtttggggttattttatgttttttcgtttctgatttatgaaagaaatgtacgaatgtgttgttgtaatgttaaggacactatagggagttataatctatatcttaacggtgttgtatatattgacgacgtatcagttaccatttacttttttcgagaaggtgaacatctttataataagttgcagttctatctaagccctctgtaccgtgttaaactacggtccaaaacgattgtaaatttgttcagtattcgtgaatggctagtttcgccggtcagcctaattgtagatg

SEQ ID NO: 109380 - DNA, 320 bp, Heterodera glycines
agcatgttttaatagtcctattctttaccctgaacgcccacctaatgtaggaatgacagacatttattataaaattgcttcttttgatcattcgtatttaaataaaatgaatcaaagtcaactattctcaatgattgatgaaattattgataaatttcaactttgtaatattgaagagacaaagtcattgtcaagatgggtttattgcgtattattagttttattatggatagctgttgtaatgacaggcatttttttctattttaattctttaatcagaaatttgtgtaaaattatgcgaatatgtagagaagaaaatg

SEQ ID NO: 109381 - DNA, 179 bp, Heterodera glycines
gcaacctttcgaattgtttcgaaatttttcaacgtggaaaattctactggggaacttttcggcaaaatttttaatcacacaacggatcaagcaggatttcctgatttcatttcatttgcggtgagtgattgattgcttattccttaattgatcaattatggctaactaaggaattgatg

SEQ ID NO: 109382 - DNA, 588 bp, Heterodera glycines
tcgatttgctctttttctcaatatcccccgccccttcggcaaaattaatgacatcatttccaacaacttttctctcccccgcccccttttctgctgccattaaaaattaatgaacatttccattggatgggagcacaacaaattgcttctttgttgtgtcagaaacacataaatcgttccgtccgatgtctcttttttacgaaatggaaattcgcaaaattttaatacgcaaaaacttccgcgttaagaacattgctgctatgtgagtgagtgaatatatgcatcgttatccttatcatcctccaatttgtccattctttgccctcctttttctcccaatttttcctttggctttcgccgttggaccgcaaaatgaggacactttcatagaaagggacgaggtcatcttccccaagcaacagaaccaccaccaccataatcataatcagcatagggtatgtgtgcgttgtgacaatttgaaaccaaaggacaaacaaacgtatttaattggccccaaaatgggcgaagaattccaaaattttatagcattttcctgaggggatgtttgaaattgatctattgacgatg

SEQ ID NO: 109383 - DNA, 116 bp, Heterodera glycines
  unsure (1)..(116): unsure at all n locations
ctgactttggatatgagtaattcgagtattagtcgagatcaagnngctggcaagaattgaaagacacagattgttttatttgtgatgaagcgcctatgataaataagcgcgcaatg

SEQ ID NO: 109384 - DNA, 204 bp, Heterodera glycines
aatcccagtcctactcatttgcaactgcaaatagtgaataataaaaattatttttgctcaatttttggctgaaaattatgcactattcgtcactattttggcatttttactcactattttagttaactatttcgagatttttcgtcaataaaagttgcggccctactactaataataatttttatcaaaaaattgtcagcaatg

SEQ ID NO: 109385 - DNA, 121 bp, Heterodera glycines
ttttgaacagactgctgctttgctccaattgtcggtggcatttgctgcgtaaaattgcctatgatacactgagtaacatcgcaagaaatgtttgtttgtttgttccccgctaataaaaatg

SEQ ID NO: 109386 - DNA, 340 bp, Heterodera glycines
gttcttacgccaataaaatattgtttaagtggattttcatgttttattgccgggccaggacgttttcgcgtggccgttttcgcgtggccattttcgcgtggccattttcgcgtggccgttttcgcgtggccgttttcgcgtgagggccgttttcgcgtggccgttttcgcgtggggtacgttttcgcgtggccgttttcgcgtggttgcatataaaagagaattcataactcacattatattttaccaaaatttgtttcactcttttttctaacgagtttttattttataatttaatgagtttataaactaaattaaggctatttaaattatataatatg

SEQ ID NO: 109387 - DNA, 75 bp, Heterodera glycines
ggttttttgttaaatttgaaataagtttttcaaagtttaccgtcatagactggcagcggtaaaacattcaccatg

SEQ ID NO: 109388 - DNA, 826 bp, Heterodera glycines
ttttttggtttacaatctaaagaaacacagcaagactcgacaagatcggtccacttctgcagctcgatagtcttggtctcgaaacagagatttttacatcccgaccttttgactagagttgagcgggaccgggaaatttgggcaagaccgggaccgggactttttgggaggaaaaccgggactttttggctgggaaaaccgggaaaaaagccgggaatttcccggtcccggtcaaaactggtcaaaaccgggaccttggtactcagttgtacttagttgtccgtgtccatgtcccggtcccgctcaactctacttttgacccaaaaaatatgtacataatgcatattaagcttttaaaattctaaattccacctggggaaccaaaaaaaaaaaatgcatatggccagattttcaaatcatattttccaaattatttggctgtttgtccgttgattacccaagttttcaactgcaattggtgaatttatttttatccccctctccttcactcatttttctgccatgctttccatctttcccatctctatgtgtattcgtgcttggaaatagttttgctcatcagtcgcatcacatcaatcactttccacactctaatctctttagtccttcctccataatcaatcaatattctttctttgtctccgtttcctcccccgcatttttggagattcctttgcgttttttatagtcccttttcttatcgtaataataaacatgaaaaatgtttaattttatttcagtgtttttctgtgaatgtttgttttatgattttctgctggtgctatttgaatgaggtgccatcatg

SEQ ID NO: 109389 - DNA, 1003 bp, Heterodera glycines
agtcctggaaaccacttaggaagaattattccgatttttcgaaaccataaagttatcgaaagaaaagcattattgacgggcttttccaattataatgccatttcggcatcggtctaacaaagatgtgcatggctttgggaaattcctcaggaattaattttcgttttctaaagaaatgcactaggtcgggcattttgacattaaaatgccattaaggcatcgttgtagcaatgatgcacgtgatcctgggaaattcctcatgaattaatccctgaatttcttctattttcttatcactcacaaataactgggagaaaattaagaagattcctgatcattagcgttcttgttctatttttgcgctattatgatatttattcccgttcatggacggtaaaaaagaaaaaaaagcgacaataaatctttttatggataattatgggaaaaaattggcgttctgtcacatttactttttatctttatttctctcacttttatgtactatctcttcattgttaataatgtaaagaacaacatttacttcgctctatagaacttttttttcgccttacagaatttcttcatattttgcatatcgatagagaaaaaaatataggatttttcaatcgcttttttaaagaaaacaatcgcttttatttaactttaatttttattttaaggcaaatttattcttttcctctccttttggcgtactattttcatgtctctaacacattaaaaatcatgaaattcgcaaattctaataattttggttataagggtacaaaatcactttgaacatttagaatcaatagaaaaaagaataaatttagcattttggttaaaaagagctggctaggacttgagttataacatgataaaagtttgaaattccgacaacttttttctgagatgtcaaattgcttagcattcacttagaaaaagattctccttttcaaaatctttttttagataccaaatttgttcatttttgttgggaatg

SEQ ID NO: 109390 - DNA, 556 bp, Heterodera glycines
aatttttattctaatttcattttaaaaaaagtacctcttaattaattcctttgcaattgaattcacagaaatgtttccatcggttttaattatttctcatggaaaaaaaattcccattttatcattttctccattttttaattatgtaattattttgggttttcactaaatattccactcatatgtagtcaatcacttgttttttaatgacaatccgtcgaatttcttatcccttccgttttttatgcgaaccgaattttttacattctttttccattaattattcattctttttttcacccctctatccaaaactaaagggcgtcgtgacaaccgctgaacaaaatgtgatcagcttgcgaaaattccacgtttttaacatttcctaccaaaattgtccaaacaaaaagggcgactgaatccataccgtgccccattttcctttttctcctttgaaacgtttcattccgtcaaaaaaaaccaagtcccaactatgttaagtggactcctcaaacggttggaagaggattgtattgagtcagccccggcagcaatg

SEQ ID NO: 109391 - DNA, 114 bp, Heterodera glycines
  unsure (1)..(114): unsure at all n locations
ttttgagaattttctatgcaacaaacgctctcgaacatgnaacgaagtgcggtgcgccatggccattttatttttcaaataatttttatatntaatagatattccagaaaaatg

SEQ ID NO: 109392 - DNA, 1003 bp, Heterodera glycines
ctcattagaagaccatcattaatgttaaggataatttggtgttaatagacaacaattaattaggcgcctcattataagattatcaattagtgccaagaataattgggtgttaatagacgtaaaattaattaggcttcattaaaagaccatcaattagggccacgcataattggaccatatcaatagcagattaatttaaacaaaaaaattttcctggctgcgcccattggcaccgccggacattggtaattatgaaaaatgtttatttgtaaacccgctggtactaattaatgattatccttttgattataacagagacgctcgaatcgaaaattcttagactcctaaaaattgaaaaaaaccgaatctttctctacgttgaaacgagacgagaatttgtttagttcttatttttacggaaaaatgatcggaccggaacttttaaaatttataaaataaatcgttttcctttaaattaaaaaaagaaaaaaatttaattgtttttatttttggttttattttttatggtaggaaattttcgtaataaaattttaagaataattgtactttttacttactttaagtattctatactgtgtggcgtcgaacaaagcagaaattaaataatttttttggaaattttgacacagtttgctaaaaaaattaaattgaaaattttaatttttagaaaacaaaaaaattggatttctcaacccttataaaattattgattttgtaatttattttttattcaatacataatcattattttacaaaacaaatttttattaaaaaaaaaatttcttattttatattataatacgaaaaatattaaaagcatgttttatttttcacatttgttgttgtttatttgtcggcttcacaggaaatacagttttttaaatcaatttttccacgtattttcgttgggaaatcttataaaaattatttaaaaagataattttatgttttatttaaaaaaaaaagatttttttacaaaatg

SEQ ID NO: 109393 - DNA, 608 bp, Heterodera glycines
tccccctcgcccggctacgaccctactaaattggcattgttaaacgaatgattggcggagagtaaccgcgatggcacgcagtttttgctttaattttatttaaaaagccacaaaatatgaaacaagattcagccgtaattcttaacaatgaagattaagaaacgaacaaaaataatatgaatccaattcatttacaaattgtccttcaaattgcacacctgctcaaagttattcattttaaacgccaatttttgtttttataaattatagcgatttatagcaaattaaaaaaacttccaaaaaagtaaattaattttggccctaaataaaaagctctattattagaaattcaattccttaattatgaaaaggaatgaatggatgacttttgtttgtttagcttatttttggcattatttaagcgcacagcaaaatcgtaatgcatatcatttactcaaattaaagtttttaaaataaaattctaagctaattattaagaattaaattccaatttgtatatttattatttaaaattatcgtcataataatattataaattcttttttttccggcaaaattatttaaaaatatcattttaaagtgaaatg

SEQ ID NO: 109394 - DNA, 426 bp, Heterodera glycines
gacccaacttatccatgcataaaaatgccacgaccaagaccgcataatcaaaaataccacgacgatgactcgcagtgttatggatgagttgggggtgactccacaaaaataaagaataaaaaaaccagaaaaaaacacgttttaagggctatttggtgcgctgatcacgaatatgacatccatttcgaaccaggtccgaattcaaaaagattgaaaattttttgaggtaatgctttcattttatcagaatcattacaactttgaaacataatacataggcaaaaagcgaatcaaaacaatgcaatcaaaaaacaaaaaagatggttttattgttttgaaaaatctatttctgcaaaatattgaataaaattattcataggaaaggagacaaataccaacaaattaattaaataatatgcagtgatg

SEQ ID NO: 109395 - DNA, 756 bp, Heterodera glycines
gtccaaaagattttttcagcatcaaaagttagcttacaattagaggaatttttttctttcataaatagattttggttaatttaagaaaatttgaaaattttcttaataaatagtaaaaataaaattttccttggagtttttccaaaagctctaatttcctcaaaaaatgccaaaatcgtaacttagtcatttttggaaaagtcgccgcaaaaaaagcggtttatatgttttggtttctttaaaacattttttgtgaatttttcccgcgattaaattccgttttttaaataaatttaaataaaaaatcattagaaaatttttttttataatcacggatcacggaaatcacggggattttggggtgccgtgatcacggttcacggattttttttaaagccccgtgatcacggctcacggatttccgtgattggaaattcaatcacggccagccctggtccggacagacatttttcaaaaaaaaaaacttgaaataaatttgtataagaaaattttaaaacaaaattttttttttcaaaacgggagtcacgggatcggttctcggtccattttccaagtcccggtcccggttatttcaaattccgggcctatttaattttttataactattaattcaattcaattaggtgactggccaatactgtgaccaatgtttgcctgaacactatgggtttggcaaattttttaaattaatatttttattttatttatgtaaatatcatttaagtctgtccaatg

SEQ ID NO: 109396 - DNA, 101 bp, Heterodera glycines
  unsure (1)..(101): unsure at all n locations
aagaaaacatgcaccaagtcaccatacaataatntggccgaacaatcagtaaaccagcaagaaaacgtgttcgatccgacgcatttggactttactaaatg

SEQ ID NO: 109397 - DNA, 857 bp, Heterodera glycines
tttctaccacctgggtcgccttcaaacccaggaaagtctccgccacctggtccacgatttatcaaatgtgaaaaaaacgaggaacccaaaccgcggaaaacatggttgcacgctgcgtgcagtcgctctcatcaatatcttgcagaacaactcgtaggtaaatgttcttgattggcctatcaactttttgcccgccacaagattaacaaatgtggttttcgggtagctttcggcgacagggaaagccccgcattcgcagagggcatgactaatgggccaaaaatgaatgaaacgaaaaaaggggaaaagatgtgcctacatcgtacacttggtactgtaaatcagcaactattgccccaatgtaaaaagtgccagcgcctgcgaagcgaataacttctcgcaaatttttggcactttccagctcctcttcctcgggcgcggggcgtttggcagggattgaaagcgggagagagacatttattttaataataataataataaaatatttatttgaagtgacaaaatttgctgaatgcctgttcttttatacactcccccccccccccccccgatcgtagaattagtctttgatttttgcgaataaaaaaccaaaaactaaaggctaaaactttatgcagcactttgtatccatctatccccccccgcaaaagtgagaataaagaacaaaaactagactataaaagctttacgcggcggaggattttgtgttcactctacgcctgcggagcctgcgtaggggtctgtacgcggcggaggacttttgtcttcactctacgacagcggagaaacttgttcactctacgcggcggaggagacttcactctacgaggcggatg

SEQ ID NO: 109398 - DNA, 411 bp, Heterodera glycines
tttcgccaacttgacatctcgccaactgacatctcgccaactgacatttcgccaactcagccaaaaacattcatttcgccaactcaaccaaaaacattcatttcgccaactcagccaaaaacattcatttcgcctactaagccaaaatctgacatttcgccaactgacatttcgccaaatagttaaaaaaattaaagaaaaaagtaaaaagagtaaaaaaatgctgtgttaatatcaaatacagccctattccagtttacacgtccaatcagtgaccatcatcatttcttatgtcctaacttttttcatatttgttcattccaaccatttttggatcaatcaaagcttaagaattcctttcacttttttataatttcgtttctagcgtaattcagattctagcaagaaatg

SEQ ID NO: 109399 - DNA, 347 bp, Heterodera glycines
tatctacaaatatattaataaatttacaaaaaattttgaacaaattcactctattaattacgagaaccgaactattttttgatgattacttaaaagcagaaatttttgcaaaaattttccaagaatccttttcaaattcagatgttccacaaattagcagttgtccttccaatcccaatggaccatttattacttatgttgaatttaatgccaatgaaatctctaacattctaaaaagcctaccaaatcgagaatccacatcccccgatgaaatttcctttaaaatcttatgtaattgccaccttacgctttcacctgtaatttccgaacttttcagaatctcaatg

SEQ ID NO: 109400 - DNA, 73 bp, Heterodera glycines
aagttgcgggcggcgtcgctgcggaacggtcgatgattccgccggggacaatgctcagtgagtgggacacatg

SEQ ID NO: 109401 - DNA, 1003 bp, Heterodera glycines
ttaagagtcacacactgaaaaagagaaaaattttaaaaatggcgaataaatttttcgctttggaattttaagcaattgtcaattcttagagccttgaattattgagaatttgaatttcaatttaaactagagttcaaaattcttggccaactgattattgttttccatttatttttgaaattttattttaattccttcattattgcttgaattttaaatataaaataatatttttatgtgtcaaaaaataagggttttggttaattctacttatgatcaatcaacattttaaataataacattattatttagatattaaatgagtaagggatttggataattctacgtcaccattataaattgaatcataatatttttatttttttataattgcgtcattcagtagataaaataataaatgacataaataaataagagaatttttttttttataattctacggatgtcactaattcaagtctttataaggctgtgtgattttccatttttcattttaataggtaaatatttccggaagtcgtaattatgggtccaaaaatttttaggtctgagtgaaaattttcaaagttccgaaaatttcttatatgaaattgtgaatttaattttcctttaaatgttaaacttttaccaaaacccttaattttggaggagctgttaaaaactttctaaaaggattttttaccgcaattcaatttctttaaaaattttaatttattatgcattcaaaaattcacatttttatatttaaacaaagatttttttgcataaactggttatattgcaacaataggtaataaaaatgtaataatgcgttccattctttttggattatgaaattgaggatggctgagaataatctttttttttatattttatgtaattttaatggaatcaatcatccattttataaaagttcacgacttactctttttcatttttattgataatttatattttattcaagaagaaaaacttaataatg

SEQ ID NO: 109402 - DNA, 1003 bp, Heterodera glycines
ctatcatttcgtcactgagaaaattaaaaaattgtttggtagattgtcttttaaagtcatctcttctccaaaattgtttttctccaaatctgtcgtaaggccagccgaaaaattttttacaataatgttttttttttttgcaaaattttgtgataaaaattgcttgaaaatggagaacatttgttcaaaaggcagtgccgcgaagagacgatgtgcggggtagtgctaagactctctagtctcgctcgagaaaattctcgggtctttttggtctcgagcagcaaccaaatccaacgatcttgaatcattcgagagcccttcatatgctctattagcctgcaaaattctggtcataacttttttgaaccttaacaaaattttttgaaatttttaagctaatagagaacacatagggctatcgaatgatatgaacaatgttggatttggttgtaaaaaagttatagccaaaaacttgtactcgtacgaaaacgacccggacccgaccccttgtacaattatgctcttaatgtattatggcgaaaaaataaataaattttagaaataagcacccttggaagtggaattaactgagaagctaaattggtctcttttatttcagagctttttgctagcacgtttgtttttcagcgacgaaacgattagtgacgaaatgattggccacccttattttaactacttagggtgtaacataagtttccgcacaatttttttttgacaaattcaaaaattcataactccgtaatttctgcagttattttaataattctttttttattttgttcgtcagaaagtcttctttcatttcatgccattgtttcattttttatttgcttattcaatttttttagtattttttcccgaccatgcaaaaattgaaaattggcccactaaattttctcgaatttttatggtcaaaaaagtaacctgatataacaaaaaagaaggttttctgtacaaattagaccagtagaatccgaatatg

SEQ ID NO: 109403 - DNA, 453 bp, Heterodera glycines
atatagtaaggggaatcggagtgcttttttcgttctgcgtaatataatgctttataactgaattacatatacattaatatcataaaataaatatttatttagcctttatttttttataatttttaggaaatttctcaaattatcccgagaccgttcgtgtgtgtcgcgattactcggacattccgccgttacctatgccgttgatactcatcataaaaaaaggcgtcaaatgcatacgcgtacactgactaatttatccaagagctaatgatcattttggcgcctaattgatcaaaatacctcagccatatctgtgaacatttgccagcttttaattggacaattctttcttccgaatgctctgaccccgctagtttacgacaaaattttgataaaaaatgtcttttatggaaaaattttccggttttttgggtcaaaacggccaaaaaaatg

SEQ ID NO: 109404 - DNA, 95 bp, Heterodera glycines
tcctgaattataagaaggtattattgaagtattatttttctaaatggattaaataatactattgatatatttagtccaattaagattatacaatg

SEQ ID NO: 109405 - DNA, 255 bp, Heterodera glycines
ccgccgctctgtcagcgttggccaaagtcgcaccgagccgattccacagaacagggtcctggcgaaagaacacaaatggcaatttacaaatggaatttgcgaaagattaataaaatttgactcaaaaattggccctaaaaccaatggaaaacgacctcaggacgaaaggacaacgcggaacggacgcagtcgacggcgcggtcgaaatttctggccaaattgtagagcacacccctgagccaaagaaacactatg

SEQ ID NO: 109406 - DNA, 459 bp, Heterodera glycines
aaaacaaataagcgttggaatattttcagggtaagttagtcctgtaccggggagtatctctattaaatttggagtgattgtgatcatttttttatgtttatttttgtgttcaattttccttaccccattaatggttaaataaaatccataatcaacctggaataaaatttttcaaaatttctaaaacctaggaatttgtcgtgaattcaattttctaaattcttagcccaatttttgaaaaattatcgaaaaactagcattttaaaaagaaaattgtttaagctcgcgctggaaatttgactgaaacatcgtcagaactcttcttctctcttctgcttggcattgccgcggttggcaaaaaaaaatttgttattttttctaaatcaaactttgttaacacttgattacgattaaaaaagtcagtccgctaattgccgatttttcaaaaaaaaaaaaatg

SEQ ID NO: 109407 - DNA, 199 bp, Heterodera glycines
tttatttatgttggaaagagtctcggagctgacgaataaatatttaaaatgggcaaggcgaattcgggataaatattcatccactctcaatcaatggcaccctaaattttggagagagcgttttccttttatccgtcgaggcccgacatcaaatttatataattttatttaattttttaaattttttagctgacaaatg

SEQ ID NO: 109408 - DNA, 235 bp, Heterodera glycines
  unsure (1)..(235): unsure at all n locations
tgtttctaaaattggaaatataagaaaacattgaagatattggggataactgcagaaaatttctccgcttttttnaaattgtccacttttttattgtcactattaatttttagtcacgttattttcaaaaattttgaaagggttcggccattagttgtaaggccccatatatttttattaggtattgcgtaaaatttcgaaaatttaaaataaagacggtatgtagagtttaatg

SEQ ID NO: 109409 - DNA, 395 bp, Heterodera glycines
tttttaaataaattatatcataagttcttttttaaattttacttcgacaaattcaacacaaaatagaacaaaagttctcttttcgtttttgtgtcttttgttctttccttccattcgccgccacttttattttcccccgagggaaaagcacaaaacacaaactctaaaataaaataaaataaaagcggagagtatttaagtgacaaattcattgggtgatgacaacatttttccttctgaattattttcaatttgtcctccttttttgatcatttaatctctctttttttaatttagcatttcatcgcttttcctaaaatatttttcatttttaaatttgcccaatttccttccaaaacgccaatttatttctgctcctccccaccctcaaaatg

SEQ ID NO: 109410 - DNA, 805 bp, Heterodera glycines
  unsure (1)..(805): unsure at all n locations
tccaacagaaaattgtcaaaaaatcatcattctcgacaaaaaaatcagctttgaccccctgaaatcagcaaaattctgataaatcagcagagttgggagccctggtttaaccttagtttgaagctaaaaatattttttacttcatccaaattgccatattaattttggcaattttgatattctcattttaaaataaaataaaattttttttcttaaatgaagtaagtataaaatctttaaaaatataaaaaacattttctcacccactaaaaaaatgagttttttgagtttttaaaaatgggttttcagaacaaggacaaattgattttgagggatttttgaaatacttccgtttttaatcatattcgaaccattgttactaacctgngatttcaatataaaaatgtttattctataatttttttcatcgttaaacatatccataatcaattcaatccaaattataacgatggattattgcagaaattttcgcagaatagcatatgaattggcataatatagtaactaggcatcttaatcttcatcatcatcattatcatcatgggaagtcaattaaaaatatttgacaaatattattaatatttattcaatggcttctgaaatttttattttagtaatgtgaagccttcaattcatattttttacaaattgaggaatgatacaaaatttggatttattttagaggtgggctgataaaaaaaaaccgcccaaaacatgttcaaattattctcctattacctctaatcggtaaaaatctttttttagcattttaataataaaaatg

SEQ ID NO: 109411 - DNA, 158 bp, Heterodera glycines
aatcgaagaaaaatgattcgctatgtccgcctgcaagccaaaataaacccaaaatcatttcatcgagactagtcaaaattggcatcaacacactaaacggtgaaatcgaatacgtaacattacagactgtggaaaaaattactgatgttactaaaatg

SEQ ID NO: 109412 - DNA, 68 bp, Heterodera glycines
ggtacacagaaaatggctgaatttaagcttaattatcccaagcatttaattttgaaggcaaccaaatg

SEQ ID NO: 109413 - DNA, 479 bp, Heterodera glycines
gttcacgcaacaaagaaacgcggattttgccaagtaatgcaagagcaatagaacaaccaatacatttgtttttacgaattctttgctttttgacttgacttacaattaaaagggattttcaaacaaattttcgaaattcaaaatcaaaaataactgtacatgcaaaactctatacaatttcaccgagcaaataataaattaaagtatttttaatattttttagactcgagaagtacgacaaatttgtgaaatagagcgtttcatccaatggaatgattgattttaagttacggggcagcagaagaaggatcctcctataaataaatttatttcattttctgttgcttattaggatttttgggattaaacctatataaaaaaattcgtttttttctcaatcaacggaatgactttgtcggatcggatattatttgttttaatttgacaaatttaatatttttcctaagccaccaaaaatg

SEQ ID NO: 109414 - DNA, 110 bp, Heterodera glycines
ttactcgttttttatatgacaggaagatgtggcggacgtggatttgatcaagcctctgaccgctccgacgttgaagaacgtcaacgccgacacgcgcccatgagatcatg

SEQ ID NO: 109415 - DNA, 187 bp, Heterodera glycines
tattcagaagcaattcatggaagcacaaatgaccttaatgcatcggcaaggaaattgccaaacgtttcggcatacttaacaaggataattaacaagaagtcggccattgtcctaccttcccatgtgagtacagcacataaatgccagtgcaaagcaaagctgaacgaacgttgtgattgaaaggatg

SEQ ID NO: 109416 - DNA, 977 bp, Heterodera glycines
aaagtttattaggcaaacaaaaaaagaatatccgaaaatgactgtcaaagaaattgcgaaaattatgaaaattaatcactttaacgtttatcgatggaagcagataattggagaaggaataaatgagtaatgcaagaacaacgatatggagactttacgacattcagtattttatttttcagtcctccttatttttattattaattttcgttttttatcagtaataaaaactaaatttttaagagttgttttaaaattttgcatattttttcctttatcgccgcctttttaaatatatatatatatttttcttttttgcattaactaggagttagaaatttaaatttaattttaatcatttccggtgaccactctaaaaaattttaaatacctatcaatgaaaaaaaaagaggcaaatttgcattttattcaccaatttttatattagaaatattaatttgttaatttttgatgttcaatcattgataaaaagtaggttgattagaaataaaaataacaccgtgctgggtcggtcgtctcgcaaaaactgtcaaatttacgcattttccgaaaaaaaatccgtcataacttttcttaaatacatcctaaaaaaatagtcttggtatcatacgatagctcttagattgcttcttcatcatgaaacatttcagaatatttaattaagttttcaaaaagttatgtctatttttttttaacatttttggtcagaactatgaaattttctgaatcttatagagcaagccaagtgctatcgcgagataccaagatcttttaatttggttatgtttaagaaaagttttgatggatttttctcgaaaaatctgtaaatatggcagttttacgaaacgaccttgccccctttggaaccacatctgtggcttttgatcataaaatacaataaatatttgctgtttttgattctgctaacaattaattcattcacaggcagtgacatg

SEQ ID NO: 109417 - DNA, 396 bp, Heterodera glycines
aaccgagatggcacaccacgatataaggacgatctcattttgaagaatttatacttgttgatcaaatgacaaactctttctttgtaattttgccgagcaatacgccaggctttgttggaaataaaacaaacaaattcaaagtgcacttgccaaagaagttggtgttcgatggggccgggtggatggttggactgtcaggcataatttacccaaacaggtgggcaaaaatcatggctattgggtccgatttttggcttaagttgggcaaagctgggtacatcagaccgacaatatgtgattgttcacctgcacgacggccgaaaataccgtttccgtgtgccaaagggaagttttctctcgccacagcagcttgagaggggcattcatcatggcatg

SEQ ID NO: 109418 - DNA, 140 bp, Heterodera glycines
ggtgaccttttcccagcattttttttcatacgattaatttatttgaaggtccggctcccttcaatcatcgccttctccatgattgtatcacccgactgaaggagcaggaattgatcatcgaaaaagcgaacaaaaacatg

SEQ ID NO: 109419 - DNA, 76 bp, Heterodera glycines
taaagagctttcgaatgataccaacaatcgttaggatttaggttggcaaagaaaattgttatagtccaaaaacatg

SEQ ID NO: 109420 - DNA, 204 bp, Heterodera glycines
acatgaaacgaagtgcggtgcgccatgcccattttatttttcaaataatttttatatttaatagatattccagaaaaatggctatctctttttttgagaaattttctatgcaacaaagctctcgaacatgaaacgaagtgcggtgcgccatggccattttatttttcaataatttttatatttaatagatattccagaaaaatg

SEQ ID NO: 109421 - DNA, 1003 bp, Heterodera glycines
ttcggcgtttttttaaatcacatcgaaaatttcatgtcagccatttcgcgattttttaactgaatttgacggatttcaagacatttcactcaatatttgcaattttatggccacattttgcaatttatacccatatttttcatccctatcgatcagggacagcagcgagacacaagagacatcaatcattgagccgaacaaagaaaataaacaataaaaatgaatatggaatggaataatctgatcttaaattaattcgttagcattttttgtggtgtgttcagtcaaacgcgcaaaaacatgaaaaactcgcgcacattctgcgaccaaatcaatcgcgcccaaattggttagccaatgcacgaaggcgccgctggaaggtggcccgttcggtgttcagctggtccacctggtcctgcagctgctgcacatgagcacacatttccaatgtacaaagacagagggaaatgaatgaaaactatcgatcagagcggtttccggacccggtcctcaaaatccggccaatccctatttttccaaaaaaccgtcggaccggttcccggatccagtaaaacccggcaccgggtccggtctgactcggtctctactattaaattttttttttaatttttaattaaaaatttttatcatgaaaaaataattaaattgtggggatcaatttctttgaaaaattttttcattttttaggggtgtattttttgagatttttcttgtcggttcttagggggtgtatttttcatttttattgcatgttaaggatttttccgagaattctgaaaaaggcgccaaaaatggcgaaataggcacaaaaatttggacactcatttttcccaatttccgcccttttatacccatttttcaatttttttgcctttgccttcaagcggcatcagatgtgtataaaaggaatgtgtttctcccaggttcgcttcatttttccctccaaccaacgaaccgcttcagtgtgcaacgcaacgctatg

SEQ ID NO: 109422 - DNA, 131 bp, Heterodera glycines
ggtggaaaagggggggggggggaggtgaatataaaaaagaaagaaatacacagttgaccgatttcaaagtgcacgaaagtacgctggaggaagtgcatttcatcgccacggtgggcacggacagagacatg

SEQ ID NO: 109423 - DNA, 348 bp, Heterodera glycines
  unsure (1)..(348): unsure at all n locations
ctttctgtgctgcccacaaaatgatttgcagcagtttcttgtcgataagaatattatcagattgtgttgtgatgtccatcctaaaaatgatgattgaccgcttaattntactttncataattatcgcctggggcattaaaaaatagttagaggttagtaccgctgtcgatccgtacgcgcctaaccggataaatttgcttggactttacctaccgaagtttccgaaattaccgggaagttttttcggggtttagaaaaatttgttgctctttttttgttgcgttttgcttgatcacaaggcccacatcgttcactcaaccaatttttcagtgaccagcagaagatatg

SEQ ID NO: 109424 - DNA, 616 bp, Heterodera glycines
gatcccaaaagaggcatcgatgggcacgggacgctttgaggatcggtacggtatttaaattttttgattctcaggccaaatccaattgtgccaaaataaaaaataaaaacatagcttaaaaataaataaattaattacatccatattcttcggcattcagatgaaatttgatgcataaattatacatcgagaaactgtggcacaaagtttcaaaatataaaagctacacttttggaggaaatcccacactcgcagcataattttaaattattttggcattaaaaataaattcttcgccgacggggggtgggactttatagcaattggctaattatggcattaaaataaatctcgcggccaatgggggaaaaaactttattgctaagatgcaccaaaactttgactaaattttttttcacaaaatttcatcgtttacttgacaaccgaaaagatactagtttaaatcattgtttaaaaatgattgtatatttatttgataaccgaaattggatttttttttctttttgtaaaaaagttcgctttttgtctgagtcatcgtatactgtaaaagtggttacggtttagctgtgacaatgggacacagacattgaccatg

SEQ ID NO: 109425 - DNA, 1003 bp, Heterodera glycines
aaaagtaaattaaatagaaaacgtcaaccagcatcaaactcataacaaagaatactgttagaatggaagcactaaccactactccacaaatatattaaaaacaaaagcaaaacttactttattccataaaaatttgtcaaaatggtaaaaaaaaattcaaaattgtacaaattttttgccttttgtcccagaatatgccattcttaggggttgtattttcaccccgcgcccccgcgggggctggggatgcggggatctgagtcacgggggcggggtgaggccaaaaaacctgtcccgtccccggggacgggggcggggctcgaaccctaggtaaaacaaataagcaaataattaaataaaaaatacataatttttttttctaaaaaattttcctttcccaccaatttccttcacaaatgtttactcagacccccattcttaccagtgtacggttgaacataaatatcattttgaattttgccacaaactgccacctctaattgtttgatctcacaatctgcaggtgtcagtcaatcccattcatttttagacatcatttttatttggtatttaccgtatatgctctaattatagcccagtctctattaatcccgcagtctccaattatcccccagtctacgaggtgttttgaaaaataatccctctatcataatcccccagtcactaattatccccccttttctgaggaggttgaaaaataatcccccatgggctataattagagcatatacggtatttctttatccaattagtgattgtttccatttcagtaattcttaaaattctcgaattaatttgtcaaaagggtaaactgatagtgatctcatgttgcaaaattatttattacttcgcgtattttccccattttttatcagatcatttcttaattgctttccgcggcacttccccccccccccccaccgtttttaccttacatatttaaacacataaaaatttccagcttaaattttacttacaaatg

SEQ ID NO: 109426 - DNA, 117 bp, Heterodera glycines
ttagatcaaaactgaatgttattgcctgtttgtaggtgacagaacgccgaaaaaaggcattacaacttctgcatgagattgcgccataatgaagacctttaatttggtgacattatg

SEQ ID NO: 109427 - DNA, 699 bp, Heterodera glycines
ggttgggattcgggattacaatttttatgaagaaaaaaatttactttcccaggtgctatgttgttataaaattaaaaactatcaaataaaatttcgacacaaaattacccataattttgttcaatgcaattaaatttaattctttttgatatcattcgatagtcttaagagttctctattagcctgtatgtacaatttcaaaaaacttcgttaaggttgaacaaatatggccaaaaatacacaatgaaccaggttttcaaatatttttggccaaaactttttttgaaacagcgaaattttttgtatttttaagagtattacaggggacaaataagtcttgcttttgataagaattaacaaataacttggtcattaaaaaggactacgcgtgataatgcatggattatgtttaggggggattaagattattttttatcacggacaaaaacctaaaaattgcccctgcttcaatcataaagttccaatcaaatttttgtttttcattcgctatcctttaaagagaatcagaatgtgtttcagtagctcttagaaatctctactagcttgaaaacttacaaaaaatttcgcagtttcaaaaaagttatggccaaaaatgcttgaaaacctggttccttgtatatttttggccataacttgttaaatcttaatgaatttttcaggatattaataggaaacatg

SEQ ID NO: 109428 - DNA, 138 bp, Heterodera glycines
aaaagcgcgaggcggaattggcaaaactgcgccggggacttggaggagaacaacctgaaccatgagacgcagctgaatgcgttgcgtaagaagcacaacgacgcggtggccgagctgaccgaccagttggagcagatg

SEQ ID NO: 109429 - DNA, 125 bp, Heterodera glycines
taaacgagcgttgtgccgaattgcaaagaatttttggtttgtctgtagactttaaaatcactgcattttaataatggattaattgcatcctttttaaagtagccgtggaaaagtgtcaaccaatg

SEQ ID NO: 109430 - DNA, 301 bp, Heterodera glycines
actaattttccgagctgtttaggtgccctgtcgtcttgtgcttcatgggtggcagtgtgctgctcttcaggccaagattggtttaaaatgcttaccactttttaaaaatggtgacaaattaaattatatttttgtatagcagaggaattcgtctgctaaaataaatattatcgtatccatccctttctgtccctcacgcattgccatatttccgatccttccaacacttctcctctttatttcttattgattttttatcgttaccatatttttaatgtgctttcacccccctattaaaatg

SEQ ID NO: 109431 - DNA, 437 bp, Heterodera glycines
aaaaatcgttttttcccaaaaactgaggcgtttgaatttttaaaccgaaagtttttccctttttccgattaactttgttttcaatgcgaaccgctttttactgattgcctttatccgatggcttttgtttcggcgaacggactgggaaattggtcgacgaatcgagcgaatgctcgacgaattgtacctcgtcgtttaccgatgtttcgaaattggtcggctatgttagggccgatttgatgatgccttaaaaaaaggctaccgtttctcaatcgggcgagagatgtggcccgattggccggagacggggagttgaaaaaagattaggttcttaaattctatgatatataatttattttccccgataggtctaattcgattttaaaatctaaattaatgtcgaatttattattattatgtatcaatttgtagtgatg

SEQ ID NO: 109432 - DNA, 809 bp, Heterodera glycines
ataatgttattatcataaatgtgtctcataagttctgagtaccacatatgtctagagatttgaaattacaatgaaaatttactgatcataaatccgggtccggggttcgaaattggtcgaaatgaatgtcatattcgtgatcagcggccccgaaaaccccggaaatgtattttcatgacttttaaaaaaaattttcaaaaagggtaacttttacagtagcgccaaattctctatagtgtcgaaattactcaatgtcgaaatggtccagtgtcgaaaatgcaggaaaacagtgaaagttttagaaataattcagtgcgaaaatgtagtgtcgaaattacttagtgtcgaaaatacttagtgtcgaatttactcagtgtccaatttacccagtgtcgaaattaccagccgcggtttttttggtaccggtaccggttttttcaaaaatcaaagtaccggtaccggtttgtctagtaccggtaccgccggtaaaaatttgcactgttaagaataggagtttagcacaaaattgatgatgcaaaatttagggaaacggaaaattttataaaaatagaaaattttgccaaattttaggcattttaaacacaatctttcgtcatatttattcattgaagattaatatatttggagttaaaatttcttatcccttgttaatttattctacaagagaatcatgattttaattttggtaatcaaaatccaataaatgtctgccatttggaaatatttcgacaaatcatcgaatgataaagcattatgcaatgtttgcggtaaaaaaattctccgaaatg

SEQ ID NO: 109433 - DNA, 1003 bp, Heterodera glycines
ggcgcaccgcgcaaaaaaaaaaccgcggccgcgcattcaaattgccgcggccgcggatcgcgcaaaaaaaaaacgccgcgaatcgcggtcgcgctccagccctggtgtatttttcgtttttattgcgtttttgttaacaaattttgggcaaaacgccaaaataggcaaaaataggctctttcaaaattttttaggctttttaggctctaaaaataaaagcctagaaaataggcacttataactcgaaaagtagcttaacaacagcccaaaaaaacatgtttttcttgcgtttcaggccacggggagctcaggaaaaaaataggcttttgcctaaaaagtgcatccctagttaagagctttcgaatgataccaagattgttggatttggtcgacaaagaaaaaagttatgatactctaaacttggctcatactaaaccggacagactaaactgtcccagtccgtcactttttttccttttttcaaagatgataaaatttttctagaacattaagagctatcgaatgacatattaattaattaatttggttgactttgtttaaagttataacgattttttgtcaaaaacaatacgagttggggtatgtacgagggtaggtaatactttgatttgtccctcccactatttttctaaattttttttaaagttatgaaaacatatttccaagggtttttggggtttctgatcacgaatccggcagaaatggatgctgccggattcgtgatcagcgacccaaaaccgttggaaacatgttttcatgactttaaaaaaaaattgccttcataaaaatttttgaaaaataatatcactattttggcgttttgcccatttaattcttgacaagaattttggttttaaaaatttatatctcaatacttgatttggcttaattttgttactttttggatgacattttacgattttaaaccaaatttgaaagcttttagtttatctttatacattctttagacatacaaaaaatg

SEQ ID NO: 109434 - DNA, 753 bp, Heterodera glycines
atgaagatacttttattgttccaattatttatgatcaagtgacattggccattgatgtcagtgtgaaagaagcgaatattgaggagaattcataaatacccattatgatctggcaaaaatctcatcattgaattatcatcctatggacctgctgtgtttagcttctttcttattgtttatcttttggttttacaatattgatttatggattattaaagcggcttttttaagcattgaaatgaaattggcatatcccctgatgtgccttctattgtttaacaattaattggtcattaaattctgttcggtaatccgccacgccgctcttttttgaaacaattcgaaatgttcccaaacatttgcaactccaattttctgctcaaataaatttattaattaaaggttgttaatttttattaataaatatttaatttgatttaatttccacatcattgtaagcggaacccaaaaggaaaatgcccaaaaatttcgcattgtcagtgcttccatttttcggatttatttgtgccataatttttccacggcaatctttactcaaaatcgtgcaaattccgacgatttttcaatgtccataaaaagtgttccattggatttgctttgaaccaaaattaatttgtccttttttggtccatcaacagttgtgatatcaatggtcaatgtaattccttcagtttaatcttttaatttttttgggtcaccattttacttcgataaaaattatatgggaaaatg

SEQ ID NO: 109435 - DNA, 796 bp, Heterodera glycines
  unsure (1)..(796): unsure at all n locations
atcgaacctggtcttttctaatctctttcaaatcgccccaaattttttttacagcttaactaggcccaattaagcttatttccagaaaatctcgcatgaattctcattttnaaattttttatagatttttaaatatttggattttttttggcttaccaaaacttcatcgaacctggttctttctattctctttcaaatcgccccaaattttttttacagcttaactaggccctattaagcttatttccagaaaatctcgcatgaattctcatttttaaattttttatagatttttaaatgtttggattttttttggcttaccaaaacttcatcgaacctggttctttctattctctttcaaatcgccccaaattttttttacagcttaactaggcccaattaagcttatttccagaaaatctcgcatgaattctcatttttaaattttttatagatttttaaatgtttggatttttttttggcttaacaaaacttcatcgaacctggttctttctattctctttcaaatcaccccaaattttttttacagcttaactaggccctattaagcttatttccagaaaatctcgcatgaattctcatttttaaattttttatagatttttaaatatttggattttttttggcttaccaaaacttcatcgaacctggttctttctattctctttcaaatcgccccaaattttttttacagcttaactaggccctattaagcttatttccagaaaatctcgcatgaattctcatttttaaattttttatagatttttaaatg

SEQ ID NO: 109436 - DNA, 221 bp, Heterodera glycines
gcaggccgctgtaagacaatatatttgtgttcagtagagtcttaataattgtttaagaacattcctcctccggcagtttgtaacagatttgtcgaagggttttcaagcgtttatgtgtatgtgtgcagtttaatgcttttgagacaataaagttatttaggttcgaaacccgaccatcttcacatggcggtgcttttgcattccgctacgatgttgaaatg

SEQ ID NO: 109437 - DNA, 225 bp, Heterodera glycines
aatatattaatgagtatttaaaatacaaatattttttttatatccttatttagcatttcataaacttaaagtataatcaataaacgaggagatgcacaatttccgcaccgacttcaacatggaggcggtgcacaacgaaactccatctggaatgccgactcacaaactgaccatcaaagtgaacaaaattttatttgattattgtttaaccaataaatccagatg

SEQ ID NO: 109438 - DNA, 364 bp, Heterodera glycines
tttttatttgaatttaatgcgccgttaaaaataggcacatattttttatcgcgttttcacaattgataattcacaattaattccaacatcatatttaactttttattagtgttttgttatattatattaaaaagatttacatattacttattgcccttcaattaaaagtttaattaactcgtcttaagccaaaatgtttcactgttttctgattaaagcaatgtgcgaaaaggtgccaaaaatatattaattgaaattttcttaataacaaatttaagagaaagcctttaaaaaatcaaacaaaaatacaataaaataaagaaaattaacatgaaataagagttgatattctgcttcaaaaatg

SEQ ID NO: 109439 - DNA, 1003 bp, Heterodera glycines
tactaattttctactgaaatttcactcaatattttcgtaaatttaagttcttcattcgtttccccataaatttcatacatttttcggttcgcccacactgagactattttcggttcgacctagcaccgaaaatacacaaactttttaaaaataggtcctagagtcaaaactataaaagatttctgccatatgtctcacatttaaattcataacatcttaataccgtatcatgttttaaaaagatactttatcataattgattttttattgacgaaatttccggtcacatcggaataaaagacaaaatgatgaatgattgattggtctattagcagtttgtggaaaaaagataacaaaattatgtcactttacccaaatcagaaacactttcaatttgcattttattattaattaattccaaattgagcatttgataaaagtgatgcatttgtattttgaagtgttcattctgaggggcaaagttgtcttttgtcatgtcacaatttgtcctttgttttttgatattttccattttaacattccaaaaataattgcattaatgttttatatatttttttcttttacatatatcaaaacttcttttacttatcaattataattacgctaattgctctatttaatgcatatttatttatccccatgccctaaccaattttgaatttggcgaactattttaagtaattggatgatttctcggcgattaccgcccaatcgcaaaagacactcaaataatttaggtaaagtgtaaaacaattggacgaagacgcaaaatgatcgaaggtcaaaaaaagagatgaatataaatggaaattggcgatgggttcaaaggcgaaggaatttctcttcccttttccaaatttacaattaaaaaactttaacatttgattttcatttattattaatattatttgttatataatttataataaatcaattaaaaaaaagcaaaacaaaattaagatttatttgattatccaaaatg

SEQ ID NO: 109440 - DNA, 70 bp, Heterodera glycines
tggcggagaatggcactttagaagggtcggagcaatgtgccacgaaagagagggatgctggagcaaaatg

SEQ ID NO: 109441 - DNA, 102 bp, Heterodera glycines
ccccccccccctctaaaggcgattgtcgtgacggacggtgagcgcgtcctcggcctgggcgacttgggctgttacggcattggcatccccgtgggcaaaatg

SEQ ID NO: 109442 - DNA, 228 bp, Heterodera glycines
gtgaattgtcatggtaagggttctgcttcgaatgttcgtccgtccgcccctttcgttggctttcgccaaaattcggtcgccacggaatcccttcgctgtaaatcgtttgaaaatttccccatttcttcgcaacggaatgaacgaaaacaacaaaatcagcaaaaggattttgctgatcggcggcttggacttcgctggttttcccagcagcaaattgggcgagaaatg

SEQ ID NO: 109443 - DNA, 1003 bp, Heterodera glycines
aggttttagccgtacattcagtaattctttacattaacatattcaagtctccccccccctctctcctctttttccctctctctcccccttaccctcctctttcctttctttcccctccctctctctctctctcccctttcgccctctctctctatctctcgctcttctcttacacaacaacaattttaagcaaacacacgccacattttcctctaaatttaatgagttaaaatttaaaatttcataataattattacctatattacgtacatatatattgacctttcccccccccccccccatcattattaattttgaactttggttttcgagcatttgatggtttaaatagaacttaatgaagtggtagaggaataaattgttggtttaatttatgtaaattacaacttttagttgttcgcccttaaaataagtttttgcccttattttggcgttttgtccaaaatttatttaaaaaatgcaataaaaacgaaaaatacacccctaagaatcgactcaaaaaaatttcgaaaaatatacccctaagaatcaaccaaaaaattttcagaaaaatatacccctatgaatcgacactaaatttttcaaaaatagattgtttgccttagtctgaaattatttcatataaaaaagagcaatttaaaaaattacacccctaaatttggaacttttttaaccttattttcgcccttatttacggccttattttggacttttttttctcgtgactcattgctccgttatttttactgaaaaggtaattatgctaaatacagtgagcaataaataaatttcattcatcagtggctcttcgcacccctttcgtccttagtcctttccttttatttcccccctctctctccccctatttccctccgtcatttccaacgtgactttccttcgttgtatatatacctacttattaatttcattcttttctctttaaatccatcacagaagaaaaatgtaaacacacagacagatg

SEQ ID NO: 109444 - DNA, 372 bp, Heterodera glycines
gataaaaaagcattgtacaagagtgttattgcggtggttgatctcattataaacatggtcgtcataattttgagcgggctccatactgtctgttccccgtttcattccgtttgaggaaaacggggcgttgacgcgcatgtaaaggaactgagattgaggtggacacaatggtcatcaaggagggaatcaccttatggtcacacgcatagaaaaagcgcagtttgtccatattgatgttgtctacgagcttcccggtcattgttttttcccgtgaagaataaggcaagggtgttcagcgttccgtacagcgaactgccgtcctcagacaggtgcgcccagcctctacccccaccaccaccacaaccaccaatg

SEQ ID NO: 109445 - DNA, 511 bp, Heterodera glycines
  unsure (1)..(511): unsure at all n locations
aaataaataaaataaaatttattaatttgcaaatatatcaaatgtaataaatcatntggaggtaaataattattaattcaccaacaaaaattcacctattccccaaaccaaatcactggaacattaatattaggattcgctctccccaaatgccgcgcagtaagtaacaatagagatatgacaggtcaatgacaataacatttggcttcacaatattgccattgatgcttgttttcccaatagcaatttcaacaatagcaatttcaacaatatttttgcattttcctacatttttaatagataaacaattaagaaaattaattctcgatgatatttaagccccgaaatgctcggtttcattctcattctaaatttagccgttcaaatattacttcaaatgtcagtttccccgcttcttgactttatggatttaagtactgaatttaatttagttaaatgaattatattatattatttagacaattttgtagacaattttgtggatgaaatg

SEQ ID NO: 109446 - DNA, 367 bp, Heterodera glycines
agatgaagaagaaaagaagaagttgaagctgatttgttcttgaaatgccacggtgaaaagacaccgcacggcgcatgcaccaaacacaaaatggtggccagacagacagacaaatcgggcaatactatgtgaagaaacgtgtttttaattttgttaattataaatatttcaatttaggaattttttgtttttagaaaaataattcttcaattcctcaattttttatccagcggaagaaatcgcacaattcaataaaaaacattgatcatttgacaaaaaatgaaaaataattctttcatatgttaaattgttttcaggattattgatatattttaataattaattttaaaaaatgcttttttaaatg

SEQ ID NO: 109447 - DNA, 271 bp, Heterodera glycines
aaaaatttatgaagaaaaatcttcaaaaaattgattttttcagttttcatattatatttgtttaattgccaagcaatagcttagaaaaagcttctaaacccattaagctttcgaagaacaccaagattgttggatttggttgacaaagaaaaaagttacagccaaaaaacttggctggggcctaaccgtgcggggccgaactggaagggtagaccgcctgctagggttttttagacaaaaaattcaagcagggtgccaaagacgttgcatg

SEQ ID NO: 109448 - DNA, 1003 bp, Heterodera glycines
gccaaaaattcccggtttttcaacccgaaaaggtcccggtcccggttttgcgcccaaaattcccgctcccgctcaactctagttttaagcatcatattccaatgagcaaaaattaaaaaagatgaaacaatattttgaaattaaagaagaaaatcaaaaattagtgacaaaattattgctaagaaattaggaactctgcgcagatggataaagaaatttgcatcaattgactaagtcgattataatggcattgatataattagtgcccggattttaatgtaatttttataatagccacttttctttatattttgttgtgcttatttgataacaaaatttttttttcatttaatatttctccggaaacttgtcaaaaattgataaaaattggtgtggcaagaatttcattgtcactctttatagtgaaaaaatcattggctggactcaagcctcggtttttcataggcattgattttccagggttttttctatgaaaattcatactaaattcggaaattaaacaaggcacagttaaatatgaaaaattcctaaaacatttcaaatatgaataaacaaaaaaataagcaaaagctcaagaattacacagtatatttattaaataaaatattcaaatgattattttcaatttcaacacatatttattcactgtattttaattgctaattatctgtaataacacgaaaaatcttttgcttactctttcacattaatccctatgaaaaacatttttgtttaaatataattccaattaaaatgaccattaatccattattaaaaaaagagattagtaacgaaaataaaaaaaaagagatttctgcccatattttaatgggcaaaatatgaccatattgaatcagttgaaaattttttttataacaaaatgatgaacaaaatttatgccaccattcatttcttattgcttttgactgtcattgctaacaaagtaacaaatattaatatctaattattaaaataaataatg

SEQ ID NO: 109449 - DNA, 529 bp, Heterodera glycines
taatcagcaataagaaaaatccaaacgaattcagtagtcgtaccagtatttagcgcttttttaacataattgcaaaaattttttgggtttttttaattatggcggcgaaaaggacatttttctacgggcggcgaactggccgcggcgaaaaaaccccgcggcgaaccgaccccgacccgaattttcagtattttagtgtgacaaaatggcgcccctacaaagtgtccaagcctcgaaatgtccaagcctcgaaatgtccaagcctcgaaatgtccaagccacgaaatgttcaagcctcgaaatgtccataagggtaaaaaacacgaaatgtccaaaagtctaaaaagtacataaaaacccggaaaacggatctaatttagggtttttggagtcgctgagtacgaatatgacatttacattgccccttgtctatcccttgatccacccgaacatgaaataagttcaagaattattttaaatgtgtgctgtactgacgactttagatttttctattcatttggaccaaatg

SEQ ID NO: 109450 - DNA, 315 bp, Heterodera glycines
aaaaatgctataaatatagttatgtggcgttttattagtattttattatttttttttcattatataaatttgtctttatttttttttcatgaattttttttcttttaaaaggcctaatcttaaaaagtattaatttattttattttgaatgttaggtattttatgatttaagagaagaaaaaatattactaaattctttaaatttttcgaggggcgttaaaaatttaattgaaaggaaatgaatttatttaaaaatgccaaaaaaagttgaatttaaaagaataatttgaattatttttaggcccattaaaaatg

SEQ ID NO: 109451 - DNA, 282 bp, Heterodera glycines
ggcggcttttaacctacaaaaattcaaaatttttcgagaacctagggaattttttaaaacttaaaaattatagtataagaatttatgtgaaatttaaactttaaaaaactccgaatgtttgtaagaaattttgaattatgaaatttattaaacttttgcgaatagaaagccgtaatataaaggtattttatttgtaaaatttcagatgtgttgccaggaaacaaaaggactataaggcttcacaaattcattattttacacattttttttgttggaaaaatg

SEQ ID NO: 109452 - DNA, 1003 bp, Heterodera glycines
aattatattttaattgcacttttttaagtcatatggacaatccgtcagaaaatttatcaaaaacatttgggtggcttataattagagctcgcattttgagacatgccttttttgcgcactagtttcgataattaagcataaataacacattttccacttgatttgagacttctacgttgacttttattatgccttttttttttttgcctttttcgggattttcgtgccttaaatgccttttttgccatttttccattttggtgccttttttggcgttttttccgaaaaattccataaaaaatgcaataaaatcgcgaaaatacacccctaagaattaaaaaattttctcaaaaattgatcaccaaaatttatttatttttttcttgtaaaaaattttaggcttaaaaatttttccttattcgaaaaacattataaaacatttaataattatttaaatgaccaaaattaagttatttggttaagttttgcgtgttttgctccctaccaatcccttattaaaaaaattttaagtgttaagtattttctttttgctgaattgtctttctgctaatctctcggctatttttaagtgaatattttatcactaaaaatgactcttttttcgcttattttttacgatattttcagcaaatgtttttctatttatgccctgtgacataagctgctaattcattgtccgtaaaacacttcaattttaatttttgcataaatttttctgactcattttccatgagcactttttattgtttgtattatttggaaaatcatttaatagacaatgattatacgattatgaccttgattcatatgactggcttttttggcgagtgatttaattttcatcaaaacgaaatttgcagcaaaattaaacggaggcaatcaatcggagagagaaacggaggacgaataattaaccaatcagtcattcattagcacaactaattatttcaattaattaattaatttctgctttaaagtgatg

SEQ ID NO: 109453 - DNA, 331 bp, Heterodera glycines
  unsure (1)..(331): unsure at all n locations
gagcgctacatgaaaaaatcaaaaaaagtcttggagctgcttattttgtagcaaatcaaancaganatactggtgaaactttcatagttcggcaatgtacgaccaaaaaagataccgaaaaactttttttaattggaacagaagaagcaaataattggagaaaatttgttgtttcaactttatatcaaagaaaattttatntagaatgcttaaaatgcaaaaagatacaggaaaaagaaaattctctttttgaattttaaaaaattttcttaatttaattaattttaacagagtgcctaaaatagctcatactatcattgacgagaatatg

SEQ ID NO: 109454 - DNA, 512 bp, Heterodera glycines
aatgttccattcagttcaatgagcttccgcagagcgctaatgactcatttatgacaaacgcagcaaacagatgggccaaatgtggacggaaatttttgaaatttgggatcatttaagaaattattctaatgtttaaaaaatatccaaaaatcttcaaaatataaatgttacgatgccgaatgatgccgccaagaatttaatttaatgagtatatattaactatttgatttcttataaaaataaaagaagataaaaaattcatttgcattatccatttgcttctgttttttgtttttccaatacccgccgcatcggacatcgcccattttagtaggcctttgactgatcagtaaaaataaattattcattttgatcaaattattttataacagttattgttagagagaaaattccgtattcatttaaaaatatttttgcctttccctgttcatcgttattaagaaacatgcttaaaattaattaataaataattatttagtagaagaataatg

SEQ ID NO: 109455 - DNA, 94 bp, Heterodera glycines; identical to SEQ ID NO: 97954

SEQ ID NO: 109456 - DNA, 662 bp, Heterodera glycines
  unsure (1)..(662): unsure at all n locations
agtatgcagccgattttntgattgttggcgattttgacgacattttggtgcccgacgatggcacatattatgacgaatttttacgacttaatgacccaaaagcagtggcatttgtgtacaatcggttgcacacggaaatcacaacaagttgcttattcgattaacagattttacctaaaaattagagcccggtaaaaaaaaaatttcggaaacgagaaaaacgattttgctggcctttttagaccaaattaaaaaaaaattaatgggaatttcgtgccgaaaaatgccaaagagcaaattttgagaattttatgcaatttatcaatatattttataccaaaaatagacaattttatgaattagggtcctaagaattttatatgtgagccctgcccttttgaaaatgcaaaaaatgaaatcttttataaatttaaaattttaagcaacaaatccggcaaatttttcgttgctcaacacattaatgtcggcaaatgtttcaccaaaaattccactcctgcaaaagtcggtggtgaacacttcgctcaccgaatcactttgggtgcatttgccgtacattataaagccatttgccgtgtttcgggaagtgccgacaaacagcggacgaatgtttcacattcgagaatggcactttgtgggggatg

SEQ ID NO: 109457 - DNA, 726 bp, Heterodera glycines
cggtagggtgccaattttaaaaaattcaaaaaatgcgctgccagggcagaacgccaaatttgttgtcccgccaaagtgtttgctgcgcgttgctgttgtgcccgccgtctctttcatctccgtgctgttgctcatcaacaactcatgctccgccgccgcctctgcccatgcatttccgtccgcagcagcatttttggcacaacgacaacagcaacagcagcagcaaagtgagatcgatcgatcaattaattaattataaattaattggggaggggcaaagagtctcgcgcagatcaacaatcaattaattataaattaattgaggataggccgagagtctcggagcggatcaattaatattatttattaattggggatgggccgagaatctcggcgcggatcaattaattaggtaattggggataggccgagagtctcggcggatcaatctgtgctatgacggttttcaaaataaacattttttgccttttattctcgatataattcgcttgcactaagtgttttctattagccttcaaaattttaaaaaatttcgttaatgagcaacaattattcaatcaatcaattaactagttaattggtaatggtcgagagagtctcggcgggtcactcaatcaattaactagtcacacggctattaaaagtcattaatttttcaactcattaatagggcacaatgcaccgcttctcttccacctgttgatg

SEQ ID NO: 109458 - DNA, 1003 bp, Heterodera glycines
acgattaatagtcgaacaaaatttaatataactttttaaataaataagtttttttttttaatttttattatttcttttcccaattttcctttgatatttaatgtgtttaattacaagcaaaaaagctagaaaaagtcatttttttggggatcaattcgcttcccgtgcccccccccctctcccgagattaacacttcgtagtttacatcagccattaattacatcactcttaaatcctatgtttatattcttttacttcttttgtcacgctaaactcgaaacattgccaacaaaaatgactaaatatccgaatttgcatatgaaacccaaaaatatttaaattatggataattttttaaactaaattttaatggcattatttttattccttttcttataattttaaaattgaaaaaaattccgaaagtaatacttcttgtcctttatcatcctttaatttttcgccttttagcatctcttcaaaacattcatatttctccttctttgcgcgtataataattcttggaaaaatggtcaattttttgtcattttattttgtgaaaatgatcttctgccaatttagtcaagtctaatttcaaaaaaacgacagtgtccaccctcttctgctgaacaccaccttgtgaaaaaagcaaaaaatatgtaatttattttaataatttaagtaattattgatcaattatatttaaagcgaacccgagcaatttgcgaatgggtgggtatataaaaaattaaaaatgtgtgtaaatttatattccaactttatagtggatttgacgcagacccttggttgtcagtaaatataaatattatatatattataaataaagaataaatagaataaatattatattagtgtatatgttttataataatgaatcccaatattaagcgatttcatcactgactataattggtaagtcacatatctataaagaaaatattaaaatatttttaaaaaaacatttcaatttaaggccagatg

SEQ ID NO: 109459 - DNA, 723 bp, Heterodera glycines
aatgagacatttcaattgcatttttaatgaatggcacgacaattttttttgttagtgttaaaattgacgaaatttgccgacggaaaatggctgaaagtgccattattaatggtgcatggaatttgccttgtgggcacaaaaaataatagttgaaaagtgccgagacaaatggggagaaaaatagtgccaaaacaggaaacgcaatattaaaaaatagaaaaatggattcccgggggattttcgggattactgatcacaaattttactctgtttcttcaaccaaatcagaacccttaaatgagaaaattgtgttttaaaaatttaaattttcgactttttgttcgatgtcgggttagagatttgggaattggtgaaaatcaaaacaaaccactcatgatacagtctttgaagaaactcacaattttatggttaaaatcaaaaacttaattttcttatataggccaaaaaaatgttgccacaataaattgagaggaagcaaaaaaaaggcatttctgcgaaaaaaccccaagggaattggcggcggcgaatgccggcgcacttttcacgcttctcttttaattatttataaattagcggaaagggacaaaaaagaaaagaaaagcagcacccaatgtctgggcaatacaaagataaataaaataaataaaagataaaatttaaatttaaaaaaaaaacatattcttataggggagttctatcatg

SEQ ID NO: 109460 - DNA, 123 bp, Heterodera glycines
agcataagatgaaaaatgtagtagtagaggagtaacaaagatcggtgattcatttttacgagtcaaaggaattttttcatttatttaaaaagcaaggaaagcgttgtatccttttatgagatg

SEQ ID NO: 109461 - DNA, 509 bp, Heterodera glycines
gtcttgtactggtaaacctgcttatatatatatatatatatatatatatatatgcaatttattttttagaggcagggtttcacagcgtcagcgtcgtaataattcttttggttgaagctgttttttcgcgtctttttttaccgaaacattgacaatcaactaaaaaaggcaaacagaattttttattatagatttcaattattgttattagtttaatatataattcttttttatcatacaggcaggggctttttgttttattggatgtattggatctactgtgcgtgatttagtgctaagaaatggtggacgaaggaaaattttcattttatggacattaaaccttcgttttatcattgttacacatttaaccttttcattaaaattttcattgttaactgattcgaccttattttgtttatcgaaccaacaaagcatattgaattcttgcttttcgtcggtaaagagagatattaatgttttctgttttcgtaaaaagaaaagcaatg

SEQ ID NO: 109462 - DNA, 132 bp, Heterodera glycines
cgtaattctatgctatcgtatttattctactatatcctctggaaaattaaatctaccctttttatgggttgaaaatatgatttttaattttttaaaatgaattcccaattttaagccaaaaatgtactgatg

SEQ ID NO: 109463 - DNA, 53 bp, Heterodera glycines
agtcggacaaatgtgtcaattgttaaccaatttagaatttagagccaactatg

SEQ ID NO: 109464 - DNA, 619 bp, Heterodera glycines
atcagtttataaaaaaaaagttaagcctaaaatttttcgcaaatttaaaaagcaattaaaaatttttagattttttattcatctccctttttgatagtgaaagcatcagagagccttatttaacttttaattaacatttggtgcgtttcagagcacgttctaaaaaatatttatgaattaattttgcaaaataataaataattaatgaaaaagtcagaatttcgaaaaattttaaaaacaacaagcgttggcattttttcaggttaagttagtcctttacaatggagaaggcctgcaaaatttggagagattatatcgattttagtgcgctaggttcgatgaaactttttaaaatataagcctaaactttttggcctgtttaaaaaggaattaaaaatttttaaaatatttattcatctccctttttgatagtgaaagcatcagagagccttatttaacttttaattaacatttggtgcgtttcagagcacgttctaaaaaatatttatgaattaattttgcaaaataataaataattaatgaaaaagtcagaatttcgaaaaattttaaaaacaacaagcgttggcattttttcaggttaagttagtcctttacaatg

SEQ ID NO: 109465 - DNA, 55 bp, Heterodera glycines
caaaagagattttgttaatttaatttaggaattccgtgaaaagtttgccaagatg

SEQ ID NO: 109466 - DNA, 827 bp, Heterodera glycines
atcacggctttaagaaggagggacgaatgtggtgttgagagaccaatcaataagtggagtgaactttgttcactcctttcccttaggcacattccttcccacatataagcgatgccttccctccctccctcgttcattctgtcatttattccttccattgcacttcccttcgcttgaccatttatttattatatttgtgctccaaataaatatttgtcttttcttcatatctgttgttctcggacacaacaaaatttggcgcagtcagcagagcagaagcgaactgaagctgagcggcgaaagagctgagaagcagcaaaatttggattgctaattccgagttggaatagctgtttccaaaaccgtcaaaaaggagaggaagctaattccgagttggaatagctgttcacccaggtggtggcactctcaatttctggtgttaatccgggacggatatcagccagcgacgaatcgccgaatttggaggaattgaattgttaatccgggaaggataacaatttcaatcactgatcgaggccgaacagagcaagagaaaaatttgattggaaggcaagactggaaactgagtgccattgttaatccgagttggataacattggccttcatcgattttgattgttaatccgggacggataacaatttattctcactgttaattcgggttgaatagcagttgagcagcaccaattttcattgttaatccggtacggataacaattgaatcactgtaaatccaagtcggattacagttgatcagcatcttgaatttgatccgagtgggacaaattaagaaaagtccaactatg

SEQ ID NO: 109467 - DNA, 361 bp, Heterodera glycines
ttctctttcatatagtcgttttctgtcctccttctctttctctctacttcctcttttatttcctttgtcttaatcatctataaatgtctaaccaattctatttcaatttattcttttcttctcttccctctgagaatgttttcagcataagaaagaggatgttgtttttgctcttcccgttttttgggtcaacattttgccgaaaaaacataaaaaatgtaaacagtgaaggatagagaatggtaatttacatatttttagttatcctattattcattggcatttgttcttcagaaacataaatatttccaaacgaaatttaaaattataacagtattttaagatagcaaactaaaaaatg

SEQ ID NO: 109468 - DNA, 77 bp, Heterodera glycines
gagcgaaatattataaaaatattgttctttattttaacaactaaaaatatttacaggatgtccatccaaaccgtatg

SEQ ID NO: 109469 - DNA, 570 bp, Heterodera glycines
ttgtcgtgggccgagtgtgcgaccgtctcatcacaaaagcggcgttggttctgctcacatgcgtgtcacaggcaagaatcactgattgaactgttcatggcatttttgcggtcgctgatcacgaatcaccgacatttatttcgactaattccgagcccatgattcaaaatccgaacaaaaatgttgaattttttaattttgtctttttgctcaaatttgggttcgggattcagaattcggtaatcaaaattggttttgcctcgtgttgtcaccgacgccgaaaatatgttttcaacgaatagaaatcgtattaaaaatgttttcaaatcagggtcccctatggttttaataattttcaaatttaattattttatttcttgcgccgatataaagtgacaacatgcctcattaattatcaatttaatgtttaacctaattattcaccatatttgtacaatttaattcctccaatagaacaccccgctctctcaattagtgataaagaaagcttgcaaaattaattcggctttttaaaaatatttgaatttggcaccttttcagtacggcatg

SEQ ID NO: 109470 - DNA, 88 bp, Heterodera glycines
tgttgttttgcggtcgtagatacattccaagagccatatagtaacgcttcttgaagaatttagaaagagttttactgccatcaaaatg

SEQ ID NO: 109471 - DNA, 359 bp, Heterodera glycines
  unsure (1)..(359): unsure at all n locations
acacatttttaaatatactgccttttatttactctaaacaatgaaacatttataaaatatggcattttcagactgttacaaaagttataagtaaaacaaatatacagtntagtccaacaactcttaaagcaacaaacaaatgcgaatttttatgcacaaaatactgttttttacaaacaaattctctatcataaacgcatttctattatttttttaaaaaattgatacattcacattgttttttgtactatgagtgaattttgatattaaaattttgaaaaaaataagaaaatgccatatacgaatactttttgggcgatactatagatggtggatggtcaacctttttgaaaaaaatg

SEQ ID NO: 109472 - DNA, 77 bp, Heterodera glycines
atgaatttattttaggcattggtaatcaattaattaaataggacaacaaaattgccaaagaatgctctgaaaaaatg

SEQ ID NO: 109473 - DNA, 702 bp, Heterodera glycines
aactattgtcctgtcctggtcgtcctgaccttgtttgtgtcgaaaagcggtcgttcgtcatcttcccccccccccctcacctcctaaaaatgggttgttctgcttgatgatggatggtaagtggtggcgcaatgcctttgttctgttttagtgattcacgcgttttgccgtcctcatctttcaaggcccgaaattgtatgcaatttatttttttggcatgtttggaaaggattttcccaaaatttgtaccgtatttggaagccccaactactgtatacccttattatgacaccacggctatattaatatgcgcaaggttccagttatgccagagctacgaagtttttccttttttcaaattcagcacaaatggccttggggcctaaaaactcagattttctggggaaggaagtgcccagtggtgccgaaaggcgccgcaaaaaatttaagattttctgaattaaatggccatcttaaaccagcgcacaaatttttaaaaaagcacacatggggactgccagttggtcccaaatacaaaaattcaactgttttacacattaaaaagaaaaaaaagaaaatttcggcgattctgttaatccactgccggtaccgtaatttcaacactgtatattccatcaactgttgtttcaattaatatacttaaataatcaaatttaatgcaatttcaggtgtataaaaatg

SEQ ID NO: 109474 - DNA, 1003 bp, Heterodera glycines
ttattttgttagttttttgttcctcctcttcaaacgtttcttttgtacaaattgttaatgcgcgaaagagttgcgcatcttcgggcccattttcaaagaaaacagatggaggttcctatttaaaaatataatttatatattaaggtccaagccggggggggggggggggcggggccggggatccccgtgattttcatcccgccggtcccctttcctcgtttttcctattactgaaaacggggatccccgcagcccatctccgcaggagaaaatacaccctaaagatagtctggtagacaacaatgaataaaaaattataaaaatcaccgaaacaaaaatatattctttgcttgtttttagcatttttccttattgtaaaacatcgtaacttaattttttgggaataagacagacttattaaaaaagatgaagacaaatttttatggatttaagaaatttatcttttaaaattctgctaaaggcagcttttcggtcaaaatctgttaacaaatcacatcaaaatctataaaaatttccccggcccgccgataatattttttcgaactaaaaataataaataaaattgcgcaagttcaaaaaaaaaatttttttttcttcagttaaatataaaatttcttcttctccgttcccattgaatgaaaataaatcatagtttaatgattaatttatggagtaaaaagaaaattatcggttttaatcagggcggccaagtgtccttatttgtaagatttgtccttatttggaggtgccaaatcttagaaattaaaaatgtccttatttgtaagatttgtccttattttggcacgacctccttgctttgtgcttattcatggatttgaaaataaaaatgcaaaaatttaatatttttttaattacatattgttttttattgaagcgaatatttgaattaattcgtttttgtaaaaaatttcatttttatttttctttagtgtaaattcgttaattttaaatgcccaaaatg

SEQ ID NO: 109475 - DNA, 300 bp, Heterodera glycines
catgctaaaatagaagaatatttgtaatttttgttttacattagcttttccaaattttgaacaaaaggcgtgcgcccggccaaaattttgggccggaacagcgccgcgcggtaaaactggcttttttgcatcgggcggcacgggcgcggtcaattgtctatggccggtctcgggccgggtacttcaaaactccggtcttaaaaaattaatagaataattaattttgggctttgtcattaaaaatgaattaaaaaaacaactataatttgaaataaaatttaaagtcgttcttaataaatg

SEQ ID NO: 109476 - DNA, 419 bp, Heterodera glycines
ttcaacagcttatctacaaacatatacaatttttttattattttttaataaattttcggctgcataatgacataaagattaatcgattaaaaaatcattaggccatttaagcgtaggcgaaatatgaaatattgccaatgcttacgtgtagttttaatttctatttgtttaaaatgggaattaaattataggaccgatggtgaaatgccccaatagcctcggttttaatagccaaattactccgctctccggataaatgtgtgatgctaacattcttatagacggacgatatgagaaaagttaattaatgatcgcttgtacaatgaaataaaaatttggcggagatttatgttaaaatagaaaatatttttagtattatttaaaaatttttaaattaaaatcattttttagcaccaatg

SEQ ID NO: 109477 - DNA, 1003 bp, Heterodera glycines
taatttttatttcaaataaatttcaaattaacaaaaaaaaatttcatgacatcactatatgtaaaatttagtgctacaaatataaatttctcatggcgaatatcgattgtaatgcttcatgtattgatttatttattctttattattaattcaattataaattatttgtatttcattttggtcaaattttgtatcattctctcatagcattatttttcttgaacatgagtgtttcttataattttaaggcctaataaagaaatatttgattttttggaaaaaatattcttcgtaaagggtgagaaaaatttaattttcacaagaaatttcggtaaaactgttatatccgcaacattcaagtttccatatcttgtgataattacattgacctactttctcccggcccagtcccattataaacttgtctgtctgttcatctcatcccaagccaatcctccccctcatttccaaagttatcgtgccattgctatccctttcctttaataaatctctctctaaaaacagtaatttaaaatggctttaagccttaaatccggggacataacaacgggtccttttttcaaagcatggactcgtccaataatgagcagcagcttcaggaaattgaggccttggaggtgtagctgtgtgtattataatttgataactttgtttaaaccagttaaacattatttagattactacctatattaaagggcgaaccgtcaccgacaattacttggagtaaagatggggaaattttggtggagacaaatagggtgactatcaacaataaaacccaggtgagttcatcaggcattgattttagtacaacaagcagcagaacggttggaacttctgtcccaattagccatcaaacagcggagagtgctaaagggcggccatggcagtaaagtaaggggaagaggaggggataaacgtgggaaagggtaattgatccattaattcatccaagcattgatttcaaactaacctaattatg

SEQ ID NO: 109478 - DNA, 290 bp, Heterodera glycines
aaaatatttgtagaattttgtataaataaaattttattaataattaaattacaggaaggattagctttgaatagcataagcaaattattgtgcttaattaaatgtttatgttatttaatatatattttttgtcaattaaaaaaatactaattgacaataattagcataatcaatcctgtaactctaattattccggattagcattgaacagcttaagcaaataattgcgcttattaaagcacaattatttcatcctcattactctaatagtccaattaagaaatcaaatg

SEQ ID NO: 109479 - DNA, 205 bp, Heterodera glycines
tgtggtaaaggctttgtgcccaaaccaaatccatcaaatttgagctggtctttgttgtgtactaccagccgggctgtttgtgccaatcaccaaatttaaaggagctggtcaagtgtgttttccagccgagctgttgtgctgaaaaaaggactaagtgtcttcaaaaaaaagtgttttaaaaaaaaaaaagaaattttggaaaatg

SEQ ID NO: 109480 - DNA, 214 bp, Heterodera glycines
agccaatggtgtcaaaggtgttgctgatgcgtggcgcctaccgcgaggcgctcgacattctgacgcgtgagactcgcttcgccgaactgttgtacgcacacgcggcacagcttgcgttggccgagccgcgtgcgctcgttgacgctttgttggcactacagcagcaacatgcgtcgttggacgtgttgcaattgttgcccgccttccaacaatg

SEQ ID NO: 109481 - DNA, 62 bp, Heterodera glycines
tattagtttttaaataaaatatagtaaacatatattcattttaacaggccaaaatgagcatg

SEQ ID NO: 109482 - DNA, 416 bp, Heterodera glycines
gaaacaatgaaaagcaattgaaattgaaatgggacaattgggtaaaaaggggggggggtaattaaattaagcgaagggtcattcattccgacaaaataaagacacataattaaactaataatggtaattaattaaggggatttgcccatcgacgagacgacaaaaacgaaaacagaagcagaggaggtgaatttgttaaatttaaataaataattattaatataaaatataatgattttgccaatttaaaaattcgttttccattttcgaacgaaacgacgccaattccaacggcagccgaagaaggcgaaaagggagggaatgaagtgaccgaaaaaagcattgagcaaacgacgggacaaagggaggacgaaacggcggagaaaaacggcaaaaacagcggaaaatggcaaatg

SEQ ID NO: 109483 - DNA, 514 bp, Heterodera glycines
  unsure (1)..(514): unsure at all n locations
aaaaaatcagaatttgggactcaganaattacaagattcncacccncctgaagaaatttntacaaatnttcctcgaattcgtcccccaaaacgaaaatataaaattttatgggtacatttttgaatataggcaattttcataacaaagttcactcaaatttccaaatttttttcaaaaaattttctcttgggaaaattcccggttggtcccggtctcggcttttctctcgatcccggtcccggtcgaaaaacttggtcccggcttttcgggtcccggttttttgtcaaaattcccggtcccgaccagctctagatttaatcacaaaatgattgactcgttttgatgatctttaaggacaaaatcgaaatttgagaaatttattttgcagaaatgttatttttattttatttatgctaatcttaccaactggcactcgggtaagcaataatgataagcacgaatcttaaaaattgtaattggtattcaatttcccctacttacttgttgattatg

SEQ ID NO: 109484 - DNA, 309 bp, Heterodera glycines
attgctgaaaacctaaaaaagggccaaaatatctagtcctcaacatagttccaaaattaaaatcaaattgatcaaaaataccccgaattttgcaaaaaaaaaatttaattaaaatatataaaaatcggatccttgataatttcgatggaatttttggaaatcggcgttaattttaatttgcattttattttaaaattttattttccccaagatgctcaaacaataattgttcccgatttggttatggaaatggcaaaaatgcttcagaactgggactggaattatgtccatttcaatattacaaaaatg

SEQ ID NO: 109485 - DNA, 392 bp, Heterodera glycines
tttgcaggctaacaaatctctccttagttttaaaatcgtttgaataaatattttagcctattaaattttgggattatttttctaggtgaaattgaagaataaaattgacaaatttttagagagatttgtccgtattaaatttttatttattttaaaaaaatttttaagcatgcggacccgaacaaaactgcgccgtgtttttacaaattcacaaattttgtaaaagattggctttcttgtgttaatgcgaaattggtcaaacaattaagttaatttttaatatttttttaattttaatgctttaatttttagttgtttgcccacaaaattatatgttaaaataacatcgaatgatttcttggaaatattcgtaaaaagtgtcggcgaaaatg

SEQ ID NO: 109486 - DNA, 174 bp, Heterodera glycines
gctaaatgaaaacatatacattggcaccgaatgcttttggtcaccatgaattttgctggtcccatccgatgtccatcaaatagcgcgtcgctgtccatccaaaatgttctctcagctgcgcaatttcgaccgagtcgaaatagaacgcaaattgttgaagaggcatccaaaatg

SEQ ID NO: 109487 - DNA, 217 bp, Heterodera glycines
  unsure (1)..(217): unsure at all n locations
taattttatttgcgtttgcgacgaaaaaagctaacaaaattagcttaaatgacagttgcaaaccaaatattccgtccgaatggcaatattttattttattttatatntagcttttgttagtgtttgaattttcctttaaacaaaattttcatgaaaatggttgaaacatctcaaancggcaccgaaatcagcggcactttcattttcgttgcttatg

SEQ ID NO: 109488 - DNA, 713 bp, Heterodera glycines
tcaccctcacagacttcaccttccacctgcgcaattggtccttcgacacctcgtgctctcataacagggtgccggtggacatccataatttgttgtgagggcggtcattattgttgtaggcatttttcaattcccatcgccgaaggctccattgtgcaatatttatgggatctaatagcctgattctcccctgcagttttcatttgttataatcttctaggaatttcaaaaaaaaaactaacttttctttattaaggatattatagccttccctctcccccccccccaatccccacagtggtttttggcatttaacccattgtttgccattcttcccaggccatgtcggcagattcgcgtgtcattcgctgttcggcggtgccactgccgagttgcgtcctcagttttcttcgttggcaatttcagtggatgagattggcacttcggaagcgaaaatcagctggcgattattgggaaaaggcacaaaaaatggggagaaaaacgcgcaaaagcgacgacggttttatgggaataaagtgagaaaataattaaaaattaaaaagaaaagtattctcaatttatttgtcctgcattcttaaaagacttttaaatttcattttcagtcagaatttgcccaaaatcacaatgtttttgtcttggaaattcgggcaaaaagagagcgaagttggcgcactgtgaaggaattgcgaatg

SEQ ID NO: 109489 - DNA, 125 bp, Heterodera glycines
gaaataaacaaaaagccaatggaaatggtcagatttcctaattgagagggcaaagaccgaccgatcggataaacaacaaaaaacgatgggacaaaaaatgggacggacagacggggaaaggaatg

SEQ ID NO: 109490 - DNA, 409 bp, Heterodera glycines
ttgataagtgtgaataaacaatataagtaaaaagacttatttaatatttacaaatttaatgccaatttaaaagcaagtatttttaattacaaaaaacaaaatttttctttacgaatgcaaatgccattgtttttaataatcaaaatataaataaatatttagttgaaaataaaattcaaaacccacacaattcaatttgctatagcaaaatatgttgaacaattgatcgattcgaagcaagattataaaatgatcaatttaatcaaaacctaaaaaacaaagaaattttatttaataaaattatttacccaataaatcataaattatgagtctataaaatatattttcatcaaaattaacaaattgctttaaatataagaaattggaacaataaaattagctaaaaatg

SEQ ID NO: 109491 - DNA, 891 bp, Heterodera glycines
tggggggggaggtctgggtgaccgacccggtcgcttttctcaaatttggacaaatcgccaccgttcgtttggtccgactcgtcaccacccgtacaccaacgctcgtcttccctatcgcggccgtggcaatcctcggtttgcgaatgaagcaaacagtagccgacgctgatgcttcttcctgcgcgaaccccaccttttggagccgaataattgaccttttgcggcagagacgcctttttccataggggcggggtgtagtaattaagttgacttttgacctctcattatatatttaaattgtattggcattttgttgattaaattgttccctccctatttttcttttgttttcgttgttcgttgttaattttaattttgtggttttcatctccgatattatgaatttctcttaaagattggttgtctttgactttgttttgatttgagtttatttggtggcgacagtccagcaaattcagtgcttgtttaagttaatttggaatttcgtcctatttggcgctcctggtaaagcaggtaagaagcactcgaattttgttttctataagtgaagtactgggtgtaaaatcgaaaagtaagaacaaacgaaattttctggatatttatcagtctctgggcgagacgataatataatttggctaacggattgttggattacaaattttaaagaaaataaataaatctctcgccattgtcacctgggaggtgcagcaaagcggcatttatcggaacgatttgacacctgagcggttttcaacttgtttttgaagaaaacggaaattttgaactacgtaatttggttgaatttgcagacgacctgggcggtggaaattttgaattttggttataaattgattttctgggagaacaatg

SEQ ID NO: 109492 - DNA, 131 bp, Heterodera glycines
tttagtacgggaatgaaatatttggagaatgaaaaaaaagaatgaaaaaaaacctaaagtgagacgtgacaatttttggttacaaccccatcagcagcaaaagtgcaaaaattgttggataaaaaaggatg

SEQ ID NO: 109493 - DNA, 1003 bp, Heterodera glycines
aattaaaaattatttatttataatatcaagttttggcataaattcttacaaaaagtgccagttaatcggctgagcgccattaaattacttaattatgctgttttcatctatttaaactagaaatcgaaggaaaattatatatttagctgagaattttaccctaaacaaattaatacaacatgaatctattcaacatttagctgcatccgtaagaacgagcgagtcgctctcatcatcacctgagcgagaagaacaatgagtaatatttattaaatattaattacctaatgatttaatctataaatacaaattttataggaattaattaaataaaattaatttttgctattttaattttctttgaatgcgcatgacaatgaatatggataaaaaaatatcaaaaacgaatattaaacatgaaattagaaaaaagagtaatttatttagtaatagcatagtagttagtcctacagattttggcccctaaagttcggaccctcttgactgcaactcaatttttatcattttttaattcaatgcgtatggaattaatctccataagcccttaccgtttaaaatttttttccccaaggaaacagataattgataataatttaacagaaaaaaaggataaaatatacaaaaagatcttaataattcaagtaaaaaagcaataagacaatagcaccaatggccactgtagtggttccccataaatttaaagaataactagcacagtgagaaagtaaattttaattgatttttatggtaaaaaatcattaaaaatgtaaaacaaaaaataacataaaatcaaattaaaaaaagagaaaaaacatcctataatagactttttttttgattggttcacgaaaactatatttttttggtaaaagacgttgaccgcccctcgtattgccgactctgcaagcaatttcatataaaagaagacgacgacgacgggatgaacccctgtacgaaatgtttcatccaaccattaaaaatg

SEQ ID NO: 109494 - DNA, 1003 bp, Heterodera glycines
attttatttttttgaataagacatcattttgataaatttggctatgtgaaaatattgtacaacagaaaaggaggggggattgggagaaagcacagcaaggtcagtgtgtgtggaggaaagtgttcactaatttataaaaatcaacagacaaatgaaagggagaggggggggggggaaatgggagttatgcaatgcaagcagtaaaagcgaaatttattttgtcttttttgtaccacaaacaaatagcaaatgggaattgggaatgatgggaaaggcaggacgcagaaagagaagcattgacgcagcaccaaaaaaaagagggggtgggtgggcgaagtaaacattttgaaggggggagaaatttccaaaaatacaaaacaaaaacgaaacgatcatccaaataataataaaaaagcgaaaaaacgacttttaaatgcattaaaatgcagcagcggagacgcaaaaagtaattagtgcttattttgatcgcaaaataacagaaaaatagacataaaagggccattattttttgatcatggctgtcatctcttttatgtattaatcaaaaatcgggtaatagttaatacacaacatgcctatattatgtacatatgtatacattgcccgtcccgttgccaattgtatagtacgtataataggtaattaattgaatgacattcattgttcacattatggcatgccaaaaacattaaaattcgtgaaaataatggagtttttctactgattatgagattcctctctttttcttattaattattaaattgttttatatttccccaataattttttctaatgtcaacaattaataatttctctgtcgcttcttggccattcgtttttcttccctccactttcttttttctttctttccttcctttgtatgtacgttgctcattattcattatcatttatttaattacccagtttctgtacaaatattaacattaactttccgcaattttaggatttcccaatcactatg

SEQ ID NO: 109495 - DNA, 68 bp, Heterodera glycines
ttacccaagtgattcctattcaccacctacctgctgtcctgttgggctagcgttggcaccaccaaatg

SEQ ID NO: 109496 - DNA, 196 bp, Heterodera glycines
  unsure (1)..(196): unsure at all n locations
cctcggtgcntgaatactgtacatttgaaaattcagagataaatttatacaaaaaaatttacaanccaacttatattaatttttattacaaaaaaatttaaatttgatttatattctaaaaatgaatggcagttattctagaaaattgataagtgtgttttttattgtcagattggttatttttattttatcgatg

SEQ ID NO: 109497 - DNA, 1003 bp, Heterodera glycines
aaataaactttgtaaggtaatccaaatttttggcaaatatacataaataaattaaactattacgaaaacattcataatttgatttgcattaatgatttaaaatattattatttgaaaaataactaactaataattttatcaaaaattctaaaataaattttagccacagtgtttttatcgggtttatcttttaaattagaaacaataattctcttttatttaacatctaaattaaaagagacattgatggtcaagagttattattgactccaatattcatcatttttaagaagtaaaaaagttataattaaagaaaaacgacaaagaataatattattttgccaattcaataatgatgtaatccttgtaatggatggagtctcatgtgaaaattctaaatagatgttaaagcatagaaatgtgtaaatgtattaaaagcaaataaataaaaacgtttataatgacaaagcaaattcaaatgtggtttaaagtcatttgttccacggaatatgtatcattaatttaaaagaaactgacaaaatttgtaacttataagccaaattggcttttatttacagacaatgatcaatataaaaatttcaaccaaaaaaaaatatactttattaatcctaatactgattgaggctagagtataataatttcgaaaatatacatattccaatagcagtagatttatcaacctaataatatgcaataaagttagagcagaggtcgcatttgtacttatttttaagaaatgtactgatttggagggatcgaatcttaagaatataaaatgtacttatttttaataaatgtactgatttgagctcaatgtacttatttttgtcttatttttgagatttaagagaaaattcaattttgaatgtctattttgaaataaaataattttatgaagcgtttttattttaatttattgaaaattttcatccgaagacctatgtactatataactttttagcttagattattattattaatg

SEQ ID NO: 109498 - DNA, 184 bp, Heterodera glycines
cctgaaaaaaattaaatataaatacaattgaataatgataagaaatatttttttgttaaaataaaaaatatataataacaaatataaataaataactccatatttttcttgaaacaattaggtaatatttaatggctacttattttctggctttctctgttggttttaatgccataatataatg

SEQ ID NO: 109499 - DNA, 81 bp, Heterodera glycines
ggtgtgtgtgtgtgtgtgtgtttgccaattctttgaatggaacagagccaaaaacaaacaaaacaaaaaattttagccatg

SEQ ID NO: 109500 - DNA, 225 bp, Heterodera glycines
agtgaatgaaagagagctttgtttgtgtggacgaatgccatttacggacaataaaattatttcttaaaatgtcgacaacccttaaaattaaaaacgtgcgattaatggtaaaagggggagaatatgctatcttgaaagcaatatttgtatttaataatataccatctgaaattgatggacctataatttatgcatcgcacagtctcgccgaaatttcgcaatatg

SEQ ID NO: 109501 - DNA, 140 bp, Heterodera glycines
acgccctgccgacatcgaactcaatcagctcgacttttttttgttttggttttgaacaaaacaattttgattgttcaacctttcagttgttgttcatcaattgttaatcgtcgtgagcagtgagcatcaaaaaaaaaatg

SEQ ID NO: 109502 - DNA, 696 bp, Heterodera glycines
atttagcggtcaattatgcgcacttatcgattggcaaacggtccattggggtaacccttgtgaatacattggccgtctgcttgcgctgaacacgacaaatgaagtggccgaatttatgggcggaaaggcaccatttacattgtgtagttgtacattcagtattcactttgatgcagatttgttgacacattattagtatttaagccatgttttgtagttttaaaagcagtcaacagagaaaagctcaaaccgtgaaaacttccgttgacccacaatttattaacgcattgccatttacaaattaaccctgccatttcatacgcagttggtgtttggtccaatttttaagagacaaattcactgttttaatcgtcaaaactttgaataggtatgtatacgtacgaattcccaatatttattgaattatgttttagtttcgcttttgtatggttggtccctttcttttagtcttgtgttcgttttcgaaagtcccattttgtcttatgtttcgttctttaacctcccccgccccctcctccccgccggtcctcctcacttttccttctcactttcctttgtcgtcatcattcgcgtgatgtcttctcctttttgtcaccacgtgcttttttaatttattttctttacagctgcttattctaggcaacgaattgttaaaccaaacaaacggctgaaatg

SEQ ID NO: 109503 - DNA, 67 bp, Heterodera glycines
ggttcggccaatttgaatttactctctctctctctctcattatcggtgcttaattcagccctcaatg

SEQ ID NO: 109504 - DNA, 114 bp, Heterodera glycines
ggtggcgaaatgacaactctctgatcagccaatgctttcaatgttttgatccatttgcaggaattggcggagctgaagcaggaaccgatcacgggttgcaccgcggcaccgatg

SEQ ID NO: 109505 - DNA, 1003 bp, Heterodera glycines
aaatatttggcattttcattcaataggtgaaatttccaatcggttcgttggcatgttcaacaaaattctctggcatttctaaatgctttggcatttccaatcaaattccttggaggacttttcaaatcaaatatttggcattttcattcaataggtgaaatttccaatcggttcgttggcatgttcaacaaaattctctggcatttctaaatgctttggcatttccaatcaaattccttggaggacttttcaaatcaaatatttggcattttcattcaataggtgaaatttccaatcggttcgttggcatgttcaacaaaattctctggcatttctaaatgctttggcatttccaatcaaattccttggaggacttttcaaatcaaatatttggcattttctgctctgctgattgaaccctccttctctctttccttaaataaacctttcattttattgccatttgccccaattttcgccatttgcttttggtagcccaatttctcgcgcataatttatgtgttaaatttgctattcctcccaaacatttcctcccgcatttttgccgctccgataatttcgtcgatcgtggcgaaatacattaaataatcgccaccaccgcgagttccaaaacaaattaattaattgtgaaaacttatttgctaattcccttttggccaaattgaaattatgggactgatttggcacatttggccataatggcataaacattcaaattccatgttttgtgtatgtggtttttctttatgcaaattagagtccggcgggatcgggactcccgcgggattttacaggagtcccgttcgggactcccgtcccggaaattttgaactcccgctcccgctcccggaaatttttttttaccggactctaatgcaaatcaatggcattttttatcgaaacgatttcctattttagctccatttctgtcctctcaaaaatccttttaatttcccccgctttttgttctgctgcccaaatg

SEQ ID NO: 109506 - DNA, 386 bp, Heterodera glycines
ggtggttttttttcgtttgttgatgtaaaagaatttaatttcagtgatttcagtcattattttttgaattttcttttccttatcaatgaatgcttcgttcttttcaggatttgattgttcatctggcctcatgatttgatttggtctttactcgatttatgacgaatttcgttgatttgtactgccttttttattttcagtaaatttttttatttcaaaatgatttattttgtggagcactagtccatttagaacagaaagaatgggaaaataaggggacaggctgatgagagcgtttttcttatcaatgaatcaaaaagttgacaatttgaatgaattttttcttttggtaaacatcaccatttttattttcatttcagaaaatg

SEQ ID NO: 109507 - DNA, 974 bp, Heterodera glycines
  unsure (1)..(974): unsure at all n locations
ggggaagggacggacgagcccggtgaagcgaagccccgcaggagtgagagactcctgcgggggaagaccgacgctgggcggacgacgacgcagacgctgacaaatgagcagcagaagggggaggggaaaaccgtcccgatcaaatccnccggactcttttcacaaatatatatttattaagcagcagcagaaatgaatgaatggaaatgtggaagtgagcatatgtgagagaaaaatggtgccctttttataggccgaaaaatgcgagggggcggggcccagaggaaaaaacttaattggactatcactaggaaattcgtgggaaaaaatggctggcgatcgataagatctgtcgccgttggcgacaacttttatctttttaaaatgtttttgatataagattagagttgctacctttagaaattatcgtgtcggggatcggaaatcgatttgggaatagtcaaaagtttatttgatcaaagaaacattcttttttattaattagtagagtcaaacagctcgagcagagccggaccctgtagagctgttttaaagtgcgcgacaacccggcccagtgaaatagtcatttgtaggcgtgggctttggacaaattttttcaaaaaagttgacccgctgttcaaaaaatttatttgcttgttttaaacccttttaatttacatattttatataatttttaatatatttttttgttaatttgcttttaaaatatttccattcttctattatttttaaatttatcacagtaaaacgatgactctcataatgcgtcaactgttcgcctccttgttcttccttttgcttctcattttgctcatcactttttccgatgctcaattatttggcggatggggtcataataaaatttagaattatacctaattaattacaatatttttaacaatttacaaataatataaataaaatttaaataacaaatatttattgtcaggatg

SEQ ID NO: 109508 - DNA, 297 bp, Heterodera glycines
tgtagggaattttgtgctttaatgagcagattgtttttaccaggatattttttcagcccactagaaattttttcccaaaatttatgaattttcctaatttcaagtcattttgggcttttcagacccccatgaatgagtgatctgattaacttgtttaagtgacttttttgttctgcacaaaagctcggctagcagtaattatttcaagagtcaaatttcttagccttcgcttagaaaaagattcttctttttaatatctttcgaataataaaaaattattcgatttagttggaaatg

SEQ ID NO: 109509 - DNA, 420 bp, Heterodera glycines
ttatcaaattgttaaccataaatatttttgaataaacacttatttcatttaaaataaatacaatatttcatttaaatttttttttgtaattgagtaatttgattaaaaagttatcaataacaaattaatgaatgcaaaaatgaaaatatataaaaattgacggcattaaatcgccggacggcgaaacggcaccaaaagttcaaggaaaaggaattgaaatgccaattccgtcatggaaattcccaaattttaatgaattgttgggcaaggacaaggacaataatggtggaacaatgaagagagaaaaacgtaaatgaaaataaataattaattaactgaggattaaattaaaattttgctgattttgatggacaagtcccatttatgccactgatgatgccagaatttaatccaatgatg

SEQ ID NO: 109510 - DNA, 94 bp, Heterodera glycines
ggtcggcaacagctgaaggtcgtcgaaaattcatttttcaatttaaatttttcaattttaatcataggaatttcgtgaaaaatttgtcaaaatg

SEQ ID NO: 109511 - DNA, 80 bp, Heterodera glycines
cataatttgagtgtatataacagatatacaccaaaatattaccaatttttgtgaatataagccagtattttggaagcatg

SEQ ID NO: 109512 - DNA, 433 bp, Heterodera glycines
gactttggattcaaggaacaccagcggatagggtaagtgtttttaataaaataaattaaaatagaaaaaaaacttaaaataaaaaaaacaataaataaatttaaaataaatacattaaatttattaatgaagcaaaaattctttaaagaaaaaatgaaaaaaagcaacaaaaaacctaaaaataaattaaaaatattaaaaaataacaatttaatgagccaaaataaataaaaattaaattttaaaaatcaaaaaaatatatattaaaaaatattaaataaataaaaaataaaatttaaaaaatcaaaaaaaaattaaataataattaaagtaaagaaaaaaaagaaataattatttttaattaagcaaagcagcaaaaaaaacagaaaaaaaaatttaaaaaataaattaaataataaagaaaaaataaatg

SEQ ID NO: 109513 - DNA, 261 bp, Heterodera glycines
ttacgattaggaaatagtttatgattataattgttaaaaaacataaaatggacctgcgaaagaacgcataattattgattgattgtgtgagtgtgttagcgcgcagcgacctccagacgggcagtcccttcttaatcgataggccacgcccatccagaaacacatggactatagagtagtggttagagaaagataccaaagggcactaagttaaacacacactgtaaccccaagccaacttattgatttttacagactatg

SEQ ID NO: 109514 - DNA, 113 bp, Heterodera glycines
aattgattttgcatatatctgataggttttttgccgtgttcgaaaggcgtttcccgaatggcaccgtacagcgattgttgcacatattgacggacgagaattggcaacaaatg

SEQ ID NO: 109515 - DNA, 198 bp, Heterodera glycines
tctgaagaggaaaagcacaatgaaatgagaaaacagaaaaagaatgagcgagggaaaaagggaagccatgggactgaattggccgtagcgaagtcaatcgaaaaaacgaacatttgctggtttttcctcatcagttttctgtacgagaaggaaagggcgtagtaagtgcatagccaacagacaaactcaggccaaatg

SEQ ID NO: 109516 - DNA, 71 bp, Heterodera glycines
aacgcaattacagccaaatcgagaaagaggctttggcactcgtttttgcagtgcaaaaatttcacaaaatg

SEQ ID NO: 109517 - DNA, 427 bp, Heterodera glycines
agtggaaagcgatgatcagaattatgataccgatgaattggatactgatgatttggacgaaatatcttcagcaggtcaaacagagtaggggattcgcggattttaccgatgtccgtcgttttctcatcctcgggagcggggatcccggtccatacctatcccgcagaagatgtagaaaaatttatcccctaaaaagttgcaacaaaagtgagtcaatatccatatatgaaaattcgggtttcaaataaagtgttgatccacttgaaattccgattatttatttggtctcttaattaaaggagtttccttgttcttagcatgttttgtggtattttattaattctgatgtttctttttataaatgttgtttttggtttagccggagtccgaggaatacaaggcactccagcagctccacaaaaaaatg

SEQ ID NO: 109518 - DNA, 414 bp, Heterodera glycines
ttagtttctcttttgtgccggttcagaaatgccgcacatccctttgttatttgaatttgaccccgttcgcatcggtcaccgcagcgtcggaccttggctacacagatggccacgatcccgtctcatatacaagggcacatgggaaagtcgccctctttttatttcttccattcactcgcccgcgcaccccaagaaaatgaactccgaaagacgtcgcaacgagcgtgagcaactgcgtgcacgcctcagcttattggttgacgaaattgataccgtcgtccaggggctgatccacaactaccaggacgacgggctggtggtcctcgctgtgagattttttttggtcttttttttttgattattatttgaattttaatcttgattgaacaggcgccggatgatgggcagctgatg

SEQ ID NO: 109519 - DNA, 144 bp, Heterodera glycines
tgttgccattgttggttatattggaacattgtgtggcaatgagtgcctaaagatttatcaataaataattaataaggtgaatttaagtgtgttatcattaaaacttagatagaatagctgtttcttacagagctgtcacatatg

SEQ ID NO: 109520 - DNA, 609 bp, Heterodera glycines
aatttttgagtctttcacatttttagccgcgatgcgcgatgtgcgatccgcgattcgcggcgttttttttttttgcgcgatccgcggtgcgcggccgcgggatttttctgtgcgcgctccacccctgttacttagagcgtttaattgaaaaacaaaaagaacgcttattgttagttttttcaaaaaaattttaaggcatagaagaacacagaatagggaaattgatgcataaatttccggatttttcgttttgtacactattttggatgcaaatctaagctaaaagtacatatgtctttagatattccccctgccctttaaatttcaatagaaaattgcttttaccgctttcactcttttcaaatcggctttatccctaattttaattgttgcaattaattttaggggttacacatttccctttctcctctttcctctctgttgcgctatcacaacacaattccaattcgtcaacagctttttcttccctcatcgacgagatgacttattcaaattcggtgatcctttctccccacccatttttatgtaatttttccgccatttcccccccccccctcgttcagcgatctcgtcataaaacttccgatg

SEQ ID NO: 109521 - DNA, 168 bp, Heterodera glycines
tcttcaaagtcaacaacaacgacaactattgcctcttttatgctctggaattaatgcgcttctactctttgtataaacgcggaattatatctgaaaaaagatggagatggatgaacaataaccaaactactgttcttcgtcaaaaagtactacttttactccgcgatg

SEQ ID NO: 109522 - DNA, 570 bp, Heterodera glycines
tagggcactggttcccctatagaaaaatttttaagatttttgaaaaattgatgtttatcattggatatatcatttattgacgcctgaagtgaaatagagcagaaatttaacacttgcccatttttggccaattatgttatgatttatttccaaaaaataagccttctccctaattaaaccaatttttattatttttatgcattttttaatttttaataatgttttcatctcaagttttttttgcccttttcccaaatctttcccccgcagttttgcccatttttgggtcaccgtttgcccaacactaaaaggcaacaatttgaataaataaaagagaaaaacggaagaaaattatgagttattcaaatatttattattcttatcttttgcccatcgcatttttctccaattttgggtcatcgttttgcccataaatttatttactttttggcctataaatatgtgcacaattacagcggctatagcagaatttagccttcatttgctcatgttttttctgaatgcattaaacaaattaaaattttaaatttagattttaaaattaaaatg

SEQ ID NO: 109523 - DNA, 490 bp, Heterodera glycines
  unsure (1)..(490): unsure at all n locations
ttttttgcgttaaaaacccttacatnttgtttgtatttttttctctatcgatatgcaaaatntggagtggatctaacgtatagaaaaaaaattaaacgtagcgaagtaaattcggtttttctctattaacagagataaagaaatagtacgccaaaaagagaatgtttttttctctgcactctctatttattggttcatgtctcgttttttgaaacggtgtgttaagctatggagaatccaggaaaaaatatgtatttacataaaaaaagaatccctgataataatattttagctctcttctgtctctccatctttgtcttattctatcttgttccttctaataaaaattctttttcatcatatttcacttcaaacaaaatttaagtatcacaatcagtctcaaaaaacatcccaaatagcattgtcatcaaatttattaaaaataaaatttaagaagcctaattccttgaattaatcatctcatacaatg

SEQ ID NO: 109524 - DNA, 1003 bp, Heterodera glycines
attcaattcgcttctccgtccgcccgtccgctgtttgccatgtccatttttaataaagatgggctgccctgtgcccaatttcatcctttcccttcccccctcccctcgtcatttcctgctgcaacagaagcaccagcgaaagcagcagaagcactgagagtgtcccctctccgtcagtcgcccgtccaaattaaattttacccgccaccgccggtgagaaaggaagggaatgaaatgggatatggacgaaggaaagaaaagggggaaagggaggggggggggggggagggaaatgccggtgccatcgaaaaagggagggcaaaaagagggccaaatctgtgcgactgatgcgaaaatggaaaatcaaacaaatacatttcaacagcttaataagagaattagcaaaggtttaattgtcaaattctgatcaaatttaggcgcccaccgccaaagccaaacagttaattattattggggataaacgaaattcatcaaaatcaaaattcatactaaatttataagtatatctgttatcaccaaaagcgaattattgatgaagtttgaaaattgttttgttttcagaaaataccgtataaatattcaattttgatttaaaaatcttagaaacattatgccattaataaattcaaaaaggaaaagcataaaaattaattaggttcaagcacaaacaagcaaaagcatcaattaataaatttcaaattttctctcttttaaaggatgttaattggttcattaataaacaacaaaaatcgacaaattttgcagttttcttccttttcttcaattttatttaataaaagccgcaaaaaacaactcaattttcttcatttaaattttttaaggaggtaaaagagttaatctacacttaagtatcaccatttacctcatttaattcgttaattttttgcttttcccataaaatagtacttctgcttcatcttcgtgcgtcgagtcttttcccgaatggcggcatcaaaatatg

SEQ ID NO: 109525 - DNA, 57 bp, Heterodera glycines
aatggaggtgtttcatgtgtcaacatttcgcttcaggccttctcatacaggccaatg

SEQ ID NO: 109526 - DNA, 267 bp, Heterodera glycines
gacatcatatttttgtttgttttttattatcttttacattacatgtcatggaaattcgtgcatcacaccgttccatgtaataataataataatttttaagccacccaacgcgccaatgaatcagacgacagcgtggcaggtgctgtcatctccagcggcggtagcaacgtagcatacagtgtaacagaagctgcgttgctgaccaacaccaccagcaaactaatgggcacgacgtcggccgccgccgtgacatcaacgacggcgatg

SEQ ID NO: 109527 - DNA, 1003 bp, Heterodera glycines
tgattgttaatttagatgctcatcaatttcccggttctcactgggtcgcaatgtttgcatatggattaaagaagaaagtaatttattttgacagtctagcgctaccgataaacggatcaattggtagctcctttctcacttcatttcccggagcggtgtataaccaaaaagtctttcagtccatttcatcaaagtcatgtcatttttgcatttgtttttactttttatcatcaggttccacatttgatcaatttctaaataaatttaatcatttaaatagtcccgaattgtatgttcaacattttgttcacaattttccaataaaactttaaagaaatgactcttttttttttcattgtataattaggtctatttcacaaacgaaaggaatgaaaagtaaagtaaacacaaggtaccgtctagtgtctagcaccactggctgccgaatggacctaaccaatctgcaatgacccattgaacgctgattggctgaatatccattcacccattatttatataaccctttcctcctgcacaaatttaggtgtatgttgtgaaaaggccagaagaaggtcaatttactcgtatttccaatgggtgtttactttccacacagctattgcaaatgatgattggtcgtcgtccccttctcatttgtagatcccgctgaaatctcggcggacattgagaaaggaccggggaaggtcaatatattcgtatttccaatggatgtttaccttccactcgcaaatgatgattggtcgatgggcatttcccttttcatttgtagcttccgcagaaatgttgaatgatgattggatgaaagagtagaatggtcttatgactaatattgttggtcctttctgcataaaattgtgaaacaataattctgtttatatgtcttaatagtttccggtataaaaaagaatagaatatgctatgaattcattttattattggaaataataaaaaagtattttagcaaaataaataaaataaaatg

SEQ ID NO: 109528 - DNA, 996 bp, Heterodera glycines
  unsure (1)..(996): unsure at all n locations
atcatttgtgaagtattnaattaaaaataaataaataattaaataattatttttttaatnntagatnttgtacatcccatgcatgatcgcaatacgaaagcacacggactccacttgttatcgggttggtctgctggagtttgggtgcagccaccttaggcgctgttaaacaaaaattagcttttttagcccaatagaatcccatagtttaagcgaataaagctcattaagaagatatgtctaatgatacccaaattgctaatatccgataaccgaaaaaaaattatctatttttttataattctaatatcaaatatactttttataaatttttcatttttagtttttaaatatcaaatataattttttaatcaataaccgagtaggaatgccaaaaagttgtgcccgtatcagtcggttagggcatagttcggtttggaataatagtgggttcgagtcccaacgggtgaattaccctttattttcaaccttttcgaaactttgtactgattttttatgcaatttttgcatgccataataatgaaaatgccatgaaaattaaattgtttgcatattttggccctttccagttcatgttttatatcgccataaccgacatgctgagcttgttgatctgtgccattctgacgggcatttttgcaattatcggcgccgtttattgcacagcgccacgcttcatttacatcagcggagcatttggacttggtaaaatataaaaaaaaaattttttaaatcaatttttttttgctagcaaatacacactgtagatagtgttatactgtaagcaggaaataattcctttctgtctcagttgtactggaacagaaaattttacgctaattgaattcatttaatagctaatttgtcgataaattttacaactttgccaaatgaaagtttattcaaattataaaaatatgaaattcaatggttttaaatagaattttttatcagaaaacatccaaaaaataaatg

SEQ ID NO: 109529 - DNA, 625 bp, Heterodera glycines
gcgggcgtcgcgaaaaattagggggtcaaataaataaatcaattattgaattcacaattttctcttttaaaagcaaaaagaaatgggggaccgtataataaaatataatttagaaattaaaataattaaaaggttaattaattaattattattcctaaaataaattttttattacttctaaaataatataaatatttttcagtgaattaacaaatacatttaagtttaattattgatttgtctgttaattttttatctcctcaaaaataattacagcaccctttcaggtgttgggcgtttgtttatttgaccaataatttttaatttcacatctttacgttgcccctccctcacacctgctcatttgtctggaatttgtcttgcgccaaaccgctgtgccattcatttatgtaatttgacaccagtctgataataatttcgccaaaatttatttattatttgtccatttattacgaattattttgcatctatcactccaaattttgttaaaaaaaaattttttattgtcccaatttttaccattttgtgttttttcaacaaaataaatatttgttcaaatttaaagaattaatttttaaaattttagacacaaaaacaaatcatg

SEQ ID NO: 109530 - DNA, 201 bp, Heterodera glycines
taattagtaaaatgaaaataaaaaaatgattttactcatttaaattggcatttagaaaacaaatgtactttttctgagttagtaaaaagctaaggaaattaataaatttggatttaaatttaaaaaagaatttttacgaaattaataataatttatttctcaccaataattgcgcattctttcagcttttcgccgaaaatg

SEQ ID NO: 109531 - DNA, 248 bp, Heterodera glycines
tggagcaattatatcaaaaaattgctacaattcaaaccgatgtattttatagtggcagtaatttggttaatcagatcatcagtgaggcaaaagataaattggaggacttcaaagaaaaaagcggtgggtcaaattgagtcaggcgcaaatttgtccttggttcttgtggtgcccaagatacggtagggagtcaactgatgctttgtcgttggttgtggtgtccaagatacggtagggagtcaactatg

SEQ ID NO: 109532 - DNA, 348 bp, Heterodera glycines
ccgatgttttttttcgtatttttgcatcgatttccaaaagtttaattatttttaagctgaactagtgacaaaaatttcgaccatcaactcagaacacagctacgcggctactccaatacaattcggcatcggctcaccggcgccatcaacttttacatggccaaccatcgtgagactccacaagaacagcttgttcaatattctttgagcgcgctatcgacttcgaaacaacgccttcagggatatattttttcacgattctttcgtttatatttaataaaaaatttagttcacgtgtgggaggaaatctttcgggcgcccctcttcccaattccaatttggaacatg

SEQ ID NO: 109533 - DNA, 193 bp, Heterodera glycines
ttaataattacggcttacagtatacttctaattacagtatgctccataaggcccccattttccgggagccggtaaataccgtactgaataaaaaagatacggcttactgtatacttctactacagtagtcccattttccgaagccgtgcaattatcgtattgaatgaaaagtgtccgggctgtcttagaaatg

SEQ ID NO: 109534 - DNA, 396 bp, Heterodera glycines
tgatgcagttgcgagggaatgcaaagtgttttcggtacctacttcggtgcgccgagtgcttctgatataatttttaaagattaattgttattatcattttctacctaaattcaattattttatttaaatattgttttttattcaaacgagaatataaataaagttagcatttcatttaaattaatttttttatttcttttttttaaaattataagatattgaaaaaaaaattctattaatagcttttcaaataatattcatattttttgttttggcctttttgtagtttcaatatttttcttcgttaaataataacaatcctttcattaattcttgataatgacaattaattttgaatttatttgtaataattatcataatataattttaagaatg

SEQ ID NO: 109535 - DNA, 267 bp, Heterodera glycines
aatttgaaaatttgttttttaccattttttgaattcaaacggtttatgggcggagacttcagttttatttggtcaatgatcgggcattgtggttctgcagtgacaacatttccgtctccaatttgcagttgcagaagtgatcatttggtgtaggagggcgaaatttgtgaactccggacaattgatcaaactgtgcagttcacggagcaattcaccagagccatagtgaatggcgaaaaggcaaacgcagcggtcagatcggcgatg

SEQ ID NO: 109536 - DNA, 61 bp, Heterodera glycines
ttccgtgatcacatttcttcgttccaaccaacaaatttttgacaaaagaggcaccagcatg

SEQ ID NO: 109537 - DNA, 196 bp, Heterodera glycines
atttttttaaaacggtaaaaaatacggattaaatttttttgttcatattttggttatggaaaatctttttaacggaatataattgttgtttattacgctgtcccacccaaataaatagctcaacaattccataaatataatgatgataaaaatgccgagttaagatgatgctgatgaagatattctgaacagaatg

SEQ ID NO: 109538 - DNA, 358 bp, Heterodera glycines
tgtattgagctttttttttgccgatttacaggtcattattttttcaagtctgatcagaactgtgtttaaatggtactaaaaattctgctctatccaattataatcatattaacccaattggaacatgaaaattaattataaaaaatatcgtcgatttttttatgtttaaatagactattctttctgattgctctcctaaattgactagggtttcgtccaattaattaactaatcaattaattgccctttcctttgccttacgttcgctgcgcattttctccgatggtcgacgaaatcgcctgctcctccgtgaccctaaacggattgcgaaacgaaactcattaccagtgaatgaatg

SEQ ID NO: 109539 - DNA, 119 bp, Heterodera glycines
tttttgtgaatttgattactcggatttgtccctattttaatacactataaataaactacattggcttaaacgtttttaactttcgcttaatagtttcagtttttagtttaaacgaaatg

SEQ ID NO: 109540 - DNA, 370 bp, Heterodera glycines
ggagaaagcagattatgtcatttatccgagtggccagtataaatttatttttgcagttggcccctttggtgaggattatatttatttaaaatgtttattataatgtagcattaaaattgaaagatcatataatagggtaaattttataaaaaattaattgtgctttgttgtttaagacggcccaaaacagtattctcttttgactgacaaagaaggcaatctcgaatggaatttctacaaaaacatacacaacaataattttttaaaagaaaattacataagcactaaatcggcagaaaaaataacgattttggcggagaagggatccgataaacgtattataagcgaatttgttaattacgctgaaatg

SEQ ID NO: 109541 - DNA, 359 bp, Heterodera glycines
ccttaaaacattaaaaagtaaacaaaaactcttgagcaatttcattgagtataataatttcggtatttcgttatggaaatggttaaattaataataaaaaaggcaacgcgaaaagaaaagaaaaaatcgcgagttttcgaagttgtcgaaatcaaatgctgcatcagctacttgtgacgctcacaaaaatcaacaaacattttacatatcatagcaaaacgaactccggcttcgtcattgctgtgctcaactcgggctgctgctgaagcggtgactggcggcggcggcgatgtcaccggcgccggtggcgttgccgaccgcctcttccggcgctctctgcttctgctccggtgccgatg

SEQ ID NO: 109542 - DNA, 177 bp, Heterodera glycines
taaattaattaattctgtttagctaaaagtccgaaagtggcgaaacaattaccatcggtggtgaagccaatattttttaatgaagaaaacttccatgacgatttcattaatattgtccaaattctgaatgacatttcgaaatgtttttggaaaattggggaaaatgaattgaaaatg

SEQ ID NO: 109543 - DNA, 143 bp, Heterodera glycines
atgagagattattgaatttgtgggagtgagtcataagcaattaatggccgggttccgaaaaatccagggggacaggatcgagaaaactcgagactcggagtcgcgaaattaccgaccatcattcacaaatagcaggagatatg

SEQ ID NO: 109544 - DNA, 252 bp, Heterodera glycines
ttgccgaaattttgaatttttttgaggatttccaaaatttctgtaaaaaatccacaaaaaatataaaaaaaatgaaaatatataagaaaaaagttcaaaaatacaccaaatatgtaaaaaaatcccgaaatatgtaaatatgtataaaacaccgaaaagtgtaaaaatatataaataaaagttccgatttttaattggcagccatattaatcattgaaaaataaaacatttaatcatttcagaatttaaatg

SEQ ID NO: 109545 - DNA, 452 bp, Heterodera glycines
  unsure (1)..(452): unsure at all n locations
aaaaatacttatgaattattttgcaaaaatannataagtaatgaaaaagtcagaattttgaanaatttaaaaacaacaagcgttggcatttttcaggttaagttagtcctttacaatggagaaggcctgcaaaatttggagagattatatcgattttagtgcgctaggttcgatgaaactttttaaaatataagcctaaactttttggcctgtttaaaaaggaattaaaaatttttaaaatatttattcatctcccttttgatagaaaaagcatcagagagccttatttaacttttaattaacatttggtgcgtttcagagcacgttctaaaaaatatttatgaattaattttgcaaaataataaataattaatgaaaaagtcagaatttcgaaaaattttaaaaacaacaagcgttggcattttttcaggttaagttagtcctttacaatg

SEQ ID NO: 109546 - DNA, 1003 bp, Heterodera glycines
ggggaagcaaaaaataaattgtaccaaatgctggtaagcccttatcaatctttgattattttggaaagtttcatattcaaaaacaatttaagattaactacttcattaaatagtacttgtgttttggtaattcatgaagatccccttttttctattaacatgtggaatcattgttaggaccacaagtcaaagcaagaatgaatttataatactttttaatatcagagtcattaatgattgttctgaagaaaggagagcggattgaatgagttgaaccaactcagggagatttgtttttagaacagagcccggaattttaaatcatatttttctatgcgttattatggcgagagaagcccaaaatattttctcagaacatttttatttagggctacttataaaaaaataaaaaccgcccgaccctaaaaatatatattttcttgaaaaaattttctcaaaatctgttaacaaatcgcattagaataatttcatgaaaatcaatgaattattaaaattttattacatttttattttttcaaaaattttcaatttataaagacttccagtttccagcagggtttgatttcgctttcacccttttggagtgaaagattttcacatcactaatgaatggcatttttttgtgggaaaggcaaaaaagttcatatatctttaaatacattttaatttacaaactttttgtgttaaatgcgatccaaaatgatcaaagattgacaggagcttcccagctggtataatttatatcgtgttcaattgctgttagtctgagcaaattgaatattaggatgacttgtaaatcattaagaaagaaaaaggctgttaatctccaaaattaaatttgaaatcattatttgtgctgtcaaatatttaaattattcggttgtccttaaacattgcacccgttggcccttgggaaaggtttttctcttttttataatgattttcattcatttttttttgaaattgtgtatatcctcaaatg

SEQ ID NO: 109547 - DNA, 72 bp, Heterodera glycines
  unsure (1)..(72): unsure at all n locations
cccatccaacctatntcgcccaaaaaaaaattatttttcttcctgaaatattatttttaaattttagttatg

SEQ ID NO: 109548 - DNA, 380 bp, Heterodera glycines
agccaaatgcccattaatcccacgacacaaaaatcgcagttcaaaaaagtgaaggccctttatgactttgaggcggcggaggacaacgagttgtcctttttagctggcgaattgataatcgtatacgacgataggtttttattttttggcttttcgttttgcgatcacttcgaattccgtccgttgtcagtgaccaaaattggtggcgcgggtcgacggaacgcggcggcggagcgagcggactttttccggcgagttttgtgaccgaaaacttcgacaacggacaaatttcgaacggaacggaacgaaacggcgagagaacggaggcagtggaaacggcggttgtcccaaaagtgcaaatcgatgaaactgtgctgatg

SEQ ID NO: 109549 - DNA, 98 bp, Heterodera glycines
ggcactaataaattccactattttaaaaaaatttaaaaatttcatggaatgtttaataattttgccaggcccaaaatgttggtgacgaaaaaactatg

SEQ ID NO: 109550 - DNA, 553 bp, Heterodera glycines
ttttgaactaaaaatgcaaagttcaaaaaatttgaattttccaacttttgttcgaattcaggtccggggttcgaaattgatcgaaatagatgccggattcgtgatcaacgaccccgaaaaccctaggatgtcttttgaaaacaaaaaaaaaaattcaaaaggggcctaccatcgacagtacaaaaaaatttaataataagaatactgagagaagaagattttgaaaaggacgaatgtgaatgctaaagtgaatgaagtgaaacgaattgagaacttaaatgggctgatccaatcattagtgtcagctcaaccaccaacagaattatatgaaacaaaatgccaatttatttttattaaaatagagcccggtaaaaaatttacggaaacgggaataaagaaaaagcgaacgggaaaaaggattcccgatcctgtcaattttaacggaaatccgtctggaaataggaattttttaacgaaaaatttaatttgtcaatttgtaatttacactttttttgctccacctgccttaaaattaattttgtttagcgcaatg

SEQ ID NO: 109551 - DNA, 334 bp, Heterodera glycines
aaattagagaaaacagtcaaaaaaccattaaaaccgttaacccccccccccctcaaaaaataaagttattatggcgttgccgcgtgccatggctgcaaatgtttcttctggcgatccatcaaaaacaaaatgaagttgtttgtgactgagatggcattttcgccaatgttccttttaaggtacatttgtcgtggagacggccaatgcgacataataaacccaaaccatcgcaattcgtgccgcttttgtcggcttcagcgatgcctaaaggcaaaatgcgcaagggcaattaattgaccaattaattaattggggactatttaaggccggaatg

SEQ ID NO: 109552 - DNA, 539 bp, Heterodera glycines
cccccccccccctcgcgaattgccctctttcccccgccgggccctccttcccatccatcattcgtctccgcccgcccaccggccatatcccatttcattcatccggcagattgccctcataccccaatgtgatgctcactttttcatggcctaaggcaatctcagccgaacaattaatgcgaaaggctccgctcatttgtcagcgccccattttattgtcggatgaaatcgtttcctttgtcagctttagcaaatcaactgatcaaggaaagttcaacatagaatgagtgtccgtcatcccttctcctttcgatcatttccatttttattcgctttgtgcccattttttggcgcttttggcgaatggttgccggacggagaaacgaaacccttttcattgtcctcaaatgaaacattttcgggcggaaattcaatcatcagtgtaaatgagagtccatttcagccaactacaggacggaagacaaatggaggcaaagagcagttcaagttgggacggacgggcaaaatgggaagaaatg

SEQ ID NO: 109553 - DNA, 497 bp, Heterodera glycines
aaaatatttcttactgaatataatcaaaatgaagaaatgagttttcaaaaatgctcgtgtcacaattaagtcaagcgaatttttaatggggaccggaaaattggacacttgaaatttggacttcagaaaattggacaccaagcggaaatttggacaccggaagattgggcaccaagcggaaatttggacaccggaagattgggcaccaaatattatttatttaaaaaaaagaaataaaatttgaaaaaaaaattaattagaaatattggattaataatctaattcgattccgaatacatggtttatttaataaagggtcatttgtaagccaataaaatttagagaaatcaaatgcacatggatgcttgagaaaaagctgtaccgagtccagaaaattctgattttttgagttatcgatgcggtataaaataattttattataatttgattttgattttattatcaagtttatatgattttttttgtaccctataatg

SEQ ID NO: 109554 - DNA, 148 bp, Heterodera glycines
  unsure (1)..(148): unsure at all n locations
caaatattaaaaacgatggacgatatatataattctatacaaaagaatcaacaaattgacattatctatattgattttgtcaaggcgtttgattcagttnnnnnnnnnnnnnnnnnnccttccattgtttattttcaaaacaaagatg

SEQ ID NO: 109555 - DNA, 326 bp, Heterodera glycines
atttatctatgaaaattatatttaaaaaaattttttgttgtgctttgattgattgaggtatttttttaaaatggtgtttagcgttccgttttattgggcaatttttgatgagcctaacgtttggtgctgtttttccggaggacattctgcgcaatttattcaccatgtgcctttcttatgcctccgagggggccaaatcaatgaaaatatccgcggaccacttcattttccttctgacgtcaaaacaccttgactacgaagtggctgtacactttaaaaagctggacaactcggcaacagaaaaaatcctgacgcgttttgaaatg

SEQ ID NO: 109556 - DNA, 681 bp, Heterodera glycines
gaattttttgaaaaaaaaattttttttttttttaaattattaaattttttttttgaaaaaaaacaaaacgagtttatgaaatgaaaaaaaaccaggatcatttacattgaccgcgtttaatgcaatcaattcaatttaaaaaaagcggaaaaatacacgccctaaatattgaggtttccaaaaacgaaaaaattcccccctaagaaccgactttttgagttggccccccccccccccgaaacgaaggtcctggctacgcccttgcaggagtataacctcagcaccaccgaacatcctaaacggactcagagctctttcccacactaagtttcattcggaaacgccacggaaacctggggaccgggggcaatttatgaacagaaattttacaaaaattactaatttgtcaaaaaaaactcaaaaaaaaatttccgaaaatttccgactttttatcaaaaatttcggaaatcggaagtcggaattccgacgaccaaaatttgacaaaaaatgtatttttcaaaaattaattttaggctagaattcgcttgacagtagcgtacgtagcatgtaaaattaaatttgtgttttgcaaatccttaggagctcatgaaaaaaaaagaaataaaaaaaaataatttcctaaaaaatgtgaagtgtcggataattcgtcggtcaaatatg

SEQ ID NO: 109557 - DNA, 425 bp, Heterodera glycines
ggttgccgacaatttctaacattccactatactttgtatatctgcgcgctctctccgtagaaatttattcaagatatttcttgaaaaaaatataaatttaacttcgtgttgcacaaggcgtagccagacccttgacttcagggatgggggggggggcttgattcgttttgtagtggtgtatttttcttttttagtcccgaattaggaaatgttttttgctggaatttgtagtcattttcgccaaaaaaattttagaattttggggttccttttttaaaaatatagtaaaaatggaggtccatcgatgccgttaggaattttgtagggaattgcttaaagttttcaaactcattgtcagttttcctcggcttccccctcctccttccaactctgtccatgtttagaattggtccttttcagatatg

SEQ ID NO: 109558 - DNA, 381 bp, Heterodera glycines
tctcgttcaattctaagttgcaccaaaattcattttatttttgaggattcacaccgaaaacttcaaaaaataaacattgaaaaaatgaatttcgatgtaaaaagacaaaaaaaaaaacgaataaatgtttaaaaacatcatttatttaataaattttcagtgacaaatttgtacttttcagtatttatttatgtcgggcctacctgattatatttctgtcgtgtcggacaaatgttggcttttgctcaaaaatatgagcatctttcaccttttttgtgtaattttagatttttttaaataccaaaattttttacttctaacggtcgcttcacaaatccgctctcaacattcgcaacaaaggcacaactgaagaaaaaaatg

SEQ ID NO: 109559 - DNA, 403 bp, Heterodera glycines
ttggcaacggttgaccacgtgcgttgacaatttgcacaacgttcagaaggaagggatatacttgaaataaataaaattaattaaaatcgtaaacaaaatgaatgaaataatcggagaaggttgaggaaggatattggtgaatatacagaataaataaaatgacaaatgaattgttctgtccaagaaacgtcctttatatacaaaaataaggacgactttttcatggattcagaaagtctaaaaacagcaaattttaacgacttcggtattatcacaaaatttgcaaatacctaaattgggcctatttaataggaatcgctgattttacatatattttttttcattttgctaagctattttacatctgtcggaaattgtcttaataattaccttcaccaaaatg

SEQ ID NO: 109560 - DNA, 77 bp, Heterodera glycines
ttgagatcatacaaaatccagtcagggatagacaagccaaatcaccaaatgagcattcaacggcaccaattcctatg

SEQ ID NO: 109561 - DNA, 300 bp, Heterodera glycines
gtgaattgaataattgtaatattcctaagaaagaattaaaatcaaaattatttatgataagataaaattaaaaaaaaaactttcgaaacgattactttttctttttaatctatatactgtaaaaaaaaatatttttaaatatgtatgtatttatgtacattatgttatatacgtatatttgtttttgcttataaaatatgcataaaattttaaaaaataagtacgcccgtgcaataggtttaatcgcgtgggtttaatccgaagaaattaattctaaaaattagatcatttaggataatg

SEQ ID NO: 109562 - DNA, 267 bp, Heterodera glycines
ttatttctgaaaaataggtatgtgtatgtacaaaataggaaattttttataaaaaatgtcaatttaacggactgttaatggaatcaagtgcaagcatttaaaagagattcagacattggcgatttgtttcaaataaaaaacactaaaaaaagaaaagttatttcatttcctctgggaagcctgccaaaaagtacaatccttttgtttctatcaaaattttaagcattgtgtcgacaaactaatcttattacattgcgctcgaatatg

SEQ ID NO: 109563 - DNA, 1003 bp, Heterodera glycines
atttttctcccccgccgatttttgtacccttcggcgtcgctcttttgcatcttaatctttgcccccccccagggggaaaatgttctggtacttaagtattgtttatcgtctatttggggccattccattccattccattccattccatttggcacacattcacctcttgctcttcactcgttctcactcctcaccatctttttctttttgctgaatctttcccaatttttgaccccctcaataatccttatcgcccttcccttcctccaattttcaccatataatccatcaacatctcgcgtataatcatccaccaatttttgaccattttatcatcatcatcaccaataaacattttgtcggaaaagtgttgaaagggtcagagggcaaaaagggggggaaaaattcgctcgggaacgaagtgaccaaaggggagccaaagccccgagaatcgaagcgggggacaatcccccgcagagcagcagaaaaaagggacgggagccagttcctggcggttgacgcagttcgcggccggaagtccaactcttctcccgaacctcaaccgggagcgccgacagctcttcaaaaagtcggtggtgccgttacagcaacaaccgcaaaccccatcttgtttgtcctccccaccccctccccagttcactcccttgggcacggacccaacggcagcagtagcagtttcaggaaattgagtgaattgggcccgagggacgggagagaaactcccgcgcacagaccccctagctgtcagcgccggccgagtttctttgccacaaacaatttggtgccgttagcagggggcaactgcagccatcaacaatcggtctacgagcgaccaacgagcacgaattcgagaagctaacggcaatttggtgccgttagcagggggaccagcaacaacactccggtcgcaaaggaccagcacaaccaccagcaacagcacttcggtcgccgaggaccaacacaacgcatttgaacaaaaatg

SEQ ID NO: 109564 - DNA, 450 bp, Heterodera glycines
aatgctttttgaaaatttatgatatttaggagccatttaattttgatctagcttcataccgatttatattatatatttatttgattatataatttgacaaaaaattaatttgcagataagaaatatttatatatataaataattcgtcaaggattttattctcattattattatgtttttttagaaatgaattaaatccatttttgttttaggtattgtcttaactttcgagtttttaaattgctgaatattcattttaaatgttaatatttagtaattaaatgaattttatttatatttggaaaatttattgcaatgattaaatttgtacaaaatttaaagtcatttattaaatatttacaaaattttattttatattcttatttttttcttataatttaaattataatgcatgttatttaaaaaaatattaaattttaaagttcaatg

SEQ ID NO: 109565 - DNA, 115 bp, Heterodera glycines
caaatcaaaatcggatttcaatcgccctcctttaaaccatcaaaaccaaaattttgaatttgctggtccacggaacactaatttcagacaaaccggagacttacaaaatcaaatg

SEQ ID NO: 109566 - DNA, 128 bp, Heterodera glycines
aaggagttcaagcagtacgtgcacttgaaatcaggaaatcggcaagggctcggagaagccgggcaatttggtccccggagcgtcatgtaccacgaaaacgaggcgcaattcaaccaagaactgggatg

SEQ ID NO: 109567 - DNA, 471 bp, Heterodera glycines
cagagcacgttctaaaaaaatatttatgaattaattttgcaaaataataaataattaatgaaaaagtcagaatttcgaaaaattttaaaaacaacaagcgttggcattttttcaggttaagttagtcctttacaatggagaaggcctgcaaaatttgaagagattatatcgattttagtgcgctaggttcgatgaaactttttaaaatataagcctaaactttttggcctgtttaaaaaggaattaaaaatttttaaaatatttattcatctcccttttgatagaaaaagcatcagagagccttatttaacttttaattaacatttggtgcgtttcagagcactttctgaaaaaatacttatgaattaattttgcaaaaaataaataagtaatgaaaaagtcagaattttgaaaaattttaaaaacaacaagcgttggcattttttcaggttaagttagtcctttacaatg

SEQ ID NO: 109568 - DNA, 86 bp, Heterodera glycines
aattgaatttttaaaaatccatttaagccaattacattaatgagcaaacaattggttttttggatttcaatttgttgtttgtaatg

SEQ ID NO: 109569 - DNA, 134 bp, Heterodera glycines
acttttcttctccattgtcccttcggaaacaatttttaccggtggaaaaatcgaaattttttttttttttggatttttgaggcgggcttggtatttgaaaagtgaaaacaccgctcatgttgttgtaacaaatg

SEQ ID NO: 109570 - DNA, 194 bp, Heterodera glycines
tccaaaggaggggggagaggtttcatttttcatcacaatcatcatcatcaccaacaatccccgtagggatagactgctttttacaagcagagcgacttcatcttttcagtcatgacacttttttatatagcatatgagacaaaaaatatataatctaaaatttttaaatttttttagaccctagccaagcgatg

SEQ ID NO: 109571 - DNA, 873 bp, Heterodera glycines
aggggagggggaggatgaaagggaagaggaaaaagagaaagaagaggaggaattagcaaaatgaacattttcatggaataacggtgaaagtaaaatactttttgaaattaatccctttttcctttcaacacataatcttttttatcttttcatgaaccgctttttgccctttgttgtggttgttgcttttacttattttatattccataaaacgaagcgcttttactgaccgattgcccggacgaacaaatggcaaaaatacaaatagggcgcctcttaaaaactgttaagtttggtcattttgtcaaaaatgcataagcaagaatgtaaatatttgttttcttcactaagtgttgacctaactttgtcctttctttactaattaggtaattaattattcattagccgagtgggggcgggtgcccttttgatgaatgaatcagataagaaaagttcgtttctttcatttcccccaccctttgctatctttcatttatttttccttttctttttatcggtcgtatttgcattaaaaaaaaagtttttatttcattcattaaaaaatatagggttgctccccgagccctcgggggacaaaatgtcgggggccggggacctcggggagtgacacgtcgggggtcgggtcggggaataggtcccaaaacgtctcgggtcgggtcggagggctcggggtcggggagcaaccctaaaaaaatacattccataaatatttaaatttgtttttttatttgttttatgccgtagggcaaggttgaaataatttgaattgtgccaaagggtgggtgccgtttcaccttattgaagcattaggttaatgaaggaaggataaatagacaatttgcacttaaaatg

SEQ ID NO: 109572 - DNA, 137 bp, Heterodera glycines
aatggaattggcatgcatttgccaaataaatattggacctttcttaaggaagcgatcagtcgttacaccgaatggcaaaatcacgtggaggggaacagagcacccgaactgccgaccaaattgagtgacgaaagatg

SEQ ID NO: 109573 - DNA, 262 bp, Heterodera glycines
aaatatacaaaaactaaaatttttaataaaaacgatttcagtctttaacttagggttgatccacgagtctcaagggaagaaaagtcgagattggtaagggaaaaatctcgatgcaatttattgggagagaaaattttcataaaaaattgagaaaaagataacagaatttttgatagtcttgggaaattcaaaagtcattttaaaagatgaaaattttgatattcgaatgaaaaaaattacttacattttccaggaaattatg

SEQ ID NO: 109574 - DNA, 85 bp, Heterodera glycines
caatttcatggtaaaagtataaaaattgcagtcctaattagcagacttaacttttcttactttcgtccacttaaatttgaaaatg

SEQ ID NO: 109575 - DNA, 163 bp, Heterodera glycines
gggaaaaatttttgtattttttaatgcgatttgttaacagaatttgtaaaaaaatgaccaattgattaagttttgggtttttaggatgcttaacatgaaagaaaaaaattggaatattttttaaaattaaaattttaattaaaataatggtaaagaaaatatg

SEQ ID NO: 109576 - DNA, 151 bp, Heterodera glycines
tcggatgtatatgagtgcactaaatttaaataatgatgacactacgagtgtgtaaattatgtatttaagccccgcccattattagggacagtataatgttagattctcgtcattttaatgaatcatttctaaaatattgacccaaaaaatg

SEQ ID NO: 109577 - DNA, 117 bp, Heterodera glycines
ataagggtgggaatttaagtcactaaaaatcttcaaaaagtcgactaaaaaagtcataaaaatcccaaaaacatttaactttaattcccagccctactaatcatttttaaagcgatg

SEQ ID NO: 109578 - DNA, 420 bp, Heterodera glycines
attctttccaaaatcacaggcaaaactcaattcaattatcggggtcaacagaacacggatcaatttggaggccgctttcggcagcaattcggccaaaacaattttcgtggccgcaataattttcgagggtcgaactttattcctttgggcaatcggttcccgagacagaacggtggcgattttcggccaaattttgaccaaaatcggaatgaacaaaattggagaggccgcggaggaggtaattcatacggaggacgcggaggaggcaaccaaggacgcggaaggagcggctggcgtgtgaatgaagtcaacttcccattcatttgctttattgcggttatttcggcaatttttatacccgccactggacaataccaaatttgcccaactcagccaactgagggaattacggtgacaatg

SEQ ID NO: 109579 - DNA, 113 bp, Heterodera glycines
ttttacttttttttaatggaattttctttttatttatagtttttcattttcatagattttaaatggatttaattcttgccaccgattggataaacaacgcttatcccgaaatg

SEQ ID NO: 109580 - DNA, 453 bp, Heterodera glycines
ggttgagtcggcccattccttcacactttctttctccatatttccttcagctgctttacgccgcccccaacaacaaattcccctccggcgctttttccaactttggcatttttgcacatccatccgaagttcgaacaatggtcacgccagatttgaacactataaaaagccaaacagatcacattatctaaaaagaaggaagaacggccaacaaaacaaaaaggaaggatgtgttaaataaaatgaacttggggaaagttcggcttcgaactttaggattattaaggtttcgaaaaacgaacgaaatgttgggaaaatataccccataaaaagatgaacaatcggggaaaatttattcctagcctaaagacagttaggctttgttttttagattttcccaggttggtttaaatttaccaaaaattaattaaccttatagaaattacatttatg

SEQ ID NO: 109581 - DNA, 94 bp, Heterodera glycines
aaaaaaaacttcagcaaaaataggaaaaaattttttgaataaactttgatctccaaactgacttcagaaagagcacattggcatcactcagatg

SEQ ID NO: 109582 - DNA, 936 bp, Heterodera glycines
tttttaattgcgctgtgcattaattaattggcgcccggaaaatgcgtcagtggaaaaagcgtcagcagaaatgcgtcagcgaaaatttattgccttaaaaacaagttccttgcgttttcgaggtcactgaccacgaatccggtatccattccggccaatttagcatttttggttcaaaaacggaataactgatgtcttattgacaggggtgcgatcgaaaatttttcaaaatcaggacatcgggcccaaaaaatcagatttttgaaaattttttgcggcgcatttttccaaaaaactttaaagtcaagcgacgacttttttgctttaaaaacactttttgcggcgcattttttcgaaaaattttggaggatggacggaggatccggcggtgccgataggcgccgcagggaaaaatttttgcgatttttaatcaacttgttaacagatttttgtcaaaaataactaaattttgccacaaatcttatattttcttgataaaatagtgacattatgccataaaatttcaaaaatgtgggtttatttaagaaatcaggacaaattttggtcgctacctccaaatcaggacagatcgcacccctgcttattgaaggattgatggatgtcagtttgttttcgtgtatttaaaccgattttgaagaaaaactctaatttcgaaaattttgactttgactttttgttcgaattcgggttcggggttcgaaattcagaacgataattataaaattatacttcttattacaataccaatactacataacttaatattaaaatatttttatcactaacgcattttctgctgacgcattttccactgaccgattttccggtcacgcttgtaactggactcaagcgacgtgctgctgagacgtgcgaagcacctgcgactattcgtgctcaagtgctgcaaaaaacatg

SEQ ID NO: 109583 - DNA, 290 bp, Heterodera glycines
ccgttcatttcttttcataaatgaacaaagaaaaactgacaaacatttagaagtagcatcattcattcaatattgtcaagagattcgcttgcttttaatgttcttttccgtaaattttttattgaatggttcaaatatcaaccgttaatttaaagaaaaattggatatttttttttacaaatcgttacacgctggcttttgttcttgtccgtaaatttgttgaagtcgttaaaatatgaacgtcaatttaggcgctcgaagtgcagaaaaatgcccagcaaaagacgatg

SEQ ID NO: 109584 - DNA, 1003 bp, Heterodera glycines
cttttttttaccaaaaaaccgactgactctgcacaccgattcctagtgttaattcaagttttattctcataaaatttaaatatttttgcataaaaagaatcgtctggcgttaattgtgacctcatttaatgaaaattgaattcattttgttaaaaacaatttaatataattatttatgattttcaatttatttaactgaaaaaattgaacaataattaattatgttgttcaaattttgatagaaatgagatttttaggtgctaaaaattctgaagaaataggtacctaaatagttgctaaaaaactgcaaaaatagtttctaaaaattggaaaaatatgtaaataaatgtatgaaatttgaaatttccattcattatccatttcggttgcaacacagcaggcgttaaaagatgttgattgtccgccaaatcatggccaggattttttgctttttgaaaagtcggaaaaacttttgaagtcgattctaaaggctgcatttttatatttttatttacatttttcataacaagttttttgttcacaagcaaaaatccaaaaacagctgaaaaaataatttccagctggggtgtagtcaaaaatacaacaaattttttgataagattctcgaatcgagtatgaaaacatgctaacaaatgccggatttgagtgccaagatgcgaaccttcaggctcttgtacacaccgtttcaaaaaacgagatgtgtaccaataaatagagagtgccagagaaaaacattatctttttttctctaattttttgtctccttttggcgtactatctaatatttctattattaggaataacaacattcacttcgctctatagaactttttttccgccttacagaatttcttcatattttgcttatagatagagaaaaaaatactgcatctgtctatagtgaattcatttttgtctatggtcaaactcaaaagttataaattttataattaaaaaactattcttttatttagattttatg

SEQ ID NO: 109585 - DNA, 157 bp, Heterodera glycines
aaagtgattataagaggtacaacagtgattagaagaggtgcatcagcgattagaagaggtacaaacaatgattagaagaggtacaaacaatgattagaagaggtacaaaagtgatagaagaggtgtaacagtgattagaagaggtacaaatttgatg

SEQ ID NO: 109586 - DNA, 472 bp, Heterodera glycines
tttttagaaattgacctgaaaatcgcagtgttatgtatgggggttcagagtacaaaattatgaatggaaattggggaaaaggtaataatttattgtttaaattagagttgtacgggaccgggaattttgagaaaaattttaaattcttttattacaattttaataacaaaaaaagagagtttgccgtttttatgagttatttggttaaattcacaatttatagaacagacagaaatttcattttgtttgattggaataaaataattaatttcattaattaattggcagatgaattggtggaattattggaattgttttcattgccatcatttggctttaaattcaataaatttaatcatttgagcatcaccacaaccgccaattatgattcaaataatttaactgcaaaatttgcacatttggaagcgtcgaaaaatgtgaccactttttcgaatggtttttcagctcaatg

SEQ ID NO: 109587 - DNA, 268 bp, Heterodera glycines
aaaaaatatagaggcccaagaaaccatgattacttctagtaaaattcgagactctcgaactctgttgatcatagaagtgaggaataacattttttcccgtgaacaggactcgtgcccaatttttcgggtctcgaatttcgcaaaattttcggtatcgaacacattaaataatatttggccgaactcataaaatattaaaaaacaaaaataaacaaataaatttaatttgctttcatttaaaattatttctagacaaatactaaacatg

SEQ ID NO: 109588 - DNA, 422 bp, Heterodera glycines
tcccatcaaaagtgccgttaagcagaagtgaatgggtgcgcgtcaccaatttgcctgaatacggtaaaaaaattataaaaattttcatggtatatatatatggttgtaaaaactcgctctttaggcctcaacgtgcaaaattttaattttatgtgtaacatattggtgtttctccaaaaattcaatcccaaaattatcttggggtttttgacaattttttctcaaggttgcctaaccaaaattcgaacatttcaatgaaagaggtgatggggattatttgctaatcagtaatataaaaggatttgagttaaaattctatggatcagcaggacaacatattttacagaaaataagggaggccgaaaaggcttttttagtttctgatcatgtttccggtcctgttaggtgatcaccaagaaatg

SEQ ID NO: 109589 - DNA, 420 bp, Heterodera glycines
attttcactcattttttatattttgtttaggcttcttctcgcctgttcagtgcatgttgtccttcagagaaggctccatttttatggacaattacaaataaaaacgaaagatgaatcatcgaaactgtcctcccaaatttaataattataatatcttccatatgaaaaatttaaatgaataaagagaagccttttgttttttattttgttgaattttatttgccttctctacaagaatggaaatctgaattccacattaaaacacatttattatcatgtcgtccgtttaaaattagggcatgcgtgaggtcgaatttcgtcagggttttaccggggttctcggtcctgttattgaataaattgtgtcagtgaaaccatgaattacacggttttttcggtcgcagtcacgattcacgaatg

SEQ ID NO: 109590 - DNA, 418 bp, Heterodera glycines
aatcaatttcacattattttggagtttctccggggaatttctcgcaactatcgaatgaacccgtgaatttctgttaatttttacattttttattgttaaaattattgttgaatttatttttaaactgtttattttacattttatgctgaaatttaaaaagttgtttttactgtgatttttcatttttctgtacttggggcccaaacgaccccggggcccaaaaacgagggcccaaaaactggggcccaaacgcccccgactcctttttgagtatttttgcgcagataattatggcacaacccaataatgcttcttcttttttttttgcagattttttgacttaattactcaccctttcctttttatagtcaaattcaacaaaaataataacattttctggcccagaaaatacgcaatg

SEQ ID NO: 109591 - DNA, 176 bp, Heterodera glycines
aacctaaggtccacttgctggtgaaccattttgtacccttcgcccgacacaccaatttttggcacttttggacgagcagggtcaaaaagcattttgaaattttagcccgaatttttttaggcgatgaagcattgcattcggtgtggaggcgtttggaacagctgtggaaaacaatg

SEQ ID NO: 109592 - DNA, 1003 bp, Heterodera glycines
tctatcgaatcacagtttattttttagctgtctagtttttaacccgagatcggctcttctatttttacaagggaaaatccccaaaaaatttcaccttgcattttaaacctttcaaagggagcggggcggctcgtttcccccccgccgtttcccccccgaatcagttcccccccgcatcgtttccccccgagaaaatttaaaaaaaaaaaattgctaacttagaaatttttcaagaataatttatgagttacgggggagaatttataagagggaaacggaggcgcgtgaatagaagttacgggacaccttcgagatgcacttattcgtgacaacgttgtcgatgggcagagtttgttcgagttggcttctccggttgctagaaacattttgtaactatatggacaccatgccacagttgatggaaccttcaaagagacttaacccgaaaaattcgaatagtttaatttttataatattaagtgctccccagctcattttacccaagtctacacaatttctgtactgatcgataaggtggccgtcccctgtgtttatggcatacttaaatcaaaatcagaaaataataccttaatgtttgttttagatttttttaaattagtgatcagtgccaaaatttttaagatgttccaagcagttgttcaatcagtcccactcaggttttcccaaatgccacaagggtgggctgtcttttccacttttgccaggcggtttaccgcaaattacaacgcctgcctcaacttcacactcacttttttcaaaacgcagaccaacacacggatatttaatgttttttcgctcttgcctttgtgcctgttggtgaaccactttacaattatttttgtttgttggttcaccaatttccgcataacgaggaagttgaacgtatgtattaaaaactaatttgatgggctaattaaaatttctagaattggtacggtattttctgatcacatggatcggttgtcgggatgtgctaaacatg

SEQ ID NO: 109593 - DNA, 470 bp, Heterodera glycines
tttctcaaaatttaacggttcgttcgtctattagcgccgttttttttgttttgtggaagacaaagaagcggatctgatcagcggatttgagaaagaacctttttgcttcaactttaaacatatttttgtgatgaaatgcacaggagacggttttcataagcatttaaccatcgttttgtgcttctcttattaatggttgtaaatggtttgcgtattttttaatttaattttattcattaaaatttgaaaaaaataaagcgtatttattgattatattaatttgaaaaaggaaggttgcaaaacctttttatttaatttaaatttactttaaagttaaaaaaagtatttagaaacggttgagcaaataacatttgatattgttaaaaatcattaaaagtgacaatttcttattaatgatacaatttaaataaagcctaaattaaataaattgtataaaaactttcaaaatg

SEQ ID NO: 109594 - DNA, 78 bp, Heterodera glycines
agccattcgtcgaggaattgtcgacatgaaacaaccgtttgccgaaagtgcaagaagagtggccacttggaaaggatg

SEQ ID NO: 109595 - DNA, 159 bp, Heterodera glycines
gtaaagcatgctttgactatgtggccaagatatcgcagaaggacaacaacagttcgatgaagaacaaagtgaacgcttttctgactgaagtggccgaacgaatccatcggttgaaacacgtacagaggacgacgacgcaccggtaaaagcaagggaatg

SEQ ID NO: 109596 - DNA, 73 bp, Heterodera glycines
attaggcaaatggcggtggtgtaaagagactttgcttaatgggcatttgattggctattaagccattcagatg

SEQ ID NO: 109597 - DNA, 389 bp, Heterodera glycines
atttttttgaataatcgaagatgaccgaaaaaatggattctgttataagctccgccccttttgctgtaaatttatttgttattccgcttcttcgttcgaatgaggtcattaacatttaaaatattttagcttatgggcggagcctaatttatttatctaagtccaccactaaattttctgtataaaagcacaccgctttgctcactttgttcattcgaacagaagaagaagccgaagaagcaacaacaacaaaaaataaattcggagccatcgactagcgcatccctttgaccaataaaaaaaaatatatttgttgtgtttttttgagtgtttaataaattttttattgttaccattattcaatcttttctcccattaagaattaaatg

SEQ ID NO: 109598 - DNA, 134 bp, Heterodera glycines
tgttttcttttctctgaaaatggatttaagttttttttttactatattattttgtattatctcatgaggagacacttgacatatttaacatcatcttatctgtcataatttagcaaatatttcaatttatcatg

SEQ ID NO: 109599 - DNA, 712 bp, Heterodera glycines
agcactagcgctgtgtccaaccgttcgccgcaaagcgtcaggccggaggccacaagccgcgaccaggcactagcgcaccagccccaagcacggggttgagcactagcgccgtgtccaaccgttcgccgcaaagtgtcaggccggaggccacaagccgcgaccaggcactagcgcaccagccccaagcacggggttgagcactagcgccgtgtccaaccgttcgccgcaaagcgtcaggccggaggctacaagccgcgaccaggcactagcacgccaaccccaagcacggggttgagcactagcgctgtgtccaaccgttcgccgcaaagcgtcaggccgaaggccacaagccgcgaccaggcactagcgcaccagccccaagcacggggttgagcactagcgccgtgtccaaccgttcgccgtcaagcttcaggccggaggccacaagccgcgaccaggcactagcgcaccacgccaatatcaaaacaaaaaacataaaaatgaatgaatgatgaaaaatatttagacaaaattcaattcagtaaatattaatgcatgagaaaggtcagagaattgctggacgggcaaaagaaagagggggaggagagaacggggggttaattatctcaaaattcagttctgtacgatttttatttaaatatttttttataaataattttaaaaaactttttagatttttaaaaaaaaaatg

SEQ ID NO: 109600 - DNA, 177 bp, Heterodera glycines
aaatcaacgaactcatccaggtgggctaagggggtatagccaacgttcaatttttgaaaaaccagaaaaattttattttcaaaaaatccgtatgctgccacgcgggtttgaacccctataactgtttcaggcgaagtccgacggcgcccgaaatttgttggaatgccaaaatgaatg

SEQ ID NO: 109601 - DNA, 531 bp, Heterodera glycines
tttgaaagggcggctgaggggaaaaagcgtcggaggaacggcacaacgcattttggccttgaggaaaagccacggaaaatatgagccgaattgtttcagtttaacctttagtattgtcccattgttggcgcaaaaccgaacaaaaagtgagaaaaaggccgaccaatttttgatcaccgcgtgaggcggcgatggcaaaggcggagggacaaatttgggaagggccgaagggaagggacgaaaagggcaaagggacgcagaggaagggattggcaccggcacggagcaaaagctcacagagggcaaaattaccagtcgaagcagcgatctgaaggaggaaaagggaaaaagatcagaaaagaggaatggcaaatgaatgaaatggccaatagccttttcccttccccccatttgtcaaattgttcaattaatttgaattgaaacattcgaaaatgatgcccctgggcattactctcccccccccccccctctccatcaaaaatttttttcctctcccttcccacctgaatg

SEQ ID NO: 109602 - DNA, 65 bp, Heterodera glycines
aacaaaagaagcaaaataaaaatttgaaatttgttaattttcttcaaccaaacggtgatgaaatg

SEQ ID NO: 109603 - DNA, 148 bp, Heterodera glycines
aataaatctggcacatttagtggagtttgtccaagtctgatcagcaattcaatccttttgtataataaatctgatcagaattgatcataaagtttgtccccattaagcgctgaccgacccgagcattcactacggatttcatcggatg

SEQ ID NO: 109604 - DNA, 319 bp, Heterodera glycines
acgaaaaaaaaaaaaaaaatttttttttcgaaaaatttgctggaaagaaattttcctacaaattatattttaatttttttttcaaatatcctaggactgggacatccctgtaaaattattgtacacccataactccctcatgcaaacttttcggcacaaagccaaaaccaaggtcccgtcctctcatgacagggaccaatttttaacaaatttcacaaaaaaaaaatttttttaattttaatttttacaaaagttggtggcatagtctggtgctgctgctgttgtgcatgatgattgtgaaatgctgatgaggaagatg

SEQ ID NO: 109605 - DNA, 341 bp, Heterodera glycines
tccattggtcgggacaatgactaggtcctggtttttcttggccttttttaattttctggtacgctgaacacaattatagcctttatctcggccggccatttcataacccttgaccaaaaaaacataaaatatagggtttgtacagtctgtaacaaaattacaggccataaatttgaaacactaaaaaacgttcaagtataaatgtccaataaaaagtttaaaattaattagtatattatgccaaaattcccttttatcagcattattatttttttattttttaggatttgctttttcgtatttaatttacgtaaatgtaatttcagctaatttttaagatg

SEQ ID NO: 109606 - DNA, 126 bp, Heterodera glycines; identical to SEQ ID NO: 103918

SEQ ID NO: 109607 - DNA, 1003 bp, Heterodera glycines
tgtcgcaaaaaacgcttattagagggtttttaagggtcaggaaaaccgattatgacttcgatttcgatcaattccgaaccccggacacgatttctaacaataaatcgaaaattcatttttaactaaagttcatcttttgttccaaaaaacgctttttaggggttttaagggtcaggaaaaccgattatgacttcgatttcgatcaattccgaaccccggacacgatttctaacaataaatcgaaaattcatttttaactaaagttcatcttttgttccaaaaaacgctttttaggggttttaagggtcaggaaaaccgattatgacttccatttcgatgaattccgaaccccggacacgatttctaacaataaatcgaaaattcatttttaactaaagttcatcttttgttccaaaaaacgctttttaggggttttaagggtcaggaaaaccgattatgacttcgatttcgaaaccccggacacgatttctaacaataaatcgaaaattcatttttaactaaagttcatcttttgttccaaaaaacgctttttaggggttttaagggtcaggaaaaccgattatgacttcgatttcgaaaccccggacacgatttctaacaataaatcgaaaattcatttttaactaaagttcatcttttgttccaaaaaacgctttttaggggttttaagggtcaggaaaaccgattatgacttcgatttcgaaaccccggacacgatttctaacaataaatcgaaaattcatttttaactaaagttcatcttttgttccaaaaaacgctttttaggggtttcatggtcggaaaacccgattctgacttcaattccgaacccaggacccgatttctaacaataagtcgaaaattaattttaaatgtgaattttgtaattaacaagtaagtacctaaatttatataaaaggcctgtgctcctcagtttcaattcacttttcctcttctcttaatcattatttgctgctcgatg

SEQ ID NO: 109608 - DNA, 648 bp, Heterodera glycines
tttcgtcaacaatattaaaacccacaataccattcgacccaaatttgttttataatttttatagccatttaacccagacctgagaatttatcctcattttgtggttttgataggtcagtgaggattcttttttaatgaggatttgaggatttttatggctatgagaaattttgaggcttttggggaaaatcgtcaaaacttttaaatttagtgattaattttaatcaatttggcataatgtttgacaatcatttaataatttggtttttaatagagcgacattttgataaaagcatttgcttcgaaattacagaccgttattggtgtgctgcttggtggcattaagatttttttaaaatctgaaacagaaaacgggaattgacaatttagcctagaggaagcaatcgcgacaattttgaacattcttgctttttaggtacatattgaacggttaagtcccagttctgtaactctgtttgaactgtcgccgactcctaaaaattgcaccattcaatttctcttacaattgctgagagaattgcaaattaaaatttggcaatttcttcaattttattttttagtgtttgtaaattgaataaattacacatattccctccctattcgctcgctgccttttcctgaaaaatg

SEQ ID NO: 109609 - DNA, 843 bp, Heterodera glycines
aatacttttaagtaatataaaaaactaacttaataaatattcataaccagaaaatcctcaacgaacaaataaaccatcttcagcttagagatgaacaactagtagggggagggcagtcaagaattttttaagactgaactaaaatttttctcgaaaaataaataataaatcaaatgatataaaatttacctttgtataataatttattaaaaaagcttttataatgataattgaactaacattttccctgtgaatatataagctaacaggaaaacataagaattgctttacataaaaatgaattggcaaatctaaatgttaataaatcacaattatttctgattgttgggtagtgaataatttgaatttatggcgatctgacttattgactttatttgttatttctatgtccatccgccccctccctcgtccataaaagtggacacctcctcccattatttgttctttcctttcatcattcatttatattttatttcccaatttgccctccgaccgaatcaataaaattatttatttatttatttttctttgtgtgttctaagtggaagaacacaacaaattggcgcagtcagcagcctttcttcatcactgaggacaaggaccactgcaaattcaacaaaaaccaatagcacccaggtggtgtgaggtctgctaagaagcagtttaactcaaaaaaaaaccaatagacctaagaagggtgaggttccgcaagaagcgtttttttcaacaaattcgtcagcttagcaccaagacggtgtaagcatccaccaggtgtggattttgtggattttttttttcaacaatttcaattgacggacaatg

SEQ ID NO: 109610 - DNA, 1003 bp, Heterodera glycines
tatgacattcatttcacgaattcaaacaaaaagtcggaattcaaactttcccttttttgttcacgctttagctttttattttgaaactaaaaataaaattatgggcctaaacacaaatagagccgatatgggtttagagtttccttttgtcgagggtcatagattaaaaataaaaaaggaaattttttgcaaggcgaagtggggacaaatttccaactacataatttcgtgatttttttgttgcccttcaagcaattttacggggcgcatgaatgagagaatctgtcaaaaatacggatgttttttttaagattttataccaaatggcaagtgatttttggttcaaattgaaaaaattaagtttttggggtccttttttcgggtgcaccccaaaatctcgccgccgaaatctcgccgccgaaatctcgccgccggaatctcgccggccggaatctcgccggccgaaatctcgccgccgaaatctcgccgccggaatctcgccgccggaatctcgccggccggaatctcgccgagacaaaatctcgccgccgaaatctcgccgccaaaatctcgccgccggaatctcgccgcagaaatttcaaaaaaaaatttcaaacttagaaatttttcaaggaaaaaattcttagaaaaatttttttataagaaaatttaaataaaaaaattgttgaaaaatttttcagcaatttttcagcaattttttttgaaattttatgaaaatttactgttttttttttaattttcaaaaaaacttagcaaatagtttttttttggaattttcttataaaaaaattttctaaaattttttccttgaaaaatttctaagtttgaattttttttttttgaaatttctgcggcgagatttcggccggcgagatttcagccggcgagattttggcggcgagattttgtctcggcgagatttcggccggcgagattccggcggcgagatttcgtcccgtcccctaaaaaggggggagggatg

SEQ ID NO: 109611 - DNA, 815 bp, Heterodera glycines
attttatgaaaaaatctaaaatttttggcattttgtcccattatattaattttttactaaattaacctagaaatataaaattttcagtgaacatctgtaaaaaaggtcaaaaggtctaatttttctcccggcagcgccaatggctccgtccatcctccccccaaaaaaagaactcactttttttaagaaattgtcgcaaaaattttcttattttttggtgaaaatctgttaaaaaatctcacaatcaaatcttcaaaatttttacagcggcgcctattggcaccgccgtacccctccccctcaagttcccaaaagtctttttgaaaaaccgccgcaaacattccggtgaaaaatagatttgaagttaattaaccttttttaattttttttgttcaaatttttatgtgtactttgatttcataaatttcccacgttatgtacttggaaattggtattagcactgatctgagcccggattcgtgatcagcgacctcaaaaaccccttaaacttattttcattaatttctaaaacacatttattggcatctgaaagtgtatgtgaatctgccccgtaaactaaaaaagtaccattgtttttcgttcatttctgaccattaggcaaacccctaaaatctatccctagtaatgatataaaaaataattagcttacctatatgtattggaatttgattttgaaacaaacgaagcttttgaaatagcaggctaatagaaaattataaattgattcaattcggttttttcctcgaacagattttttcaattttgcatttatataaaaatttctatcaaaaatg

SEQ ID NO: 109612 - DNA, 276 bp, Heterodera glycines
  unsure (1)..(276): unsure at all n locations
atatagaaaaaaaaaatcgattttctctacnactgatgtttagacagcgagaaaagtcagacagtttatttagacaacaccgtaaaaaatgaattgggctttgattaataatacaaaaatcaaaaaatctcaatttcgtgttttccgatctctgccgaggtccctttgctggtgccgccgcacagtgccgtctccgcgccgcacgattggccccgcgtgttccgcctcggccccgcttcgtccgtccggttccattcccagcgggcgcttctcatg

SEQ ID NO: 109613 - DNA, 1003 bp, Heterodera glycines
taggtgtctaatttccggcattttgtgccaataaaaagaaatcattgtgaattcaatgaatttgtattgttaaattggggataaataagggacggcctttacatcacgcaaaaatttagaattttatgtcacgcaattcttttcaaaagccaaatttttatctttaggttttcggtttaaaaggaaacgttatttaataatttccgttttttattcttagaaatatttaaaaaacattataattatcataaatgaatagaaggtataaaaattcttattatattatttttaatcggtgagaaaaaaaattcaaaaaagaaaatccccaattatgaaatttcgtaaaaaaacacataaatttacgttttttattttgttaattttgattttgtattaattttttataataccattttttaaatatttattttcaagaatgcaataaaaaaaagcaagctcactacaatttttttttgttaattttcaaaaattggtgcaatttcttattattttttgaccgcatagaaacaaaacaaaaaaaaattcaatttttttctcgaattcgtatataaaataattagggctgcgatttttagacaaatgccaaaatttctgcgcacttaatacgctcaaataagcacgaaaaacgtattttccgcttggtttggtgtgtctacaatgacttttataatgcctaagtttgcctattttggactttttgtgcttaatgcctaaatgcatatttttgtgcctatttcgcttaaatttttcggtttttaaaaaatcaatttagcatctgacaatgaatgctgttggttatttagaaaaaaatctaaaaaaatgtaattcacgttcgttttatttttcttttattaatttccattttatatatctctatgttaatagtgcagattgaatgagaaattatcagaacctagataaataatatatgcttagataaattgaaatttatttaaatcccgaaaaatcctatttcgaaatg

SEQ ID NO: 109614 - DNA, 106 bp, Heterodera glycines
acattgactttgtcgggcggggggcagtccaaatttttgactatttggggacgcggcacgaaattaatgggcgaaaagcagcgaacggagcgagcgaaaacgaatg

SEQ ID NO: 109615 - DNA, 76 bp, Heterodera glycines
aagtttcattgacagtaagcaattctttgtcagtcgttaggactcaatttatggctgttcttcagaagaggagatg

SEQ ID NO: 109616 - DNA, 349 bp, Heterodera glycines
  unsure (1)..(349): unsure at all n locations
ataaatttttaataaaaaatanttgaatacaaaaaattcattttggcttattaaaagaagttaaaattgaagaaaaccaaatttatatttcaaaattaatgtaattattaaataaaattattttaaaaaaatataaaaataaaacaaaagaaatgttgatggactatcttttaaaaatatggagtaaaatttaatttttttttttttaataatggtattcaattcataaaattccaaaatttatattaaagaatttaataaaagaattaactacggctaatgtaataaaaactaattgcattttcaataaaattatataaataatttgaaaaataattgataaaaaatg

SEQ ID NO: 109617 - DNA, 67 bp, Heterodera glycines
agtgcgtttgctttgtcacttttcgatttctgttttcattttttgatctttagacctcacaacgatg

SEQ ID NO: 109618 - DNA, 573 bp, Heterodera glycines
aacaatcgactgaataatgcctcctttaccgttacacgtttatttgctgattttgttggctgttctttgatttcttatgcaattgatttactctttttttgtctttattaaatgtaaatgactacggtagtaaattcaacaacagttttaacatttattacaaaatgattaaactaggtaattttattcactagctacgctgtatacgatatttgaccccgagagtcgaaacatagactcaaaaaacacgggaattgctcaaaatccagccctactgataaggtgttagttaacaaattcaaatatgtcatgttggccttttgcctttttggttgtggcaaatggaaatggaaggatcgcatcactcattcattctcttgtcatttgtcagttgttgcatttccatgtgtaaatatttaaaccgagttttgttttgtttttctgtgtttctctttgcctttgctaatttctgttcaatttcagcagcagtcaaacggcgcgtcggtcccatgagctgtttgttgctcatgtccaaattcgcagcgagtaaactgcagctgttgcgcaacgatg

SEQ ID NO: 109619 - DNA, 376 bp, Heterodera glycines
tttttgggtaatttaacttaagaaccaacttaatcatttaaatgcgagaaaaattattaacaaaagttttgatggagatcttttacatttgtgttttggtatggtcgaatcccatgctaaaatactccaattgctattagggtatgacatctgcattaattataattataaccaattattctttaatttttacaatctgaatatttctggtggaaagaagggttatgatggtacttaaattatgtgccacatttttgttgtaattcaatgaagcagaatacttgaaggctgagacaaaggaaatgatgaacactacatgagtatgataattgttgacagattaacttagttatggtattgatggctaggaaatatg

SEQ ID NO: 109620 - DNA, 556 bp, Heterodera glycines
attcacttttacgttcatatctgcacagaataatattttttgatgtttcaatggtttttgactggatttagcttgttttggtcaattttggaacaaaagtgagaattttgaaattttttaattttcgactttttgttcggattcgggtccgggattcggaattagtcaaaatgaatgccagattcgtgatcagcgacccagaaaaccccaaggaaatgtgttttacacggcttttttaaaaacttttatttttttcgaaaaatgggggggggggggtaaacttcagtattaccaaaataagtctaagcatacaagcctaacctaagtctatgttcatcgccttttgtatgaattgtcatgactagagatgggatttttaggtttttacctatttttttgcggcttagttatgatgatagaagcccaaaaatagcattttcttcgaacaattgcgactttttagcatctaaaattactaaaactggattttcggtcatagcacctattttggcatttttcgagttttaacacctattttggccttttttcagaaatg

SEQ ID NO: 109621 - DNA, 307 bp, Heterodera glycines
aaaaaaattcatcatctgtccagcggatccgaacccatgacatatggtcattaaaatgcaagaggaaaaaaataatcaaattaacaaatttttcctgggattttcatttgatcacttttttcagatcatttttggggtcagggccaaaaaaacccgaaaattggcaatagtaaatcgaatatgctctacaagataaaagtggtcttaaagcgatctgagcagtcacagttcggaatgttcccttgttagaaaattttcaaaaaaatttaaaaaaaaaattttgcatttaatttttttgcaacagatg

SEQ ID NO: 109622 - DNA, 485 bp, Heterodera glycines
ttaatacactccatccatttaatgaccagatccaattcacatgcgaaatataaaaaaatgattaattgaaaatttaaaacaaaattaagaataaaaatgaatcaactctatcaaattaatttttttatctctttgtgttacctatttcagcttctttttccatatttctctaattaatttttcttctcgtctcacagttcacgtgtaaattttataatttaaagaaatttacaggcaaatcgtttcgtaaataaatcaattaggatctttgttatctgcagatttgcaattctaaaaaccaataaaacagactactaaaaaaaattcttagaaaagcttaaatacgcataaaattcctaaaaagtatgtttttcttgagttgacagacaatgatacaatacgatttactttcataattggcagttcaaaaataggcaaccgttttttaggtgttattgaaaaattattattacaaaggaaaaatg

SEQ ID NO: 109623 - DNA, 77 bp, Heterodera glycines
ttcacccgtttgttgctgtacgttgggctgctagcctccagactggggtttgctgtccttctgttcagtggcgaatg

SEQ ID NO: 109624 - DNA, 70 bp, Heterodera glycines
cgaaattcgcaacgattatgacgtgctgaacaaccgaaacagaagcgacatcgagtcgtggtacaaaatg

SEQ ID NO: 109625 - DNA, 195 bp, Heterodera glycines
ttagtgcactctttctttgcacaatagggcaattcgccctttttaagatagctataaatcaatcattccaattagaaaatgttaaatgtaataaaattatttgaatatttaatattaaatatgacttaataaaagaattacctcagaaaaatatttaggcccttctacgagggcataattttctgcgcaacaatg

SEQ ID NO: 109626 - DNA, 991 bp, Heterodera glycines
ttatttactaatcaaaacgtcattcttttgattacatttccctgtcgccgatttccctcccaaattgttgcgatcagtccgtttttttttcggcacaactcaaaggtttgtgtgttgtgttgggatgactagttttggcgcacccgattaggagagaaaaaaatgaaaatgtaatggcagatgaaatctacggctaaaatggccaattaaaaattcaaattttatagcgctaatcaaccgcgacctttttgcagattcttactcgtggtaattaattgctgtgattgatgagagtaattaatttaaaagatgcatttatcatcaatcatttcatttgtcccatttcaaaattgtgttaaaaacgacggtttttcggaaaaattcttcccattcactgatgaaggtcgaatgaatacttttgaaagactaaagatttgaacaaggaatttgggtggggaaacttcgctcattttgccgcgtctctctcattgtattttaatattaaaagggttggcatgtgacgcagaaagctcaaaagtcatcgggacattccatcattttcaaataaaatttaaaataatttttctttttaaatagaaaagcttttgagaaaccgaataaaccaaaaatgataaattcaacacgatctaaagagatttaatcaaaatctaaagtgtgccgagagttctgtatttttgtcgaaaatcaaattatatcggaattagggatacggttttttaggtttttacctatttttttcctgaagcacctaaaatctaaaaaaattgaaaaaactattttcaattattttagcgtttttcctaagatttattgggacccacgcgtttcggcgcgctcgtttcgacgccagctcgtttttccactatagcttttatcattcgaaagcttttaacatgctctatctctctatctctctctctctctctcatttatcagagaattctctcccccgatttatgggagaataatg

SEQ ID NO: 109627 - DNA, 614 bp, Heterodera glycines
tttgaaggaatttaatgctataagtatgaagaaaagattaattcattgaattgttaagcgatgttttggtaatactgccgatggttgccccattttttgaagtttttattattttcaaatcatgaaaatatgcttccaagcgttttaatggtcgctgctcaagaattcggcatccatttcggtctatttcgaaccctgtgcccgaatttgaacaaaaagtcgaattcaaaaatctcaaaattcacatgttcgaatttgtgcagaatgaaaaacattatgaagtaaattagatatgtatgttttctctgttaatagagaaaaataaatagtacgataaaatgagagatgttttttttcttcactctctatttgttggttctctctcattttatgagaaggcgtgtcaattcaagtgccctttgtatattattaactttaacttctctttcttctcattagttggtacaggatttatttcgtaatacataatacgtgatcaaatgtattccttatgtcatttcattaattcagacaatttatctttagttcgtttttcccataaagaaattcagacagaaaattatttaacttattccttaaaccaaaaaagcatg

SEQ ID NO: 109628 - DNA, 421 bp, Heterodera glycines
tcttgacaaattaataaaatttaaaaaaggaatcaatcgggtcaggaggacaaataatataaaaaattaaataaattgaacttataagcatgagattttgaaaaagcctggacccatcttggtctgggcctgtattttcttgacataacaggaccaggaaaccccaatcttttcgagacctgggttttttctcgctcaattttcgagatatatccgtgcttttgtatacaaatttcccaaaaaatattcaaaattccaccggcggtgcctgctagcaatgtcggaaaatatattctttctttttaaaacataacgattcaaaaaatctagtcccaattccaagagtcacgttaattttcgtatccaactaaatttttttttattgaaaattgtaaaatattttttacagctctctctgatg

SEQ ID NO: 109629 - DNA, 109 bp, Heterodera glycines
tctaagattgaaaaaatgtaagtttgaacccaattttggacataggcgcaaataattttaaaaattagttgaaatataatatttttaggtatttccacaaattgaaatg

SEQ ID NO: 109630 - DNA, 68 bp, Heterodera glycines
tttgggttttatccaaatatttcagctttttttccatttttctcctccacttttcttttttgcagatg

SEQ ID NO: 109631 - DNA, 198 bp, Heterodera glycines
gaataaaaaagtaaatcaattgatcttttatatgacaattcaatataagaaaatgaaatatgttttgtgatttaaacatgtctttataatgatagaaacttaccgatctgagaggcgttcctcttgtccaattatcggcagctgatcaaatggtggacagatcggtcgaaaagcgaagagagacgggggaggccaatg

SEQ ID NO: 109632 - DNA, 163 bp, Heterodera glycines
tcagctttcggtggagagtttgatggaaaaatgccagaaactgggcagcggggagagaaatgccaaaaattgagggagtgccggtaggaagattacggaaacggaggtgacaaaaattgggcgaactatgcctgaaatctcaaaaaaaaattaaacgaaaatg

SEQ ID NO: 109633 - DNA, 142 bp, Heterodera glycines
tttcggcattttgtgtgttttgtctgtatgtctattttttgcctcctgcttttcctctcccttttatcccctttagctgcttcttcttgactttttcctctctccccttttggcattttcctcccctctctcccccaaaatg

SEQ ID NO: 109634 - DNA, 592 bp, Heterodera glycines
tgccattcccgccgcccttctcgtccaaagtgcagcgcaaggcaatttcggaaagtgcttaaatttgtgaaattacacacattcattattttgtttgatgacacttttctgttgcgtcgattcagtaattgtcgtcgagtcgacagagcacggaattggagcaaagagaacattcaatgggtaaatctgagccaaaaagggacgtatgaaaacggacgattaaatgggaaaagaaagggaggaaaggaccgggttgacggagaaacgcgcgacaaaattgtcaagggcaaaaaagtgggaatggcagtgaaaggtgcagtggtgacactcggccaagtcgatggacgaaggaaagggggacacctggcaaagagcgatgaatggacaaatatgggaagacaataagcaaaaaaaacccgacccaatgggacccattggccaaataatcgacaaatttagcaaaactcaaatggaacatttcgtccgtcattttggcaatcgacgaatttgcagaacaacttaaaatatgacagagcaatttttgccataaaaacaaaaagcggacgcattgcaacggagccaacaaatgatg

SEQ ID NO: 109635 - DNA, 474 bp, Heterodera glycines
ttccttgtagaatttctttagcatttttgttgcgataatttaaaaacgatgaatatacaatatagttggtcctcattttagcaacgccactcaatcaattaatagatactcaatgaattcataagcacatcattctgacagttgccacaataagacgttgggttgtgagtctgctgcagaagaaacaatacagaataagtcactaattatcaaattcaaggacatgaatatgaaaataaaggattaaaaattgttgtgtgctcgataaaagaaggagaaaatcagtaaatttaggaacttaaaaatgcaagggtagagcatgcataataagacacaagtaattgtatattataatatgatgcatcagcacgatttgtagaaagtgtatcagatcgttaggcagtttcatttaagctgaacgatataatagatattcagtacaattctatcgctatagctcttttaaaagcaatg

SEQ ID NO: 109636 - DNA, 59 bp, Heterodera glycines
taatctaaatttttttaattgataatttatgtcttctttgttttaggtttattaaaatg

SEQ ID NO: 109637 - DNA, 360 bp, Heterodera glycines
cagataagcacaaaatttgccatttggccaatgggaattatgctcattgaaatttcatttgaccattttcttgctcaacaaagagaggcgccgttaattgaagtgagaaaaaggaacatcactttagggggggcaaatcaaattttggttttttcaatttacacttttgttttgaattaggatatttttaaatctgcccacagataacacacaagtacctttttttgtacgagttgccatgaaaacttttgttttacaaattttgtttagacatttctccgtgccaccacttctgtaagttacaaaattcaattttattttcttgtgaaaccaacgtcaattgaacaatttgaattgatg

SEQ ID NO: 109638 - DNA, 307 bp, Heterodera glycines
aaatgattgagttaaataaaaaatgggacaaatataaatgcgttgagttaaattcaattagctgtcatatgaccaaatgacggaatgtacaaattagaaaagaataaatgatgaaatggaaagaataaatgatgaaatggaaagacccagaagtggaaataattaaatgtcacggggaacaagccgaatgtagtatgtgtggatgatgattgtgaaaagagagagacagagcgaaaataaaagaacagagaaatgcagagatgtaaagagctagctgtatgtggaaagaaaaggaagcaaaattatg

SEQ ID NO: 109639 - DNA, 383 bp, Heterodera glycines
ttttcaaaggtgggagtcctttttcggatgctcaatgggtgccggtgttggatttgtgcgagatcaaatgcgacgaggaaagggaaatttgtgtggagaatgacgaaatgaaacagcagtgctccaagtgtaagagagagggaaggggaaaaactgtcccaattacggcgagggaaggatttaatgatcgggcaaatggccatgatcagactatttttacttgatcaacaaattgggaatgatcggaatttcctgctgatcatttagacaatgaccagactattacttccgctgaaaagacaaataccaactgatcaataaagtcccttagtttggataacacttaagattatgccagtaaatatgaatttcagtgccggatg

SEQ ID NO: 109640 - DNA, 140 bp, Heterodera glycines
tgtaaaaaattgaaattttctaaaaaaaactttaccaatttctcaccccctctcccacttccatttttaggcttgtgtcgcccaaattggtactgacccggcacttttggaccgattggcaaagccaacagttccaaatg

SEQ ID NO: 109641 - DNA, 71 bp, Heterodera glycines
  unsure (1)..(71): unsure at all n locations
cacaacggaagaancacttgaaggccaacgaagaactcaactagttctacggcctcaacatcattggcatg

SEQ ID NO: 109642 - DNA, 174 bp, Heterodera glycines
tttattctctgtcatctattttttatttattatattttattcgtttcttgcggacttattttatttattaaagtttattctttaaaatggaaaataaagaaaataaaaaatgacagaaaaagagaaaccgaaaatggaaaatgatttaagaaaaaaacgacagaaaagaaaatg

SEQ ID NO: 109643 - DNA, 85 bp, Heterodera glycines
caactgagtcccggcggctaatttctcacttttgctcttgtttgaaggcccgtaactttttttctaaaactctgatcaaaaaatg

SEQ ID NO: 109644 - DNA, 648 bp, Heterodera glycines
tgcaactataataattatattgtgcttttttttttgtttgtttttttaaatttaattcgcaatttttcatcgcgggattaatttaattgatatgtaatattcgaatgaaatgatatgtttttatgctcgagttcttatttaaatgcaaagtttttctacacaccagaaatgtgaattttaagtttttgaagaaatcacttattggcatggaaatcctacacctttctggattataaaaaaaaatattcggatttttcgaaaaaatcaagggcgctttcatatgacatagaattttcgttttgatcaatagattcatgattagcccactaccttaaaaaaagttttggtttgtcggaagggatcatgtaatttttaggaagttgcagcatagcggtttccatttcaaggacagataaagctaaaacatatttccgtttcaaaattccacaaaatgacgcatttgtcaaactgaacaaattgagggattaacgaaaaaaatgaaaatttaatttgcttagctgtgattctgtgatttgaatgggaaatgaaagcacataaaaggagcgaatgaatcagtgaaattattcaactttaatttgactgtgcttccgaattgtcaaaatcattaattaattatcgcaaataatg

SEQ ID NO: 109645 - DNA, 330 bp, Heterodera glycines
ataactcagtgtgttgataagccattttgttatcattcgtgatggattacccgagaataaatgagcatgaactcaaatttcccattccctccgggattgttgtcagcgggccctcctcttcgggtaagacgcagttggtccttcgcctgttggcacacgccaacgagatgtttgatccctcgccgaaggtgataggtaagccctctttgccatggtgtaatgggcgtcccattgggttaagtttgggcttacggtgagtactcctcgcagatccccgagctcgagaggcagggcgttgtcccgcacgctggtcctccctccgaagaaatg

SEQ ID NO: 109646 - DNA, 149 bp, Heterodera glycines
ttgcgaaatggacgacctaataattgacgaaatgtggaaatatgcaatgacatattcaattcgaatgctcaatttggtcccaaattttattccctttaataggccataaaataaattcaaaagtaaatttaattaattgtcaggaaatg

SEQ ID NO: 109647 - DNA, 396 bp, Heterodera glycines
aaaatagggactaaaaactgccaaaaatatatgctttaaccctcaaaaattccaaaaaaggtgtatatattcaatatttgtttaaataaactgaaatacaataaacaaccaaaaaatggatttaaaaacttaaaaatgcaaatttttatcgtctcccattgtataaaaaatacttccaaatttgccaaaatttcgaaaagaattttcatttaaaaaaaaaaaaaattcgcaaaaaactgcgaaaatatttattaaaaatgccaaaatgaccggcgaaaactcaaaattttcgtatttttgggggagtaatttttaaaaatttccaaaaagtcaatcgttaggggtgtatttttcgtttttttttgtcatttttcttgtgaaattttgccaaaaatg

SEQ ID NO: 109648 - DNA, 1003 bp, Heterodera glycines
gtataaatgaataactattaaaattattaaacttatattcacttataatgttggcaaacaactgactgatatttttgacagacacttcttttcactaataacaaagaatatatattcaatcgaaaagtttgtataataatattatatcataaaatttaattccaaaacaataaattaataagtcatagccgctacttttattaatgagacatcaagtctgtacagcaggattttgcatatttcgtcaatttatcagcaattagatgaattattctattatattactcatagtaaaaaaaagtaaatatgaaaggaatatgtcaaaatttcacaaaagattatatagtttatgttcttaaatttattttgaatttttttgtaaaagtaagagccaggaaaaataaaaaaattattaaaatgttaattaaaagaccaaaataattaaggtacttttttcataaatataaatttttgtgtataaattgtcaaaagaaatgcatttgagtcaaaagttcatttatctatcaaatacaacaaaaaatgaatttaaataatttataaaaaatattaattaagtaatttctggataaaggccgcgattttatcaagaaggtgagggatcgttaaaaattttattggaaaagcgaaaatattttacggaaatcactgtgatagacccaaattataatatgataaagactaaaaggtctttttacataaatgacatgatagacacaaattaaaagatattttaaataaataatttttcgtgaaactatcaaccaatcattgattaaaaattatttattaaaattatatataaaattcctttattttttattgtatccaattaaacgggccataaaattcaaattggcagagaatatattaatgagtatttaaaatacaaatattttttttatatccttatttagcattccataaacttaaagtataatcaataaacgaggagatgcacaatttccgcaccgacttcaacatg

SEQ ID NO: 109649 - DNA, 51 bp, Heterodera glycines
attacaaatgtcaaatctgtacacactcattgtcagctaaacaaagaaatg

SEQ ID NO: 109650 - DNA, 72 bp, Heterodera glycines
agtgaaaaaaaattcatttaaaattcaaatgaattaattttctaatttccagcaaaggatcggcctcggatg

SEQ ID NO: 109651 - DNA, 122 bp, Heterodera glycines
attattcaaaaggcgatgcccatgagtttatgatgttctttctaaatacgcttcacattggcttgaatggcaccggaaagacgaattcgtcaatcgtttataagattttccgtggccgaatg

SEQ ID NO: 109652 - DNA, 554 bp, Heterodera glycines
  unsure (1)..(554): unsure at all n locations
aaattagtaaataaattaggtgagtattacattttaggattntaaatacagaattcattttatcanaatgggnttaatggaaatttgtacaaaaaaaaattgtttttagaaaataaggcctaagcctaaaacttagcctagcctaagtaattgtactagttgcctttgtacgagttgtcatgacaccgtaatatgctctattagcttgaaaatttaaaaagaaaattgatttggaatgtaaaacaaattaaattgtttttatttttatattttaacaggaataatgatttttatatttttaaagttgtcggcatttcgactaattttagctttgtcggaatttcgactaattttagctttgttggtatttcgactaattttagttttgtcggcatttcaacgcgtcagcatttttacgaacagcggttaattaagccaaaatatgaaaagccaaagccaatgtgaactatttcaaaattaagctttcaattacaaatgcccttatacggcaaccgttcgaattgtttcgcaaagggaaggaaaaagtgattatg

SEQ ID NO: 109653 - DNA, 207 bp, Heterodera glycines
tcaaaaggggggcggctttatttcagggtgggacctaatcaagggagtggggctatattataggaaatacggtaatttgaattattttatattaaatgagaaaaataaattcatatttatgcaaaatgaaatttcacataataacaaagcctttgctttggttgatgtattccgttatcatcttgcttttcagcgcacataccaatg

SEQ ID NO: 109654 - DNA, 67 bp, Heterodera glycines
ttgatggcgaagcgttaaatgcgcggaccgcccataaggcaaaaaatgccaaaaaataaaaaaaatg

SEQ ID NO: 109655 - DNA, 274 bp, Heterodera glycines
ttatgagtgaaggtccaagtgcatgttgataaacaatctcaaagccaaatgaaaactttttgtagttttcgtcagtgtcaatcatcgtgtttctgtcacttatattttgatatctttttgtaacccttaacaattataattggcaccaagtcattaagacatattttcatttagttgcattttggcgaacaaaagaaatctagaaaaatatttttaacagaggaaattagagttccgaaaaaataaaataaattatattttattgacagaaatg

SEQ ID NO: 109656 - DNA, 763 bp, Heterodera glycines
ttctgctataaaatttcaaaattttgaatatatttaagaaataagaacaaaataagaacaatagcccgaaatgaggacaaatcttacaaataaggacatttttattttgtaagatttggaccctccaaataaggacaaatcttataaataaggacagatccgagccctggttttaatagccccaaaaaattgtacaacattgatcattttgctaaacatctgctgttaaaaatgatttataaatgcacaaaaatttttctggcgccaaaataaaataattatttcggaagggaaaatttgaagtttagggcctttttaaagacttttatccttttttattagtgaaattgtattgaatgaatttatcgggataaatgtcagtctcaaaatacgaaaaatatttttggttttttttttgcataaaaatgctaattatatgagtgaaatgtttaataattactatcattttaatacttttgttaatcaatccaatttacatttaataactagggctcggaaaaatatggatataaaatcgcaaaatatgtgccgctaaaatttgctcacttttagcgaaaaaccaacccgaaaagcgaaattttcgcattttagcttatttttggcgtaaattaaccaattttatcaaagttcaaatttaatcaatattttcgaaaaattttgttaaaaaataaccttttcggaaattcaaaaaggccaatttaactgatggaggccattataataaaggttttctggaaaaatg

SEQ ID NO: 109657 - DNA, 192 bp, Heterodera glycines
tcggccaactactgaaaaatcttttaaattttctcagtttcctgtgtccatctcaattcaatgcctctgacgaaaaaccaaataaaataaaaataaataaatttaattattacattttaatgtgccaattaaatttaatttttttttttcatagggaagaaaatttattcagctgaagagaaaaaagaaatg

SEQ ID NO: 109658 - DNA, 295 bp, Heterodera glycines
tattttttgttattttcattgttcatttcttcggtgtttatttttaaggacgaattttattgttccaccttttgattactgtattgtttcttatatgtatatgtatatatatttttttgccaaattttatattaaatataaataattttcacttaatcattaaaattttacttatgttggttggcctccaccgttgtcatgacaacatggaaaagtagcaaaccaacaaaaattataaaataaatccaaaaaatatatttttcctcttttgaattttcaaaaaattaaaaaaatg

SEQ ID NO: 109659 - DNA, 443 bp, Heterodera glycines
gcaattagggatttgatctgccgacaaatagggccatacttgggaaagggtgggggcatctgtttttagctgtgtcctatttcggcatttatttttgatctttcaaaaccactctgatttatttgcacagacggggcttgctgatgggagcggagctttgtacattgggacggcatcgaaaggcataatcgacagaagtcaccagcacaatgcacaggtgggctttaacaatgatcacatttaattgatcattagcagtgaaggaatgccaaacggaaaggattgaaaagatactcaacaaagacaattttcgttgatttttatgacttaaattttgccaatcttttgccgcgctgattaaattctgatcaatcatttgtcatgtcaattgttctttgaaggtttatcggtgcctttacgcacaaaatccattcaatgaaatg

SEQ ID NO: 109660 - DNA, 399 bp, Heterodera glycines
aaaaaatcaaatttatttttaaaattttgttacttcaaattcaacaaaataaaataaaaaattatgagaaagtaaagttttgtgaaaatttttaatttcaaaatttttgaaaatattaaaaaaaaaaattcatttacgagtaaacattttcgaaattttagaggtttctataaatgcaatctttatttttattttattagaaaatttgaagcaaaaaacaaaaatattcatttgcctaaaacatgacattaagcaagttttatcagctaaacaataattaaaatggcatgaaaatttgaaaagcaatttaacaaaagcacctaaaataaattctgaaaggctttgctgagcttccggcacacttcacgcccatcatcggaagcggtgctaggctttatg

SEQ ID NO: 109661 - DNA, 90 bp, Heterodera glycines
attgataaatagataaaaaataaatatataaaagcgaaacagctaagagagcactcgtttaattaaacatttagaagagcgcaaaaaatg

SEQ ID NO: 109662 - DNA, 266 bp, Heterodera glycines
  unsure (1)..(266): unsure at all n locations
cctgcannggtcaaaattaaagttgaattttcgccggtggtccgaaaatccccccccatgtgttcaaaaaatggccagagccaaagctgctaaatgccgaagaattgaaacaggaaaaaggcattggcaaacaaattattgaattttttaaagggaaaagcccaaaaaaaggaaaaggaaagggagagagctcaacagaatcaattggtagcaaagaaaatgcatatcgtttacatgaaaattttaaaaactttttgaatgaaatg

SEQ ID NO: 109663 - DNA, 354 bp, Heterodera glycines
actgaaataatttagcaaaatttccattgtagcatgattgggtccaacacaattggcttttttttagaaaatccacgggatcctcatccaaaccagagtgctctcccgactaagctaccggggggggggaggattagccatctttggattctcgatcaataaattgctttttatggagcaattttacttgcattaagcatgtcagggatggacaacaccgaagccgagtcattgttgcttgtatagaatgagaaaaggtccggtgacaacaaatggggacgacgacgacggcgccatttgggggatgggaaaagggagaaaaagcggggcgacagcaacgcgatgtgatcaatg

SEQ ID NO: 109664 - DNA, 101 bp, Heterodera glycines
aaaaaaatgggcaagtaaaaatcgtaattcgctcaaaaagcttctcaaacattttagcgcttccaattccttctacaatcgcctttatacatcccattatg

SEQ ID NO: 109665 - DNA, 1003 bp, Heterodera glycines
atttgaatattaaaatttctttcaaattcataaaaataattttgtagaaattaattggcattccataagaaatttccatctcattataatgaataccttttaatgctcgtgcgcattatcatttgtgtcttttcattaaatgtcattctcttttttaattttaaaatgacacaatgcgatctttctgttaatttttcataaaacaaaataatttaaatagtaaaaaaaaaatttaaaattattttctgggattattttttgaattcatttttttttattcaaattttgttaagttgtaccaaatcactttaatatacatataattaaattcaataaaaaaaattactcaaaaaactaattaatttaaaaaaattgtttttaaatagttttttaaaagtttttttcttttatcattaattttttaaatactgacgttttatctcatctcattaaaatattttgtatgttgatatgcttgcacatttaaatggttttgttgaaaataattggtgtaacgctaattacttgcaaaaagaatacatttttatactatttctggcatggcatttcgtggcatttctttgaaaattcgttaaatttttttctttcatataatctgtaatttttaccctaaatataactggaatataaagagtttccttaaaaaaaatttgtaatgaaaattattaatcaaatttattagtcttaccacctcaataaaattttaattaaggttttaccttaattcagcagcaaaactgccatttaatattactttgaatcagggatgggctttcgctttcgcgttttactttcgcaaatttagattttttcggtactttcgcttttgcgttttctcgtttcgcattttatttttcgatttggcccatccctggtttgaatgtcattaaaattgcataaaatgaacatataaattgcgaatattccattattatctatttttaaattaaataaaatttatatttttagattaaataaaatg

SEQ ID NO: 109666 - DNA, 253 bp, Heterodera glycines
tatcagtggcgccattttttctggggggttggaggaatgttcagcccaaatgttgtggatgtgggtggaatttggggccgatgtcgaaatggggtgggaaaaccgttgcttgccggatcttgataaatgatcccgaaagcttagtaatttggcggtgttatttggaaaggtgaaaaagaaaatatggggacttaagctgtaaaagaagaaactaaattaatttattaattcatatctttcagaaaacaaaatg

SEQ ID NO: 109667 - DNA, 341 bp, Heterodera glycines
accatggcttcattggattgggccgcccattaatatttttaatttttggggaaaaatcatttgggaaaaataagaaagaaaggcaaaagaaatggtttggaggaaatttctccgccatcaaaaacatagttgggtttaacattctttcaggtattggtcatttagggttaatccataaattatgcaaaaacaataatgcaaaaaacccaaatatttattattcatggtaaataaagtgatccgcggatcaggtcgatttagaggaaaggaaaatagcgttggatttgatgagaactactgaggaaaagaaaaggaatacaatccacggatcgagatccatg

SEQ ID NO: 109668 - DNA, 214 bp, Heterodera glycines
tggcattgtcatcggccggaaattcgatcaagaaattgtcggcatagaaaaagagaaagtgaattgatggaaatcgttgagaattgacgggacgaatttacgcaaacggcggaaaaatttggcgtacaattccaaggcacaaatgtttttcccgataattggcaaaatgttgcgcaaaacggactccaaatcgggatcagtgctcttaaaaatg

SEQ ID NO: 109669 - DNA, 332 bp, Heterodera glycines
ttcaatttttattcaaatcgtaataaataatttttgaatttaatacatcataaattttagtaggttctaaaatgtaaaaaataaaataaattttcgaaatcgctcataaattcttaaacgaattcttatatttttgagtcatttttggcactgccatttttgcggcttcaaaaacatttagggcattataacattttcttttttttgttgctctaagtctgtttgatttctaaaatgcaatttctcgtatgtcttaaaaaaccctttggtcaaattgactttttatctcctttttttttgctcattagctgaatcgctcgcccgtcaaaatg

SEQ ID NO: 109670 - DNA, 1003 bp, Heterodera glycines
aagcaaccaaatttttaattcttgatgccatttgatggccttaaacacactctgtaagagaaactaaaaaaccttgtttttttgaacattttcgccataatttttttgaaaattttttttttggaatatttcaggcactaaagagagagagcatttagaactatcgaatgatatcaagtagggtagcacgagaccggtaccgataccgatccggtaattaccggttttttcaggtaccggtaccggtctcggtcccggtttttgaaaaaagtcaagtctcggtcccggtttttgagtaacggcggtaccggtactaaccggtactaaatatgcactggtaagaatggagttctgagagcaaaagaaagagagaaggttgggaaatgggaaaatatttgtattttgaataacatttcgccaaattttacagtcagtgggttgtgtgtcaagcaattgtccacctcatttatttctttcattttttgatttccatctactttttttcatttagaattaattgattaaaatgtctgatatttggaaacattacaacaaaaatttgactggtgcaacttgcaaaatctgcgcaaaaaaagtcacccgaagtgacggctctactacaggaatgtggaaacatttggaagcaaagcatcaaaaggaattttctgtgttaaaaaacacagaaaatttagggcaaatgggggaggataaggtttattgtgatttttattgtaatagagactaatttttagaaacaaaagcaaatacaatcttttttggtgacaaaaaagaatgagacggaaattgctgaagaacgcatcgtgcgaataatggtccggcaaaacaattcattctattttttcgatgacccagacttaaaggatttgtttcaaaaagcacatccgaacattgtacatcataatatatcttatacattgtgaatttatttttgaaggatcttggtgcacgagaacattttcgccgaaaagtgattcccaggatg

SEQ ID NO: 109671 - DNA, 542 bp, Heterodera glycines
ccccctatcacattttcctccaaatatgtgctttccctttgcaataaatatttgtgtgttgtcctttcctttggacagaggaaaatagcccttccctttgggcaatcaccaaatttcggtcatgcggttggggcattcggcgcccctaatcgcattcggagcgatcagcaattgtcgtgcgggattggatcactcctgatccttgcccactccctcccatcgcccttccctcctcagcgatcggagtcgggactcatcccggcaggcaattgggaggttcactcactccttaactgagtggtggtgccgttacatcacccccattttgtcggccctccccattctcctttctcggcccccttgggcattcaattcggaaaggggtcgacaaagccgagaaggagggcaaaggaaaccggcgatcacccctccattgatcgccacctttttcgacaaactggtgccgttagcaaggggctgcacaactcatcgaccggtcacccgacgaccgcgccaaattcggacttcgaacagccgcaatg

SEQ ID NO: 109672 - DNA, 278 bp, Heterodera glycines
aattttggaactgcgctgcctaacggcggtgcttaaagtgcgctaaaaatgatcaaatgattatcaatttttatttttcttaattccaaaatgaattcgaaacgcaaaaatttaatcataattcatgtggtaaaaaatgcatttaaaaataaaaaaattcttgaatttgcttctgaattttttaattttaaatagaaaattcctttttctgaaattcacaataacaatttggcgaagaaattcattgaaatttttataaagcattttgattaaaaatg

SEQ ID NO: 109673 - DNA, 361 bp, Heterodera glycines
tctgaatttgtttgttcacattttgcgccgccgcttttccttttccgccgctgcgcacattttccaatttttaatgcacacactttctcacatttattccactgtcttttgcttaatgggaacgcccgtcagcgtggggccgcgtggcctaatggacaaggcgcctgacttctaatcaggagattgtgggttcgagtcccaccgtggtcatccgaatttttttgtgtttttttaaaaatccgttcggaaagccattaaaaagcaattaaaatatttcaaatagaaattattaaaatgactgattacaaataagatttgtctccgtaaaattcgttttaactcgaaaaacattcccaaaatg

SEQ ID NO: 109674 - DNA, 79 bp, Heterodera glycines
aaagagtgttgatgacattggcagcgttgttcgcctttctgagagaaatgtaaattctcttcagtattggaaaaaaatg

SEQ ID NO: 109675 - DNA, 95 bp, Heterodera glycines
tgctcccattacagtatcccgaccgtttccaaggccttttgttacctcaaaaatccattttattgggtggtgctcaaggcagtggaaaagagatg

SEQ ID NO: 109676 - DNA, 321 bp, Heterodera glycines
aaaattggaggacaaatttattcgcgaaataattatttttattaagcgaaaatttgcgttgatcagtaaagacattttgtgtagggcaatttggacaatttcgattaaaaactatttttgtgaattgtcccaattcgtcgaattcgatttttgcagcataacgggagaccatttatgcctcaattaattaattaattaattgttcgtgcaacaatttgtaccctttaaaaagcaatgaaaatggtcagaagaaagcgccaattcatttattttattcagtttaattattttgtcttcgaaaatttaattgcccaaaatatg

SEQ ID NO: 109677 - DNA, 216 bp, Heterodera glycines
aaacaatgtgtttgatcaatcatccgcaaatgttaagatcaaagttgcgccaagaaaaggaaaaagaaatacgcggtcgtctcgcgttccgcgtcctcttccaacgcttcgcggcgttcctcgcgctcctcctcctccgcctctttctcttcttccttttcgtcctcttcttcttcctctcattcaccttccgccaaaaaacaaaagaaagaaatg

SEQ ID NO: 109678 - DNA, 75 bp, Heterodera glycines
ggtgaacccttttataattttaaaagctcaatttgtactgaaatttaatcatttcagttagcgattgacagaatg

SEQ ID NO: 109679 - DNA, 516 bp, Heterodera glycines
ttgttgatggccgaatggaaggagttagctccctgagacggaacaccggcacaaacgtaaaaccaaaaaacatggcaggtgatttttgccggaacgggtcactaacggatcgaccgttaagtattttcatagacagccaaatccaaatatgcacatgctggtagcactcgattattctcatcaaaattactcaaaattgcattataataaatttatgaaaaagttgcaaaaaaagaaatgccactcttttagggcctttttaaggcaagttgactttgtttcagggggctttcaaaggtatcattattaaaacaaaattccaaattgtgccgtttttaaaaccggtcagcggcctggctcataattttttttggagtcgtgcattttttaaaattttgtccttttaaaagaaatgcttaaattggttctatcgaaacagacaagcttatttaattaattaggttttaagaaaattggttttaaaaaattgaaaaaccaaatcaagcagcaggaatg

SEQ ID NO: 109680 - DNA, 1003 bp, Heterodera glycines
tgttaatttcaatttcttcttttaaagaagaaggcagaattattttttcattaataaaagttttcgtggcaataaaaaatcatattcaaaaagcgttggttacgtccaacatcgacaattttatgaaatttttttagcttataacttggtgaatactagagcaaataaaaccattttatgctcattttgaagggaaaattctggagaatattgtaaattttatttggtttggccttaaattgtggacttggctaaaaaagaattaaaattattgaaaatttcacctagttgaaaaatttttccctatgttcaaattttcttcaaattttgcataggcccatagtttgaccccctttatcggatccctgtttattttatgaaagttatgtttttaactcgagatcagctcttccatttttacaagggaaaatccccggaaaattttaagttttgcaaagttttggcgttctgattactaaataaaaatccagcataattgtacttggagcccaaaattgggccgctgtgtttaaacaattaaattaattatataaatcaatgtcaatgaatttcataatacaaaaatatttaaatataaattaaaaataataatttccccgtttttgtataaggtatcatattttgtaagattcaatttaatccatgtaacatccgcttgttaagccttaagcaagccgtataaaaccatgatttattcaattctctaattttcctggttcaagaataacctcgaaaaaacaaagattttatttatttttttaaatttaagcaatattctaatttttaaaaatacttaatataattgaagagtgtaataataattatttgaatttataaatcgcataatttaatgtaattaggtattatattaatcattgagactattttcgggtcgcctacacttagtttttttttcggttcgacctagtatcattttttacaataactttttccccgtttttaagtcgtcattgaacaaatg

SEQ ID NO: 109681 - DNA, 233 bp, Heterodera glycines
ttaaaaaattaaaaaacgggcgcgaagccccgtcctgaggccgcgaagcgtcctaatttccctacaaagtttgaaaacgggcgcgaagcgcccgtcctgaggccgtgaagcggccgaaagtcctccacaaaattatgaatgcgtcctcgcgatgccttaggccgaaaatcccttggcgtgggctgagaggggagaggcgtgtgggggggggggggcagccactccattctatg

SEQ ID NO: 109682 - DNA, 321 bp, Heterodera glycines
tctaaataaaaaagcacgggaaatttgaaggaaatgaaaattattttgggttttttgggaaagaagggatagacggtgccgacaagccaggctccaagtttttcttcctattgggttgatgaaaaagttctgaccctctgaaaaaacaaattatgcaaaaaaatgatatttaattctaaagagattgaaaaagggaggcaggcaattgggggatgaatcagcggacggttggccatcttttggccatttgcattcgttgtatagtcattacttttgcaaaatcgaacgattttcaaaaaatggaaaaaattcgcctaaatg

SEQ ID NO: 109683 - DNA, 713 bp, Heterodera glycines
tattccgcgtgccgtctcttcaaatggtttttcagtccggtggtgttcccattcgttgtcgaaattttctgatggcacagcaaacatttggccacgtcccgagaaatgcgtttgaaaaagcccactcgccaaaaggcactccgcaggcgatttttgtcgattaacatacagagaaaaagctaaaatttagttattagtagcaattaacatcatttaaaatttaaaaggatttctgctatcgtcagaaactaattaaagtttgtgcttttggaaagttaaatttgaattttaattattattattggcatttcattttattcgttaataaaattcgttaatttgcaaatttaagctcaggcaccaaaattgtcccttttcctttaaaaatctttagttaatgagacgcccaacttttttgcgattcaatgccattccttctttgttttgccaatgttctcccaagcacttaatgctttcttcttatttttcgtccgattgtccttcaccgtctcatcctcaattagccgttgtctccaaatctaaagtccaatttttaattttgtttattatttttactttcccaatttaaggtctatttttgtttattttgcatgtcttttccccttcagtttcgctctccctcatcggaagatgccgtcgacacgtctctcgcccgtgtgccttgccattacatcaaaacggcccgccaaatg

SEQ ID NO: 109684 - DNA, 778 bp, Heterodera glycines
ttttcaaaattttacctataaattggctaattttcagtgaaaaactgtttataaatgatcaaaatttccaattttttccccggcggcgcctatcggcaccgccgcgcccccaaaactcctattttttcttagaaaatggcccaaaatcgcaaaatttggtaatttgatgaaaaactgttctcagcggcgcgccaaaactcttatttctcattagaaaaatgatacaaaaatcacaaaatttgatgattttttggtgaaaatctgtcaacaaattttaatcaaattttcaaaaattttcccggcggcgcctgccccctcttcccaaaaagtttttttggaaaaagcgcgcctcaaaaaagcgttttattgatttttaaatttggaataaaatttaaaaaaatgatttttgctttatgattttaactattaaaaagttgaatattttggggagggaggggtagcaaaacaaggaagtacccccagtgttaagcattttgttaagcgaatgtttaaagatttggtcgctggcagcacattgtatccgattactataatgtaacggtcaacgggattatgtgaaaaggccttaagaaagtccatttatctgcaacacaacaatttgtaacaactctttgctggattcaaaaagctgcggacaagacccattgaaaatttattcaaaaaactaattttcgaacgcccatatcttttttctaactcatccaaccggttagcatttgcttagaaaaagcttcttctcatcaattgctttcgaatg

SEQ ID NO: 109685 - DNA, 270 bp, Heterodera glycines
tctcaaattgaagtgctttgacaatccatcgacagggcaaacagtgagaaaagcgcaacagacagaaaacggcaagaacagagagatgatcagtgatcaatcggtcgaccggaaggcaaaattggcaaacggaagccacattctttcgcagcactctgatcgatcagtcccgtgtcagtttcggcaacgcttcggaaatcccggcttcgatcgaacattcttcgctgtctcgcctgtctcgacttggtttctcccatccctctgctaatg

SEQ ID NO: 109686 - DNA, 176 bp, Heterodera glycines
tccagattgtgtggtggttggggttggtctgtgtagaattggtgacaatttcgtccaaattggcatcggaatcgtccgcatttggcacattcattgaggaaacgacaaccctgggccatctatgggacgaattgctccaatttctgaaccatattctggtgcatgaggaaaaaatg

SEQ ID NO: 109687 - DNA, 600 bp, Heterodera glycines
tgccgggcaaatgactgaaattaaataaaattaaatttttattaaattaaatttcaattaaaatgaaacgaatggcgaaacaaaagtcccttcgatcggccgaatgggcgtttatttaaaaagaaattgcgaatggggcggcggtgagcgaacactttttctcggctttgctgtgaaaatggctaatctcgccaatcgtcgggggaatgtcggcgatggcgtgggaaaagcgaagtgtaaaggccaatttatgtgcttcgaatgatgagaatcgttcggagttcacttttgtccctttggctctgctgatcactctctttcccagcgatcacttccgtttttgctaatggcgggaacgaattacgccgtcgtctccgttcacccgtctattttcctccaatcactttgcctatttattcgctcgcttttcctccgatcactttgcctatttacccgctcgtttttcctctgatcattttgctatttcttttaatccgatcactttgccttttatccgctcgcttcccctctgggcttttcctttattttctttggctttttcaatgatttttctcccttttagggcattatttgaaaatg

SEQ ID NO: 109688 - DNA, 267 bp, Heterodera glycines
ttatcaaaaaattattttaaaaatcaggaattgaaaatgcaattttattttattaatattaaagtgacttaaaatgaatgaaaatctgattttatacttgttattatttacttaacctatattcatgactgttataaatagcgcttgaatttctttttttttcattaatcatcttcgcaaaattattttgcagtttttttttctagaaaaggacttattcgttttaaaattttatattaattaattctagattaatttgcaaaaatg

SEQ ID NO: 109689 - DNA, 376 bp, Heterodera glycines
  unsure (1)..(376): unsure at all n locations
caaagaacatgcagcaataagcctgcaaaatctaataagtggaaaatacatgagtatagaattattttcagaaagtgtcaacagacttttggaaaaatatattgncaatttatcaaaaattttgagaagtgagttagaaatgataatcttcacgattcaaaccaattttcgttgctctaattaatccaaagcgaaacaacaaagatggtgttttgaacgaataaagggcataggttattttgaagaagtgtcaaagaacatgcagcaataagcctgcaaaatctaataagtggaaaatacatgagtatagaatttattttcagaaagtgtcaacagacttttggaaaaatatatttgaaataaatcaaaaattatg

SEQ ID NO: 109690 - DNA, 71 bp, Heterodera glycines
agttggacacggccaacgaccaaatccaacgattggaacaaatgcaattccgaatttacgtataaaacatg

SEQ ID NO: 109691 - DNA, 719 bp, Heterodera glycines
tgtcgaatttgtacaacggtcgaccattaatgaatgactcattaatgagtgggatataaagaccaaatgacctccggagaaaaaaaaagattacaaatttgttctgaaaatgttagagaaaagtgaagggcagatcccttggatatgtttacctttaattaattaattaattagcgacaagtcacaggaaaatggccagccagctaaagtacagtatggaatattgttaaagattaaaaaacaaattctttaaaaaattgattacttaaaattggtcaaaatacttaatattcatattaaaattttaagttaaaataaataaattataaattataaatacaatatgcttgactcattcattttttaatgatttaaaaaatatttttattttctttttaatgtaccaaaatttagctatgagtttgagtaataagtgatcgaaaccactttttataaccatatagttttccagtcaatttaaattaatttattttttgccaaacttttttaaaattaattttcctcttatccttaatgattaaatttttgcgtttatggcatggtgaggaaccaaatataactcacggcaattgttttccgtccaattcctagggctatagctgtgacacgccaaacagattaggcgctgtgcccggttgataattaattaattaattaacggtcattaacagcaactgttgctgcacactggcaaaatg

SEQ ID NO: 109692 - DNA, 91 bp, Heterodera glycines
tttttagactaaagatataaaattctaaaagttaaattttctatttttttttgttcgatttcggatccggtattcggaattggtcgaaatg

SEQ ID NO: 109693 - DNA, 402 bp, Heterodera glycines
  unsure (1)..(402): unsure at all n locations
atagattttnaaagaagtgataataactgttctgattatttttgtcacttcaatgaaattattatccataaaaccccaaaaagaaaaaatgatttttttcaataatttggcaccaattaaggctaaagaacgtgtttttaaggaccaataagttatatcaagcaagatattcttgtaatttaatgatgaaagccttgctttactattttatcttattgagataaattttccaaatgattttttttttttggcaaatttaatcaatataatcaaattgatgatttttattggaataaatttgccaattattaaattatttggcaaattaatcaatataaccaaactgatgattaaataattttggcaaaaaatgattaaatttttacattaaataaaaaaatg

SEQ ID NO: 109694 - DNA, 379 bp, Heterodera glycines
tttcagtagaaggaatatttttgaaggaaaaagaaccatcagcttaatttaaaaatgaaaattgtaaaagtaaattccgtcattaagactaattgtaaaagaccctctgtcggtgtaagcaaatcgtcgtccgcgaagcaatcatccactacaaaatcattgttgtttctgctaattgttgtgtcgatttcattggagtgagtagaggggttcgtcatattagccttttccttattttaatttgcaatgtctgcaaatattcgaaaacaatgaatcaaagaatgtaataaaaaataacaagggaaatttaaaaaaatattaaataaaatatgacaaaattaaaataattaaatttttgtattttttggtcttaataatg

SEQ ID NO: 109695 - DNA, 784 bp, Heterodera glycines
ttttcaagctattgctcattatttgcacattttaaatgattcatcatccaagcaaagatggactcatttcaaaatataaatggcattcaaacgaagttttaacccattaaaccaattgaaagcgcacattagcaaagtgccgccatttctttcgcctttattaggccaaattcactgggctttgaaaaaaaaagcattttttaattctgttaataaacttatgacttatgatgaaaacaaaaatcaaataaaaacgcatttattggaagcattttcaaaagttcgaatgcatttcgttggaatttgatagaaattaataaatgaattggcctttggtgggaaataataaataatttaattattgacaaagtaattaagacttatttttcgtgcttttttctatcaaaaaaaagctacagaaaaaattaattttaaataaaaatattaaattgtcccacgcttaatttcgttggtatgctaaagaaattttgtccgctgtcattaattcactttattattaaagtgaaaataacacctgctgttccctcaaatgggaatgaatttttatcttttttcgattttttatataaatttttaaaattttcccgacttgggctttctttaacaaagccaaattcgatcgagatcataatatttatcgactaaagactgaggagattctcgagcacattaataggttattgttaatgttttcaatttcattttttcagtgatttaattaattgcttttctctcacgacactttcaattcattttccaaatg

SEQ ID NO: 109696 - DNA, 168 bp, Heterodera glycines
ttgctgcggttctgctgtttaacgcattgttgcgaatttcaacgattttcgtcccactgctaacgcattgctgcgataagtgaggacgtggtaccgacttattagcgcattgttgctaacttttggactccgaaacgccaaattttattgccgccgcttagagggatg

SEQ ID NO: 109697 - DNA, 246 bp, Heterodera glycines
ttttccattttttgcattttttttattattccggaatgaactttcaataaaaccatttttatattattttttcaatttattcacattatttatcaatctttgtcattttttattattattattaggtgctctccgagcccgggttgaaagcttcaaaaacaatttttaaatttaaaattttatttgtaattaattatttttacattgccattttttaattattaggtgctctctgagcctgggatg

SEQ ID NO: 109698 - DNA, 99 bp, Heterodera glycines
tggttggtaagggaagaaggggagggggggcaaaaatgggccaaaatgggaggggctgtgaatctaagacaaaaacgggaaatttttgctataaaaatg

SEQ ID NO: 109699 - DNA, 81 bp, Heterodera glycines
aaatattctacgacaacaaattggtcacttatcagttgacgaaaaacattcacttgcgccaaataataaaccaacaaaatg

SEQ ID NO: 109700 - DNA, 174 bp, Heterodera glycines
gactgtcaacctgcgggaaacgatcccgctgtccatcgcacgccgttccctccaccgcaagttcatgaaccacagaccaatcatcagccggtcgatttgctgtttggacaattcccaagacggttcgagcagctgaacatccaagaggaacgacgggcagtgacgcccgtgatg

SEQ ID NO: 109701 - DNA, 401 bp, Heterodera glycines
atttttttttttgaaaaattttcggttggggtgtggtggaaaggagccccgacttttgcggttatgtccaaaattggattcaaagttgcattttttcaagtcctgatagcttaaacagcattaaaattaagaaaaaactgtcttctagtttattaggaacattaattctgttgtttgattttattattttttcaaaaattcattaacgatcaaatgatcggatacaatcattttcaataacttatttaaagctgattagtcgatcagggattgaaaaaacttaattttgaacccgattttggacataaccgcaaatgtcgggccgcaaaagtcggtacacgggtggaaagcattggcaaaaatgttttgacttttttttttagatggccgtcaaactcatg

SEQ ID NO: 109702 - DNA, 80 bp, Heterodera glycines
cgtaagaatggatttgattggcgcgccttttttttggctaaatgtgtaaatcaatcgttttttttttgaaggccaatatg

SEQ ID NO: 109703 - DNA, 509 bp, Heterodera glycines
attagttgattggcgagaaacaaatggacgaagccgacctcaagcattgccctataaaatgcattggattttttgattgataagaatctgataattaattaggttgtcataatttgtattattttttgcacgaataaaagttctcaactgaaactagcactgtgattttaaggcagatttcaaaaatatgttaatttattttgtgagtataactttaaaatatttgcttttctctccttgatcgataattaatcattagggagaagcaggcttaaatggtacaaaattccaaaatttagatttaatatggatgaaaaaaaccgaactatggaagaaaaatatggacgaaacgctgagacaaggacaaaaagatgggaaatttctaaagatataattttttaaaatttttataaaaaccgagaagacagtttgatactttaagtttgaggcgtaaaattgttaatcgaaaaaaaaaatctttcatttggttcaaactttgttgccaaatg

SEQ ID NO: 109704 - DNA, 177 bp, Heterodera glycines
gattttcctaatgcaatgtgttggtgttcgaaaaaaaacaaatgtagtaaaaaatttccaaaaaaattccgtgaaaaaacagaaataaatgaaaattgttacccgttatataaacgccctaacaatggaagaacttatacaaaaattgattggaaaacagggaaaaaaagagttatg

SEQ ID NO: 109705 - DNA, 745 bp, Heterodera glycines
gtgccatcgacagcgaacaccccggcaaggcgtatagttttagaaaaaatcttatttttggggtccaaatcttagttttagcctcgtttgtccttattttgaaaaaaaaacttggccaccctgctgtattgcttattgtaatctgttgttgccgtatattcgctgttgtacatatgcatgtatattgtatattgtgttgtacacactgtaatgttctcatcatactataaatgttttggtctgtaaaaatgttcaaaatttcgactttttgcaatttatgttatgacttttatgataattgtctaatcaccagacaatagcatagaattagcttctaaacatgttaagcttcagaatgataccaagatttaacatgtttttttcggaaaatgcccaaattgatcaaccgagttttcaatatgcaagcactgtttttgataatcaaatgcagattatgacaaaattcatttaaaaaaaagcccactcaattttctatttccctgccggcgacgccctataaaaggaggcattttccaccgaccgacccacacatttccctcatttgtcacaagtacatttattgtgcctaattttattcgtgacgtcggcatttgtacatattacgacagttcgtcgtcgactgctgcatattattatttgttgtcttcaccacacactcgtcaagctgctggttgagcgcaatgtccaagagacggcttcgacaggtgtcactcatttggggatg

SEQ ID NO: 109706 - DNA, 130 bp, Heterodera glycines
ttattaaaaattagagatcggagaaaaggattggccagttttttgagtaaaaagtctaaaaacccgaattctaaaaccttcgaaaaacataaacaaaagtctctatacctatgaaatactgtttattatg

SEQ ID NO: 109707 - DNA, 638 bp, Heterodera glycines
cgtgcgcctgccccgtgccctgctccttccccgtgccgtgccctgcgccttccctgtgccgtgccctgcgccttccccttaccattcccctttgtgcccattttatcatgtcggatttatttgttcattaattaattatggtttaattacccaagtttgagggtacaaaataaagtgaatttttggcgccttgggtctttaaattttgtcaactcgctctgaatacgtccgcccagcccattcaaacttttttgccgtcatcagaacgacaaaagtggtgccacgacccgggaccaacagaaattcgtccatttgctcatcaaaacctgaccaaacgtccgttaaacattcaacctaacaacaaaacacgagtgagctgaagcagttgacaaaatcaaacaaaaataaaccaaatcaatcaaaaaaaacacacgggtcaccaagcccaattaaaccaaacaagcaaaccaataaacaaaaaataaattccaaaatacttcagtgaaacgagtgacccgcgcaagttctcgcccaccagtgagcaaattgaatcaagaagtggcgaacaaagaattgaaccaaattttgaaaaattaaaaattttgcaccaaaaatggcaaaatttaatgaggcaaatg

SEQ ID NO: 109708 - DNA, 503 bp, Heterodera glycines
ggaagaggggaaaatgccaaaggatggcatttggaggggggggagagaatgcggaaggcagccgactgaccgtcctctttgattccgtaagtgaccaccaacggactaaacagagaatcattagaaaattaattgctccaaaaatatgaacaaaccgtgtgttatattcccacactgaaaatgattaatcaattgaactgatcgtccaaatgtgataagtcaaatcaccgaccgatcagtgcgcatccgacgagcgcagcaaaagtggccaaaatgacaatggccagccaaaggaggcgcaaatgacccgacgtctgaacagtgtcgcggatgccgtggaaagttgtgttttgctatggagggacagttaaaaactgtacagcattcattttggcatgacgataaacaccgtaagcatcgtacagtaggaagacactgtcggctcggcatttgcacccgcggcgcccaaaggtagtggggaataactgctgcttcttcggatg

SEQ ID NO: 109709 - DNA, 57 bp, Heterodera glycines
cgacgaattttatccattaaaaagagaaaataaaggcgcaattctaagccaaaaatg

SEQ ID NO: 109710 - DNA, 584 bp, Heterodera glycines
ttcgaattaagtggaaataaatatttatttatttattcactaaaaaaaagttggcacgatgtaactcggcactcgtactcattcagcaaaaacaaaaacacttttcgtataacgcatgaaaagcgggctaaaaacctttcgaaaactgcaaatttaatgccttgtcattacgtaatcaatatgctgcgttgtaaaaagatggcaaattaatagcataaaaagaaattgctgcccaaaaccatcatatttttatggaaaagaaattaaaaaaatttatatttctcaatattggcaggaaatatctctaaacactaggctttttcaatcgaatattgccataacatttcttaaatccactaaattatggaacctttggcatcgtaagataagattttatcttaaaattcttgagatccttcattatgtggagtcaaaaagagtcataatccacaatcctttttaatacttacgtctagccatgtccaaacagcatcaataataataaaaaaccatttatattttaaggctgatcaatttaatagaaattcagtattttccaaaaaaaatcctaaaaaaattctatg

SEQ ID NO: 109711 - DNA, 347 bp, Heterodera glycines
gttagcatcatagcagtgcttttccttgtctttttgatgccctcgcaaaatctggttcgcttctgatcagtttataaaaaaaaagttaagcctaaaatttttcgcatatttaaaaagcaattaaaaatttttagattttttattcatctccctttttgaaaggaaggcatcagagaccttagtctacttttaattaacatttggtgcgtttcagagcacgttgtaaagagtatggatgaatgaatgtcgccatatagttagtaattaacggaagaggcagaatttcgaaacatgtaaataacgacaagcgatggcattttttcaggttaacatagtcctttgcaatg

SEQ ID NO: 109712 - DNA, 93 bp, Heterodera glycines
ctttgcctactattttctctacaatttttctcccattcttctgcatttattcctattgtaattgcttatccccgcccattgccttcagcgatg

SEQ ID NO: 109713 - DNA, 559 bp, Heterodera glycines
atggacattgaaaaagtgtcggaatttgcacgagaggaggttgagagcagtcgattgagtgaaaaaatatacataaatggacttccatggaaaattgaagcagaactaaatgaactcgttgacagtgagaaatggttgagcatttatctattgtgtgatgctactgaaaaaggtgcaaattaactgttattaaatgctaattaacaacgatgagtaataatcattaagattcgaattggcgctgctgcgttcgttcggcaacttttcgaattatatcgcaaaaaaatgtgacggagaattccattgggacattttgtgattatgtttttgacaaaaaatcaaataatttgggattccctaatttcgtttcgtttgcggtaagtgccaactcaaacaaatattttaatttgacattcgtggaccagccaatattgaagttcatttatttatttgcctggtgtaaagaaatcataacaaaataaattaatttctaaaacataaccaattgaccacgcataaacaaaaattaaattagatgatttaaattaaggaattgatg

SEQ ID NO: 109714 - DNA, 143 bp, Heterodera glycines
tcacaaatgcaatgaacgctgggtgtgaaaattgtcacattttccacgaatttgagcggggatgttttattcgcccattggagccgaacaagaagaaagaaacaaatgggtggcgccttgtcatcttcgacgttgaaacaatg

SEQ ID NO: 109715 - DNA, 72 bp, Heterodera glycines
  unsure (1)..(72): unsure at all n locations
tgtgccatttgctgtccgccctcgaccancctgtcatttgctgtgccattctttgtccaatgcttcgcaatg

SEQ ID NO: 109716 - DNA, 380 bp, Heterodera glycines
gcgaaattgggaggagcggtgagggggtgggtgatggggtgatcagtacaagggggaggggggttgatcattgatcagagtgttgatcagaatttggtgatgatgggggggggggtgtgcgtgtgttgaaggaaggggggcgtcagcggcgaatgatgatgccggccgtgcatatattatgcaggcaaagaacaaaatgagagaagagaataaaagagagggagaggcagacagtggaaaataaaagagagtgagagggagagagaataaatgaaagagagaggcagagataaatgagagagagagaggcagacagtggaaaataagagagagtgtgagagggagagagatggagagtgcgaaagggaggggaagagatg

SEQ ID NO: 109717 - DNA, 938 bp, Heterodera glycines
cgtcatttcgtcccgcgtcgtttcgtcccgcgtcgtttcgtcccgcgtcgtttcgtcccccaagccgaaattagtcgtttcgtccccaaattaaattctgtttttaaaaggcattaaatttcgagttattagtgcctattttggcagtttttagagactaaaatccggtccatagttaatgaattaataaaatactttattaattgggcaaataacataacataattgaaaaaacatagatcaaccaaattctaaggggcattcattgaatcttccgtattttcatagtccttcaattttcctgcgtatcctccgacctgcaggccaagagccgtgataacatcatgaatttcggcatcactgttgtatgtagcgtccgctaaaattcgcatgatgactgttagcgtttgtgtcgtttgtgcatgaagtttcgagccgatctaagcccagaaaaattcggaagaagcgagggaacagtcgaaaatttggtatgattcccgaccaaaagtcacggccaacaagttccaaaaaggagagaaagttatggtcgtctttcctggtcaaaatcgtcgttcgcctcacaaaaagttactttggtcacattttggaccatatttgatcacagaaattggtgattcatcggcaaatttggtaccaatagacaaaaaggagatcaccccaataaaagtgccgattgaacgattggttataaagtcccaaaaggcgtcccagacatttcgacactgcctaaagggaaaaatccgtttaaaaacgacctaaaattgttgtcgatgtacgcaggaattcgttcagaaatttgcgaagtgactggaaataagtgccgcgaaattgggggaaaaagcgaatcgcaattggggacaattgcttcatattgtttggggggaaattggaaaagcgactccttttcagagccaatg

SEQ ID NO: 109718 - DNA, 1003 bp, Heterodera glycines
caacaccgcaggaattcccgagatttctgataatgatttaataaaatagaaaaaattagctttgatagcaatacaataagagaattgtaaaagaatcattatgatttaaattaacaataattgtaaaaatcaagaataaaaaaataatttagaactgaagccattgttattaataaatttattaaaaactttattccatcaatttaaccaagaaaaataaaatctcgttcagaatgttaagcttattaaaataaattaaaattaactttaattaaaattaaccaaaatgaaattttagataaatgtcacagaaaaaaatataatattcctgctgagaaaagcaaaaaatagaaatgtaaaaaattatttcaaaaaaccactgcctaaataaattgaatgaaaacaattattcgaaatgccgtcgactgaaaaaatgtaaccgattaggtgatatatgaaaatacgaacagattatatttaaaaaccccaaaaaaagaaaatagaacacactgaaaatttcaagaaaatgatagaaatattaattaaaaaatgaatgcttaaaaaagaaaatgattgggaatattgtgagtttcgattgatttatattgtgaaatattaaacccataattttaaaggcacgagacccaaaaaaatacagcggactattatagtatgcccgaaggatagataaaaaagatttaatagaaaaatgtgaaataaattcaaaaataaaatacgaaatagagcagaattttcgaagaggagttagatttgaaatggaaaaaataaaaattgactgggagacaacctgtgttatacttgaaaaactttttaaaatatttgattaaaagatcatttaatttcgaagaactcatggtttgcatgaaaataattgaaatgtaaaaccaatgaatgatagataaattgataaaatattatatgagaagagatatctagtacaacgataattatatcttaaaaaaataattaggagaaggaaatg

SEQ ID NO: 109719 - DNA, 159 bp, Heterodera glycines
gcccagaatggtaatatttttatgtgataatattattttgtaataatgtggaatgacgggaagtgatttttaaacccctaaaaaactgaaatcattcgttattcaaacccaggccttaatttcgaattaaaatcttgggttttcaggctcatacaaatg

SEQ ID NO: 109720 - DNA, 130 bp, Heterodera glycines
tttcaatttgttccgttggggcatcgaatttatgtgcgtttttctctgccttttccgtttcgattcccttaatttgccaaggcgtcacgtggacatcgttctgaagaagtatccgctgtacaccaacatg

SEQ ID NO: 109721 - DNA, 647 bp, Heterodera glycines
ccaaaaggtcattatattatagcaaatgtattgtgggtataaatgattagaattcggagggaccggagtcatgccgggattttgcaggatcggtccattcatttcaaattccgatcactaatgtttacacatgatgtttcttttgcactaattataagacatcattattttgaaactctatatctatattttcgttttgcctgtctctatttaaactcgcggaatctaaacatcactctcgttgtttaatgctaaaaaatagtaattacgtcattacgagcactaaaatgcgaaggcataactaattaatgaagaaagcctgtatatactacgcctatcagggtgggacgcgactgcgttgtggcactgtcgcgttgtctcagtcccacatttgccgactatgtagaaattaagtataagaagataagcacttggtacgctacaccattatttgtctatttatttgcctatagcctcaagctcaaacaccaaacaatccatttctttttcctttaaaaaaatatataatgccaaactttattaaaaaaatcttatttaaaaagttttattttttttcaattttttgctccaaacgcctagacccacacttatatgttaggtaggtaatataatttcctttcactatg

SEQ ID NO: 109722 - DNA, 828 bp, Heterodera glycines
ttttggaaccccctcgctcgtacgtttttggccaatggcagacgtttcaaactggaaacgcgataaagacatcatagaaaattaaacaaattgaataggaagggttatctgaaaaacaaataaatttgaaacttaaattaattaattaattttagcggttgaaaattttaaaatagtgaaattagatatgtatttaattaatttagcggttgacaaaattaaaaattaaaactagtgaaattagatatgcataaaatttaagaataatgaaatgaaaataaatgcgtggctttcttttaaatgccatttttttttgtaaagccacgcccatgagatagcatatcgctgatcgaaaataaattttgagtaaaattaatcattgtttattattaggactcgcaaacaaaaaggccccaaatcgcgaaagtggtacaattagttggcaaaaaaaattgaaaaaaagcatgaaaaggaactaaattccgaaaaatacgtgaaaaaagcatttacagcttgttattaagggtttttagggctatacgagaaaaactctaccaaaaaaaaacaattttgatcatttaaataaatattataaatatttttatataatgtttttctaacaatgacaattttcaaacataaaactttttatcaagaaaaatgaaattttgtcgacaatttttgagaagatttttcaattcataggtggtggcgcattttctgaaaattttttcagatcatttcttagtgttgaaaaattccgttttgaaacattattcaaatttaaaaattggtccgacggtgctgtgaagcgctgtcggcgaaatg

SEQ ID NO: 109723 - DNA, 715 bp, Heterodera glycines
aaccattctgtccatttctgtgaaattaccatttggtttaggaaaaactttcggaaaattttggaaatagcggacaaagagaaaatttcagggtttgtgagtttttgtctttttcgttaattgttaaccaaattaagccttttgcgcattgtcgagtcttttatcattgattccgaatgcatccacccaattaggaagcttgaatatgcagcaggtcaaaactgaatctgcagggtccgacaaataactcaaatgttctttcaaaaacagaatatcggatgagccgactcgctgacacagtgcttcgattatttcctactcaaattgaccggctcgattcattattcttatatttagcagaaaatggagagacattggccgatgttcacttggatgtacttaaaatgcttgacattcatgattcatacattgttatgtaaaacaaattcttgctcttgacaagattttatctcttataattcagttttgcttttattttgggacgttttttgttttttcattccaatgtcttctccttcgtcctttctatttgagcagtttttcccatggttggtctccttaattgctctgttctctataattatttggttgcgaagcaaaacaaatcgaactttgtttgtgaatcacgaaaaaggtaaggtttaaagaggaggagaatgttaattaagttgtaacaaaagggagaagactaatg

SEQ ID NO: 109724 - DNA, 388 bp, Heterodera glycines
tactagtaaactgaaaaaaaaagaatttaagaatttgctcgacattaaatcaaacataaatttgaatttacgcaattacatattcttttccaattttggcgaaatatttttttttgtaaaacagagcttcaaaatttagtttttcttttaaaaatttactgacacattttcttccgatggttttgcccggtcattgatagaaaaccataaagaacattccgctgtgccaattacataaagcttaggtaaccaaaaaccaccaaaaataatgttgcgaattaagccctcaggctacaacacgcaatttgcttccatttcttttccaaaatcaaaatacgattttataacgcaattattttgtttcagaaaagtgtaatgatcaacaatg

SEQ ID NO: 109725 - DNA, 184 bp, Heterodera glycines
tttcctgacaattaattaaatttacttttgaatttattttatggcctattaaagggaataaaatttgggaccaaattgagcattcgaattgaatatgtcattgcatatttccacatttcgtcaattattaggtcgtccatttcgcaatgcttttcccatatttcttcgacattttggccgcatg

SEQ ID NO: 109726 - DNA, 274 bp, Heterodera glycines
gttgaattttcaggcgtaatttcccatcatttagtaaagtttttttaattttggaagtggtaaattaaaaaaattaaaataattaattaagccaagattaaagttatggaaatgaaacttgtgattaattcgcttgaatttttaaaatgttctttaaatttaaaatgttcgtaataaataatatttttattattttttgatattctttcggcataactaatttttttttaatatgtcatctatgtttttttatttcaggttttacttacaaatg

SEQ ID NO: 109727 - DNA, 1003 bp, Heterodera glycines
ggggaaattggaaatatttgaggagacagaaaaaaagagaaaagaaaattggagggagacagacaaaaggcgggggatttggggaagaaattgaaaaaaggcaaaaaaggaagaggaaggaatattgtaaattaatggaaaatgaattaatgaaatggaaataattaaataatagccatagataattaaaatggagagagagagagaggggtagagaaagatagaagacagaaggggtaaaggagagagggaaagatagaagagagacagatagaagaagaaaaagcgagagagagagagagaggagagagacaagaaagataaatcgaagtcttttgtgttcaaaaaaacataaactgagagaagcaaattagtaagatcaggggattaaagagccaatttctgatcattcaacaccgccggtgataaaaaatgctaatgaacggactgattaactcgggaagaacagctcagtgataggttaagcttaagcattaaactgaccattcattttcatccatggaaatgtctgaactgtcgtcgaactctgctgatgatgtctttgctggtggctgtgatcaacaccggcggatgagaaatgggcggacgaagacgaagaagaagagggacaatggacagcggaggaaggggggaggacgagggaagaggaggaggagggcacggcaccgtagaaactaaacggaggggggagtggtcgaagaatggcacgaagacgaacaaaacgcgagagcacagaaagaaatgccgaattgggatttgaatgagggaagaagggccaaaagggaaggaatcagcggatgattgatggtcggatttaaatgatcaattgattaccaccagctttcaaaatggtaaataccctcctcaattgcttttcctcggcttctcgcccgcccccccccccaattaaatgttttaattttacccaacggccgccgctgctgccgctgtgtttgcctctgcccaatgagcggccaacatg

SEQ ID NO: 109728 - DNA, 757 bp, Heterodera glycines
tatcttttgtcacaacatgtttgttatgccatgcaagaaatttaatgagaatctaaacatcatacagtatcaataatattttattttaattaaaatttcatattgaaccttttttattttatactcattgtttaattaataattgttattgttgttgtttgtttggttgttgttattttggttgtgactttcacagcttacaattttcgtgttctttcattcttttccaacacttcgttatgattttattcaatattttaaattaattaccacattatttgtttaattgttaaaagtaaaaagagccagagaaagtaaagtataatgatattttattatatttaagattccaattacataagctgattccaaaattgattcgcgaatttttctaatacttctctttatctaatctccctctttctaatttttctctaatctctctcactctctctctctttttccactccccccccccccctccctctcatacatctctcctttttctttctctttttctctctgtctctctcttttcttttttctctccctccccctcatttatcactcctttccggtctacctcagttcggccccagcacgtttcggccccaaataaaacaattaatttttcaaataaaatttcacgcaaaaattagcaagcaaaatgacttttttaaattaatagtgttattcttatttttatatttttaattttaattcgaacataaatttaaactttttaagatttattatg

SEQ ID NO: 109729 - DNA, 1003 bp, Heterodera glycines
aaatttctttttgtttcgcgccttcgactgaacatatttttaaaatgtaattaaacgatcaccacttttgaattgaatttgaaattatcaccttgctgccagcagatgttgcaggtaattcttgatttttctaaaattaaaatgaaaaaaaaacactcaataattcgtctaatcttaatacaatccccccccccccctttaggttgtttttccgcatcggatgggtcccccgtacaaaagggcgctcaaaacattggcagcagaactcacgcaaatgattatccaagacgatggtatgtttgaatatacaaataatttaaattcaattccattcgtctggaccaaaaaattattgaaaaatgaaatttttttaaaaattgcgctagggctgggaatatttgttttttttttaatatcctaaaatgataaaaaaaattaaatggcccttgatctcaaaataaaatcatttgaaaaattgtttaacaattactttttttaaaaattcataaataattttctggccagtttataccctagagaatttttcggtctttcttatttcccacttcggtaatatgttagttttttttaaagtccacatttaccgattttggcagtttgaggtagggttaagccccgactctcggggagcaaaatgtcggggaacggggaggaaattttcataaaaagtctaaaaaaacaaaaagaaaaagtccagaacaaaaaagtcttaaaaactcatttaaagatacttccatcttatttcaagtgcactttacgactttcgtaattccccgaaacctgtcggggcttaaccctagtttgaggttccaaaaaacacacagtaatggaatcctacattttttatttaaaaaatttaaaaaacgcatttttatttatttcttttttgctgtttagagtccggccacgacagcaaggaggacgcgttggcatgcatgcgcataatgttgcgcaagtgccggggtggtgccggtgcgccatg

SEQ ID NO: 109730 - DNA, 262 bp, Heterodera glycines
atgctctacacgataaaagtgatttaaagcgatctgactctcaccggacagttcggaatgttcccttgtcagcacgtcattctatacccataaacattctcaattaacctgcaaaattcaaaattcattaataatatgtttgtttgttattgatcagtaaggttggggaaaacaattttaaattattttttggcccaacttttttttttgaaatttaatgaatttctaataaaataaaaaacgatttgactagagagtgatg

SEQ ID NO: 109731 - DNA, 121 bp, Heterodera glycines
ccgccgtgtctatgaaaagaataacctttttaatgattttttaacaaattaccgtttttctaatgtgtatactgtaatcaatgttgatttttgttttatttaagtagctttacgaaaaatg

SEQ ID NO: 109732 - DNA, 877 bp, Heterodera glycines
tttaaattaatctataaatgacaaaacaaaataggtggcatttccaactgatgttttccaattgatgtctcgagcgttatttgcatttttctgcatttttgctatatgtaaaagaaactcaaaaatagaattttttgtgttacaatttttgtttgttttggttaaggccgtttattatgagaaaaataagtccagaaatgggaaatttcatttttctactactcatttcttcaaaattaatattagttttattttgaatttttttttctaaatttatttcataccatatttaatgcttaaatttaacgaattgaagaaattttgaaaatttgaagaacgctcgcaattgaacccgaatatgatgtccgtttcgacccatttcgaactccgaacccggattcgaacaattatcaaaattcaattttttttctttcaaaaatgctttcccacttcattgccgactaatttccttatcagcaaattgcttcctacctacgcccacacccttttccctcatttatttggtcaagagttgcaggtcatttttttgcgttatcaatgcgagaacaaacaaagtgggcatgcagaacgacaacggcaatataaatatgatttcttgcgatgataataatttttaggagaaaaaatgaaaaaaaaaattgaattttgataattgttcgaatccgggttcggagttcgaaatgggtcgaaacggacatcatattcgggttctacgaccccgaaaacccatggaaacgactttttaatttaaaatcaatttaacaaagagaaaaattttgttgacacaaaacccgaaagtaccccaaaacgacttgaatctaaggaccctgctctgcaaattattacggacactatg

SEQ ID NO: 109733 - DNA, 140 bp, Heterodera glycines
caggttcgaatcctctacatgtttgtccattttagacttttgttttttgttttttatgcaaggtcaattataaaaaaaaatttttaatgaaataaaatttttattaatttttttaattaaaaaattcattaaagataatg

SEQ ID NO: 109734 - DNA, 77 bp, Heterodera glycines
aaattggggctagtaaaccgatagaagaagaaaaaacagaaggaaaaacaagaggtgaaatattaaagaaaaaaatg

SEQ ID NO: 109735 - DNA, 385 bp, Heterodera glycines
agctcaaccattcgcttcctcacccaaccaaatttttttctgtaagaaatggaaaattttaaggtgccaacgatgaaccacatcatgcagcaagtgaagcaataaattgagtttggtgcatgcgcgttgtataaaacaacatgtgaatgaatgtgtttgtggtgggaagggtgttgacgattgggcaagcaaaacattgggaaaatggacagattagacgagagtttcaattaagaaaaatgcaaaaaattggagtgcgctaaactaattagccgatcttaaccacatctggtcagcggaaagccggaaaataatgaaaaaaaaatgaaatttgaaaaaataagtgaatatattgaagaaatgaacagacagacagaccaccatg

SEQ ID NO: 109736 - DNA, 1003 bp, Heterodera glycines
ggaaaaaaaaaaaattgaaaatagcattttttacataaaaaattttaaatctataaatatatttaagaaatctgaacaattttcgtcgctaccccaaaatcagaacattcttataaataacgcactcttgttggcgctaacgaaatcagatgattaaagtgaaaaaaggaagatttacgagcatttaaaaataaaaattgagtttttcgttaaaattttgttgatcactacccgatcggggtccccgacccccgacaattgagctcccccccgacccgacccccgacatgtcgtcccccgaggtccccggcccccgacattttgccccccgagggactcggggcttaaccctacttgaagatttaaaaaaattcaaaatttaagagaagccaactttaaattaaaaaaaaaattattagtctcaaagactatccaaaaacgaccctaaaaaatcattaaaaataaaattaaagaaaagttttgaaatgttttgagatttcactaattgcaaaggctataaaaaattgccttagggaaaaatcattaaaaatgcaaaagacagtgaaattaaaaacttaaaaaaatcattaaaaaacattaaaaattttgaattttttaaaatcccataaaaaattcttgtaagataagaaaaaaaaattacatttttttgaaaatttagagagaaccagctttaaaattaaaaaaaaattattactcacaaaggcaataaaaaaaaaccctagaaaagccccattaaaaatgcaaatgtccgagacacttaaaaattttaaaaatttttcggaaaatttttgagtttttttttaaatgcgtaaaaaaaattcttttaagataacgaagaaaaataatatttacattctcgaattgacattggtgttgaaaacggtggggtacagtgtgtcattgttcaaatctgatgaaacggttgggccccacaagaacaacggaaggttgtagaaggtggcaccgtagccggcgaccaatg

SEQ ID NO: 109737 - DNA, 904 bp, Heterodera glycines
atctccgttttcgctcgccgagagtttgccccgagggatgaaatttgttaattggtgacaccgacaatttagttattattttttttggcttaaatccgcaaattcaaagacaccttctaattacgggtcattcttttctccctttccctctttcccttttgtcatttcgtttctttttaattgcccctttttcttttttttttgtatttactgtaattacggttttatgtcttttggtatttatgtgcttattaattaattttttattatataaagaattttttcatctttcgtttttgcgtttgtttctgtttttaattaattttgaaaatgttttcccgtgtcactcttttttttttactttttgccattgcgcgaatttacggcatcgccgccactaatggacatccgcccaccccattgggtgccgggtgtttggaacggatgagaagcgaatggcactgccaaataaatccgtctctttggcgcaattaatttttttctcacattgaccgaaagcattttatgtctgagagagtttttatcattcccttggacaaaaaatgcccaattaatatgaattaattaattaattaggaaatgtaccatcaatatcagttagaggtgagaaatttataagcaaagtgatatttgctttgcaaataaaaataaataaaattattcaaaaagggaaaaaatcaatgaaaaaattattaattttatgccctcctttccctccttagcaaatttttccccgctcgtcggcggcgggtcgcgagacgccgtccaccgcgttgatcagcgatcgggacataggcaacgccaacattgtcgggagttcctcctccgcgcattcgattgacaacaattcgaccccgtcagcgtcgatttcgcccgtccaatg

SEQ ID NO: 109738 - DNA, 451 bp, Heterodera glycines
tggaataaattttggaactgcgctgcctaacggcggtgcttaaagtgcgctaaaaatgatcaaatgattatcaatttttatttttcttaattccaaaatgaattcgaaacgcaaaaatttaatcataatacatgtggtaaaaaatgcatttaaaaataaaaaaaattcttgaatttgcttctgaattttttaattttaaatagtaaattactttttcgaaattttgcacaaataagaggcgaagaaattcaacgaaatttttattaggattttgatttaaaatgttgagaggtttaacaaatttgtacactgaatgttggatcgtcaacaccaatgagaaatgactaacagaaaagaggggagaaacgggcgttgttggctttggaaaaatagcttataataaaggagagacgagcagacgatgagtgagagaaaaatattggtaaaaatg

SEQ ID NO: 109739 - DNA, 279 bp, Heterodera glycines
acatttttaatatttaaaaaaaaaaaagttgtgtgaccgattatccgattggacatccaactctccacgtgctctgcgaggaagttgattggcgccgacccgaggacaacccatacccgctcgccattctaaaagtgttcgtcattccaccgcgacaaatcgacatccccgttttgccggtcaaagttgacgatcggctttgttttccactttgcatcaaatgttgcaaaaaatttccgaatggtgccgtcaaatcatcatacagttgtactcacgatg

SEQ ID NO: 109740 - DNA, 141 bp, Heterodera glycines
  unsure (1)..(141): unsure at all n locations
agaggtggcaaaataaagcatgnatcagtccactgagttnggttcatttttgatcagatcgtcgatcggttcggctgggacactcccgcctatgactacgccatgtggcgaaaagcgtttgggcncaacaatttcggcatg

SEQ ID NO: 109741 - DNA, 58 bp, Heterodera glycines
cgactttatagcgagcattttgatgtacgaatctctgtcaagatcggcactgacaatg

SEQ ID NO: 109742 - DNA, 172 bp, Heterodera glycines
aacaaattttattctaaagattaataaattataattaggagcatgtgatctaaacgatgaacatcatgtgtcgcacaacgtacaatccatcgtgcgcgtagagaatccagacgaccgtctttgtctagcacgtgccgtgctaatagggcttcgagaccgtgaaaccaggatg

SEQ ID NO: 109743 - DNA, 613 bp, Heterodera glycines
acaacgccgacaacaactacgacaaagccaaggaacaaaaaggcagagttgcctaaggcaaatggtgctatgcaatggcctcaacttttattgtgcggagcccttctgccatttttggcatttgtttggcggcaccaaaggggtttgtttaagtttataggaaatttggtcaaaaaatttttgaatcctcctcaatcaaaaaagggaaattttgtgaatttcaatcaaaacatttttcgtttatttcaagatttgagtttttgagaacttatagaaagtatttcatgcttcctagggattttttcaaaaaaaataaaataattttttagcaaaatttttgtacacatttcgtgcttttttgcatactaaatattatatttacatattttaaaaatatggatgaaataaatatttttccctaaaacctcaaaatatttttttattaatgaaaaaattaattttaaatgaaaaaatttagtgcatgaatgcgttttttgatctcctttcttcaatgcatataagcaaaaaaaaaaaaaataaataaaatcacagtcctactgataattcatttaacaaatttacagacgtcgccaatttgttggaagacacaatg

SEQ ID NO: 109744 - DNA, 64 bp, Heterodera glycines
ggtggacaaaccaattgggagctaacaaatcaaagacaaaccaaagaacaaacaattacagatg

SEQ ID NO: 109745 - DNA, 399 bp, Heterodera glycines
aaaaaaattagatttgctcatattgatttacggtatggccgtaaatagaataagcagagacaaaaagccgatgaggaaaatgccgcgtaggaaaagccgataaaaaaggcagagacaaaaagccgatgaggaaaatgccgcgtaggaaaagccgatagaataagcagagacaaaaagccgatgaggaaaatgccgcggaggaaaagccgataaaaaagtcagagacaaaaagccgatgaggaaaatgccgcggaggaaaagccgataaaaaaggcagatgttccgttgcctagacatcagctaaagctttcgttttctttgagtttaaaatgccaactgaataaatttcccagtgccaataacgttttttagataatatcttttttaattatagaaatg

SEQ ID NO: 109746 - DNA, 251 bp, Heterodera glycines
ctcagaaagtgtttttatgtaattttgagttggtaacgtattcggcaatttttcctaattgaactgcttttgcaattcattttgcgagaaaataaattcaaaaacagatttgagaggccaatgattttgtttttaaagttaatagcaatggaatttacaaaaataataatgctttatgctattgcttaatttaatagcagttgaagctttcttatttgtaaatttccgaattatgatcgcttggcgaaatg

SEQ ID NO: 109747 - DNA, 320 bp, Heterodera glycines
aaaaatataaagtcattcttattttaaatcaattgcggatcaattaacagaaatggcggagccaaaggaagtccatccaatggaagaaatgaccgacggagagcagctatcgctccaatcgatggaaagaagcctgcttaagcaattggaaaaagtcagaaaaacattggccagtggccaattaaggtgcgggaagaggaggaccaagtggcaccaataatgaaggaggaaaatgaaatgaatgacgatgatgggaaaccggaaactgaaaaaaaggaattaaaattggaagcaaaagagaagggcaccaataggaaatg

SEQ ID NO: 109748 - DNA, 1003 bp, Heterodera glycines
taatttaatgaatgtttaattacttttgaatggaaaacgcaaatttgagaagcattggagccaatgtttgaacagtccgtcgaggcggtcaatgggaatgtgagtgatcaatcgaactaattaattgttaattgactcttctgctgctatggcttttttattgacgtaagacgcataggaacgaagacaaatgagcacagcaaaagaaatggacaaattaaaaagcaactaaatccgcatgcttaatgaattaacttaattaacgtgtctttttctttttcatttcaaataaatcattaagtttgttttcgagtacaacttgtaaatatctcaaaaaagttaaatcttctaaaaagtgatcgcatttcgcacccaaaagaaaaccagcgcaaattgcactttctgctgttcgctgtctctttctcttctcaaccggcggatggcgttgtgaatgaattaatgaatgattggctgatccgaagtgccgccttttctcctttcgcttccaagtttttaaattagcgtaatcccattagcaagcagaaaattatcaaagtgtgcgacttgggtgggaacggaaaaagaagcgcaggaactggcggaatgagaaagggcaaaaattggaatgatcggaaacgaaagagagggggtggggagggggtgaaaagcatttctcccttcgcgaggcggggtgggtggaagcatttctgccctcgacctgctaaagcggcacccttttaacaccgccggcgcccaaataacgccaaactccttccgtaaatcccatgagaagcattgcacttatgataatcaaaagccggatgatcagcatggatttgatttgtcatttggagcataaaaaaggcggtcaacaaaaacctttttgaccggactttcatttgggcattgccatggcattggattgacagaccaatcactccgatcattaatttattcactgctctctcttaattttaatttattttatgcttatgcttaaatg

SEQ ID NO: 109749 - DNA, 331 bp, Heterodera glycines
aaatgttaagtatatattaattttttattcgacaaaaatcaagcattcatgcttttttatattttgcaggtaaatgtatgcagctataaatttacaacgaatacaaaatatattctacagagaatataaatgttaagtatatattaattttttattcgacaaaaatcaagcattcatgcttttttatattttgcaggtaaatttatgcagctataaatttacaacgaatacaaaatatattctacagagaatataaaatgttaagtatatattaattttttattcgacaaaaatcaagcattcatgcttttttatattttgcaggtaaatg

SEQ ID NO: 109750 - DNA, 295 bp, Heterodera glycines
  unsure (1)..(295): unsure at all n locations
ttaatttttatattttttgaaaaaactttctagcgatttaaggttttataatgatcaaaaaattcgcaaaatacgctgaaaattttttcaaaaattttattttcttcattcttatggaaaaattttatttgattttttttgataatttttgtttgaaaaatttttcaaaaaattttcgggcgtgcgtnggcggtgaattagtgcacctttgtactgtagcattgtcctaccgtatccacccctctgtagcgtataccgtatcnncacacacccacaggagacagtgtttgccatg

SEQ ID NO: 109751 - DNA, 456 bp, Heterodera glycines
aattagaaggaaggcctagtacatctgtgcaaaggaatccgaatgagaagccattgattggaaggatgagaatgcgaacgtgtcacaagtgtggagaacaaggacacattgcgaagaattgccggcaatgagaaagagtaagtccgtggaaatgaatggttaagaatgagtgtgaggcccggggacggtccctaaggggtattggaggagaatgaccataaagagtgcttaagaaaacgcttttgcagtgggctatggcccaatacgtattttgaggcctcctgcgttgtctttcttttctcaaaatcttatttttgtccactattgtacctaactgtcttcttccgctttattttctattgtaaaataatacatttaacttttcttaatatgaaataatgactagtgagctacggcccaaaagtattaaaaatgacgtcaaatatttcagcaatg

SEQ ID NO: 109752 - DNA, 90 bp, Heterodera glycines
aggtcccatatagtcatcttaggaatacatatagggcgcacattcctcctcccgcctgataaagatgacgacacgcccattgcaaaaatg

SEQ ID NO: 109753 - DNA, 59 bp, Heterodera glycines
cccccccccccccctcaaaaaatataaatttttgtttatatcagtgtcgacacaaaatg

SEQ ID NO: 109754 - DNA, 161 bp, Heterodera glycines
  unsure (1)..(161): unsure at all n locations
gagaattgcaccaagttcgtctccaacaaaattttatttgtttcgggaaaatttcaatttttgcagaagcaaatgaccgacttggacttttcgnatgacaaaggcgcatcagcagaagcaggaaaagtggccgaactgacgggaggaactcacggcaaatg

SEQ ID NO: 109755 - DNA, 341 bp, Heterodera glycines
ggttaataaaaattcatttagttttaggaatttgatgacttccacaatttcactatttacctgaacaaataattcaaatttttgatgattaaattgaaaaagtgccaaattttcggtgattctgtttgctcatctgctgtcatactttcttttttgtactggtctcacaaactacagtcaaaagttggcatatttaagtcagaatttgccaatccaatcccttcaccaattcctctgtttaaagcccttttttaaatcggaaatgaatcccaacggttttttctttgttttagcggtgctctttcttgtcaaagtcgactttttacagtgcaaatacaatg

SEQ ID NO: 109756 - DNA, 130 bp, Heterodera glycines
tctgttggaccgagtattggccgggcgggtgcgtccgctgcgcattggcatgtcgtgccagccgccgcagttcgcctcgccctaccacatcccacaccgcgctccggagcagaacaccgccgcagcaatg

SEQ ID NO: 109757 - DNA, 938 bp, Heterodera glycines
ttttcttgataaccgaaggagggggcgagaggagtcgtcggatggttaaaaatcccccgaattttcgactcggctatttttggttaatatttcctccaccatatttttaatgggtttttttggataaatcactttcaaatcggcagaataatccaagcaatcaaaaactaagttttcctttgtgaatatttgtcatttttaaagtcttaaggcgacgcagaaaattctcaaaattttattaacttaaaaattgtctgtccacttttctttttgtttaattttgaaaataattcttttttttttaatttgaaagttctcctaaaattccttaattaaggtgtgatctgttaacaaattttctattttttgcagcattatttttcctagatttttagtggaggaggtccggcggtgccggtaggcgccgtccgggaaaattttgaaaattaaagtgcaatttcaaccagattttttaaaaaaatgagcaatttttgagaatttgaattttttaaatttaggattttagtttcgcgatcgattaattcaataaaatttctattttcttccaatccaaataataattttctctctgattacatcggtgctaggacaaaagagaattttctaaatttaacatagttataaaaaaatttcgaccataatttaatcaatgcgttagcaattggcaaattcattcaaaaccaaccataaattgaaagttgattcagcggcaggtgctccctcccaattgtcactgcccccagggtaagtaccaattttcttcacaatttcgatattttttcaaattaaatcattgtgcattttgtcatgtgtcatgtgtactcagctgcaaattaaaattgaaatttcctaataaatttgccaatgctttcattaaatatttaattcaacttccatttggaaaaaattcaagaatg

SEQ ID NO: 109758 - DNA, 612 bp, Heterodera glycines
attaaaagaaaattggataaatttgccgtgaaattttatttgaaaaactgtttatcaaaatttgtatttatattaaaaaatatatatatatatatattttacagtccggttgcaaaagtaatgcatcaaaatgtttaatcgaccaaaactcaattttaagtttagataaaattctaaaacaatttctgctaagctaacttttgattctgatcaaaaaaagtctttaattaaataataaatggctgtatatgagtgccataatgaaaatcaaaccaaaaatgtcaagcgccaaaaggacaaagaaaaatttgccattttaaaattggtgggaaaaatttaatgtacgcgcggcctaattcttaattgaaaaatgtgacctcatttactgaaaagtaccgagaattccatcataaaagcttcaaagaattttcttcttatacatatctttatttttagttatattttaataattttttaatttttttcttactcaatttcctttttattatttttattttttattattattaattacatataattgtagtaatgaattcattattaagtttaggtaattgttatttgaattaattttcgcagaaaataaaaatg

SEQ ID NO: 109759 - DNA, 308 bp, Heterodera glycines
acggagttggctgggacggagttggcgggacggagttgtcctttttgtattgggacggagttggcaggacggagttggctcgggacggagttggcctgggacggagttggcctgggacggagttggcgggacggagttggctgggacggagttggcgggacggagttgacccgcttcgcgcgaaaacgaccctgaccgttttttgcagacctactaatcatcaatccttcccttcaacgcaattaattcttccttccctttgtgaaatcattcggaactcggccaaattgtgctaattgcgaaaaatg

SEQ ID NO: 109760 - DNA, 422 bp, Heterodera glycines
ttctctcgccgtttctcaatttctcactcgcttccccatcacacccccccctcggacggtacagtaccgaaaaatatataaataaaaaattttcgtttttctcgtaaagcttagatttttaaaactctaaaggtatgtggatcatattttgtagataggaaaccaatgaatatacaaactttgcatttgtattttcttttcctcttctttttccacactctctaattgttgtgtctcttacaaattagttttgtaataagacattattgatttgtttgtccattgcatgtttgtgctcctcaatatttattccgatttcgtacattttaatttgtcggttcaaagaccgaacacgttttttttgcattgaataatttcgaatacttttttctcttccagagtttgaaattaaattaattatg

SEQ ID NO: 109761 - DNA, 71 bp, Heterodera glycines
ttttagataataaatcggacgaagacacaacgccaatcgaaggaaaaaaagagcggcacagtaaagaaatg

SEQ ID NO: 109762 - DNA, 158 bp, Heterodera glycines
tgttgaagaagcaggaacaacaattattctctgtgaattttatagaaaattattttttaaacataaatattaaataaattgggatgaatgaaattttcctatggaaatatttttttatataagattaatcaatgtattacgtgtaaaaacgcaaaatg

SEQ ID NO: 109763 - DNA, 51 bp, Heterodera glycines
tcgtttgcgcgacgggttggcgcactgtcgtgcagccaacactttcgcatg

SEQ ID NO: 109764 - DNA, 716 bp, Heterodera glycines
ttttttaagactcagctttttttctttttttcatttttttttattgagtcatcatttttaatgggttttttttcatttgtttgtgcacattttttcacgttcctggaaccccccccccatgggttggggggggtataaaagcccgggcccattattacatttttcttcactctgatcactttttgagtaagtccagccgggacagttttctgttcaaagcaatttgcattaaattgtaattgtaaatatttgaataaagattaagaaagagtcttagtcttttctctatctgtaaaagggacgctcaggagccctttcatacagatcattaagccattgacccacgttgggtcaaagaaaaggctttcaaaaggaaaggagaagcattttcctcctttcaaattgtcccttcagtaaaggagaggaatttcctccctttcatttgtccctttggactctgtgagtttctgtcttttggacagaaattcgctttgcttaaaagactcccccttctgccgggagagtctgcttccccttctgccgggaagtgcaaatttttgtggccttttgcccataaaattggagccccttaggggtcggcttccagtcgtaagcctaccctccaaccaaaccaatccaaagcgcggcctgagcgcttggatcaaacacacaacccaaaggggtttattgtgttttcatcaagcgtaagagcaatg

SEQ ID NO: 109765 - DNA, 176 bp, Heterodera glycines
ttgatttgatggcattggtgggcaattggctgccgactgaaattaaaaatgccaaaaattgggaattgccaattaaagcaaatttcgaattaaaaaaaactttgcatttcttccatttgaccaccacccaaatgaacacataaaaaacaattgcgataaaattggccatcagcatg

SEQ ID NO: 109766 - DNA, 769 bp, Heterodera glycines
ttttggccaccgccgtggcgaacagtgccgtgatcggtccgaacagtgcgcagccaatagtctgcgcgccaaagtgtgctgcgagcgcaaatgcgctgatcagcagggtgcgaacaaagtgtgcggaggacgcgtcggcacgcggaaacgcgcggaggaggagaccaacgaggatgccaaagatggagccgatcagcagctcggcaggcagccgggtcagcgtgtagatgagtgcatctgtttcggaagattgttttatttggagcagagtgaatcagcggaaaaatggtggtgatcaaacagactcaacagacataggaactgatcagcaataaataaaatgatcaacataatacatgaaaatgcaaaactgatcagttcgttcaatgccaacaattgaaaattaagagagtttttagttttaaaatcccatcatgatttgttttattaaataaaactatggaaaactttttttacaattttccatgagtgagaatgactgatcgatcgattaattaattatggatctgaaatgattaaatagttttttttaaaattgaatcagatccaaaattccaattaacactggatattcgtcattaaccgggtcaggattttaggttttactaaatttttgaagagtataatttattagaaaagtttggggttcgaaatttatcgaaatggatgttatattcgtgatcagcgaccctgaaaaccttctaaaacattttttttctttaaaattaaaattttttttcaaaaaatg

SEQ ID NO: 109767 - DNA, 1003 bp, Heterodera glycines
ttttttgccaattcaaaatcgtttattattgtgaaataattattttgtatgtggctttctacttcgtttttgtttccaaatgaaactaaaaagcataaaatttgccatccctgctctaatgttagaagatatttataagcaagtgctgagctaagcatttaagcaattcatcaaaaaagttcgcggctgaaaatctaataagtcagaatttttgcatattttaatttacagttttttacatgcctgcaatgctttgtcatttttgagagcttaataatgctaattaagagcttccgggtgattccatgtttgttggatttggtaacgtgtgttatatttcttcggcacccatacggttgcgcccaaatgtctcaccattctgccaaaaatttccctgtgttgttctttcaaatttttatttgtagcacttcggcgctcaattcgctgtttttctttaaaaaaaattagatttcatatttaaaatgtatttatttttactttttttattattttcgcccgttcctaagccaattttttccatgaattgaacaatggactgaaccagttccattcgcccgatttgttcaatgaacgtcaatgatggcgtagaatctgcgatcagagtgatcagataagagagagagagagaggggggaatgcatttggatgacgtcagactggcttactggctttaagcaactaatttttgtgttattactcaacgctattccttctatttatttatgacctaaccaaactaattatatattttttggtggcaaaaaaaaatcaggaaaaaattggaaatattttgaaaaatatcggaattatgaagcattcattttcaaataaatattcaagtttttaaataatattttttgaattttccaaatctgataaaattcagtagaaaattgaaaaatattaccgagcataaaattccaaaaaataataaaaagcgcacaaaaaatgaaagttgttttaacaattttttcaaaaaatg

SEQ ID NO: 109768 - DNA, 672 bp, Heterodera glycines
tagcccccccccactcctcgtgggattcattttactgatgctcaaatgagtcccggtgaaatttgggaaaaaagaaagtgatggatggcattggcattaaccaagtattttttgagaaattttgggaaaaaaagggatggcgttggcactaaccaaatttttaaagtttatttcaatggaactctcataaaacgatttaaatttagtaaaacagacagagagagccccgaggacttcccttagagggggagggtggctctattacggggggatatcaaaaaacgcaaaataaacgaaattaattcaaatatttaaaaatttttgtaatatggatattttaagttaaccaaatcttggtcaagaaaaaattttttacgggatgaatttttaataaatttttttcaattttattatagtgtattttcagaaattttttcattcttagggctgtgttttttttggtcattttttgcttttccgtaaatatccattttattattcttttttttcttttcaagtgccatcatttttccttatcaaattttgttaaaccccgcctgggaaagagatttgaacaacaaaaaagaagtaactttttgtacaattttttcaattggcaatattttttgaatgaattcaaaggcgaaaaggtaaacagagaaagaaaaaatg

SEQ ID NO: 109769 - DNA, 158 bp, Heterodera glycines
ggtcagagggacagcaattttggtgtaatgagtgaatttgttttcaaaggcatcgcttaacttttaatccatttctgtcccttttcgcctctttttaggacccttttttcgaagtgtacgtccaattccgcgagtacggcgcctttgtgaatgtcatg

SEQ ID NO: 109770 - DNA, 100 bp, Heterodera glycines
cggcatcggtgcgttggagcagccgacgacgacggtactggcgacaatcgccgggggaaatgccgtgacagtggcgacaacactggtttctgcggttatg

SEQ ID NO: 109771 - DNA, 83 bp, Heterodera glycines
tagccgcgagggctgtcccacccagcttcaactcggtcccatcggtgccacagcccaacccgggcccaattaagcagcagatg

SEQ ID NO: 109772 - DNA, 186 bp, Heterodera glycines
tctttaattttattttagaaaataacagcaaaaaatcaattaaatttttaaaaattggaaaatttaccaattctggcttccagaatcggattttttgaacaggaaaataacgcttttgaattgttttaaagaaatttgtgatttctttttttataaagaaatccttaagcaaccggtccctatatg

SEQ ID NO: 109773 - DNA, 434 bp, Heterodera glycines
ttttcgtccaacatgtctcatcaatagggcgtccaaaaatatggatataaaatcgcgaaatatggccataaaatatggacaacaaatcgcaaaatatggacataaaattgccaaaatatcaaaacatggacataaaattgcaaaatatggacataaatttttccaaatataggctataatttctcaaaatttcatcaaattcgctaaatgcaaagtaaaacttttaagaatggctagatatgtattaaaaatcatttttgaagaaaaaaacacgatacattaatcaaaattttcgacaaaattttgataaaaaatgtctttttcgcaaaaattttccgatttggggtcaaaatcccaatttagctgatgggggccgttctaataggttttttagaaaaatcccagaatatggacataaaatatggataaaaatg

SEQ ID NO: 109774 - DNA, 227 bp, Heterodera glycines
tggcaaaataaatggaagtgatcccaatcccctcccccccccctctacccgttttgatctattttcaactttttatgcataaatgcattttccgttattttctcatataaaatatttggggttcttgaaaaaatccctttttgattaagatgaaaattttgagctcgagagaaggctggacgatgcatagcgggccagaccccgagacttacacgcggagggaaatg

SEQ ID NO: 109775 - DNA, 219 bp, Heterodera glycines
cctcaaatcaaggcaattaataatcaaagacatttgctaattaggttttgttttgtaccaaatgaatttcatttttgaagttccggtgggtcaatctcgaaaaaagcaaagattcgctaacaataatcggctttggcatttgttcaacaaatttgagtgtaatttatccaatgtataaattaattttgccaaattggccacctgataagcgtatcgatg

SEQ ID NO: 109776 - DNA, 250 bp, Heterodera glycines
ataactttgcttatgggcaataaaattttacattcttggtaccattcgatagtccagctttttctctattagcataaaaaacttcaaaaaaattatcaaatttaacataagttatcgtagaaatagttaccacacaactttttctaaagttgaccaatttttttttaaattttggaggcttatagagaaaaagcttggctatcgaatgataccaagaatatataatttggttgcttttaagcaaataatg

SEQ ID NO: 109777 - DNA, 131 bp, Heterodera glycines
  unsure (1)..(131): unsure at all n locations
tcagatcaggtccctaaacaatggaacttatagatttttgaaatcaaagattttaaatttcaatttctgaattttttttaattttaaatttgtttttaattttttaaatttaatttttntaagttgcaatg

SEQ ID NO: 109778 - DNA, 191 bp, Heterodera glycines
attttggatcgttttgttgaatgctattttcccttgttgataaattactatttgttgaatttggtacagtaaatttcttattatttgttaaagttgacaattttccttaaatacatcatctttgtttagccaacatgcatttcggtaaactcaaaaattaagattaattcgtgttaacaaatgatataatg

SEQ ID NO: 109779 - DNA, 407 bp, Heterodera glycines
tcaataccagaaatagtttgtgaaaccaaaaaaaaataaataaaggtttggggaaactataaaccaaaaatggaaattgttttgatgtgtccggaaaccagaaaccaaatcaggaattgattttctgataatacaaaccaaaacagaaatagttgtccggaaaaacacaaaccaaatcaggaatttatttgcggaaaaatattttaaaaaacataaaagttttgtgtaaaacacaaacaaaaatattaaaaaaatttttgggtaaatataaatcagtaatgtgaattttgtttttgtttatacaaaaccaaaaaacagcaaaattaaataaataaataattattgtaatgcaaaaatggttgtttataaatcaacttttaattaattacgaattgattgcaaaaatg

SEQ ID NO: 109780 - DNA, 772 bp, Heterodera glycines
tcaccaaatcattcctccaacagcttacccaactctctgaagtatgttctttgtgtttttttagttcctttttttctgttttaggcatttgaaaatgcttccaaacaaatcagcaccccgcggagtgatttgcccgacacttcctcccatttgttgcgcaatgacactgggcttggcgtcagtgtgagcagcaccgaatcggtgaaggtaaattatggccaacaaaaccaggaataaaaatgcctaaaatagcgcttttgatgaattttttaattgtaaatagaatgtcactaaaatttgaaacaaatccgctagagggcgactttgaacaacgtgttttcctaaacatgctcctgatttttttaaactaaaacaatactgcttctgtaattttaggtggtgtttacgtgccattccccggcggtgaacaatcgacgtgttcagaccgccaaaatcagtccgtcttcaccaactgttttgggaaccggaggacgggaaaattttgaattgagagtattatttaaaaaactatcgcaaaaaacggttaatttttgtgcatttgagcgtttttaagaagaaaaaaaaagttattggggttcggtgtgaatcgccgagaaaaatcgttggaattttatttaaaatatgagaatttttgctagcagttttgcataaaatggccattttcatgacagttagttgaaaacctgaatttattttaaaaatttttttattgctctttttaggccgttctgcgacagcccttcagcatatg

SEQ ID NO: 109781 - DNA, 401 bp, Heterodera glycines
ttgtctaaatcgaatgacattattgggcatgccttaatgaggcgataaattaaatttttttctatttttttatttttaattccagaacttaatctctattttttaaagaaattttttaaatattaaaacaaataatttttaaatttatttatattttatgaattttaaaataaatttaaatttattatttactttcacaattttagttactggagttaaatcaattctatttttcatcaacaaattcaaccaatttgcttaattttgcaaaatatttaaaataaataattttcacttttttccagcaaaagttggctttaaataaatttcaaaattacctcaataataataataataattaattaaattattcattattcttcatcattattcgtctgatg

SEQ ID NO: 109782 - DNA, 261 bp, Heterodera glycines
atttaattaaaaagagccccgagcttttcttaatttgtcattttgtttatagataataagtattattatgcgttcctctttttttatatacacaaattgtgcgttccttttcaatgtaaaaaaaactaatttttctgcccatgggcaaaaaaatatcgatttaaaattttcaaatatttaaatagttattttataattatatgatacatttcaaaaatcgttaaggaattaaaaaaaaacaacaaaaattgttgagccatg

SEQ ID NO: 109783 - DNA, 150 bp, Heterodera glycines
gacgctaattaataaacaatagtaattaatttgcattgtttagaaaattggagttgcaaatgttctttaacttttcgaattgtgtcgcaaaagagcggcgtaaaggattataagagagaaataagcaaagaaaaaatagacaataaaatg

SEQ ID NO: 109784 - DNA, 302 bp, Heterodera glycines
tcaaagaacatgcagcaataagcctgcaaaatctaataagtggaaaatacctgagtatagaatttattttcagaaagtgtcaacagacttttggaaaaatatatttgcaatttatcaacaattttgagaagtgagttagaaatgataaacttcacgattcaaaccagttttcggtgctctaattaaccgcgataaaaacatccgaatcaattaaatagcttctgagataataaggtttatcataaaatttcatttaaaaataaaccctcaattattggtatgaacgatactttccaaacatg

SEQ ID NO: 109785 - DNA, 167 bp, Heterodera glycines
agttgaacgagcgtcaacgacagatcaatcgtgccaaaatacaaaagaaggggctggatccaaacgatgcaaattcgcgctttccggttagttttgggagtcgatcattttggcaaaaatgatcagaaatttcttgtagccaaaagttgccatttcatccaaatatg

SEQ ID NO: 109786 - DNA, 191 bp, Heterodera glycines
ggtcattttagggaacgcaaaatgattaaaactactatatctatctccaaatccaattccgggctctaaatcgagcattttttgtatttcatatttatgctttctataaaagctaaaaatttatagaaggctttcaggctttgttagtttttttttggttttgttacctaaaatagaaattcaaaaatatg

SEQ ID NO: 109787 - DNA, 1003 bp, Heterodera glycines
ttgaacaatagagagcccctggggctctaatcggttttcatgtgctcattttggcgtacagaattttcattgaaaaataggtaccaaaatattttatgactcctttcaagggggcagaaaaacgaactctcggatttaaattcagaaaatttggtgttgccaaaaaattgcagcccttaattgatgatgatgagtttaatgatcattaaatcctaaaataccgcaaaaattcttttacaaatcaaattaaaaatgtttttttattgctttaatttgtgattcaaaaatcgaatcgaatttgatcaccaccgaatgatctgtctgatcagtggcataaaatgcggtgaactgatcaaacacactttgagaatgaatgaatgaaaaaatgaaatgtggtggcgttttggtgacgaaggacagaaaaaaaaattatttatataagaaattgatcagtgtcaaccctctgaaaatcaatgctctttcattaagcccctgcttaaaactgaactgatcacatgcacaagtaaatttttgggtcaatttttagaattttaaaaatttttctttttaaatttttcttattagcgatttaattagaaggcttgaatttatctaatttagtgggcagtttgatttgaacaaaaaattttattttaaattcgcatttttacattttacaaaaaaaaatgataatgaaaatatattatttcttagaaattcaaaaaatttttttttgcatttccaatttaaaattttcttattagcgatttatttagaatgtcttaatttatttaaattattaaaaatatattttaaatatttctttttatttttgttggacagctttatttgaacagaaattttttatttttttaaaattcacatttcagccatgttaatccaagaattttcttggcaaatcttttacagaaaacactttggatttggcaaatcccaaaagttttttatttaaatttttttttaatttaatattttagcaatg

SEQ ID NO: 109788 - DNA, 705 bp, Heterodera glycines
ttcgtcttagtggtctgtgagttagtcatcaaaaagggggtctcaggttcaaatcctccttgtgtttgtgtataaatttcaattttttaaagcaaataaataaaataataataaatacagaacgccaaaagaacaaatacaaacagtaaaaggtacacactatattttacccttgattttatgaaatttttttagcttataacttggtgaatactagagcaaataaaaccattttatgctcattttgaagggaaaattctgaagaatatttctaatttagtcaaaagattattaaaattgtttattggcaaataaatgtttcatgtgttattttatatgttagagacatggaaatagtacactaaaatgaaagaaaaagaaaaaactttgtcctgggtcaaaaaatttttcctagggtcagattttcttgaaattttgcataggcccatattttgaccccctctatcgaatccctgtttattttttcgaagttatgtttttaactcgagatcggctcttctatttttacaagggaaaatcccaaaaaaattttaagttttgcaaagttttggcgttctgattactaaataaaaatccagcataattgtacttggagcccaaaattgggccgctgtgtgaaatgttgagaccaaccaaacctttaaagggtcgattttggcattttgttagctgtccaaacaaatg

SEQ ID NO: 109789 - DNA, 205 bp, Heterodera glycines
ttccgttctgaatgtaaaaaatggcactttaaatccggtgatgctaaggttaaattgtgcccgattgattgcccattgcttttccctttctccttttgtccgcttcgcttttctttggcctttccgcttttccgcttacccttacgcatttggccaagcggcacgcctggcacgccctccgggatgcttttgtgattcgacaatg

SEQ ID NO: 109790 - DNA, 98 bp, Heterodera glycines
ggtacactttttgaaggagcttaaaaaaaagaaagccctaggattacctttgtcaactatcatttttttccaagcaggcacaacaatgtcgtcagatg

SEQ ID NO: 109791 - DNA, 402 bp, Heterodera glycines
aaactagcagaaataaatcacaggtaattttaacagcaaaataagtcattttatgtagattcgaacatacataaagtaaaaataaaaattttcaattttgttcgaattcttgtctggggttcgaaatggatatcttattcgtgatcagcgaccttgaaaacctcaggaaagacttttatttagatgacttttaaaaaataatttatttttaagtaaaaaataaattaaaaaaattgttcgaatcaggatttggggttcgaaaaaagtcaaaaaaacgatcatattcgtgctcagcgcatcaagtaacccctaaaaatggtttttttttattttctttttttgtgggaccaataatcttcacaattgccgtttatttctcttttccttttttgttcggtcatg

SEQ ID NO: 109792 - DNA, 952 bp, Heterodera glycines
aagtgatcagcagataaaaactaaaaaatattctgttttctttgaagtatatcaaaaataatatgatattataatttcaaatttaaaaatcatgacaagagaacctgtttgttaaaaaaagtgaaggttattaagaaaagtgcgactaaaaatttatttgaaaaacatatgaattacctttcacattcatttaaaatttcattgaaacgataaaatagtcccatttatataataaataaatcactgtatgacaacaggtgattaaaaaaccctgaggatgtgaaataaatgaatgtagacgacaagatgttaagagaaaatctttattgctagtgaaaacttgagatgccgaaaaaatgaaacttagatctttaactatgaaacttatacatattgattttcataatatttatacaaaaataatcatcaacttttttgctccgtaagtgcaatatagctcatgagatattatataattaatatgataaaacaattttcatttcatatatattcttatgaaaatttaaaaataaaataaaaaatattccgttaaaattacggaagcaacccaattttcccataaaagaaaatttctgtacattaaagaaaaataattacttgaaattaaaaaaatcttttacatttacaaaaaactagcttatttgttgatatatgtagtaaaaaaatcaattgcttatttcaatattataaaaacaaatatattataaattaaatatatgaactattaaaaaaaatgaaatgaaccaataattataatttaatcccatggaaaggttgagtgtccagaacatgagaaatagcgcaggaaatggctgaaaattgagaaaattcaaaatttttaaattatatttagaacaacaaaaagacagtaattccaaagctccaatgatctaatttaagaacagctaaatattcaatgatcctcaagatg

SEQ ID NO: 109793 - DNA, 500 bp, Heterodera glycines
tttgtaaaattcaaatgaattaacaaacttaattaattggttggggtgtcgtcggcacggcactaattaaataatgggccccgggtatcggcacggcattcccttctcaatgccctcttccctttctgtcgttgtctcacctttcttcttctcttcttcgttcctctgctcttcttctctcccccgaggccatacaaatgcaatcaattcgaattgtagcaattaccaacagaatttcactcgcaaatgctgcttattttgtttttgcggctgagagagggaaaattaatttccaatcggacaaatggcaaaagtggcggcaaagggtcgcctggcgggggcatttatagcgaagagagtccgccacctggggacattttcaaattgaaattggcatcgattggaaattactttggcacagttttcgacttcctaattaccccaagaaaagattggccaagttttgctctgcataaatttgtccgctttctgttcgaatg

SEQ ID NO: 109794 - DNA, 201 bp, Heterodera glycines
aatggcaatgctgcgttcgttcggcaaattttcgaattgtctcgcaaaataaaggggctgagaattccactggcacactttgtgaccgcgtttttaacaacaaattgaacggctggggattcaaaatttcatttcgtttgcggtgagttcaattaatctgttttcttaattgatcaattatgggcaattaaggaattaatg

SEQ ID NO: 109795 - DNA, 213 bp, Heterodera glycines
ttttttttatcaaaatttcactaattaggttcttatctgggggttaattatttaataattaccattaatgaatttggttacaaattcctttgcataagcaaaacattgaactctcgtttccgtttgctgttcagtttcactttatttttgatgttcacattattattaaaatataattagctccatcgctcggcttattatttgtaaaaaatg

SEQ ID NO: 109796 - DNA, 707 bp, Heterodera glycines
aatccccgttctcgctaattttacgtggtcgagcagctcctcgtccttgaggaacgtctcatcgcatgattggtatccaattagataccaatacctcacagcaccgcagatgcgacgatggcgccttgtcgtacagggccaaagacgtcacttcatactcagttgtgccatcgtcgtcctccgcgatgtcggcagcattttgatccgggtgtcgatgttggcactaataaacaaatttgtccattaaaaatgaggtagttacgaatggcttctaactcattttgcactcaaaattatgaaaagatctatctcgggatgagtcaaattatcattttttgcctataatctataatttcacaattaatttagacttattagataaaaattaccccgaccgtccctaatcgcaatttcaacaaattttataacacattcaataaattcaaattttgccgccgccaaaacatgtcagtggggcgcttaaagtcacctattcttttgtgtccaatattccctgcactaatctttgttgatcgccccgagccaaacaaagaaagataacatctgtatgaccatttctacaatgaagaggtgacaaaagaaacaaatttttggagaactaaagtggatggggaaggggaaggggggggggggggtttagcgatcggcatactccgctggtcatttctccgaatattcgcgccatg

SEQ ID NO: 109797 - DNA, 283 bp, Heterodera glycines
aaaaatccaggggggatttaattttatttatttaatttttaatgtaaaatatttttttaataataaatatttttataaaaataataataataaggtcatcgttctgtgttcgctaaacacccaattttgttcaccgaatctggcattttctattttgaaatcagaattaaaagctgtaaaaggtgaaattacaaaaaaaaattaagttcgatttgatttatattttaatttagtctttgctcaattggatttgccaccaaagcgatgccattgggcgaaaatg

SEQ ID NO: 109798 - DNA, 256 bp, Heterodera glycines
atctttctgtgacaattgatggcgaaatgaaaatactaaacgaagtgagggaaatgcgtaccaggctgattgaggcggttaaaaagcgttttttacaaaaagaaaataggtatatacctacttaaaatactagtaagttttataaataaaacatttagactttgtatgttgagcacttttctcgaccctcgcatcaaggatcgtttttcctctgaaagcgacatattttttgcgcgcgtttcacgttcaaaatatg

SEQ ID NO: 109799 - DNA, 639 bp, Heterodera glycines
taaatttgataatttttaccggaataaataatcataaaaatttgacgattaaaatcaaatataataatattaataaaaaattatttaaattattaaacgactagccatattaaatataattagtttagaaaaattattttgaataaaacaaaatcttttatataaattaatttatatttattttgcttaataaaattgcttttgctttgctttattgctgtggcttgtgtgtctacggataagggcctaaacacacggaataattattttattaagttttaataaaaagaggacaccgtactgaagaggcccagtctctttttattaatttttgcacttttcgcgaaacgcccatttttgcacttttcgcgaaacgcccatttttgcacttttcgcgaaacgcccattttgcacttttcgcgagaaaggggacacacccatcgcctgcgtaaaattggggaccttcgtatgaaatttggtcctgctgacgggtgccggcgggtcgttactcaaaaaccatcaaaataaaaaaatttttgacagattaacgaattttttgtttgtttgtaagtttgcagtataatagaaaacaattttatatttgttcctcaatttacaggtgcgatttatccgacaatg

SEQ ID NO: 109800 - DNA, 1003 bp, Heterodera glycines
  unsure (1)..(1003): unsure at all n locations
cccattacccgactgggccctccccgaaaacaaaatctcatctctttcattttctcatcgcaactcaaaacttaacaaaacttcgagctacgtcatcgggatgccggcatttaatatggttattgttctcattaattttaattcttttgccacttgtcatcggtaccaaacagaaagcatcatcaaataaattgtcggataaattaattttaaaatttcataaatccagcaaatggtcaaagctcccaataatataaagctgtccaatttgttcaaaattacaaaaacattttcgattctcttttaagtgacacattccaaaaatcacggggtcaaaattcctcttacgaaatgtaacgcgaccacaaattcattgaaaatttataaaaaaatataattttacgaatattgctttaaatgaatttgtttaagttctttcgctttttaattatcattttattgttttttcgcttttacaaattgatacaaatattaaattgccacaaaattccgagcattttttattanatcaatttttactcaactcaattaaaaaaatatatttttgcaaaaaaatgaaaatagtaatattttttattttttaaatttaatttgttattgttttagtcaatatttattgcaatatttcttgatttatcattgctccgctaatcaactactacacaaaatttctttattacataatacaatttaactttatggcggaaaaggcaaaaaataattctcacttatggtaccgttgaaatgtattatgccaaaatttagaaatcctggacagaaacttttaacaatatgttattgttctccaccctattttggactctaatttaaagttattcgaatttttcaaaattttgtcacctttaagccgagcacctctaattttatgtcttcactcgattaacccactaacatcgaacataaattgaaacaaactgattaaaaagtatgtatgtaaatttgaaggaaataattgctaatg

SEQ ID NO: 109801 - DNA, 660 bp, Heterodera glycines
aggaatttaattacaatttgggatactaatacactaattaatgcttgtatattttgggtgcccctcaaatggcgaagagttggtggcagagaaaaacaaggcagcaaaaatcggacggacgatcgaatgcgatcattgcggcattgacttttgcggcgatttcgtcgttgcaaatggacgaagaagaggaagagaaaggcgaacaaaaatcagaagggatgagaaaaagaaaaacgaacggagccgaaaagcaaatcgaatggaaaagtacggaattttgagagggaaaagcaaatcggaaggatgggaacggaagagatcgacgcgtcatggaatttttagaatagcaacgcatttcttcatcattttatcttttttaaaatttcataaactgttcaaaaaacaaacaaaacaactgccgcccatgggaatgtgcttttgcagttgttttttcgcttttcctgctgatgactcatccgtccgtccgttttcacttccgtccgtttcacttccattcactcatcccttcgcttctttcttcgtcatcgctctgttcgacttcgtccgtccctttgccattcatttccatttaaatcattccgtcgccccatcaaataaaataaaataaatatttcacaataaaacacacaaatcaaaatg

SEQ ID NO: 109802 - DNA, 561 bp, Heterodera glycines
gtatttaaaatgatctcttccgccttcatgtgcatttactcccacttgattgtttattgtacattgcatcgcctattactgtgttcaaaatattattaattatcgcccagcacagatacccatgccaaatattgcctttctattgcatcattgatactactgtaatatacaaaagacgatgaataaatcataataacatacaaggaattttgccaaatacagaattggaaatagtacctaaatgcttttttaagttttgatactttctgtttttactaattgtatgcttgcgattagcggttttgattttcttttgctattgaaatcatcggaggtgttgttttgggtgaatcatcccatgcaccgatcatatgtacacattgggagggtgaggggtccttcccttttccatttcttttcattttcacagtcaaattttatgagtgtagtaaaaaacagttaaatctctttccccctcttcacacgtttaaacaaactcttcttgtcccttccatttcgattaaaaagtgtcattttgattaattacttttgttgcgaatg

SEQ ID NO: 109803 - DNA, 453 bp, Heterodera glycines
tcaccagtgtacttcgtttttgtattttttttatggatttgacccgccaatttctccattttaaactgaccaaactgtgcgcttgactgccggctttaacctaaaacaaataaggaatttattattttatacaaaaaaaaaatcggtaaacaaaagtgttgcagttttggcattccgcgccaacaatggcattttaaaaaataaaaaaattgccttgcaatcgcagcagctagccgcggaaattgtggttggcctccactcgtcctgcccgttcacagtcactcgttgcaacacatcaaaattacggtaccgctgattacagacgccccatccttgaaaaattggattatatatttggaacattgatcgaaagaagtggaaaatggatgcttgatcacgactgattggaatcgcaaaaatttaaaaaaaataattaaaaattatatgaagatg

SEQ ID NO: 109804 - DNA, 444 bp, Heterodera glycines
tcctttttaaataaatttcccaaaggtttacacaaaaacattgaagcctaccagtccccattgacatcaacatgtgccccccattgtattgtgtttgtttaccacatgtcccacggaaaatcattcgataaatttatacatattctcaaaacttgttcaaaccctgacatgtattcattaataatgttaaataaaatgttgaacagttaaattatattttcaatttcttaattttttcaaaattgtgtcttccacctactaattatgcattattctacctaaaagttacattttccaacgcttaattattttcgtaatttatttcacattcattaattatgcatgcaataaaataaaaaggggcggagcttatccatttgagttggaacaccggtataaaagccgctcgaatttcttcattcagacataaaaaaatctgaaatg

SEQ ID NO: 109805 - DNA, 83 bp, Heterodera glycines
ttccgtcgcttttcacttcaaagtcaacggggggggggggagagggaaacgcacttcgcaccgttccttttaagctgccgatg

SEQ ID NO: 109806 - DNA, 128 bp, Heterodera glycines
cttcccgacttttcctttccttcccttcgttctctgctttattttctttctttgcttagctttacgttcccaccgtcgaagacactttccatgtccaattcggcgactttcgttccgttgaccaaatg

SEQ ID NO: 109807 - DNA, 1003 bp, Heterodera glycines
gagactcgagactgagatcagcagaaaaacatgactttaaaaaagtttaaattgtacacttgaaacccgattaaaacttaattaatttaaataattcttttttattgaaatttcaaacaaattttgccgttgcgaattttggttcaattacaatttatcaatcaatcgttattttaaaaataaataaaataagtggttgatcaagttaatttctcttgcctgggctatttttacaaaattaaaaaaggaggtttcgtcgtagagaattgagggaatgccaaaggtggaatagaaaaaaaaacaataaaatttggaagcctcttttttctcttcgcaaattcaatcggattttgtcctttaaaggctcccagacatttggaccggcggagtggacaattggacattaattactacagtgaaagaaatatttttttattggttttagcattgtaaatattttggattctaagaaaaatgaaaaaaaaattaatttcattgctagtcttttttaagagtaaaaaattaattcactgccgttatgtcctctgttcaattgtccgttactttccaaatgacttcctcttaatgtccattggccaaatgtccggtcacacctaaatgcccattttttgaatttttgggttgaagcccggcgccgggaactttaaaactttgaggaggagttcaatcgccaatcgcaaggcccttttctgacccccctcttgcacagctaagaaattagctaaaaattcgttgacatttaaaattactcaatttattaggaggcatggaatcaattcgtcgacttcgcagtggacaaaggcacaaattatgcaattaaatgtgcgatcgaaactacggaaaagaaggcaaatgaatttatgattaaaaacccctatttttgtttacaaatttcagaaggaatttttatggattattaaaatgcaaaaaattaattaagcaaattaatattataactttcagaaaaataagcccaaaaatg

SEQ ID NO: 109808 - DNA, 226 bp, Heterodera glycines
caaggataaaactgtacgagtacatggagcaggtcttccccgaggaagggtctaagctgctgtattgtgatacaggtgctcaggaataaaaagaaaataaaaaccaaaaatttagattctctagcttttgctcatcggaaggggcggtgtccgttggtggaggggaaatttttggggtaaaacattatttttgaaacgcatctaaattgtggttttaagggagatg

SEQ ID NO: 109809 - DNA, 624 bp, Heterodera glycines
tgtctgcttggacgagttgttcaaacaacgggtctctacgatcaaaaacttcggagcgaagaaaatcaggataagcaattctaaattactaaagaataaagcgttttaatttcttccccacgggaaatcatccagagaaattgcatttatccgctcagtcgacggctgcttcacattttttgccctaacattagcaagcgtagtggccaagcgtgtagaaggaagcctttttagcaataatgaacaaactgacaaatgcattaaaattttttattgaatcttaatttgatttatttcaatgataagagataaattaagcagttgtttttcaaagtcagtaattaaaaaaatatgaattaaaaatttagtaatttctgtaactgcaaacattggaagggcggatatataagtagatttatttgggaataaaatgaaatgcagagaaattttgaataaataattaattgtatggccttatgttttgaaatttaaaaaggctgattcgccgatttacctttccctttttctcttatctgcatttttcaatttttcaatttctcatttctttccttttcttttttgtctcaaaactaatctaaggttaagaaaccaactattgcgatg

SEQ ID NO: 109810 - DNA, 685 bp, Heterodera glycines
aaaaataattcgatataacatgtcttacacgcattaaaataaaaatattaaaaatcaaatattagaaaattcgcaattaaaaaaacaaatatgcagttaatatattttactagatttagctgaatatttatgacgattaacatacaaaatcatcaaaaatataataattaaaaaattgaaagggaaaaattattgaaagtattataatccatagaatagaataaatattctcagcaagtaaatttaaataaatatgtatttttcatttaaataatatacaaatgtgaaatatataaaacttttttaattcgtaattgaattattttgtcaatcttcaatgtgaaacttatttcaaattcattaatctatctatagcaattaaatttaatgaatatttgatctacaaaaagcaaacaacattaacaatataaaaatacatattaaaataatggaattgattttcttttaacaaaaatttattttaaaagcctctccaactcgaaattttaaaaactaaatatatttaacgaaattaaaaaatcaataaatataaacacctatatcttgaaaaaacttccatttaggtattgtaagccgggactcgggtctcggctaccgattgggattgaaggggagaggctcctccccattggaacgcccaccgggattccccttttaagcgatg

SEQ ID NO: 109811 - DNA, 207 bp, Heterodera glycines
aagcagaaggaaaatttatgaaatattaaaaagaaaaaacaaagaaaaatgcggaatttgtgcaaaatttgcaaataataaatatacatatcctaaaaaccctcctctaccagtgtttagagtaaaagggaaaagtgcatttgaacatgttggaattgattattttggacccctctccgtaaaaactttggatggcaataaaaaatg

SEQ ID NO: 109812 - DNA, 275 bp, Heterodera glycines
atctgttcaccgaggaagtgccacggagggtcatctcccagctggtgcccaaccaaaattacattgggcacaatcagaataaccccttttacttcaaccaccacaacgtaagtgccgctttgacatgtatttctggcagaaaaaaaaatgttcaggtgcgggatattgaactgaccgcctctggcaggacatacccacagtttccgtacaacttggactacaagaacaacaggtacgcaagggcgtaccatgacacccaggagcaccttggcatg

SEQ ID NO: 109813 - DNA, 1003 bp, Heterodera glycines
gagatcgagacccccccaaaaagccgagaattttttttttaattgaaaattgactcgctcatctctccctaaatagtataatggcaaaaatggtagtcgggcatgggagttgatcttcttctgtgcactttttgatcaccggcgcaattccccgattccgttccccgcaaaaaaggcacgacggcgaaaataccccgccaaactcacaacaaaatattgagggtaaacaatcaactgccgagaatcgaaaatgatactgatgatgatgattaatgtttgggatgttacaacgcaaaaatttatttatttatttatttgggcatttcaaaagtgtgaaaattaacggggcaatcgcgtccctccctataaaaacggcacggagggcggcactttgcaccaaaaaaaaaaatttttttttttttttattacaaatatttatgattaattgtaggtactacacctaaatatatttttgtttttaatctttgtttttgttgggtatgtgtttattattttgtacgcttaacggaccaaaaaaaaaaaaaaattgtattttcttcataactttttctttacagtaatgttgcaaccaaatttgacaaagtggcaaattttaataaaaaaaaaaaaatttcactaaaatttccaaaatttttccacgcctagccgtccaatagattattttatgctttttgccaaattttccaaaaaatacatagtagtcatttttgggccaaattcaattaataaatgtgctaaatgctattatgtatttatttcatccgaggttcaccgaatttttgaaaaaataaaattttgcaaaaaaaattttggggctaaaagcagaaaaaacttttttggattttcttccaccttcgaaatttaatgataccaagttttgttggatttggttgacaaaaagtgatttgccaaaatcctctacgatttggccttcccagattttgttttaaaagagaaaaaaacggaaattaatttaaaaatg

SEQ ID NO: 109814 - DNA, 950 bp, Heterodera glycines
accaaatattgttgtataatcttataataaatctcataaaattatgtaccgaacatataccgccggacatattgcctcaaaaaaccaaaattaataaaaacaatttcttgttggatttatatgggaaaacaaatttgatcggaatttttatttctttatcgcgttaaatagcctggatcattcttttttcgacgaagtttcttctcaaaactgttttttccatcttataatgctattttcaaatttttttcaaaaaattttctcttgggaaaattcccggttggtcccggtcccggcttatttgttctccaaattgtttcttccaattgaaaatgctctttagatgaatttcaatatttttgcaattttattatcacttatttttggattttcactttttatttgccaataaattttcattttttctattttttgttcctccgttattcttttacagcgaattccaaattgtttcttccatttgttaattatgtctcggccgactccaattttcttacaaatttcgacataattttgtttccattcttttcaacatttttcggcgctaaaatttcatttttggccattttacaccaattttctgatataatgaaatttcataaaatctctttaatttttctaaaatctctttacattgtgaatttattttatttttattgaaaatatgtttattattttcgaatgagctccagtagaaagtaataaaattttattaatcattaatttaccaattggcaattattttgtcattaagataaaattattattattatttctttgaaattaaacaggatttccttattttattaagtaaaataatgatttattcagttttttaatcagaaaaaaatcatttaaatgcctcaaaaaatgaattgccatttaattgaagaaaaataaaacaaaattatttcgagacgacaaaaatg

SEQ ID NO: 109815 - DNA, 79 bp, Heterodera glycines
aaaatttttataaaaatagatttgttaattaattgactttgtatgtatattttcttttcagagattaatatataaaatg

SEQ ID NO: 109816 - DNA, 558 bp, Heterodera glycines
  unsure (1)..(558): unsure at all n locations
acgggggaggtgaagaagtaatagcattggacancacggcgagaagagacaaaagtattggaaggactcagaaaagaaagacgaagaaggaccatttgaatgtcaaaatataatctgaaaaaaagtgagagaggaaaggcaattgaaactccaaacgagcatggcattaattggcttttaaatcatcattgaaaaataaattaattttgagttattttttaaacaaagtgccaaataaattcaatttttcacgcattttgttttgcttctacaagtacaaaaatatgcttgaacttgttgaacatctctttaccttttattattccatttaatccactggcactttgctgatttctctcccgttccttcaaaaaacaaagggccgggggggggcttttttcgttatcagcaactccaaaaaccctgtgaagatttattatgacaaagaaaactttgcaaccataaggggtcccattttgtttaataaattcaaacatttttcgggggagtccatttgcaaaaccattacatttttccgtttacagcactaaacacatg

SEQ ID NO: 109817 - DNA, 101 bp, Heterodera glycines
ggtgaaagctggcacaatttctatgtccaaaataaacaaatgattttaaaaaagtaaaagaattgagcggatgagtgagttttatttgaaaagtttagatg

SEQ ID NO: 109818 - DNA, 101 bp, Heterodera glycines
  unsure (1)..(101): unsure at all n locations
ttggactcagcggacgcactttggagagcgacagcgtaaaagtgcagctgacngtgcaatgtgagaccggacggattctccagcaggtagctaatgctatg

SEQ ID NO: 109819 - DNA, 428 bp, Heterodera glycines
cggagtcgttgaaagggcaaatcggacaataaaggagcgcttgtacagatattttacaaagaaagacactcttcgatgggtcgacgtaatagacaaaataataacaaacattaacaacagtgtgaataggacattgggggccaaaccgtcttcaattaattttgaaaatgcccgtgcgctctgggaaaaattatataaggagaaggaatttaaaatttcgaaaaagaaaaaatttaaaatcggtgatatcgttcgtattaccaaggaaaagggaaaattttcaaagggatacctcccaaactttaccgaagaattgtttaaaatcgttgttgccaattcgacgacacccgattcatacaggatcgaagatttggaaggaaatttaataaaaggcatattttataaccaggaattagtgaaaacagatg

SEQ ID NO: 109820 - DNA, 282 bp, Heterodera glycines
  unsure (1)..(282): unsure at all n locations
ttaaaaaataatntggagaatgttcaagatcctgtccaaattccgaaaaagtgttctttgttgccattttgcgtaatatatatttgcttcattttgtatgcattaccatctctccgcttattcaatatttttgtgttatgtaaacatgaacccggtattaaatgaatggtgtctagagacaatgggtggtcttgaataataatcactttcccattattcgaaagaaaaaaaaataacaacaaaatcattttacttttttcccctgttgacgtagcaaatatg

SEQ ID NO: 109821 - DNA, 359 bp, Heterodera glycines
tatttggccatttttggcctttttagtccatatttcgggcttttttagtccatatttaatgtccatatttcgcgttttttagtccatataatttacaaccctaattataaaaaatcttttttattaatttaaaatttatttcaaaaaatttatttcatttagtatttaaatacattaatacaatatttttaacaagtaaactgaaataaattcgaaaaataattatttttattaattttaaatttttattaaaaaattattccatttagttaaaattgaattatttatttatttaatattttatattatagtaaatttttggccagatcagttacatcagttgggtggaggagcgcatg

SEQ ID NO: 109822 - DNA, 414 bp, Heterodera glycines
tgttagcaaaaaataaaaaaaaattttatgtcacttgggtacctctcctttttgcagtgtgggcgttccacaaaaaagctcagtgattgataaaataaaataaattttaaaatattaattattgaacggcaagtgtaattttgatttaatttctattagatgtgttataaaaaagaatttataatatttattacatagctaaaaaaggaaaattcacaaattaattgaacacaattgattaggtgctaattttctttgcatttcatgtaaagattttataatttcattcccgaaacagtgaattaattgataacataagaatgtcatagtaaaattttgagtatttaagctaatttttattaatctataaatcacaaatttaaacaaatattcactctcccaatcgctgcaatg

SEQ ID NO: 109823 - DNA, 760 bp, Heterodera glycines
aaaaaccatcaaatgaataattttgacagaaaattattcataatttcgtctaaaatggatcaaattttataatattgatatttttcgatagccctatgtgttttctattatcctgcaaaattaaaaaaaaattctttaagtttaaaaaaagttatgacctgagaagctcaaaaaaccaagttttttgaacatttttaatcataactttcttgaaacttaacgaaactttttggaattttgtaggctaatagaaaacacttagtgctgctatttaatgatatcaagaattaaaaatttagttgcttttgggcaaagttatatcaaaaatattttcatttgatggtttttgactaatgtcatagcaccaatgataccgtacccatccacaaggaccacaaaagtggcatggacaatgaaaaagttcctctgcgggtagagaggttgacaagtagagcccggttttgggaaaaattaaaaataaaattgaacaaaaaatttgtataaaaattggaattaatcgaaagaaaatttataaatggaaaaaagaattaaaattaaataaaaataaaagaaacttaaagcattattatgaaaaaagcaggaatttattgaacgaattgatgaatttaaaagaatgcccaaaaatggaaaacagaagcaatttgcgaaagaattgggcattgaaattggcaaaagtgaatttaatttaatttttaattttaattttaaatatttcagggtattctaatgaaaaaaaatg

SEQ ID NO: 109824 - DNA, 55 bp, Heterodera glycines
aatgaaagtgtcagttacgccgtaaagacagcggccgtaggggaagggcaaaatg

SEQ ID NO: 109825 - DNA, 1003 bp, Heterodera glycines
tgcttgctcgagagtctcaggaaattttctgtttcaagcagaaatagtgcgggcaaggacgggcgaagctcagcttagcactcgaaaccgaaagcgaacccaatttttttcgaagctcgaagtttcgcccacccctggtgcggtgcgggtgcctcgaaaaactttcacaaaagattatcgtaaatatcagccagccctgacctggctccccaccccccccccggccaattgtacgtcgtactggaatactgctggttgaccccttacacacttgtggtcataatcagggctaaaaattttaaaaattagtattttaccgacaatacacagcaattggggtcaaagagcagcttataccccttgaaaacagcaaaatgctgataaatcagcagagttgagagccctttgatcataatgaattacgtcgcaaaaaaataaatttaagaaataagcacatttggaagctaaaattaaagatgagaagctaaactaatctcttttaccccctttgttccccaaaagttttttggaaaaagcgccgcaaaaaccatcttcttttctaacaaaaaatttctcaaattttgatcatggacaatcagaaatataacattgaacattttaagcctgttttgaataaattttgtaaaaatgaggtatatttgcctgccaaatgaggctttttaaaattgagaagctaaattggtctctttttttcagagaagttctctttcaaatctcacaagcaaaaaatttatttatttattttttgctagccatttgtttttaaagaatttttgttgtttttaaggcaatgtgccaaacttttttttaaaaaaattctcagtgacgaaacgatcggccaccgttgacttcacataaatatgagttatgtgtttattttttcaaaagatttcctcattttagtcgaaattacatattcttttctaaatggcaccgcccgtcaaaaaaaaagaaaaaactttcctccgtcgaccaccaaatg

SEQ ID NO: 109826 - DNA, 418 bp, Heterodera glycines
gggcccgtagaataagaaggtggttaaatgaccgggtcaaacgaccatggttatttgacctggtcaaatgaccacgaagttggtggtaaacccgtagaataagaaaatgaccacgaagtgacgtttttaccaccaacctccgtcaaacgaccatgaactatgttcctattctaccgggttacttaaccacgtgcacttttgggacaatttgtttacacattttttatggaaaaataacttttgttttttaggtctatcgcataacaaatcgttgccaataatcaattttatgttttacccaccaaatgttacatatatttttcaacaccaatatattatttatttgtgagttgaaaaagaaatgatcaatcaataaattatattttttaattaaatcaaatcaaataaatttaggatg

SEQ ID NO: 109827 - DNA, 90 bp, Heterodera glycines
agtgtatttgccgatcgaatagtcgtgctgtgcacacctggacaaaaaatactatttaaggagcgaaagtacgcgcaggatcgcaaaatg

SEQ ID NO: 109828 - DNA, 63 bp, Heterodera glycines
ctgttagttcaaaagttataggtagggcgtgtaattatatcgtatataaaatcgcgaaatatg

SEQ ID NO: 109829 - DNA, 777 bp, Heterodera glycines
aatattttgacctctctctgcttaatttatttctataaattgtgttatttttctctccgacctctgacctacctataattatgttttcctttctttttgttgttttcgctaattatgttgttattttcaatagatatttcctttgctagatttccccgcatgtctccaggaggatttcttttttcatggtacattttactaaggacactgttctctctaaatattttgtgtgcatttatttattcgtcaattttaattaattggtctacagtccgttcgcttgtcatcttgtcggctttctcaatcgtcgactattccgccccgagtggcaaagcaaaagggagaagaattgaattaaaattggacgatatgatttgaatggataaaaaagcatagtattggacaaaaacccgcgcattttttgtttttacaaaatttatggagtgggaaaaacgtgcaaacctattttggtgtaatgtgcaaacagcaacgatttgaattttttaaatatgtatgtccttatttttccgcttgccctagggatatgaatttaatattattattttttgttattgtaaattatgtaaaatatttctaatttttgatgaaacattcattggataattgtcctgatttttttgtgtttgtactgtttttttataatcgatttaaaagcaataaattcgcattttcttcatttaataaataattttataaagctaaaaattcccaattttacattgataattaggcaatatttattgccaattaaaaatg

SEQ ID NO: 109830 - DNA, 69 bp, Heterodera glycines
ccgagtggcggcggcacgggtgaccgtggcaccggcgacactgtgccggcggcgaccaccgtagcgatg

SEQ ID NO: 109831 - DNA, 1003 bp, Heterodera glycines
tcaatcaaaataaaaaaaggtaattaataataaagactggaatttcgaaaccaccggtctttgacaatcgactgggcccggtattttcatttaacgggctcggtaaaagccggtcggacgtccaacgcgtccaggtcctatcaattccctcccgccaatttatgacattttagtcgattttgatttccatttatttatttcttgttattaatccccctcaacttttattgttttttcttcctccttcgcctgctgtgtttattttgcagaaattggattatttgcataaatggcgaaaatgcccaaatcccccgggggtttccgtccaattcgcagttggaattgccatcgtcggtgggctgcttttgccaaaagtttattcttatgccgtgcccaatttggtcatctcatccggcagattaaactcaagtggtcttaggggcggaggaattggacgacgattaaaaaaggattcggtggaataaaataaacggttgaaaacaatagtaaatatagtattatcagctgaataatccaaattttatccccaccccattttttctctctccgtccgtttttatccattggaggaatttctatggacatatgggaggaataaaaaaggataattaccgcaaatttgtgtaatgagcagcataagcaaaaaggacgaacagaagagagacatcggtggaatcggaaaaagcaaagaaaaaatttaggggaataaagcaaaggaaagggaaaaggaggacgattgggttttgagttgagtgaatttgaagaagagcgctgacaagggagcgaatgttgagagatttaaggagagaaagtggggggggggggggaggagggcggagcaaaactgaaattgcgtagagaaggaccaaaaataaaggcggtcaaaataaatttggatatttgttagaacttgggaatagttttaatcaaaatttattgttataattaaaaatgagaattatagaataaaattaaagtaatg

SEQ ID NO: 109832 - DNA, 78 bp, Heterodera glycines
cccctttccctaaaaaagttttaacaaaattttttaagaattttttaaatcgtttagccgtcccagtccggctacatg

SEQ ID NO: 109833 - DNA, 747 bp, Heterodera glycines
tcatggtcatgttattttcaattttttttaattaaggcgatttttttaatagattttgaccaaaattctaataaataataaaaatttgggaaaaaacctttttttttttgaaaaaagcaccaaaaaacaaaattatgattaagcatcacatttggtagccatggttttatcaaagtaatatgaccatattcaatttcagaaattcacgagtgaatttttttacgccctaaattaattttaatttttttttattcaattatttggccaatgttgttgtataacattaatcagttccgcttcaattccactcaaaaattcgccaaattcgttgagaattatcaatctcaaagacaaaaaaaaagaccatttcttttttgaaattaaaataaattaatttctgtcagttttgttcccccaatttgtcgaagaaaaaaataaataaattgaaaacctgttcgttaaatttcgcagctgactttgttttaatggaacacccaaacacacaatataaaaaaggtcaaatttcctaacgacagacaattccaaatccaaatcactttataaatttaatttttgatttgtcattggccaaaaatgaaatttaatgccttcaaaaacactaaaaaaattttactaaatttaatttctttaaaatatttttttaacttttactataatttgttttaattttcagattaattttgtaaacaaaaacccatagccttgcccaaattaaatcacaaaatg

SEQ ID NO: 109834 - DNA, 140 bp, Heterodera glycines
agacgtgccattattgtttaacccaccaccaaatgtgccggtaattttgggtcgttttaggttgcgttttctcaaatgaccaagtgtattttttaggaaattcgtgtgggaccaaatcatgatgggcattttttccaatg

SEQ ID NO: 109835 - DNA, 647 bp, Heterodera glycines
ctttttctttgtaaaccaaatccagtattgttggtgtcgttcgaaagcttaatctatttagaagctttttgtaagctattgctttgcgattagacaattatcaaaacagttatgcatgaaaattgcgaaaagtcgaaatttttgaagttttttcttaataaaatttttacaggcttgaaaaacttttcgtttttgataaggctaatagagcatgttaagagctttcgaatgataccaagattgttggatttggatgccaaagaaaaaagcttaagtggaaaaacgagctggcgccgaaacgggagcgccgaaacaccggacgccgaaacgcgagcgccgaaacacgagcgccgaaacgcgtgggtccctattttgcgggccaggacgttttcgcgtggccgttttcgcgtggccattttcgcgtggccgttttcgcgtgagggccgttttcgcgtggggtacgttttcgcgtggccgttttcgcgtggggtacgttttcgcgtggccgttttcgcgtggttgcatataaaagagaattcataactcacattatattttgccaaaatttgtttcactcttttttctaacgagtttttattttaatgagtttataaactaaattaaggctatttaaattatataatatg

SEQ ID NO: 109836 - DNA, 760 bp, Heterodera glycines
tttcggtaacgcttttttctctgtgagcgaagtgcatcgggggatttgctttgtggtacttaattgaccttttgacttctttttatgttttgaattataattatttgttggcgttttgttttcctttttttatggaccttaaaatatttgtgagttttttactgttcggttttttttgttttcttgtctgctcttgaattgctttgaatttcttttgatgctgacttcttctcaattgattgttgtggtctcgtctttttaattattattgttgcggtttaaaatttatcgccgtaaattattttgttttgtttatttattaaagtgtttgcgaattcgttttgaaacaggtgctgacaagccgacagataattgtgtttgatccatttctgaaaagagacaacccatccccatccaaatttgttggttttgttcaacttggcgctcctggcgacaaaggtttggcttagtggcgactattcattaaaggataatatcggccataaaatttttgtgaaatcaagtgaacaaagtgatttctataccctcgtgttgggtttaaagcatcattcggcgtatttttgccgaccttacaactttctgctcgccgattaaaagcactcgtgttgtgctttacgaattaacgaattttgttaaaagctcgtgttgttttaaaactgatctttattgttttatatcgtgttgataaattctgatgattttccgctcaccaccactgacaaggcaaaggctcagaatg

SEQ ID NO: 109837 - DNA, 363 bp, Heterodera glycines
ggcccaaaaaaaccccaggaaaatctaggtccaggaaaaattgatccagtgaaaatccagaaaaattcaggtccaggaaaatgcaggcccagaataaattccaggtccaggaaaaatacaggaaaacctaggcctagaaaaatcctggtttcccaaaaacgacctgggcctgggcctggatacagatccagactgagctctaaatggaacttttttattaactgaagtaaatttcttattaaagttttctttccaaataaattatatactaatattttttaataataaaaattagttaattaaaaaaattaaaaagtatttaatttgacgaaaatttacttataattagacaatgcatcaatg

SEQ ID NO: 109838 - DNA, 1003 bp, Heterodera glycines
tggcattttatacaaggcatcccaggccccaaaaattttcagaaatcgaattccgaggctcaattttaacctaaaaaatttgacaattttagtggtgcgcttttcaaaaacttttggaaacttggggcgggaatgaggtccggcggtgaagacaggcgccgtcgagaaaatttttgaaaatgagtataatttgttaagagaattttgtccaaaaattgtcaaattttgtgattttcaagccaattattggtaaaaaaaaaatttggagttttgggaggccggcggtgccgataggcgccgccgaaagtttttcggaattttaggaatttttaattaattttattaagaaaattgtacaaatttaaaaattttcaagagtccccaattccccgagttagtgtcggggggtcgggggataaaaagtcggaggtagggggctcggggagcaaccctattataaacccccaaaataggtgctaaaaatggaaacgagataaatattttaaaaatcaaaaatgtagtcaagtaaataaataaataaattttgaatatgaatttttgataaaattttccatttctcaggggtgtatttttagttttattgcatttttgttaataatttttttcaaaatagcagaaaatattttacaaaaaattcttcaaaatgaaaaagagcacaaaaaaagcaataaatttattattattacaggttatatcgctccaatttgattcggtttttataaaagtcggtcggttgtttcggttttttgattatttcggtcggtcggtttcggttaaaaacccgaaaaaaaccgaaaaagtcaaaaatttctcggtcggtttttttcggccaaaaaccgaaaccgaaaaataccgaaaaaaaccgaaaaaaaaccgaccggtccgatctctatttgtatccatattttctcattaagaaatgcaattttttctaagcataaacaatatagtaatcccttaaacattatattgttagtctatg

SEQ ID NO: 109839 - DNA, 346 bp, Heterodera glycines
tttttccttacccatacaatctttctcttttagactttaagctgtacagattaccgcgtacgactattttcgactagttggcgaaatgtccgtttttggcttagtgatggaatgtctgtattaccatttaggtattttaattactaaaaatttatgaattatgcataatattatatctaaatatattttttcatttaaacgcaataaacaaaaaatccacacaaaaaatcaataaatgtctcctttaatttccagaagaatacttcgaatttatcaataataaaaataaaatatataaaactagttgacattttcataaattcccaaacagtcaaatcgtaaaatg

SEQ ID NO: 109840 - DNA, 164 bp, Heterodera glycines
  unsure (1)..(164): unsure at all n locations
aaaaaagtttgtccccccatacatcaaaagttttccaccccccnccgtccttatcaaaatttcaaaaagtttccacatgccaaagccgtcagcacttcaaaagcgactccgcctccctcactctcagaccagagtgcctgtggcacacgcgcggtaaaaccatg

SEQ ID NO: 109841 - DNA, 159 bp, Heterodera glycines
atttcttctaaagccgagacggctctaaaattattcgaaagcggagtcggcacgccaaattcgtcaaaagccgggttggctaaatattaaattgacacctattggtgcaatacttcaacgtttattgatttcgggtcgaaacaataatcgtctacaatg

SEQ ID NO: 109842 - DNA, 557 bp, Heterodera glycines
ttttattttcttcttctgaaacaaagttagggccaaaagtactaaaacaaccaggttttcagacagttttggtcataacttttttgaaccttaacgaaattttttgaaattttccggctattagagaactcttttagctatcgaatgatatcaagaatgtttaatttagttgactttgacaaaagttataggcatttttttgttgaaatttttcatttgatggttttaacggctcagctccctgcaaaatacttgttaaagatttgaatatttcttggggtgtctttcgttgatttgcctaaaattaatgctttgcttttgtgaacattcgctacatttaaacaaccatttcaatcaatagcatgatatgccaaatcattgatgccaagccaaatttttgcacgtcaaatgccacccccgtccccctgtttaaggtgggtgccatgccaaatttggctgtaaaatctttccccttctgattaagggttgatgccatgccaatttggcacgtctaattccttcaaaataatttaatataaaaaaaatatctagaaatg

SEQ ID NO: 109843 - DNA, 921 bp, Heterodera glycines
aaaagcaaaaaaattcactgatttttaaattgatatatgctaattttctaaaaatttaactgagtttgggttggaaaatctaagttttaatatgaatttttaatgtcttaattaaccttaattgcttaaagacaccctgatgagtaccaaaagaaaaaggcagccgaagaaaaaatgggcgcgagaccgttggatgtgaagagttaaatggcaaaattaatcatgtgttttgagagaataatgaaatctttcgattttattcaaaatttattttggtatttgtcacaaataatcatatttacacagaaaaaatattgaaagatatcaaaataaaatattatttattaatttaatttatattccaaatgaatgggttaaataaataatcaaaaatttattatttttcaatcaaattttcgcataaataaaaaaaatggaaaaaataaaaaattatgttatttaaacagctattaatggacttttccccataaccatcttaacaaaaataaaataaattaaaatttgaaaattaagggagcgaatcaaatgcactttcgtttttgcaataaattcatataaacaatgtctatgtgcttaaaaatacgatttatttgaatacgtaaattccattttgatgaaacgatgaaattcatgagttttttcgctatttaagcaggtcatacaataaaagcatgcaatgaaaaaactctgtttattgattacatttaaactttaataattgttttcctcattttatttattaatgacaagaaagcacaaagaaagggaatttaatgtgttaatgtaattttttttcttaaattaatattgaatacaaattatttttttaatgtttaattaataataatttgaaattaaattttttgaaatcttttttagatttttaacttttctacaatg

SEQ ID NO: 109844 - DNA, 148 bp, Heterodera glycines
gattttgaaatttatttttaataaagcaattagtactattttgttttctctcaaatttgaaatttttcgagcctagtttttggatttaaaaatttaaattgttcatttttaaggtgtccgctcgtctgcgcgccctcaatgaccaatg

SEQ ID NO: 109845 - DNA, 80 bp, Heterodera glycines
ttcagtgtgtgtgacagtgatcgaaccgcgggtgttggctggtcggtgggaagggcgaaaaggggtgaaaagcaaaaatg

SEQ ID NO: 109846 - DNA, 115 bp, Heterodera glycines
gaaaaaaaatttgttgaaatttattaaaatattatagagtttcatgaaatttcattattttcatttaattttcaatgtttttctatagaattttcgtgaaagatttatcaaaatg

SEQ ID NO: 109847 - DNA, 115 bp, Heterodera glycines
ttttaaggcatgcgccaaaaaaaattttcatttaatattcctctcaaatttggtgccaagttcagatcatgttgagaagaattcttggtgatcaaaaatttttatttgaaaaatg

SEQ ID NO: 109848 - DNA, 287 bp, Heterodera glycines
gtcaaaagaggaaaggaaattgctcctttttcattcgatgttgcgattagacgagaacaaacagacgacgaatcgttttctattcgcgagcaaagaaacattttggaaacaatggaagagaatttacagcaacagttgggaggagccatgattctgaaagttgacaacattttttacgatggcatcggaggaattttaatactccgtgtgaaaattgcccgttttataagtacaacgattaagcataaaacacaaatccaaaactttttttagattttggcaggatg

SEQ ID NO: 109849 - DNA, 170 bp, Heterodera glycines
gagccattacttatgcgaactatccgcataagtgtccagccctaattagtcaaacgggatggatgcgttgtccacgatgttctgggccacatccgattggatacccatgttttatacaacctctgaaagatgaacctactagcggaagaagaagaagagagagaagaatg

SEQ ID NO: 109850 - DNA, 274 bp, Heterodera glycines
actgaaaaagaataatgaattgcgcccccgtcaaaattttattactttgtacttccttatgaaagattgatatgaaaagcatcgttaaaaaaacaaaacatatttgttgtttttttcttcttaattgtttaatatgaattccaaaattttaaatagaaatttttttctgtgttgaaaaacgtatttgaaagaattaataaattttataagaaatttcattatttaatttttatctagacaattaattgccggaattttcaaaataatcataatg

SEQ ID NO: 109851 - DNA, 64 bp, Heterodera glycines
ggtacgcaaaagtgaaagaaatgcaaaatttgcaacgccaaaaccatagaatttgaaaagcatg

SEQ ID NO: 109852 - DNA, 364 bp, Heterodera glycines
caaatcagtaaatattcaaagaacaaatacgaatcacaccttggctttgtattttttatgagaaagaattggaaatgtgataaaattgcggataaatttgaagaatatgaacggacagaatgtcaaaaatatcgaaaatatttggactttttgtacgaaaaaatataatctcaacaaatttttcaattattattttgaaccaaaatattatataaatttgcaaccgaaattcgatgatgaaatttcatgggtgagacttaacacttaaataaaaattaaataaattcaaattttagactaaagatgctctactttcggaatttgttataggactagcgacaaattttcataaatttttaggatg

SEQ ID NO: 109853 - DNA, 638 bp, Heterodera glycines
tttgtgattctctctctctctctctgtttcgtttgtctctcttttacattcttctctcttctcgccttctctctccttacacttcagatgatcaccttcgaagcggcgatgattctcttttcttcactcactatctctcattctctttttctctgtctcttttttcatttttttttctttctcaatctctcctctctctctctcttttcctttctctttctctctgtgtatcttcgtctctccttttacactgatcactttcgacccattctttttttaccttttctgatcactttccattcttccgatcaatctcagctcaacacagcatactgaataagcatgtgatttttgttcattctctccgggcaacagctgttacggaagggcacaaaatgtatgggatttatctcgaaaattcgtgggaaggaggctatttattcacgcttagagctcctcgtcggaagcgaatgctttgtcaaatggattagataaaaatgtttcaaaatttgccattttacaatcgggggaacttaaaaatttcaaccctaatttttttgttttcttttaaaattaattaataaaaataaaataaattttaggtaaaatttgtgcgtaaacacagagccaacaacatg

SEQ ID NO: 109854 - DNA, 468 bp, Heterodera glycines
ggtaggcagattaaaattttcaaaagcctcatttggcaggcaaaaaagcctcatttttacaaaatttattcaaaacacgtttaaaatgctcaaatgttatatttttgattttccatgatcaatttgagcaatttttgttagaaataagcatttgggaaattctgagcacgaaaaatcgaagttgattttttgcggcacttttttcaaaaacaaaaatggctgattcgcgctaacaaattatttttttcacactataaatgcatctttattagttaatacataatcaaacgagagaaagtggatattattagtcattaataactttggccttttttatccggcactccggctgattgtgagccaattttcttgactgacaaatttattcaaaagctcctcatgtcttaagtaccaaaatttttattaattaataaaattcaggaattccgtgaaaagtttgcaaaaatg

SEQ ID NO: 109855 - DNA, 520 bp, Heterodera glycines
attacttaggtaatccaaaattcttaggtattaatctaaagcttaaagtttagcgtatttattaatacaagaaaaaaacaaatacttacatatattaagaaaaaatttacacttccccaaattttaagctttcgattagagcacaattttctcccactttttttctatccaaaaatacaaaaatatctttgtttattaatacgtttaggtaattatcgtacattgcatctatttttcaaaatatatttgtttacgtttgcatttagtcggatcaattttttttaccgatggcaaagcgatgaaaaaatgcataaaaacagggggggggaaggagcacaacgaaacatttgcatgttttttttttgctacaaatttcctcaaaataatcacaaagcccaactgaacataaagttttgctgattttgtgccgtggtttttatttcttgccaattttgaaattgccaataattttaccgcatttaaatagataattaaacgaatgatggaattgcttagcatg

SEQ ID NO: 109856 - DNA, 222 bp, Heterodera glycines
ttaggctcgccttttttttattgtcatgacgaccatttattaggtagaaaatgaattaacaatataacttaaaaattgacatgttcagaaaattttaatttgaaatactttttttgtataattttaaatttgataattagcattcattattaaacaaataaaaattgatttttatagggagagaatttccgttccatttaataatttaataaacccaaaatg

SEQ ID NO: 109857 - DNA, 147 bp, Heterodera glycines
  unsure (1)..(147): unsure at all n locations
tcccgaaaaaaaatcgaggtcccggtcncggcttctcaggtcccggcaagtcccggtcccggttttggcaaaaattcccggtcccgtggcactctactttttaatattgctttagaaaatgccccgaggaaaagccgagaaaaaatg

SEQ ID NO: 109858 - DNA, 138 bp, Heterodera glycines
gcgacggcgtcgcgttcgtattgctcccaattttacataaatgttcacaataaaaagcataataatttttgttttaaataattctttttcttttttagctcaaaagcttcccagctcgttcacaattttttattgatg

SEQ ID NO: 109859 - DNA, 135 bp, Heterodera glycines
agtgagtgacgcaattgtaacatttctattcatttattctgttttcttttttagattttgaacatttcgcccattttggaggatggcactgttcgccttcgttggcgtatttgttacctcggcttgctgagcatg

SEQ ID NO: 109860 - DNA, 393 bp, Heterodera glycines
atttaacataattagtaggaagttttaagatgccttttgtgaagctgtccaccctccgccccatcttcaaccaccctcattatgaaagtgaagaagtccggtactgtcactgtttttaacaaaaaccaacagtttgcttcaggaatagaactttgctggtttattcgctttacagtaggaaatccctcaccgaagtaatgtaaaaaattatcgtgcaaaattccacttttatttctttgaaggtgtaccattcgctgcgttcttcgaacattcatttttacgtgtttcagccgcaacaatgcatagagaaacacccaaagtgagttcataaatttgcttatgcatttttacccgtttgaatacggtagaaacggatgttcgtatttggaaatg

SEQ ID NO: 109861 - DNA, 316 bp, Heterodera glycines
tttgtgtaatttgacaccacttcttttttcttttcgttaaaaattaaaaagattgtctggaatttgtcttgcgccacaccgctgtgccattcatttatgtaatttgacaccagtctgataataatttcgacaaaatttatttttatttgtccatttattacgaattatcttatatctttcgatccaaattttggacatattgttttttcttttcctttttagcaattttgctggtttattcaattaaaataaataaatatttgttcatctttaaagtaataatttttataaaatttagacacaaaaacaaatcatg

SEQ ID NO: 109862 - DNA, 131 bp, Heterodera glycines
tttggtatttgtcgttattccacggctggtgtcaacgtggcagttcaaaccgaaccgctaatcagcaaagaggtgagtcgaccgtttgaaacaaatgaacatttttttattgttaggtcttgctaaaaatg

SEQ ID NO: 109863 - DNA, 251 bp, Heterodera glycines
tatttttttttctgaaattttgtgtcatttattatacaagaaaggaaaatacatcatatacccattatttttgtcgaatttataaatttcaactagggctggtcaataaacattccagaaaaatggctatctatttttttgagaaattttctatgcaacaaacgctctcgaacatgaaacgaagtgcggtgcgccgtggccattttatttttcaaataatttttaaatttaatagatattccagaaaaatg

SEQ ID NO: 109864 - DNA, 201 bp, Heterodera glycines
ctccagcgccatccattttcagggctagttgattcggcaggtgagttgttacacactccttagcggattccgacttccatggccaccgtcctgctgtctatatcaaccaacaccttttatggggtctaatgagcgggcactttggcaccttaactccacgtttggttcatcccacatcgccagttctgcttaccaaaaatg

SEQ ID NO: 109865 - DNA, 70 bp, Heterodera glycines
tcagtcaaaaagggaggaatgtttgaggaaaatacgacattttggttctttgccgacggacacagcgatg

SEQ ID NO: 109866 - DNA, 88 bp, Heterodera glycines
ttttcggtttgcacggaactgaaagaaaacaaatggttgaattaccaattaattggcacccatttcaaaaattcgattcgagaaaatg

SEQ ID NO: 109867 - DNA, 119 bp, Heterodera glycines
tccacttcaccggataacattccttacattttattaaaaaattgtgctgagccaattacaaaaatattagctgacatatttcgacttgctttggattccggtcaaattccggaaatatg

SEQ ID NO: 109868 - DNA, 227 bp, Heterodera glycines
tacatcccattatggagcgctaaaattatcagagtgccgaaaatcgcacgtgatctaagcctagcaaaaaatggtgtaagtaaaaatcgtaattacgctcaaaaagcttctcaaacaattttagcgcttccaattccttctacaatcgcctttatacatcccattatgagcgctaaaattatcagagtgccgaaaatcgcatcgtgatctaagcctagcaaaaaatg

SEQ ID NO: 109869 - DNA, 300 bp, Heterodera glycines
atcgctttgatttgagtttcatgcggttccgcttttttctctctgttctaataaaagatgaacattaaacttgaacgagaaggggatgggagggggtgtcatcatcgatttgaattgtcgcacgggactcagtattgagtgcccatcccacccaatctttactcaattccttttgcgtaatttgacgttttaaattggagggggggggctcaattgatgtccagccgggtgtatataagcagctgttaattccgccgtcttccatttcattctcgaaaatttttctcccaaataaaaatg

SEQ ID NO: 109870 - DNA, 395 bp, Heterodera glycines
aaggggggaagcggaagaacaaggggtacaggtgcaaaaccataacccaaagcgacggataaggtgaagggaagagggggaacggaaggggaaaagggacatttgaaaagtgtggtacaaaatacggacggaagtgagggcggaagaaagacgagcaaattcatcgaaacaatgcgaaggaaattctcacgttcctccgggacattccaatcgagaaaaagtaaagcactgatggaaagacaacgaaatgttaagcaaattaatactcagaagcatcaagcgaaagtggcgattttgagaggggaaattcgacgaggtaagccaaaaatgagagagaatttgaaaaagttgggggggggggggcaggagacatttgcattagaaaaaaggagatg

SEQ ID NO: 109871 - DNA, 118 bp, Heterodera glycines
  unsure (1)..(118): unsure at all n locations
agtactattcttttaccttcatttattttgttgtatagttgattccgggagagcgtccggatttgaaaatttatcaaaaataaagaagtacaaaacttacttaaanaacacaaaaatg

SEQ ID NO: 109872 - DNA, 186 bp, Heterodera glycines
ttttcagggctagttgattcggcaggtgagttgttacacactccttagcggattccgacttccatggccaccgtcctgctgtctatatcaaccaacaccttttatgaggtctaatgagcgggcactttggcaccttaactccacgtttggttcatcccacatcgccagttctgcttaccaaaaatg

SEQ ID NO: 109873 - DNA, 309 bp, Heterodera glycines
ttccaaaatcacgcattttccatctgatcattggacctcagtaaaaatcgcaaataaaagggagtcatgtggaaaatgaaggaaaatgaatcggaatatcggcggagttgtttatcattgcaaaaatgggaggagaaggggggggggggaaacacgttgagaaatggtaaataaaagtcgaggaagtcgtcgggactcactcttggccattcattcgctccctattcccctttttgaatttcaataaattattttccaattttttttctaaattttgctgaaatgtcggccaaatacttgcgcagaatg

SEQ ID NO: 109874 - DNA, 495 bp, Heterodera glycines
gtacattccccctccccaccttttatcattacccaaccattttttaaattttcaaaaaaagaaaatatttcaaaaaattcataaaattggcgataaacacttaaaatgagaatctacaattgaaaaaacgtcgtaatttgagttgacaaggcaaatttttatttcaaactttgtgatttttatttgccaaaaaacgcagccctactaattacgctaaagatgtaccatccgccaaattggtggctcacaatcagttggttaaattactatttttgaaggtccgggttcgaacccaacatgaatcatgttctcgattttcgtccctttgtctgatgaagcgcatatttagtaagacaaccattgcagcaatattttttgttacacaaattttcttcaaaacactgactgaaactgaccgtcactgagttgttggcacattcaaagtcaaacagtgggcccggcacttcgccaaccgcaattgtgaatgccacaatg

SEQ ID NO: 109875 - DNA, 64 bp, Heterodera glycines; identical to SEQ ID NO: 99473

SEQ ID NO: 109876 - DNA, 351 bp, Heterodera glycines
gctaaaaaatggtaggtaattgcgtagacatttttataacggtaaaagtaattccgtaagactatataacagggatgggatccgtccttgaatggcaaggacatccttgaaattgggccctctttcttgaaaataaaaaaatgtccttggatgcaaggacgtccttgaaaatgagaatttggaaaagtggaaaaaataatcaaaggaaatttggtaattttataacatatttggatattaaattatggcattatgttaattttttttgctcatagttgagaattattatttattattattattaatatggtattaggaatctttcatgatacccatttttatttcagaatg

SEQ ID NO: 109877 - DNA, 110 bp, Heterodera glycines
  unsure (1)..(110): unsure at all n locations
atcaaatgtcacaaacccnccatgagcttagcaaaaatttatacaggctcctgggtgagggaagtgatccgttagcaaaaaaggtacgatcacnacagaattctntcatg

SEQ ID NO: 109878 - DNA, 1003 bp, Heterodera glycines
tattaattacattcaatattaaatcttactttttaataaacgatttccttaattatttaattttaaaaccatgattgtaccctttttaaccattattgtaccattccaacaattattgtaccttttcgacagtggttgtacctcatctaatcactgttgtacctcttctaatcactgttttacctcttctaatcacttttgttcaaattttaatcactgttgcacctcttctaatcactattgtacctcttccaacaccttttccaacaaatcaccaaatttaaaaaacgggcgcgaagcgcctgtacaaccagaacaaaatttgaaaaacgggcgcgaagcgcccgtcgagcccaacaaaatttaaaaaacgggcgcgaataattttaaaaattttttaaaataatttaaacgttttttttgttaataataaaaaatttatttatgttttaaattaatttttttgtgttgaaataaaaaaaaacaagaaaattcattagatttatttttaagcaaaattagatttaaaaaacactgttgtaccacttcccgtggttgtacctctttccccgtggttgtacctcttctaatcacaattgtacctcttcaaatccctgttgtacctcttctaatcacttttgtacctcttctaacaattttgtacctcttcaaatccctgttgtgcctttcccttccgtggttgcacctcttttaatcactgttgtacctcttctaatcattgttgtacctcttctaatcattgttgtacctcttctaatcactgttttacctcttctaatcactattgttcaaattttaatcactgttgtacctcttctaatcactattgtacctcttccaacaccttttccaacaaatcaccaaatttaaaaaacgggcgcgaagcgcctgtacaaccacaacaaaatttgaaaaacgggcgcgaagcgcccgtccaaggccaataaaatttgagaaaccggcgctaagcgcccgccctatg

SEQ ID NO: 109879 - DNA, 1003 bp, Heterodera glycines
cttttttgattataatacatacgaaaaaaaatctgatttgatttttgatatttgtttgaatgaaaaaaatgttttgtatagtaaaaagagaatgaacaagcctttaatggattgaaagaaagcaatgtaaatctacatctcaaattttcctgttcgggtggataattatatgcagttgggatatattacgtgccgcttgctgaatgaccgcttgctgaatgaaatttatgtggaatattttaaattaacgtttacaggtcagtttttgttttgaatttgggggtgggtgcaataacgattctcttttatatgtttttaaaaaaaaaccctctcccccatctgcaaactattaacttaattactgctttttttgagcgaaaaaagaaaaagttgaaatgcttcttttttttgtttttgtgtacattcttttattttcaaagtttgtttcaaggtttaaaatatctaccgctgatttttgtaatgaatttaagacctagaattggaatttaaatttgattgtgtttgtaaatgctaatgaattgtttgtgaaaaaagtcacatttaatttttttaaatatgaatttaattgtttggttatcagcagaaatttttgtttatgttatgattaattgaaaacgaattgttagtaaatgaaagttttgttgtttgatatgtatcatgttgtgctgattcaagttgcaatttttttacaaatggatgttttacgatatcgaagccaatctacaaaatgtgatgtttttgaaaattttaaaaattaacgggataacaggtcagtttgattttttctctttttaatgagagataatttgaccttgcattatttttgacccactcatttttatttttaatcattttattaaatattcacacttgcttgaatatgttgtttggttcacatttatatatttgttattttgtaaatgattttgttatgtaatgttctttcaggtttaaactttctactgcctcctttgttataatg

SEQ ID NO: 109880 - DNA, 1003 bp, Heterodera glycines
cttttctttctctctctcgctctctctcttatctctctctctctcactctctttcttttttctttctctctctcttatatctctcttttctctctctctctcttttttctttctctctctcactctctctcttatctctctcttttctctctctctctcttttttctttctctctctcactctctctcttatctctctctcactctctctcttttttctttctctctcttatctctctctctctctcactctctctcttttttctttctctctctctctcattctctcttctctctcactctctctctcttttctcttgctctctctaataccacacaaaaatataaataataataataataaattaattaaaaaattaaattttgttaaaataataatagttaaaaaattaatacctaaataaatttaaaataatagataaaaatttaaaaataaatgaaaaaatataaaattaattaattaaataattattaaagtcaaatcgtattggagggacggacatcagctgtcgtgccctttgggagggaagggatgccaggccatttgagcgctcgcgcgtgccatttgaccgcacgcaggggccatttgagcgcatatgccatggcatgaacaatttagttgccaacctgccaaatgaccacatgcttgagtgaaggtcaagctccgcccacttgtgagggtataaatagccggctattaccagcaaaagtcaacttctcccattcattcgcgaaaattctacccacattcattgcttgcgcgctccgtcaaaaaatatttaaactaacaaatttgcaactacattaccctttcatccaatattttaccaatattcaacttataaaaaaaaaaatattttcaataattttctattacaactataaaatttacatttttctaattcaaaatattctttcatattatcttatatcacctataaatcataaatttttcattcatatattattattcaaataaaatg

SEQ ID NO: 109881 - DNA, 598 bp, Heterodera glycines
ttcggggttcgaaatggatatcagattcggattctacgacaccgataacctatagaaacaactttttataaatttcaaataaatttaacaaacaaatttttttgttgacacaaaacccacaaggcgtgccgaaaaaagtgctgtatttattacattaaagaatttctgtaaaattattgaaggaaataaagattaaaaatttcttcaatatgtaagcaatatgtataaaaacccaaaatgtgtacgaaaatatgtaaataaaattttttttattaaaaaagattccccaataaatttttcaaaaatcttactgtgagaaaattctttataattaactaatttttctagccattactcagaattttttaaatttttttcaaaatgcgtttttcgtgcttatctgagtgcattgtgcgcaaaaattttaggcatttgcctaaaaacacagccctaagtattacatatagattttcagcaaaatacgtacagtaacccaagccttaatggcgtcctaatcaccgcacttattatttccacattttttttgaataatataaaattgttaaaaaaaagagaaaaaggtacacagtaaaaaatg

SEQ ID NO: 109882 - DNA, 100 bp, Heterodera glycines
aaagccatgacggaaaaacgaaacaaatcgcactaaaagtaccgattgctttttttaaattggcaaatactcccaaaaggaaccctttctcgccgaaatg

SEQ ID NO: 109883 - DNA, 63 bp, Heterodera glycines
ttccaaccctccttcgccaaactattattgccgattgcttccattcagattgaaccgctgatg

SEQ ID NO: 109884 - DNA, 915 bp, Heterodera glycines
tttttagcaatttttgtctctatttgtacatgctaatcatgttaattgggtgctgtttattaatatgttggacaattgcaattagcagacccaagtcccctgagtttatattagcatggatttcatcgaaaaaatttttcttctaccctttcttatgaggaggtaaaaattataactcaattggatattggtagaatgagaagcagtaaaaaaaatctgaacttaagtcatcgcaaaagggggcaataacattttttaaacaatatttttttttttactatttttcacatttaattacttgtcctacacaatactgacaaatgaatgtaataattggtttagctaattatcattttccaattaattagccaaattaaattcaattttatattctgagaataattttgacatgagcacatatttagtgatgaatttgtttcgttcatttaccatttcgcaggttttcttctgccttcccaatacgtcgattttattttggccaaattggcacacaaatcgggcactttttgggccgaatatttcgaggcgcgtattgcgagcgtttttctgttggaacaaatcaacaaaaaggagagatttttggatcgaattggaccagcgaaaatacgaaacgaattgaagagaaaaatcgttgaggcgaagacgcaattttatggccaactcaaagaacaaatgtcgccaatttggcgcaaaaatttgtgcattttggtcgaacttgaaatattttttacgaaaatatttgaaaagagaaatgaatttacaatggacaaaatcagaaaatgggagccaggaaagcatttagaaataatgaaaaaaaaattagaaaaacggagaaatttattaattaattatttaaatattaatttatatttacttttttagactgcaaaaatg

SEQ ID NO: 109885 - DNA, 315 bp, Heterodera glycines
  unsure (1)..(315): unsure at all n locations
taaaatgagccattatgaattacaagcgtatatctggtnccacatgnagtgtgtgggcgagattaagtaattttctgaaagagctcaaatgcagctttcgaatggtgtattcaattaattgtttacttgaaaattcacagagatatgtccaactgaatcttgaaatgaataatggcgtagtattctataaaaaaaatttttcttaggaattttacagtgcccagggatttgaattatccataaacacatcatagggtaaatatctagaaaaaacaaatttttttttacacaaaatcctagtccagcagacagatg

SEQ ID NO: 109886 - DNA, 53 bp, Heterodera glycines
acttacagcaatcaacatttaaatgccattaaagggagaagcaggaaagcatg

SEQ ID NO: 109887 - DNA, 59 bp, Heterodera glycines
atgaatttattcgtgaacggcaaaaagacgacggaccatgaatatggacggaaggaatg

SEQ ID NO: 109888 - DNA, 414 bp, Heterodera glycines
  unsure (1)..(414): unsure at all n locations
ttaaaattaataaactgtattaanttgagacaaaacataagatatgtaaaagaacggaagtgcaaaaaaatctcgcagtttttataaattaatttcgagaaaaactattcgacgaaaattatcagcaattttcattaaaattcctagattttttgcccggcggcgcctaacccacaaccctaattttttttaatgaaaaaccattcacaaaatgtgttgttcaaagaaaaaaacaaaagatttttacatattaattgacgcctttcgcaaagttttcgtttgttcacagccgccccctctctttttttctcattatgctgctaattgaactaatcaaaactttatattttttcacatccaaaaagccgagtcgtagaattacataattttttttttgtagtaacccctagaatg

SEQ ID NO: 109889 - DNA, 460 bp, Heterodera glycines
ttttcaactttttctttctttctttccccccacttttttgcccccccccttcattttttgttgtttctgctgatgaattacatatgaagcaaaaaactgtgataataaggccaaaaagggatcggttggcccgccaaagggcgccggcgcataaaaaatcggcacaccgattttccattgccgggccatcctccgcagagctttcggtgggtgtctctgattttaaagcgccaattggtcgcgcaatttgttcgtctaaacggacacgaaaaaatcggattatattaattctttatttaattttattactttaattaatgcttgtgttgataaaagaaaggttcgagtcggtgttctttatataattatgaggagttaattatgacaattaaaccaaattagaggtcagcgggggcggtactcccacgggacccgcaggtttttttactgggcaaaaatg

SEQ ID NO: 109890 - DNA, 777 bp, Heterodera glycines
tttctgtgatcaatttgtgataattcgttcaccatttcaaaatttttgtttaattacccaagtttgaggtcatttcccggaataaattttttattaattccgtgtctcgtccctgcctgcccctgaaccccgcaccgtggaattcatttggcccgaccccagagcaagtcgggacaaattggcgctcctgggtggatttgctgtgaaccacggactgaaatcgacggatcccggtgacaaagggggaagggaaaagcaaattagagagcctagacaagaccctctgaggcttgtctagtgttcatagtttcgtgtagttattgtcctccgaggcataacttcacgagggacgtagcggacttagtgtttaccctctgaggaagcacttcgtccgaacagagggttggaaggtgttgtgtagtggacgaagtacttgccctccgaggaagtacttcgtacaaaagggtgttcaagcgcgcacaaggccattgacaaataaggaaaaaaggcaaactaacagtcctccgaggctttagtttagccataaggcaaaaggcaaactaacagtcctccgaggctttagtttagccataaggcaaaaggcaaactaacagtcctccgaggctttagtttagccataaggcaaaaggcaaacaccttgtcctccgaggcaggtgtttagtcacagaaggtccaggaccaaggccagactgatctcggaaaaagacacaaaacaacaagcacacacacacacacgcacaatcaaacagcacaatg

SEQ ID NO: 109891 - DNA, 151 bp, Heterodera glycines
accttttaaccttaaggaaaaacttcctgaatattgttgtaatgacgtacaaatactcacccacgccctcgtcgaattacgccgggaattcaagcaactcaccaaacgggacggaaaacacgggggaatcgacattctttggcaagccatg

SEQ ID NO: 109892 - DNA, 400 bp, Heterodera glycines
ttgttaatcagcggtcggttcggcggcttaattacccccttcccctcactcactcccgcccctttctgatcagtagggaaagcgcgcagcaatttttaacttaatttttaatcaatttttgaatttttttttgaattttatgaatgtttcattgcatttttgacatcaaaatttgctttggaaacattgatttgaataatctgcacaaatccaatccattcagcggcagcgcgtcacattttgtttaatccgctattttttgcaagcttaaaatctgctccgatcatccgatttagtttttttgacctcctttaaaatgatttgactttgtttttttttaattttgactattttttgtttaggtaattaaaatcaaagtttatttcgaattgccaaaatg

SEQ ID NO: 109893 - DNA, 685 bp, Heterodera glycines
tagaaaaaataaatttattatctaaacaataaacgttcatttaaaaagcgtttttatcttactaattaatggtttctcgtagtaatttgtgttttggtctttcttgaccatggaatgctattgtcatttgaagccccgagggggcaaatgacgtcgaggtcattcgtattgtggttttaattaatattaattagtttataattaacattaactcattgctccactatacgaaaatgctgccgaaaaattaactaataataatcacctaaattaacaagttaaaactttcgactcggaaatgttacagcaatagtttttttttatttaactaaggacttaccacacaatttatatttttacaattatcaagcctaaacttgatacatagatcaggttatagtcaagataacaagccaataataaatagagtaaattgattgtttattaagaaaattaaaatatttgtgtacaattttttatattaattttattaagataatccgttttctaaaaaacattatcaagatgacggttttcactttatctgttgcttttttgtttttatatgcgcatcaattagtttcttcacatggaatgatcgctgaaaaagcgcatatgaaaatggtggaatagaattttcaaataattaaaaaccttaaaaattttagaaagaaaattttgtatg

SEQ ID NO: 109894 - DNA, 109 bp, Heterodera glycines
ctttgcgcagtacaaagacagcggcccaattcgtttgaaggactgctaccatggaggacgtgtgggtccacaacgactacactacgaggtgccggaggggtggcggatg

SEQ ID NO: 109895 - DNA, 452 bp, Heterodera glycines
aagtacggaaaaagaagcaattgggaaaagtaaccggcaagagtacggtggcaaacaacggtagtactgtaatgccaagtcaattagtgggcttaatgatggggctttggacacattttttgcaaagagttcgcaaatcagaccaagacaaagctactcaaactaatccagaggtaattctaatgagtgaggatgtgtggggacgggggggggggaaggattttcatccccgttccccgtttttcctatcccaggaaacggggatccccgcacctcattcctaccgtggacgggcatgaaacatactaaaaatgggctcaacaacaataatgaagaaactttttgacgaaatttaagcaaataaaaaaatgggaggaaaatttgtttcaaaatttttcctccggccttatcggcatcccagaaccactaattcctttcgatattcaaaaatg

SEQ ID NO: 109896 - DNA, 239 bp, Heterodera glycines
aattaaatttaaaacagtggcataatccattagcatttgggacctcctctcttttagggtgtaatgctctttctcatttaatcaggctaaaaacaaaaagaacatctgatcagctgccagagaagtgtccccaatgccgtaaaccaatcaaaaccaaacaaaacaaaccttttgaagctgaatttgccgcggatagtcagcccaaggaacgttcgctgttcagtgccgaacttagaatg

SEQ ID NO: 109897 - DNA, 120 bp, Heterodera glycines
taaaaaaatgtcccacaatacaaattttattattttgacctgcgtggtttgggtgaacccatccgccttttgcttcactatgttggccaaccgtttgaggacatccgctttaaagacatg

SEQ ID NO: 109898 - DNA, 103 bp, Heterodera glycines
gctgaacggattggtggagaatatgggacggatggagtcgcagtggggggacaaaatcacacaaataatggccaaagtgagcgaattgcggcactttgaaatg

SEQ ID NO: 109899 - DNA, 255 bp, Heterodera glycines
tgggtcttcaatgggcgtgttcttaacaatacttggctagcagatgaaactcaattagctttaactgacgcaccagggaaatcgacagtgcgtagctgtaatagtactctgaaattaacagaacaaaacttagcctattttattgtaaagaatggtcgtcagaccaaaagaaaaagagcattggatagtcttgttactaattctcaattcgcatcacaattgacttatttggacactgaagtgtctgaaactatg

SEQ ID NO: 109900 - DNA, 371 bp, Heterodera glycines
ccgccgggggaaaaattgagcattttgaccatatttttagcagattttcattaaaaaattctttattttgtggttttttggaaaatttaacaaaaaaccacaaaaagcctcaaaatttctgaaaaaaccacaaaaagcctcaaagcctcattgtgtgtgagagagagtgagaggagagaggaaaaaaatatagaagcgatataataaatttaataattttttttattaaacaatttatgtaaaaaaaaagtccaacattgaccccttgaaaacagcaaaatgatgataaatcagcagaattggcaactctgatttaatatacatatctatttcagttagaccttcaaaacattcaaagcaacactaaaatg

SEQ ID NO: 109901 - DNA, 1003 bp, Heterodera glycines
tttttaagaagggtttctcccctaatccgggggcagaaattttcgatggcgcataaaattatttatggccgaacagacctgaatcttttctccattccatttttaaaccatcaacacgttttcacattccctttttagatttaacactaaatataaaatgggcaataaattcattccatttgctgggagggcaacaaaattatggaataaactggagaaagaacgaattaaataaattaattaaatcgtttaaaataaaatcatttattaggataataaaacctgaaaacctagaaaatttcataggttatttggtattttttatgctgtagatctcagttggactttgactaatttaaattcattttgcccttatggatgacttgttttttaaatttttggaataaacgataaaaggtttcttgaatttcaaagtttaatattaaatttgttaaacaggagggaaatgatgtgaaaggggtggggttgtgaaattttgttttcgtttcaccattcattgtttgaaattagactttttatgccgtttgaatgatttttaatttttttttacctgggctataattgtcaaatttttttgaattcgggcgccctgctgtttttgaggtatgatttaatattgctatttaattttatttagtttttcgtctataaaattttctacgaaaatcaatgccacatgaatagacaagaaaatcattaaaagctaatattatttcctttcactctccgctcttcatttattcaagacaacattttatttattcaaataaagatgatttgcggatttccgccttttttagcaattttttttggttggcagttttagaaagaagccaaatgaatgctttatgaaataatataaattagcaattaaaatgcaaaattatcgtcattaattgtattttagttaatttattctttttgtaaaaattttttttaaatgccgagaaaattcaattcgctttcagttttattaataatg

SEQ ID NO: 109902 - DNA, 686 bp, Heterodera glycines
  unsure (1)..(686): unsure at all n locations
ataattaattaaaattaaactaattcattttatccatcataatccccccctcagatcggagctgtcccccctgcgtgtgccattgcggcatcagtgtttgcggcaacggatttgagccggtccgagtcacacacaaaattatgggcccaaaatgcgcgtgtaattgttcttgtcgatacgaatgtgtataataaataaattaatacaatggaacgaattttcaatgataagctcaaaatggtcttaagttttttatggcattggcaatttttgcagggaaaagccaccatttcgcaacattctcaaaagcgttaattgacaactgaataatngaataatacaatgattaaaataataataattgcattaatttctcttattaatttgttatattaatggtaaataatgaattatttttctttgataataaactccatattttgtgtaaatgcaaaagttttccaaaattaatcctcctttttataccagcgaattttaattaatttttgttccatgactgagtaataagtaaaatgcctacatttttgaagggccgtaaaaattcacatatgtgaaaagaatcagctatttccagtaccaattttattttatttgaagacataaaatgaaacatttctcttctaaatagaaaaaaaattccatttttctgtaattaatgactaatg

SEQ ID NO: 109903 - DNA, 161 bp, Heterodera glycines
taaatttggaaaaattgcatttaatttcggtttctaattgttaggaatttcttcgtgccctcaccacttcttcggcgagctatataattcgacttgtactatttgatgaatcaacggaaattgggccatttgaattggtgaatgaacggaccaacgaaatg

SEQ ID NO: 109904 - DNA, 539 bp, Heterodera glycines
ttttggccccggttgctttttgctcccacagcactttgagctcccacagctattttcgatcagtcattacagtaacattcgttgctgattatgaaaatgcgtcagaaaatagcattagagggaaagtcgtagcgcaattccctctatgttgatcaagacaataatttgcgtcacatttttgctggaatttatacagaaagcagcagcagaaaatccacatcgaaaggataacactcaaattcgtgatctgcgacctcaaaacccttataaattcatttttcgcctttttaaaatctaaaaatcttttcgaaaaaggggctaccaccggtggtactcctactcctacccagaaataatttttgagaaatttaaaccaattaggtaatactttaataagataattttattgaaattagccaatattttttaaaattatatctcagtgacgaaatgaacgtgacggatcagtgacgaaatgataggtaaccattaaaacattaattaataacaaagataaattattcatttaagtgattatg

SEQ ID NO: 109905 - DNA, 312 bp, Heterodera glycines
ttgaagctataatcaatcctcaagaaattaattaaaaattgagcaaattttcaaaaaattattgatcaaatgctttctctttaaattgttcgtttaatgggtttcgctgataaactgaacaaattttgcaaaatttgctgcagcaagattttttagggtttctttgataatgtgaattctttaaattgttcttaatgggttttggcgataaagtgatcaatttttctaattttgtgctttcatgtgattgtgcattggcttgacaattataaaagggttaatttttcttaaaaattatatttttataaaatg

SEQ ID NO: 109906 - DNA, 745 bp, Heterodera glycines
ttttgatatttgcaaatttaaaataaatatataaatattttttttaatttagaaaatgatgcaagcaagacttagcgatgctcgagattcactctcagtctcgagtcacggatttctcagtttcggtctcgattttcgatacccaagacttttttacaccccaaccaatttgtgaattgtattaaatctttttgggtttaactactcctttttcattttttttaattaaataattcgaaatttttcgtttggcgtttcaaacatgaaatctagagcccggacgggaccgggatcccgccgggattttgccggactcccggtcccggcttttttggacaaaccaccgggaccgggagtcccggaaaaacgggagtcccgggatcccgtctcggtccattttccaagtcccggtcccggccattagggccgaaaaaacgggactaaattatacacccctaagaatggtatattcgtggattaaaaggcaaaaatttatacaattttattttttaaacattttgacaaacttttatgtaataaaaaggaaattttgtttttttaaataatattttgtggattggtggttagtgcttcaaaactagctgtattttttgttatgagttcgatacccgttgaagttttcttttaaatttatttttttttctgataatagacaaaaataccagggatggactttcgcgtttcgctttctcatttttttttttagccgtagttttattacatg

SEQ ID NO: 109907 - DNA, 177 bp, Heterodera glycines
ttttttttttttgttgggtgccatttttcccgttcttttttgtgtgtgtaccagggatggcacggaattccgagttccgacatttttggggtcggaattccgacttccgaaaaaatttatgggcctcggaattccatccctggtgtgtaccatgtcgaaattttcaggcacggaatg

SEQ ID NO: 109908 - DNA, 234 bp, Heterodera glycines
tcaagtgacgactttttttgcctctaaaaacgctttttttgcggcgcgtttcttcaaaaaattttgcgagatggacaggtgcgtccagtggcgtcgataggctccgccgggaaaatttttgtaatttttaatgcgatttgttaacagatttttgtccaaaaatgaccaaattttgtgtaaacttatatttcttgataaaatagtgacattctgccataaaatttcaaaattatg

SEQ ID NO: 109909 - DNA, 843 bp, Heterodera glycines
  unsure (1)..(843): unsure at all n locations
gttctgtccaattcattgaacagctcgaaatttctccattttttactgagttttattggctaaaaatggcaaaaagcatttggcattgccaaaacaaaattgttttttttccactcgtcttgcacaaacggtcgcttaatcggacaatgccccgcccctttggtcatccaaatgacagctgattttgtcattctcataattatttgtctttacatagcacacattttaaggtcctaaatacgtctatggcatttgaatgctcaaatcatttctttgcccccccgttggccattttcagttccttggcccaaataagcggacattccgtatccccagaggattataaacgagtcttccgttaagtttgtgaaacggaagaacacattaggccatcatctttgccatttgtctctctttcgccaaagatcgatggcaccgataaaatttggtgcgagtgaaaagcaaacggccgaaaatggagagaatttttgtgacatttattgggtaatgactggattaaaaaaggctttgtccgatgcggtttcgttctgctccgactgttttgcccactgaattcccctcaaaatgccccccccccaaaaatttgcattgattcgcttttcccgcccatgccaatatttttccggtgcatttcccctgcttaaagaaagggactttgttgtatgctaaaggcacaacgaccccgaaatgccaaatgaatgaatgaatgactatgtaaatcccccccccccgtgggtcaacataaaatgaagaaaatcctttgcaatttcagcgggaaatgcccttgaattagttggccgcttcccttgcnncagggcaatg

SEQ ID NO: 109910 - DNA, 181 bp, Heterodera glycines
atgctaagacggatccctttttggccccctttacgggcgaatgggaaagattagattccttttctcccaatttattgaatattaattaatgagtgtcaaagacttgcactttcctcgaggtcccactcgcgccaccgcgacgatgccaataacaacgaaaaacactccgcccacggcgatg

SEQ ID NO: 109911 - DNA, 239 bp, Heterodera glycines
ataaataaaagaaaaatttcgtattcaccaaaagagtttaagtcaaaattgctttcaataaaattcttttgtttcttttttctacgatttgtaataattttacgcttgcttcatttttaattaatttttcttcgtataaaagatgacaaaaaattcattattggaaattaatattaaataccaatgaaaataaaatttttatataactttaataaaaaaaacttttaaaaggcaaaatg

SEQ ID NO: 109912 - DNA, 889 bp, Heterodera glycines
ggggtttttcaatttttccctagttccaaatagtcaaaaaattttttattattttttcggaaataatatctattaatttccataataatattaggtactgtttttctattgttctagttcgttcgtatcagaaattttgtattagaattaattatttcttcttgaaatcttaacaactttttattaccttttagttttccaaaacatcttttttcacgtcgctcttttataaagacttaaggagaaagggtacggcgtccggcggttccgatagtcgccgccgggaaaatttgaaaatttggttagatctgttaacagattttgtccaaaatatgctaaatttttgcgattttgagccaatttttttaataaggtttatgactttttgggccctgtgatgccgataggcagcgctaaattttggaattaagctctatttctaagatttttcatcaaaaaaatttatgaatttcggtaaatttttgtttttcttcgatatgtattttgtcaaaatatgccaagattggtcgatttctatgtgtatttaatttaaaaaaaaacaatttgtcacaaagaaaataattaaagaagaaaacatcaaacggtatcgaactcacgacagaaagtaatgtcaatggcactaacctctacaccacattccaaatgtccgaaattgagcaaatcttctttatttaataaaaatttggcaaatggttaaaaaaaaattcaaatttcgtctaacttttttgcattttctcccacgaaaatgccattcttaggggtgtatatttaaccccgaccccgatcgggagggtcggggttcggggttgtcggggtatgaagcgtcggggttcggggtcggggttttccccgaaaatggccaaaaatg

SEQ ID NO: 109913 - DNA, 675 bp, Heterodera glycines
acttgaaaaaaaaatcatttttattaaaaatgaataaaataataattttttttgagataaattagtctgatatatgcgaaacacacactgagttttattgatttttaaaagaataatatacaatataataattattattaatttattacaatatgaacaaaaaaaattattattttaattaattttttacagttttgtatgggaaaaacaaactaatttgattttaaaaagtcatttatttaatattttttcaatgaattgcaatttttgtttcattagtatttttgctaagaatttttttgtgatttttccttattggtagcacctcaaagattttcctccccaaaaatctaaaaaattgcgccaaaattgcaaaatttggccatttttagaaatttaataaatcagaacaaattttcaaaattttccccgtcggaactctcgttttgccacaaaaaaattttttttttaaaacactattcattttacataaactattctgcatatttactattgattatattgttgtaatttccgcctacgtgtttaatctacaaaaaataatttataaaaaatatttatttacataattttatatcgtaagaaataaaattgcaaaaaaaaaaaaaaatgaaaaaactaatttttattatatctttattaaatataaatatg

SEQ ID NO: 109914 - DNA, 238 bp, Heterodera glycines
ttgtaattggttatactttaaaagatggaagtggtcgtgaatgtatgaatataaatttaaatttaaaaataataaataaaatgataattaaaatattaattaataatttaattataaatgtggaggtaaaacagaaaattaattgttgattggtgattaaaaatgagagtttaggaattaatctcatgatcaagcagtgaaaatggtgaaaaatcattgctaagaatgctctaaaatg

SEQ ID NO: 109915 - DNA, 891 bp, Heterodera glycines
aaattccaaataaaatttctgggtttttcattgatttgacattaacttaaaggcaaaaaacgccatcgaaatgtgtactgacggattgtgggatggaaaatcggatggattttataaatttagttaatttaaaaaatatatgaattttacattgttttattttctaatttttttaacgggcttcgttacaaatttcaaattgtgttttttttattataaccgaaccaaaaactttttattaaatgcgaaattgttaaaattgcccatatcatcaacaaaaaactttttgtacagcattttttaaacgaatcttttttgtaataattcatacgcaatttattcttgaccttgccctaacggttacaaaaacggatgagaatgataaatgagggcggatgaatgtttatgcaaatgtctcagtcttcattatcacaataataaatctcttcatcgaaaatcctcttgataagcaatgttccttttaccgaaatgtcacagacgtaaaaaaaccataataattccaccgtttcattctgctttttaaacaaataatcattttttccccttttttgacttttctgaattgacatttcgtcgtccttttgtgaatgcgtcaaatgccagctgaattgcacagtcatttctgtattcaaaaagcgacattttaaaatatcagtcaccaattatttggctaaaattaagcattaaaccaacgctttttgaaataaggtttttattctctgaaaattaaatgtttcgctttgttgtttgtgtgctccttctcccggaattcgttcatggtttttacgaccttgaacaaaaagaaagatttggtaaaaatgaaaaagctttttatttttgatttcccttatttcagtgattgacaaaatg

SEQ ID NO: 109916 - DNA, 1003 bp, Heterodera glycines
tcgacttgcagcttcacaataatctattaaattgccaataatttattatttcttgttcatcaaaagtgaaaaacaaataaaaaggaaattggacaaatttaattgtcttatccgcagatatcggaattgtatatggaatttagaattggataaaccaaatgtgaatgtcttaaaatttggatggcctaatggagtgcgataatttgtaattttaatttagcatgaagcttcttgagcacctttattagtgcaccttttttccctttcccactttctgcggttaattgccactttttgcacttttatgccttttccgacttttttcggcacttttttaaatcccttagaaaattttttataaaaaacgcaccccaataatcaatgctcaaactttgaagatcactcttttttattaaggaatttaattaaacccaatttgaaatttttatgatattccttaattatggatgatagggggccgacagtgccattgggcgccgccgaggaaaatttgaatagaatttgttgaaagatttgtctgaaatgatcaaatttcgcggttatatgtcatttttttaagaaaatgtcgacagaagaaaatttgacaatttttttaccctttttcttaaaaacccaaaattattttctgattttgaaacagctatttttaaatgtattttacaaatatacaaaatgaatatttgtattagcatttgatataatttgttttcctctcccattatccgcacttgaaaatcagcacggtgtgttggttgaccttgaaaagcgcgaatgactccaattcataggacacgcgtgagccgaaactgcgccccacgacacaatgccaagtgccggcgaagcgctgctccattgtgtctttgacgaagctggcaatgtcctgcagggcgggggggggggggcaatttggtaatccaattaatttacaataaatctttttaatgaatttaaaaaaaagaattttagcattttgttccgcatg

SEQ ID NO: 109917 - DNA, 1003 bp, Heterodera glycines
gatcaagagagtatctgatcattgattagagattggtatcactgatcagagacggataagattaataatatgaccaaaattgaaatattgatcactgattagagaaaaattcgatcgccaatgtgatcaagaggaaacattgatcactgatcagagattggttttcatctcagagactgaattttttgcgtaattaaaatgaaatgccttttggggccttcttttataaatgattgcttcagcagctctcctaatcattgcatttggacaaattttgcgcggtaaaaggccaaaaatgtgcgacatttcacattactaattaactaattaatgatcgctgatcgcccacccattcattccgaaaggactgttggtcaactttttcaatctttattcgtttaacctccttaagtgagactttgatacccctaaaaacaactaaacaactcacgccatcacacaacagcgccggggggaaaatgcaattaactaattaataaattaattaattttgtgttattttcggcgaaatttaggggaaatttttgtgtataaattgttctgcatcgacgatacacattcattcagtatagcataaattcgtcttatttttgcttcaccctactgatcagcgcatctgcaatggcacataacccaaattcaatgccttttttgatcaaattcgttcgacagttcgcaagattagcttacccaatcttggacgcttattttttataagactgaatttgtcaattaagccccagaccctgttatggcatgaaatgttgctcaatctcccaaatgcccgatttttgactctgataaatgtgcattaagccctatcaatcgagtatctctctgcttcgtcgcccaatttattttaaattttcaaatgttgcccaagtcaattgatcagggtcaggcaatgacaactgatcgttgaatgtactgcttgaacttgatcccccgttggttgtagaataatcgtattgttacaaaaatg

SEQ ID NO: 109918 - DNA, 778 bp, Heterodera glycines
tttaaaattctaaaccaaaaattttacattattttttgtatgtttttaggaaaatgtttacatatacatatttacaccaccacttttttctatttttatttaaaagtacaaatttgtttgtgttatttgtgtccaagtgtccaaatttgccaccatttatacacatttgtgtccagcggcaggcaccaaaagaggaggagtaaacaaatgtgttttgtgaatgaactcttaagtgatttgtcgacagctttaaactgctgctgattaattgaacccaaaatatcccataatcaatcacctcattaaaatttcaaaattatccagtgaactttttgttttcaagggctttttaatgggggaagggggggggcctcgctagaaaaaaaatcgcaaaggaataaatcaatgttttttttttcacatgacttttaaaatgggcactccggcagagccgagaatcgactaccgcgggaaagaattttaatattggcaaaaaatttttttcgaaaatttgccattttctccaaaaaaatttttatatgaagagctggggtacggatgaacttgctgctgctgctgggatggggaaagaggagcacttggaatagaaagatgaagcaatcgaacaatttaagctacccaccaccctcactcactcaatcagcacaagcaaacaaaggaataaaaaagaggcaatcaaacaaaaaaaaattccaaaaaatactctgctaatgaatgtctcgtaaatgtgctacttaccaacccaaattaattaatg

SEQ ID NO: 109919 - DNA, 1003 bp, Heterodera glycines
gttgccgatggcgccgtcggaaaaatttttttattttggttctggtttgttaatagattttcaccaaaaaggccaatttttgcaattaatagacaagcattgatttttttgcattaaaaacgtttttttccggcgtgctttttctaggaaattttgggggacggggggaggggtgtcccgggaaaatttttaatgcgatttgttaacaggtttttgtcaaaaaaattaccaaattttgcgcaagccttaatttttaatttatttcaagcgaaaatataaataattaattttttatttggttttttatttttaaaatccaaagttaaagcaaaattaattataatatatttaatcaatatttcaaaccaaatatatttcaattatttcaaacaaataatcattttcggactaaatgatcgaataatattagaattcagtttgcttttcttatcacttttgtgatttgttaacagattttcaacaaaaaggctggtttttgggattactaggctcaatttgtacgagttttctttaaaaaatgacaaaatatgagacaattaaaaattatgaagaatcatattttgtcgatagaaaacccatgattatacaaaaaaataaaaatattttaattactgtagaggaattgaaccatggggaagcagaagggaaagtcaaggagactagccagtaggcctttgcgcacaattggaagtgttacttttaaagaatattaattttaaattttttcctttcattccaattttcttcactaatttttcactcagacccccatgacgatccacattgggtacaaaattcactgctcgcgtaccgcaccacgccgaacgcaagtttaaatggtcgtacgcctgccgaattgttcttagggcggcccgttcgaactgttctatcgttaattaaaccaaattcccaaaaacaaaaacagggacccgtgttaaacgagcagaacagaaaatggcgaaacaattcaacaaacaccatg

SEQ ID NO: 109920 - DNA, 591 bp, Heterodera glycines
aaggaagggaaggaactgtgctgatactgctccgactccttcgcatttgaacacagtccatttggaacaaatacctatatattttatctcttcattttttatcacgtttatcgatatccggtgattagccaattatacatacatacaatatacatacatagacacaaataatgatcacacaacggttttgatggaatgtgacaaatgggcgaaaatcaacatttatataccaaattaagacgcttcttttccagaaaaagtttcacttttgccaggcaaccaaaaggggccgataaaggaaggcattttccaccagacagcagtctactagagatcatactcataattttgaaactttatggcataatgtcactttgtggcaaaatttggtcattttctggacaaaatttgttaacaaatcacattaaaaattacaatttggcaaaatgcgccgcaaaaaatgaaaaagctgtttttgagcccgattgcttttgatttttaagccctattggcaaaataagcattttaagtttctaagactcgacccttctaagctcctttgttgtcatctataggaggttatttactatg

SEQ ID NO: 109921 - DNA, 338 bp, Heterodera glycines
ttttttgagccaattttaaaccttttttaaaatttttttaaaaaaaaacgaattgaaaaataaattttacccctttaattgggcaaacgaatccccccttttcccataaatagaagaaaaaataaaaattttaatgcaaaatttaacacaaaattgcatgtggtcaaattacccgatagaataggaacattatagttcatggtcgtttgacggaggttggtagtctaaacggcactgaaggtcattttcttatagtacgggtttaccatcaactttgtggtcatttgaccaggtcaaacgcggtcatttaaccattttcttatagtacgggccgaatg

SEQ ID NO: 109922 - DNA, 1003 bp, Heterodera glycines
  unsure (1)..(1003): unsure at all n locations
catttaagccccattttccggaatttcttccttttgacggcccaaacactgttaattcagtgcctgtcgtcatggaaacttgtcaaaaagttttcgacacgtatttttggtaaaattcaaatgaattttttacggattttacgaattcgcgacagataaaagacagtaaaacacggcgaattacttactgtagacgactttctgtaccaattggtgtaaacaatgggcggctttttaattgtgtaaataaaggtgattaggaaggagaggcaaatgcacagaaattaaaacatttattaaaatttccgccatttttgtccaaaaaaggaattggacaaaacgtcaaaattaaaattccccgccaatttaataatttcggctctaagttcatttctctctctctctgttcgtccttttccacanaactttttgccctccccccccccccatcgatgaattcgaattcaaaggcttcttctcccctcggcactgccattgctttggccaccgccggtgccgtggtgaccattcaaagcgcaatcattgccattctctacaggaaatgtgccaaactgacgcaaattattcacaatttacagaccgaaaattcgaacacttcgcattcgttgaggtaaataattttatattttattccctgaggcaaaaaaaagaaaaagaaaatggctgaaaatttgttttgagtaaaaacggaaattacatttcaattctcaaaattcccttttccaacaaaaaattctttgaaaatagcgtggcaaaagaataaagaataattagggctgccgaagagcaaaaaaaagaaaagaaaaagaaataaagaaaccaccgcctgccaaaaagcatttgccattcccaatttcttatagtcttataattctgacactgactgatctttccaaaaaggaacgaattggtccttttgcgccgcactgtccttttgttggagaggcgaattgcccaaagtgaggccaatcgtaccgaaatg

SEQ ID NO: 109923 - DNA, 1003 bp, Heterodera glycines
tgcaattaatgcaattcttggggctcacataattgtttccttccattaactggttcgtacaaacacgaattgtgataagtgtgagaactttctttcatcttggtaactgctgttgttgttattgttgttggtgtttgcctttgtgtgcacgcgtctgccgctgcttttggcacagcgtggcgttgtgctgctgctcgacttcactgcgtttgtgctgtctgtgtgtgtgcggcgtagtctttctcaaatgaactctcccgacttcctttcgcccttttcccacttttttgtgcctctgtttttctcacacataacacaacgacgcttaaacaaatgtggcgccacatgggaagacccaatctcatcattttcataagagtgcgttgtgttggcacacacatttttcgagaaatgaacaaaggtccccattaaacgggggggggggagagaaaattgcccgaggagtaattagcgcccatttatgtgtaatcgctgggctgatatccttcgcgtatggaattttttgacggcatggaaaaattaacgccttttatgcaaattacttataaccaaatacaatggggggaataatcaacggcgaaaaacaatatgtttaagacgctcaaacaaaaaatttctcacaaaacaaatttaagaactgacgacgatggaaacagggcaaaacagtgaaaatgctgcgacagttgaaaccgccgggaatgatgtggagatgtcaaccgaaggttttgcaattttttttttcttcaatttctcacccgttgattttcaaaaagaaaaaaacataaaaacttgccttggtttgatgtttatcaatcttattaggagccattcaaagtttctgtaattcaatcgcattagatgaaaacttttttcatcatattttcctaaacaaattttgaattgacaaaaaattctttgacccattcaccatttgttcaatgtttttcattccttgcaattagacactgctgttgctgaaatg

SEQ ID NO: 109924 - DNA, 111 bp, Heterodera glycines
caactcgacaaatgcaaatttttgcagcccgaacttttgttccttgggcatattgtgtcagcaaacggaattcgtcctgacccgtcgcgttcagacgcaattcggaaaatg

SEQ ID NO: 109925 - DNA, 760 bp, Heterodera glycines
aaataaagagacaattaaaattaataataatttcaaatagaataaattacttcggctcccggaaaatgcgccagtggaaattttattggcataaaaacaactcctttggattttcgaggtcattgatcacgaatccggtaccgatttgtgccaattccggaccccggactcgaattcgaacaaaaattcgaatgtccaaattttcgaatttagcatttattgttcaaaaacggcataaatgatctcttattgaaggattaatggctttcagtttgtttccgtgtatttgaaccttttccaaaatttggactttcgattttttgttcgaattcgtgtccggggttcggaattcagaatggtgttcttacagaattaatttaatattacaataaacagaattttgttttaaaatgtttgtatcgctgacgcattttccggtcactattaattctattcaaaaaataaaacatgaaatattaaaaaagaattaatttaaaaaatataagttttatttgtgtgcattcattaacagactttttggaacggaattcctcacaaatggaaaaaagaggggcgaaatttaattcgctgctataatttattcccaaaacgaatgaatgataatatttcgtatacattatttgctcaattaagtggaaattgagatgaattcaattgcaattttgaaagctttttcccctccacagaaaacgtttgagaaaacaaaattttgtaatttttagcctatgttttttcaatg

SEQ ID NO: 109926 - DNA, 423 bp, Heterodera glycines
  unsure (1)..(423): unsure at all n locations
tttgttcatattttggcaagccctnaatgataataaggggaaaaattgtgangggaaattttcattatttttcattgagaattttgtgagttctagcgaaatctcgactcaatacctaaatcccagttccgggctctaaatttcaggcataaatcgacaaaaaagaatccctaaaagcccatatgctttgaatgcgtcaatagaaaatgcgtcagtgagacagtaaatttctaaaaaatacttcgacaaaaaagctaagaattttaaaaacgaaaaaaagcttaaattccttaaatccggaaggtttactacattcttagattttgaaaaattctggtttttttaatcaggtcggagccaccgtctgcgggccttttcctcactattaaaggcagaataaaataatatgtaaaattaaaaatg

SEQ ID NO: 109927 - DNA, 506 bp, Heterodera glycines
gttttcaaaaaaaagcctttaagacgattttttttaaattttttcataaaactgttgaaaattttatttttgtggtgacgttatgtcccacgatgtttcagttgcgacgttttgaagtgtaccgaaatagtggtggcacgtgtcgcccccccccgccctcccgaaatattttttaaaaagtgccaccaacctgaacagcaactgtccggcccgatacagtgccaactgatctgggctcagactgtcccgaaccgagaacagcgcatgttgaggggctggtacggcggtaaactgtgtgacgttgaaattttatgggtattggataaattggccagtttaagtcgctctccaaaaaaaaacccggcgtaagtttttcaagagtacgtggagaaactaacgccctatggtaagcaggaaagatttcagagggtcgaaagctgagagtgtttttgtgcttttcgcgaccagaattgttttgttaatttttctaaattataggtgcaatg

SEQ ID NO: 109928 - DNA, 283 bp, Heterodera glycines
tcaccagcatgaatggcaaccgcgttttcgtagcggaaataggcaatttagaggaggtaaaaaaacaatttttattaaacttttattgtaaaatgtaatacgatttattttctttttttttctggtcacgtgcgcgcattacaacgcccattttttcgtgtacaccaacgaaccggagcgggttttagcgaaatggggcaaaatggtaaaaaaacttttttacggattttttaaaattatttaattgtatgcgaattttttagtttttgcagcagctgacatg

SEQ ID NO: 109929 - DNA, 1003 bp, Heterodera glycines
actgatcggacaattggtcgaatcaaaactaattatgatcgggacacgcggtccattccaaaatgggaccatatgatttgattgaatatttgcagcttgagacaaaaagcggggcccgccccgccggtgtttcccccgtccgattaccgtaccgaataaacccccgctgcccatcgccccatttttggggtacggcgcgattatttccccggcgggggacaaaggccccccccactttccccacaattttcgcataaattgctccgcactcggctggaaaaaatggaagagaaactgaaggacaacaataaaaacgaggggaaaaagcgaaatttatgggcaaaaccaaaaacccctcgggcgatggacggacggacgaaagcatccatcggtcagccgttttttgaatcgaatcgcccgaggggaaaagttgtggcggacggacggacggattgatggcggtgggaaatgaacacggattttgaaagggaaaagtgaacggaaaaaatttgggaatggagaatttgagttattgcaattaatttaaagcaattaaaataaaataaattaattaccaattatggtcagtcgctaaaagtccttttaatgtgtaattaattaattttatttaattcataaaaaatataatttaaaatcataagaaaaatattttgattgttcaaatattttattttttgactattcatcgctaggctccaattttagttgctaaaaactgccaaaatagttagttttttaggttttaaaaaacccaaaaaataaaaaaataggtttaaaaaccaaaaattggagcccattcatctctagacatttaacattatataataagagttttatgagtttagccaacaataaaaaaatgaatttaatcgccgcccattaccatcttaattaataactgactcattctcagtctcctcttgctgctttgctctgattagccttatttggcccattttcagaacacttccagcaacagatg

SEQ ID NO: 109930 - DNA, 1003 bp, Heterodera glycines
ctgcgcaggatcctgcagattttaaatgcaggatttgcaggattaatccggccgggtccggtcctgcaaaaatttttgaattctaatcctgcaacaggatccgcaaatttgaaatttccgggctctagttcagataaacgggtaatacaaaaaataatattaaaatacaaaaattatttttaggcatttaaatattttgagggaaaaacttttaatttttttaaatatgatgaaatatgtgaagtaactgtttaaaaatattcagacacaataatttcttgaaaagaaaacacttaaatacagactaatatatgtatttccttgttgtttttgttgttttggaaatatttgttttcttataaaatcacatgaaaatatgtgcgcaggaaattaataagtctttcactcaataaaaatgtttatcaataccggaaatatgtaaaaaacatatacatattttaaaagcctacaatggaaaagccggaaataaaaatctacttctttttaaattcatatatttaagccttttgaaaattgtgttagtgcctcatttattcatttaaggagctaagaacgttggtaaatttgaacatcgggatttccaatagctaataaggattgcaaaatgggcataaataggcagaaataactttaataacttaaaacaggcacaaaaatatggaaataaatttttcttattatttttatgtatcaaaacagcacacacaaaacttaattttatatctaactatttaataaagataaatcattcaaaactgtttaccaaacgagataacctagagttgccgattacatcaaaatgcatttatagaaaaacgataatcaacattttagtgaaaaggaaacctttacaaaatatatgtataatgtttcataaagtttaaaaatgtatatttagaacaaaaattcatagtcctcttcatgtcagcgaacaatcttcttatcttatcattagacaaaattcaagttctgctggatgatg

SEQ ID NO: 109931 - DNA, 388 bp, Heterodera glycines
  unsure (1)..(388): unsure at all n locations
ctttcatattgtacgattgaacncaatttgttatcttccatatccctaagtgttctctctttccctccccctccctctttctctctcttcctctctctccctctccccctctctctctctctatcgctttttgttcagtttttccccgttactaaggacgacgaccaattgggtgaagaaatgggggggaggggggaagggaatctttagactaatggaagcagcggcaaagggacacaaaaagataaccgatggattaaaccaaatgatcgacattaattaaaaaagggatttaattaataaagggaagaaaagcaaagaaaaatcaacgcagctgtctatatcggtcgctaaactttatgccaaaacattcagaaattcgacgatg

SEQ ID NO: 109932 - DNA, 742 bp, Heterodera glycines
aatttttaaatgttttcaattataaaaagttgacgaattaaaagtcattaggcatttttcatttaatttgtttttgcaaaaattaatcaattcgaatcaaagaaagtgccatttctgtcaccttaacaattgtttttgtgccgttctcaattcttttctgattggcattgggcaggccaaacgcattggtccgtctgcgaattgcgcagcattcccggcacacaatcgcacgagcaaaagcagtgcatttgcgtgcaaatttcgggcattgggttgtcgcaggtcggctcgcacccggcgcaacgcaattggccaatttgttcggaagaagagcactgattgaaaatatgagggaatattataataatattgtttattattagtttataaaaaagattggatttagtaggtgaaatgccgcaaaaaatgacaatttttttaaatagattacacataaataaacaaggatattttaaattcaatgattcttaatttatggtcataatattttaagatagcaaaatcattcggaacaattttcatggagcttatttgttttttatgaaacttggtaagccttttttgcttaaacataaaatgctcattaataacaccaattacacttttttctttgcttttttatttattttagttatttaaattgttattaagttttaaaaatcgggccattacattgcatgctccgttttgagcagctaagggcagagcactgaataaaatg

SEQ ID NO: 109933 - DNA, 133 bp, Heterodera glycines
gcaaaaatattaattttaaatttaatttgattaataaaattcaaaaattaccatttaccccaaattaaccagctttttcgctctagaaagctcgataaatttaccgttttacaggtcatcttttggaaaaatg

SEQ ID NO: 109934 - DNA, 822 bp, Heterodera glycines
ccttttgctgcgttacgcccgcctgttcaagacggcgtcagtgcttgtggccaccagtcaacttgtccaagtgattgggattttgtttcttaaaaatcaataaatgccatattttttgaatttttggttgtgccattgctctcagaaatgccaatttcaaccccgcaagatttgcattccgaaattttgcaaacattattttcttgcgtttcggcaacttttcgattcataaagctcctctgatcactaattactcttgatcagttgggatagagcattttctcatattttaagtttgtaagtgccaaaaaaaattttttttgcttaaatccatagggaaaatagcaaaaattgttaagagttatatttttcttggaaaatgcttaattatacttaggaatttttcaattattcacattccttaattaaggaacaaatttttataaagaaaagagttcggctatttttcttatgcaatatttaaattacatggtttttttacaagaaaacattgaataatttttttaaaaataaattttaatagtttcaatgaaattcgaagccacaaattaaaattaaaatgttaatttaatctaaatagaaaaaaaaattgcatggcaattgtaaaattcaaaaaaaaagataatttggatggcagagaggagatttttatcagtaagcagcagttttattactggaaaacgaacgatgtttctgacttacattttatttcataattttaaaaacaaaataatttatttaaaaagaaaatttaaaaataaaatcattttttaattttcaagtttttagaaagtcaaaatg

SEQ ID NO: 109935 - DNA, 1003 bp, Heterodera glycines
cctgaaccgatgcgcccagatttatggggagaccgaatccttccggaatagcttcactatagcctgtactttaattctgcgttggatttttgctccccataattgtttgagtaccccaaacggacacttgaaaaaatcgatttatttttgttttcggggcagtccccccgaaccgatgcgcccagatttatggggagaccgaatccttcgggaatagcttccctatagcctgtactttaattctgcgttggatttttgctccccataattgtttgagtaccccaaacggacacttgaaaaaatcgatttttttgttttcggggcagtccccccgaaccgatgcgcccagatttatggggagaccgaatccttccggaatagcttccctatagcctgtactttaattctgcgttggatttttgctccccataattgtttgagtaccccaaacggacacttgaaaaaatcgatttttttttgttttcggggcagtccccccgaaccgatgcgcccaaatttatggggagaccgaatccttccggaatagcttccctatagcctgtactttaattctgcgggggatttttgctccccataattgtttgagtaccccaaacggacacttgaaaaaatcgattttttttgttttcggggcagcccccccgaaccgatgcgcccagatttatggggagaccgaatccttccggaatagcttccctataccctgtactttaattctgcgggggatttttgctccccataattgtttgagtaccccaaacggacacttgaaaaaatcgatttttttgtattcggggcagtccccccgaaccgatgcgcccagatttatggggagaccgaatccttccggaatagcttccctatagcctgtactttaattctgcgttggatttttgctccccataaatgtttgagtaccccaaacggacacttgaaaaaatcgatttttttgtttcataaatatttttttcagaaagtcatg

SEQ ID NO: 109936 - DNA, 190 bp, Heterodera glycines
attgtgagctctaataattttcttcgttctttttttagtaatttttctctcggctcttttatggaaaaatttaaaatataggctaaggctgtgccaaaaattgactgccaaagtttttatgaatttaataaaaaaaaatataaattttttgttccactaatttcactccccacttttttggcacagtatg

SEQ ID NO: 109937 - DNA, 69 bp, Heterodera glycines
gccgagaaggcatttttaagcagtttgtttaatttttacaaactttatgaaaaaaagctcttccaaatg

SEQ ID NO: 109938 - DNA, 220 bp, Heterodera glycines
acgtgttttgaataaattttgtaaaaatgaggcttttttgcctgccaaatgaggcttttgaaaattttgatctgggagccctgagtaataatataatttatttgcgttaataaattaaataataaaaatattccaacgataaaaagtttttgtaataaaaaggaatcttgaagtttttacaactatgtcttgacttctatcttttttagatgcaaaaatg

SEQ ID NO: 109939 - DNA, 68 bp, Heterodera glycines; identical to SEQ ID NO: 109495

SEQ ID NO: 109940 - DNA, 113 bp, Heterodera glycines
tttgactcagttttcaggcgtgtcgtaaaagcgaatgccgccgatgccatcatcagacaaaaaaccactggcacttggcattttctccgccaaaataatttatttaaaaaatg

SEQ ID NO: 109941 - DNA, 446 bp, Heterodera glycines
gaaatggcatttttgaaatgattagaattccattcccgagtgatctgaaagttttcggcgggattagttaacggacaattgtttgggattaatataatggattctctaaagtgattaaagaaagaatgtctttcgaatgattaaaattgattaagtctgatctaaaagatttgaatgatctgaatctaatttcagacaaactgttagaattttgagtgatttgtggaattaaaactttttttattagaatgggtttccgagtgatcggaagcctttttcataaatgatcaattatatagaacacttcttggggtaattaaacagaatttttggatttcggcaatcagaaacactttggttaattaattttttgtttttaattaggctattagcaaacatttaaatcattgccccctttcaaaggcgacgacgggcccgaaccgatg

SEQ ID NO: 109942 - DNA, 938 bp, Heterodera glycines
tttttcattttttacatttaattcggaaaatctgttgggcgaaaaaggaggaagaaatatgcggataatgatggggcgattttgaaattgatggggctaattagatcaattaatggccaatcactggaaaaagcatggacaaataaaacacgagaacagcagaaggaattgaaattgccaaactatgtttcttcttcttccttcgtccccctgcagatacagcggcgttttggtggcggttgccaaagaaattcatttgttcgtggatcagttgcgcgtggacacaattcgcatggaccaatcaatcgaatggatgcgatacggacgcatgggacgcgaggagggcgttttggtcatcgccacttttggtggggaaatgggcgggggacgggggggggcgaagggtgtgacggacaaaaacatcactcaattaggaggtggtctgtgcgtgaaaatcttccgccgtgtggccaattttgaggagaaccgacagacaatggcacaacgaaaggcgacaaagggcagcatcgaattgccgaaaaagtcgcgcactttcatcgatcagagtctgagggagcggcaaaatgcgcaacttttgcatcaggtggacaaaaaagcggggacgggggggactcatttttgatggattttggcaaatgccgtgtcattcattcattgactgtccgaagcattaatggcaccacttcatgtagatttaccaacgtgattggttcatgatcaaatggcacgcaaccaaaacatttgccgagctgaagtcgggcaaccacggcgcgttgccaaccgccgactcggacgaaccggtccaagtgcagttcgacctgctcggcttcggccccctcttccgtctcaaaattcgcctcgtggcgagcaagtgagagcagaaagggcacaaaagccgaataattggttgaatgatg

SEQ ID NO: 109943 - DNA, 843 bp, Heterodera glycines
aaaagtcagaatttttgcatattttaatttataacttttttacatgtcggtatatctttgtgatttttgggaagctgatagagcttgttaagagctttcgattgatgccaaatttataaaatttggccagctgagaaaaagttacgatgctctaaacttggctcagactataacggccagactatagtgtcccagtccgtttttgtcactcaaatttggcaaaatgtccaaaaatatttcaaaatgtttttttgaccttttcatgacttttttcacattttcggcaaaatttgaattttagtcaagaaaattactaaaaataagtcaatcgtagacagcgagaaaaagatttacctacatcaaaagcattgaaatgcttttgattagcactgggctagcgaaatggataaaagaaagggaacgtgccgggccgaaaatagaacttttcccgagtttgggttcctcgggataattgtgattttccaattccatatttgattgtccaaatcccttaaaataattctccgctttttataatttccatatcctctctttttacttctccattatccatttaacttgatcgatttatttattttaaaaaatggaaaatggttgtgattaaatgtgagaatggaattgtgatttcaatatgaaaatcggtgaaaaataagattacgtaaatgagaaattggtgaaaatggaaatggtccgagttctaagtgttcttttagtgaaaatggccgaaagaggagaatcctgagggacggcccggggaggggagtgggaaagagaaccaaagatgaattttatccgggaatcgaaaggggggggtgggaaatg

SEQ ID NO: 109944 - DNA, 757 bp, Heterodera glycines
tctgaatttaaaattttttattaatttttaaagcttcactattttatttttttagcaaaattaattcataaatattttttcacaaactgctctgaaacgcaccaaattttatttacaagttattttaggcactcagatgctttcactatcaaaaagggagatgaataaaaatctaaaaatttttaataattgtttgagtaccccaaacggacacttgaaaaaatcgatttttttgttttcggggcagtccccccgaaccgatgcgcccagatttatggggagaccgaatccttcgggaatagcttccctatagcctgtactttaattctgcgttggatttttgctccccataattgtttgagtaccccaaacggacacttgaaaaaatcgatttttttgttttcggggcagtccccccgaaccgatgcgcccagatttatggggagaccgaatccttcgggaatagcttccctatagcctgtactttaattctgcgttggatttttgctccccataattgtttgagtaccccaaacggacacttgaaaaaatcgatttttttgttttcggggcagtccccccgaaccgatgcgcccagatttatggggagaccgaatccttcgggaatagcttccctatagcctgtactttaattctgcgttggatttttgctccccataaatgtttgagtaccccaaacggacacttgaaaaaatcgatttttttgtttcataaatatttttttcagaaagtcatg

SEQ ID NO: 109945 - DNA, 144 bp, Heterodera glycines
caacgcggttgggtcaacaagagcacttcaattgaactgaacgcagcgatcgagtaggggtatcgcgtcaacaaagtgttccgcgtgctggagtacgagcagagtgatgatcagctgttccgaccatacattgctgagttcatg

SEQ ID NO: 109946 - DNA, 102 bp, Heterodera glycines
aattggggacaaatcggaattgcattcaaaaatggattaaacaatttgatctacaaaaattcaaattaaaattggagtaagccatggaacaattaaaaaatg

SEQ ID NO: 109947 - DNA, 127 bp, Heterodera glycines
  unsure (1)..(127): unsure at all n locations
ttcatctccgccgactgtgggcnttgtgtgttcgatctgcttccggcttcacaacttggccttgaattgcgctgatcagccaccgttttgacttttacgtggacgaacacttcaaaactcgcaaatg

SEQ ID NO: 109948 - DNA, 149 bp, Heterodera glycines
agaaagaattttgaaaaactaaaatacattcctcaccatctttcgatctatgataatgccaattttgcctttttaggagttttgatcggcataaaaaagagttagatgaagaaattgaaaagtgccaaagtgatctgttgaaggcaatg

SEQ ID NO: 109949 - DNA, 1003 bp, Heterodera glycines
actagggcgtattccaacaccaaagggaaaatttagtgagaagaaaaatgaaactcaatttatgaaaatatttaggtatattttatgcacttgagttcgctaagctttatcaaacggttggacgtgaaatttctcgtgataaattccgacatatcatgaaaacagggaaaaaacaacatgaattagcattggttttgatggaaaaggctgggataaatacacaggagaaaacttttgggcttaaacacctcgaatttgtgcaaaacttttgggacaaagaattcccagatatatttcgtatcgttgcgtttgatatggtaaacgaacatttcctaaacttcgtgtgattgttttatttagaaaaccggacttagaccgattttcaaagggaagggagtaagaaaaaacgaagtttgtgtgataagagtgggcgaacattgggatggtttaaaatctgttactcaatttttcgccgtcaaaaatttttgtgtaagctgtgaggtgacattttggaccaaagaccgtcaccgaatggaatgtagggagcgctgcaaaaagtgttgccggatggtggttcgggttcccctgtttggatgtttgtgaggcgatacactgtggagaatgcaatcggaatttctacaacaatgattgtttcgagtctcacaaaaagacagcttgtagggagtacaagaaatgcaacaaatgtggggaaacatatcaaacacgatcaaaacacacgtgcggggagaaattctgtagaatttgcaaagtctatcatccgggtcggcaatgtttcattaaaaaaatcaaactccgacagcagaaagcataccgtattgtggcttatgacctcgagacgacggttgaagggggcgaacacaaaccaaatcttgttagtgccgcgcatacttgtagtgtttgtgtgggagaagagagggaatgcgaaatttgtaatggtccgcggatgatcacttggtctgtagcagatgggtttgaaccgatg

SEQ ID NO: 109950 - DNA, 378 bp, Heterodera glycines
acttggaggaggtgggcggaagaatagccgaaaattttatttaaatttttgcatttttttatacaaattgggcgtggtaaataaaatgaggccaacagaaattgccaaagttgcacgacaaatcattaaaataatactaaactttttgtaaaccatcttataattagcgccgcctttgttacagttcaaaaggcagcgcgccgcacgcgagtcggcacgacgacggaccgttcagtcgtttctcaatgggtacgacgagccgagttgggcccacacacttcaggtttggtggggaacacacagccaacctattcaatacaattttttcattgggtccaaataaaaaagggaaagcgcttttcccctcgtctgaccatg

SEQ ID NO: 109951 - DNA, 205 bp, Heterodera glycines
tttttgaggagaatccgggaaaactataggtttttttctctgagggccaactgagtcccggcggctaatttctcacttttgcttgcgtttgatggcccataactttttttctaaaactcgaatcaaaaaatgttcgctgtgagggggctaagttgaagtgttttctaaaaaacaaaaaaaattccaggcctctacctataatatg

SEQ ID NO: 109952 - DNA, 499 bp, Heterodera glycines
ttttaattgcgctaaaaacaaaataaatgcattttaaaaataaaattctaaaaacgccatccgttcctgaggtcagattttcttgaaattttgcataggctcatattttgatctcttctagagaagttttgtttgttatttttcaactcgagaccggctcttgcatttgacaagggaatcacaaatcttttttaaattgtggcaaatttggcgttcagatactaactgaataaaaaataaacttacctaattgggagcccaaattgactcgctttgattaaaaggctttttatcacatcattttcataacttgtccttatttcctttcgtttatgattttatttacagaatgtttaaacctcggattcctctttttctcacaacggacagagtaaatgtacaaagagcacattttgcttttgagagaaaagtaccatcaaaaaaattccttggctatcgtgtttgccatgggaatcaggtgatgtttcagcgaaaaatg

SEQ ID NO: 109953 - DNA, 965 bp, Heterodera glycines
caaatgttttaaaaaaccaaaaaattgttttttcaacaaaataagagaaattgttgtgtacataagttgaataaactatatatatatatatacatatatatatatatatatatatttgcttttttttaaattaataaacagagaaataaatttgatttaaaaaaaacataattttttctccatttatttttcgtaataactaaatatgttaattcatatcttgctcacaaatcaacaatgttttgttgaaaaataataatttgttttcccccaattattttgagcaatttgttgaccgtgggcaaagcgactaaaaatgagagaaatttgggggggggggggtcataacgaaacattactttctcctgctgctgacctacataaattatcataaacaaattattggtttttgggtgtgtggcctattagccgattaattctttacgtttttttcgactcgaaaattcctttttcaaatttccttgagaaagttaaatttgcggcagaaaaaaaaacaacttgcgaattggcacaattcggattatatgaattttattttatgcaagtccataataatttggttttttatgaaacaaaattccaaaaaaaaaaatttaaaaaataaaagcatcttaaatattttcattgccaaaaattgccattaataatcagattttgatttttaaaattgttttaatataaattttgcaatctttaattaaattgttaaaaattaattttttattttaatttattcttttgaatttgttatttttaaatgtgagattgttttttattgctttgacaaaatatttttgcaaaaaccttttttctgtttcatttttgtgcatttcattacaaatttgttgtataaaattaaggaaaaaaactattttattataatgaaaagaatcggccaagaaagtgttaatggcgggcaaaagccaaggaaaagcaagaaaatg

SEQ ID NO: 109954 - DNA, 271 bp, Heterodera glycines
gcaaaaatggtgtagagcagaagcttggtgattaatggagaatgcgattttttagttccaaaagtgccaaatttgggattcattttttaagtgctgccaaattcggtataaaatttttaggtgccaaacgtgttcataattgtgcaaaaaaatataattcgataatctaaaagtttagtaatttttttgttgaaaaatatgtaaaaaagttttttatttatagtttttgtatctcacttataaattccaacgcaatcatgattaatatatg

SEQ ID NO: 109955 - DNA, 148 bp, Heterodera glycines
gctttttagcttttctttgttaaccataataaattgattgggattccgattggaaagtggcaaaataaaaatatcaaataaattgttgcattttaacaaaaattaattactaatttttgcaaaaaataaattaaaaaaacaaatcatg

SEQ ID NO: 109956 - DNA, 65 bp, Heterodera glycines
tcttaaacacatgtgatttttatgaacaaaaaggaaaagcccactccgtaagacaatagacaatg

SEQ ID NO: 109957 - DNA, 491 bp, Heterodera glycines
tgcctgcaattagcgccacctagaagatgtatattaatgtctaattgaaaaaaataaatgctaaagtgcgggagaggaatgtaaaacgttatgaatttatacgaagtcaagttgtccatccagttgtaagtgtattaggctacgagatcgctaaaatgttaatgagcaacaaataaatgagtggatttgaagacggaatgaaaaaatttctatgtgacttcatttctctctactccttcgttaattttactacacactactcgattggtaaaccaatgtacatgtgctgaatgaataagtcgagttaaatacccggaagataaacactaccccttgacaatactcaaagttttggatgatttctttagaaaattcgatattctgttttgcccgtcaaagtgaatggtaggctctgattctctttatttatgaagtgcaccaaaaacaatcaaaaaggcaggatagacgtaaatacatatgcaaacataatg

SEQ ID NO: 109958 - DNA, 74 bp, Heterodera glycines
gtgaagatttaaatctttaatccattaaaatcatcttttaccgttttttgcagtttgttccttagtttccaatg

SEQ ID NO: 109959 - DNA, 276 bp, Heterodera glycines
aagtcgacttttgcaaggtgagagaaagcgaatcattcattcattgctaaaataattaattggtcaccgagaagacttttacgatggcaaacaaagagagaatttattttataaaaaattagagactggactgaagaagtctcgagaatagactcgggatgagactaagaccacgaaaacccaaagttttcatctaatcaaaactgagacaatcgagcatttcaggcatctactatatttttgccatgccatttttagacgcgctcgcgtgatatg

SEQ ID NO: 109960 - DNA, 285 bp, Heterodera glycines
atcatttttgcccgcacaattgcaaataaaaaacattccccaccaggttgggggtaaaattagtcctttttggtaaattctttttaaagataatttttccatcagttgagtaagtgccatcaagaagcttcgatatccagtaacgaattaatgaagaattcgattttcgatacacgaaataaataaagaaaattttgagagcctataaaaatggcacgaaagttgatttttaggggtgcatttttgaattttttgtgtttttcttagatatttttttcaaaaatg

SEQ ID NO: 109961 - DNA, 218 bp, Heterodera glycines
tttgccgggtttttggggtccgtgcctggtttttgccgggtttttgaagttgccgggtttttgccgggtttttgtgttttttccgggtttcctatttcaattcatttatttgaattttattaaacattttgccaaaattgagatccaaatatagttttcgttaattgttccggtttattttattaatttttgatcctcattttctagtctgcagaatg

SEQ ID NO: 109962 - DNA, 186 bp, Heterodera glycines
  unsure (1)..(186): unsure at all n locations
ctatcgaccaagcacatgaaccaaatgtctgaacctgcggttcctctcgtactaagcaggattactatcatagcaacaggtctntagtagggtaaaactaacctgtctcacgacggtctaaacccagctcacgttccctattggtgggtgaacaatccaacgcttggcgaattctgcttcgcaatg

SEQ ID NO: 109963 - DNA, 461 bp, Heterodera glycines
agagattaggagcacaaacgatggacctaatggtcaagatttggggggtatgaagggaaaaactatggaataagaaaagcgaagcgaaacattcatttgaatgggacaaaaaggaagcgaaaggataggcaaaacgacgaaagaaacagattaaacagcgttttcctttcatttcaacaattactttttgcaattcgttttggtagattccttttaaatttatttttctctcatttttgtcaatttctatttttctccccattttaagcggttgcaatgtgaatgcgttgcgctctgtccgcgattcgccctcctcccgtcaacaacaaaacgcgtcgtcttcgtctcccaccccctccacccccgtggccgagctgtacgcacgcagcaaacagacgccactgcacaccgccgttcagtggggcctcacagaagtggcacgggcactgatcgccaatatg

SEQ ID NO: 109964 - DNA, 511 bp, Heterodera glycines
ggtcccgacttttctggtcccggtcccggtttttgtcaaatttcccggtccgctcaactctagtttattttcaaaaaaattttttgtcatagcaaaaaatttgttaaattttataacaataataattaattttcattacttttgtacaattttcattttatttttttattgttttttcttttttaaaattttcattatttttactcccattttttaatatttgcacaactttaaaaaacagagatatgccaacagaaaaaaaaagttcaaatttttaacggaatcttttggcggaaacgaaccaaaaaattgacatcttccaaactgagcccatcaaatcaataaaaattcactgctaaacaaatgaaaattttttatgtctgccaacactttccgttcatcgaaaatgaaaacggtgcaaaaaatttccgtataaaagggtaattaaattgtcatttctcagcatattaaaaataaaacttttaaatttgaaatttgattatagtaaatg

SEQ ID NO: 109965 - DNA, 173 bp, Heterodera glycines
attgagggttttaatgcatttgttaatgctaaatctgctattgtttgcttaacataaattatggcaatgacattttgttaggtgatcaaaatgcgaagcgtcgtaaattgatggttgagagtgatgatgagtcggtgtgtaattcatgcgacagcgacgccatcgacgcgatg

SEQ ID NO: 109966 - DNA, 136 bp, Heterodera glycines
ttaattattattattgaaaaaaatcaccaatggagagagaggtacatgttaaaattttcacctgaatttatttccaaatactttattttattttcatcattataaatatattctgttttttagttaacaaagaatg

SEQ ID NO: 109967 - DNA, 107 bp, Heterodera glycines
tggacaaacagcgaaggagcagaacaaacgatcagtttcttcgacagcaggtccgcaacagagacgcactgatcactgcgcttcggcggcagttggagggaaagatg

SEQ ID NO: 109968 - DNA, 721 bp, Heterodera glycines
aaattttttaattagaaataaaattatttagatcatcaaaaattctgatcaaatctttgtcagaaacaacaaaattaagaaagcttgatatcattcagccctaagtgtcctctattagcctgcaaaatttcaaaaaatttggctaagtttcaaaaaagttatggccaaaaatgtgtgaaaacctggttgcttgtgtacttttataaacaatactcaactgccaaacttgaccaaaatttttgtaatttaggtgagcttatagagaacacttaaggctatcaaatcatatcaagaatgttgaatttggttgactgtgacaaaagttatggacagctttatgttgaaaattttcatttgatggttttttatataacgccctttttgatggtttttatataatgactcagcaccgcttcaacataaaattttgcaaatactcaattcccaaataaattttatgtttttttctaaaaaaatttttatggccagagtaactcaaaaaagcatattctcgaatataattttttggaatttggctggataatagagcatattaggctgatcggattatatgaagaattcaaaataaggtttctttttagcaaagttataagcaaaaattttcattttgatggtttttgagtaaagtcataaaaccaaagaaactgctcaaattttcaaattaaaaaaaaattttttttagaggcacggagggaaaatg

SEQ ID NO: 109969 - DNA, 269 bp, Heterodera glycines
tctgccacgtcgattcaattgtgtttgtatgctgaccagtgacaggatccttgaagttttttaagtgtttccattaatctaaaagcaattctgacaataaaaaagaaaaaaaaaattttgaaaaaatttgaccaaaaatgtggatacaaacgcaatgagtaccgcattttgaacctatccggcagaaattgagacttcatttgttttaggtcggctacaaattccgctttgaagatcagaccagcgaacggactcgactcgtttacatg

SEQ ID NO: 109970 - DNA, 703 bp, Heterodera glycines
ccgtcacaaataattaaaaataaattgtcaattactttttggtctaagtaggtcagttaatcgatggcatagcaatggggaggggatgtaaaggacaccatcactgggtgcaatgggaacgcgacgccatcgcacaaaacattgcctcccaagcttatagcttacaataataaacatctttttgtattgttcatttttcatttttatccgtaaagatttcccaactcgtgtatatatttattattcatggcggaccaaaatttaccggtcaatgaatgtaattttatttattattttcaacgatctaattttttttctcaaaagggcctcatcacacaaccccaacggaccaacaatatgttttgttctgtgaattaaacaattaaaaaatcatcattttgtctctcattttaatctattccctactctggctgaccttcctttgtgttggtcgtccagagtagggatccttattttctcacaatctttttaagttatggctgaccttttttcatattggttgtcctctcttattaagattgtttcattaatctcataataataataataattttataaaattcactggtatatgatgaaaacgttaggcagacaacaacaacaacgacggaggaaggcgggacgaaaatgggaatgcaagaggaggggaaaaagacggagggaggacaggacgaaccaaatg

SEQ ID NO: 109971 - DNA, 131 bp, Heterodera glycines
tacgacaacgcttccggcaaacgcgcagcagttcctcccgctcctcgtcacgaatgcagcatcatcagcacaacaacgacgaagacaccgaattggaggcgtacacgcccgatctgttgccttccgccatg

SEQ ID NO: 109972 - DNA, 1003 bp, Heterodera glycines
atagtgaattttcaaattaaaattaaaaaaaaattttttttttcaaaaatgaatactaaaatttgaatttttcaaagattttaactagagtgccacgggaccgagaccgggccgggaattcccggtcatccgaggtcccggtcccggattttgaaaagctcaggtcccggttccggtagggcaaccgggaaccgggaaaaacaagcactggtaagaatgggggtctgagtgaaaaattagtgatgaaaattggagttaaaggaaaaaattaaggaataatctcaaagtaccaagtgtgcaaatggcctagtggctagtctccttgactttccctgcttctttcccctggttcaatccctctacagaaattaaagtattttgaattttctttttgtatactcatggctttcctatcgataaaatatgattcctcatagttttattttaattgacacatttttatcattttttaaatgaaaatcctaccaattaagcttaatagtcccaaaaaccataacaaattacacccaaatttcaaaatttcacccggcggcgcctatcggcaccgccggaccccccttctttcccaaaaattttttgaaaaaccgcgccgaaaaaatgttatgtgaaaagcaaatattaatttataataatatcaatcatttagtccaaaaaatattaattgtttgaaataattaaagaaatttgtttgaaaattttcattaatttaatttagctttaacttttggattttattaaataaaaacaaaataaaaatttaattttgtattattttcacttgaaataaattaaaatttgaattttttaacccccccccgcccttcagagcacgacaaatatttcaacaaaaatttttaaaaattgactagagcaatcgaacgctaacggacgacctaatggaaaaaaatccccgaaggagagaatttaattaaatccattccttcgggggaccgtgtcgggtgccgcggggtaagcagtgatg

SEQ ID NO: 109973 - DNA, 648 bp, Heterodera glycines
gtagcaacaaaatcattgttttcacaaaatgcaattttaatttcgtatttatcctggcattgattttcaagaatttgggcgatgcgaaaaaaactcagttttgggataagaaaaacctaatatttaattatgcgattcactaatttatataataataaaatttaaaaatattttatttactcgatttttttgccattcaaaaatttatatgtgaaatcaataactctgaaacacgtataattttacgctgccacgtaaaggtaaaatcaatgtacatacgatgagtttttatatattcttaacataaaaattaaaaactaaataaaaatttaaaaaatgaataaaattttttttttatttgagtattcgactaccaataattctgcttttgaagaatttataaaaaatcacggggctatagaacttgtcaaaagctatcaaaataaagaaattaagacattaaaaaaacttcatgaacaaatgcagctaaagggtattaagttaagcttttgtacattagaccgttacatgcaaaaactattttcaattatagtatgaaatttcatgccgatccttttgttttttttttgcattttccgcccataattgacaaaagatattcatgcaaaaaaatttagaacaaaaatg

SEQ ID NO: 109974 - DNA, 184 bp, Heterodera glycines
  unsure (1)..(184): unsure at all n locations
tcagcatcatccgtgtgtgtgcctaaccgctcgaggaggtgctcgttcagcaggtggaccgcacttcgcgacgggaagttaaggacggatattngctgccgcaggatgcgtaccgaaaaggcacggcactttggctttgaaccatcaattctttcccttacggttttnagcgctcgaccgaatg

SEQ ID NO: 109975 - DNA, 798 bp, Heterodera glycines
tgttagcgtaagttgattatcttaatttaaaataaaaataattttaattattaaacaataaatttatatttttaatctgtcgatatgtaatttttgccttacaattctaatgaatagaaaaaatctttggttatcaaaagtaattaaatcaaaaacgttgttttaatattgttcagaatcttttgttaattaattggcaggtgtaaaatgaaattttgttcttgacatgagattaatctttttaacaaacaggtgcaaatttctctctaaaaagataatcttttaactaaatgagttacttttcagaaaacaaattttatcttttaataaacgatggaaagaagtgacacttaattaattgaaatgaataaaataattgtaattattgggtagccgagtttgaaagtggtatccaaaaacgtcatttttcagaaacatctctgaataaaaaatttgcaatgccatctgaaaacactatattaatataattctatattaggcttttatggccctaatttggttataagaatcatttgaggaatgattaggtctattttcgatcacaaaaataagttgcgaacattgcaataattaaaatttttaaaaaagatcacctcaaaatattaacattcaatgttaaatatatgttatagaggattaaataatataatgatttagtccaatatctcatttatttatcattcattatggatgtttttaaaattttttccatcatttgtgaaaattttctgacaatgatggttattaggtttcgcattttgaatttttagactaatg

SEQ ID NO: 109976 - DNA, 179 bp, Heterodera glycines
tccgcaaatcaattgatatgggcgggcaattaattgcatcactaattcatttatttcatttaacaataatacataaattaataattatgacgtttagtagttttctcattaattagaaaatattacatttattcattaatattttaatgattccatttaaaaagaattactcaaaaatg

SEQ ID NO: 109977 - DNA, 269 bp, Heterodera glycines
aataaaataattaattaatttggaatgtaattaaattataaacgacataaattaattgctttttagtgtgttcttcaaaatgacggaacgctgaagctcagaacatggaataacggaaatgcccgtttatctgtaattaatttgaataaaaaaacaattaaataaatttttaaacaaaaatatagatatagattttaattactttaattatcattctaaggtttgtattgtacgagcgaatacaatggaaattttggattgccaaaatg

SEQ ID NO: 109978 - DNA, 146 bp, Heterodera glycines
taaaaccctgaaaaacttgctcattcacccaataacctcccagtgttcccttttagtgtgtgataattaaacaatgggctgtttctcttcaacccttttgccttttatgttcgccgcctttttggttacgctgatcagcgaacatg

SEQ ID NO: 109979 - DNA, 254 bp, Heterodera glycines
atccaggaagccaccttgactgcgccgagactgagctaattcaacatctcggaccgaagccgaccgaaaagcggccactaacagttcaagtttttggagggagaaagcagcggatccgatccgcaacttatcgcttgcgactcaagcggatcgatggcggatgggagagcattgaagtggcggaagtgcctctgatctgcaccccgatcagaacagagctcatcgagtcgggagcagtacccgacagcgacatg

SEQ ID NO: 109980 - DNA, 247 bp, Heterodera glycines
gccgattggcagactggcgatgatgctgctgagaaagcagcccaagcagcagcagatcattgtgtggtgttgagttaacaagttctgtagctgtacatcgcgcacactttcagaaaggcggagaaagtgccctcaggggaaattggggggggggggaggggggcacatagggacggagcgtaagggtgtcacgaccgaaattatatttatttgcaacgcgtaattaattattgtttttagaaaaatg

SEQ ID NO: 109981 - DNA, 57 bp, Heterodera glycines
atatatccatcactcacattgttcctggattcgtgataactagggctataaattatg

SEQ ID NO: 109982 - DNA, 86 bp, Heterodera glycines
ttttaaataaaaaaaatgacaaaattttgccgaaaaaataaactgaattaaattggatttatttttgaagctcttagtttgccatg

SEQ ID NO: 109983 - DNA, 248 bp, Heterodera glycines
gagtccaaagttcgctttggcgtttttttggcctttcttctgcactttccttcttttctgcccatgagaatgaccttttcccctcatatgtaaaagtaatatttttgggtcctatcatttcccccgccgcggttttctaggatatacctatataacgttttacttattcacccaatttttaatttggtatacatattttctcccatctgttcaccaaatctggaattatattttcgttagaaataatg

SEQ ID NO: 109984 - DNA, 247 bp, Heterodera glycines
  unsure (1)..(247): unsure at all n locations
tgggtttcaaaaaatattcgaaacattacgtcaaaaatatgcaggaaaataaaaaaacgaataataatttaaaantaaatgcattaaaatagaaatttttaaatatttatgaaattcaattaaaataattaaggctgcaaaagttgcttcctaaagcgtcataacaaactcaaaacaatttattttatttttttcattaattatggcataaatcaaaatttgcggttcaggtcagtgttctgaaatg

SEQ ID NO: 109985 - DNA, 68 bp, Heterodera glycines
ggtaacagcaaactattttactaaagaattattatgaaagtaaactctgtgcccaaaactggagaatg

SEQ ID NO: 109986 - DNA, 147 bp, Heterodera glycines
ttttatgttgcacaaaatttgaaaaaagtgaaacaaatacaaaaaatgacgaaactgagacaataaaatttggacaaaaattgttggacgaattctgccaaaattttaaaaaaggacatggaattaattgtacaagcagtaaaaatg

SEQ ID NO: 109987 - DNA, 137 bp, Heterodera glycines
atttttggcactttcttttttattttctcctttttcagcttgttatccgaaaatctgaccaaaccccgcgcaactttctcatttgcgttagccgaatttttgcgtttgaaaaatggcaacttttgatcaccgcaatg

SEQ ID NO: 109988 - DNA, 273 bp, Heterodera glycines
ttctcagttcgttctgtttggttttgcctttgggccgcgttcgtcctctttcaagtcgctcattccgtcgtttcccctattcctttggcatttccgttcatttctttcagtcggttttcttccaatcattcgccgcctttctccgagtcgcattttttggctcaaattgacccaatccgtcagtgtccgtctctctcccgcgcattgcttttgcgttgtgtggacccggagcgtaagtaatgaagcaacgaaaatctatcaattgaactaatg

SEQ ID NO: 109989 - DNA, 284 bp, Heterodera glycines; identical to SEQ ID NO: 98949

SEQ ID NO: 109990 - DNA, 269 bp, Heterodera glycines
aaatagatgccatttttcttactaaaataaaaccccgaataataattaacaaaagcttgaaaaccttctaaaaattctacgacgaactttttttcaaattatttaaacaacaagaaactagggccagtcatagttaccaaacccaatccctagcaatgaccattttgagattaaaaatttatcattatcaattaacacaaaatccccaatttttaattgcttttgtttaaaaaaatattttgaatcaatttgtaggaaggcactcaatg

SEQ ID NO: 109991 - DNA, 1003 bp, Heterodera glycines
ccgccaaagcggcgtacacaaatgaatgaattgggtgaatggaaatatttcgactgctgctgatgcatacggaaatggagaaaagtgcaaaaggcagccgcttgagcgccttccctcctgtctcatttttttgaaaatttctctccgcatgataaactgtgtgggcgcgttcgtggtggcatttcgggtcagatcggcatcaacaaattaaatttttcttggcattttatttgcggcaattgctagagaccggcgggaacggattcccgcggtatgactcactgccgaaaaattcatatgggattcccattaaaaactgataaattaaagggtgaaagagtgggagcgagagataggccaaaagacaaaaagaaagtgagggagagaaagagagagaagagtaatggcgagtagaccagacgctagacgagagggaaacagtgaaatgaaaatatgacagaatcaaaagagcgagagatgtgaggctaaaatgataaaatgagggattgttattttataaggttctctacgtgttcaaaaatgaggccctaaccgccagggcgccaatgactaggtgtttcttatttaggtaaatgccgaaaattccgatgtgcttgataggcacaattaaatacgaaaaacgcgttttcctttggtttggagtatctacgatgacttttttaatgtatattttttcctattttaaggttttatgcttctttttttgcatatttcccatttttggcgctcggaaaaatccttaaaattagaaattttggtttaaaaattgtccttgttataaaaattttaataatttgttttacaattgaaatataatcaaaattaaattttaagtcttaggtattttactacctaaaaagcattatttaaaagttttatttgcatatctttgtgctatttattgcctatttttcgattttttctttttaggtgcctatttcgcgattttttgtgcctaaaaaggaagacagacctacaaatg

SEQ ID NO: 109992 - DNA, 887 bp, Heterodera glycines
gatttataattagcaattgaatgaaaaatggatttagctaaaatgtttaattaattaatatttttttaaaatttccatagcaaaaaattggcaaatattgcattccgtttttaaattaaattatagttcattaaaaaattctatatataaatagaaacaataaaattgtaaaatataacttttaaatttattactgttaaaaagagccccaaaaaatgatgaaactgttgttattttttcttcttcctcttttttcttggcataacgttttgggaatttagtagccggaagaagtgatacaactaaaggatatcatttgcatttgccatgataattggccaacctatagatgatgtaaaagcgatagagaattggacatacaatcagatagattatttgcatattttaattacgtgtataaaattgaatacatataaacaggaagcgccaaaaaatattatacatacacataaaaatttattttaataggcattaataaatttattcgataaatatataaaaaatattaaattaataacatcaaaaaatattatacatgtatattatcttttataataggcactaataattttatgcaataattaaattggattaaattattcttgtttatcaatattttaattcaggcaaaaatatgacaaataaattctttattaaaaatttaatttattaattattatttattaataattattatattatttattattaaattaatatcaatcttcctaccatacataatattattattaaggaaggtaaaaaaattaatattcaacaaaacataaaaaatttcccctttaaaaaaatgcataaattaaaaatatttaaatataatgtatttagtatatataccattgccaatg

SEQ ID NO: 109993 - DNA, 65 bp, Heterodera glycines
cgcatttacaggccattaagtaccttgactggcgcgctatagtgaagggctccagatccaacatg

SEQ ID NO: 109994 - DNA, 287 bp, Heterodera glycines
agttcccctccaagtcattattttttcttctaatttttcaaaattattcctttttcaatggaaaattcaaaataaaatttaatatttgttagaattttttcaatttaaatgaagaataaaaaatccatattatgaacattgatttatttaataaaaagggccaaaatttgcaccttttcacatgccggcgacgcctaaaaccaccatatttcttaaaaaattagctcaaaatggaaaatttggacattttttgtaaaaatctgttaataaattgaaaaagaaaaatg

SEQ ID NO: 109995 - DNA, 1003 bp, Heterodera glycines
attgccaatgaattgagagttcaattcaataaaatttaccagagaagaagtatttggtaagaaaataataaaaaaattaattatacttattatctcattgagatataattcaaatgaataaaaaacagaaaaatttgaacaatttgaaaatttccacgccaataataaccaagtcttaaaacttatgacggtatttagttttttggagttaggtatattattctacaacatttataaaagagaaagggaaattaacaatcatttttgaatttaaatcaattattcactcattaaaagttaataattatttaataattttcgcgtaaaaaattataagcaacatgttaatataaaaaatcaatactgatgcaattattggtgggggaaaatgaaaaaaatatttttaaaataatttttgtcaaatcataaaattaatatatgcagaaattctaaataatttaattttgaaaatactttgactcaaaaaatgttgaaaattatttttgagattattttcttcttattcattatcgtactaattgatggaattgatgaagatttatttgatgatttgtggaaaaatcttaagccatcaacctcaaaaaaagtttggcacatggcgaactgttgcaaattctctctgagccagtgccaaaaatggaaatttttgcaatttttttttgcggtgtgtaaaattttatttgtgggccaaaactctttcctcaaccgagtaatatttcttaaatttaccatatataaaattttttggaattccataattgtttttcaagggtttactatacggaaacggaaatttacatgtaaatgaaattattttttaatcaattatttacgattaaaaacaagataaattgcaattaatttgataatttctactttatgaaaaaattttttttataaattacataatatatatatatctatctataataaatataagctgaaaacaaaaatcatttgatttttttgactcaaaaaaatg

SEQ ID NO: 109996 - DNA, 171 bp, Heterodera glycines
ttttgcgaaaaataaaatttcctttgaaatgccgaatgtttatttgcttaagcctaatttatagggtcaaattggggagtatagataattatttgcacttcacttgcattttcatcattttctcgaatcgatctcccaattcctttcgaccaaaaaaaaaacaaccaaatg

SEQ ID NO: 109997 - DNA, 812 bp, Heterodera glycines
gtgtggtattagtgactttttgaccctttatttgattgtttgaatttgtttggcataatgtttgatttgaattgacccaaattgtttcgtttttcttcagttgtggttggtggattagttggtcgttggggataatttttaggcgttttgttgattggtcgtcgattgatttttgttttaatttattttgttgttgacttattttaatttaatttggattgtcttttaattatttgttgcataaatttattttgtttggtattggatttttaaagcaggttttgccatttcatagactatttgtgcaagatttagaagtgtggcaaagaaacccccgacaaatttcttcttcttttccaacatggcgctcctggtaacaaaggttagctcagtggcggacggctttatttttcttcagtgaatttctcattttaaaaaaagcgactacctaatttggaaaaaccctcgtgttgggtttatcgactgttttaataccctcgtgttgggttcgtcaactgctcgtcaaattttaaaaccctcgtgttgggtttatcgactttttcaataccctcgtgttgggttcgtcaactgatcgtcaaattttaataccctcgtgttgggttcgtcaactgctcgtcaaattttaataccctcgtgttgggtttttcttcatccgccttatttcgtccacgtttacaaattcgtctaaagcactcgtgttgtgctcgccaaaaaatcttttataaaaagctcgtgttgctttatacatttggattttttgttttatctcgtgttgataagacaaaattatg

SEQ ID NO: 109998 - DNA, 89 bp, Heterodera glycines
ttagttccagtgaaataaaccctcgcccctcaaaaaataattatttacatttggacacaccaaattcataaataatttagtgcaaaatg

SEQ ID NO: 109999 - DNA, 345 bp, Heterodera glycines
tacaaaaaaagtacaaataatggcattaaaacgaaaaaccccgccgagaaaacataaaactcattttcgagtatactaacaataagaattttttttgctttcattatttagttatataagaattttacgcaatatcaaaaatgtaggcaaaaaaaggtataaatgaattagataaattaaatcaaaaggtataaaaaaccatcaagtaagaaaaaaagttatgacctaagaaactgaagatgatccctaaagtgcactagagcaactttttatgttaaaatattttagaaaggacatttgcttaatttattttgtttcgccttttcaggcttagtatggccaatg

SEQ ID NO: 110000 - DNA, 562 bp, Heterodera glycines
attacattaaataatttatttatttttaacacatttatttattattaataaatgaaatgatgttaaaatatttttaaatcatttttttataaaaaataaaaaaatatttaatgaattatatttaatggatttatttattaaaggaggtgtcaattaaataagcataaaatttattagtcaattaaataagcataaaatttattagtcaattaaataagcataaaatttattagtcaattaaataagcataaaatttattagtcaattaaataagcataaaatttattagtcaattaaataagcataaaatttattcgtcaattaaataagcataaaatgtataattatatgaatgcatttattgtttttataatattacggcataattaatatattttttaataattaaattatataaaaaatcgaaattatactaatttattaaaaagcaacaatattttaatgaaaggcaaaaattaaaaataaataaatatttatatgaaaaccattacaaaattcaaaattttttgttagggtgaccttctgttttgtcggcaaaatg

SEQ ID NO: 110001 - DNA, 655 bp, Heterodera glycines
aatgatcttattattgacatccacccttcagtttgatcggatttttctttctttgattgggatcggaatggttcgggtattgataaaaaagggaaattctcgatttagcaatttgccctggtcataaaagaattataagtgatcaaaattgggtcccgaggtttgattgaaaagtgctgggttggtggttagacaggcacaacaaatttgccattttcggtctcggctttctaaatatttctcgagtctaaatttcgcggcaagttccggtctcgagtttcaattgatggtatttgttgatttcgagcagtagcacataacattttcctctgttaaattgttttgtactagtcagtcgagaatttataataaatttttccactttcaaaaaagtttatagttaaattcaaaagaatttcaatgattgctttgagacgatggcaactaaatgaatttacattgccggaagtggcaaaaaagtgccaaaatcgaggcaaatataaatgacattgaaaggaaaataataacaatgaaatactattttcattttgctaattttccagttcttaatctccaaattctccataataattttctatttttcggattgtttttcaggggccttcctccccaactgttcaataataacgaaatg

SEQ ID NO: 110002 - DNA, 1003 bp, Heterodera glycines
aaaaaggggatattctcatcgtcagttcaattggtgggtaaattgtcctggtgcgctgaagggcgtcgaaggattccatattagtaggatagcataaaattttgtgtacgtattttgtgagttgcagttcggcttgttgttcccatgtaagcaagaaagtggcgagaaaaaaatccaaaaacttggtgataatgcacagaaaatgactgctgaagaagtggaacaagtgtgcatttttttgtttgccaaaatgcactgtgacacaaaaaagcattagtaaacgagaaaaggtccgagtcggtggttattcttatgtaagggatcaaccgctacagtgacgaaattattaatcgtcaatacaaatggtcaaaaaaatatttttaaaataataaaattatgaattaattaatttttaggtgtttttgtttgtttttatatatgacttgttttgatggaattaagtcaaaatatgccataattttaaagatcagaacgtaagactcactcaaatatcttttagaaagtgagcaactcaaaaatcgttgtctctgtgcaaacaaaaatacctttccatccctctgctaattgccgtttttcttgtaataatatttggcaacagcgctgacgcctgatggtaaatattcatttgattacagtatgtgaaaacctgctcaatctttgcgacattccatggttacgcggatttacccacaatgaaaattagtagtcaaaagttcacgcaaacattttttttattggagtcttttttaaatgtttttgcattcagattaacactgagtattggtgaatcaagttttgtattttcgtgtaagattttgagtataaatattcattgtggtgcaaagttggagagcagtaaaagggacaagcgtttggatttgtgataataaccaattatttttccctaattatttgtttaaataccttatacataattacataaaacatatttacaatattggtgccttatattttagtaatg

SEQ ID NO: 110003 - DNA, 61 bp, Heterodera glycines
tttctcttagcttctgtaaatttattttagattacttataatatatacccattaaacaatg

SEQ ID NO: 110004 - DNA, 80 bp, Heterodera glycines
gagacttactgaaaacaggaaaatttatatgctaattaacattaaaattgattaattgatcactcacataaataaagatg

SEQ ID NO: 110005 - DNA, 251 bp, Heterodera glycines
gtgagggaaaggcaccaccgaacgcggcaaagagagaagcgccaaaagagtgccctcctaattgatcaattaattaatgtgtgtgttcgttccattgtttttttttgctttttgtacatttattttttacgaaaataaaaagcaacaaattaacaaattgttggcacttttctgctgatttcatttgatttcttttgttaattattttttgtaaacttattttaattcgctgtcttttcccttttcgaatg

SEQ ID NO: 110006 - DNA, 256 bp, Heterodera glycines
cgaattaaattcaaattagggagtggagatttgtgcccttgaatcagttcacctcagcatcattgcaccccttttttttattgttttttgttattttttggtgaaacgatttgtggcgaaaatatagtcgaacaaattggtttgcgccaatttatgtatgccatttagtgcgtttttctacccccccccccctcgcctctttccctctttcccctcccctttgctcagtgccattctcccacttttttagttcatg

SEQ ID NO: 110007 - DNA, 1003 bp, Heterodera glycines
  unsure (1)..(1003): unsure at all n locations
ttgttgtgggtccttttctctcaaaatggcatcacagaggattaatagcctgcataataaatggccggagattcacccttttctcccctttagctccttttctttctatctccactttgctctctttctctcgtctctctctctcactcactcacttttttctctctcccttagtttctttacattctcttctatgattggccctctcacctttttcttttctctctctctctctcactcactcactcactcactcactcactcactcactcactcactcactcactcactcactcacttttttctctctcccttagtttctttacattctcttctatgattggccctctcacttctttttcttttctctctctctctctctccctttctcacttttcattgcatatgatttttctctgtttctctgctctgtacaaatttctctatgttatttcctctctctctgcctttctttctctgtctctccatgatatgccaaaaaattgtcccttttctctgttattttcattatatgtatattatatgcctcatttccctntaaaaattcttttcctctctttctctgcccccacttttcacacaaaatgcacactctctcctcccacgcataaatagcatacatttggcgcctccggcgctttctctctggcgttggcgttgtgtgcgcgcgcaattatgaaaatttgttttgtgtcgcggaatccgagccggcgtttccgcccgagcaaaaaaactttcttctccaacccaagcactcaaaaagcaaatgagcacacatattatgcaaaaagtgcggtccactcactcacccacttcagtccattcattcgtctctttggatttttttttgtccgtgcaaaatgccaaaaaatgaattatgccaaaatgccattttcagagtgatttcaatgcctgctgccttacattttgaatggcatttttttcttgaaatttgatgccatttaaccattcttaggttatg

SEQ ID NO: 110008 - DNA, 461 bp, Heterodera glycines
  unsure (1)..(461): unsure at all n locations
cccaaagctaaaaatttcagccgggcaccaattattagcaaatggccaatttagtaaaatcgattaatatttgttttttatttcaccgatttttcttttttttagatttgcaaaaacggaaaagccaacggaaagtttctgtaatttctgggcagcaattgtttttgacgagcgaaagtttttttctctgagctcgaaaaagtgccggggctttttctcgaattttctttgcccgttgaaaagcaccaaaaattcgcttggccaatatttggcggaactttcaaattattatcattctgcgcgactccacgttcgcgnnagtacaattgcgagggtttngctacggatgaaaaatgaaatgaattttcattgtatcaaaacttcgggccactgaactaccgtaccccccaaccttggaaaactttcgtgtcgaaaaagaatcgaacgattccaacggaatg

SEQ ID NO: 110009 - DNA, 606 bp, Heterodera glycines
atttcaacctatttataactccagcctgaattcgaataaagtcgaaaagaatcaaattgtgttatggaccagtgtttgttattttaatgattcttatgaaataaagtaatgcattttttaattttatatcaaaataatgaggtaacctttcaatgaaaaaaatctggcggcgagatagccaaaaaacaaggcgcggcgagttggccgcggcgagttgggcggcggcgagatagcgccgcggcgagttggccacgcggcgagtttctcacggcgagatggccgcggcgagtttgccgcggcgaagtgaccccgaccctatataaatgaggatttaaacaattccacaattacctatatttttgtgtaaatttttcaaaaattgtcttacttagggtgtaacataagtttccgcacaactttttttaaagaatttttttatgaatataaatttagaaaaccacaatcatgatccgaaatatctgacattattattgagaatgagtttgctatttatcgggcaagggataaatcccattaggaaaagtatttaaggagttagagttgataatgtaaaaatggtcattttcgaggtatgtatttttgatg

SEQ ID NO: 110010 - DNA, 76 bp, Heterodera glycines
ggtaatttgggactcggttttgtttcttttttcgcaaatttccgagtgcttttttcaggcaattcgggtgggaatg

SEQ ID NO: 110011 - DNA, 1003 bp, Heterodera glycines
aaaattattagtgaatttattatagctaaaattaattaattaatcaattaatcatctctattcaattaggacactgagaaaaacttttttttttctttatccaacgaaaatcttttttttttataatattaaacttaaaataaatggtttttcttattttctttttggaaattgtgataaattataaatttaaaaatctttgcagggattttaaataaatccgtttaaaaagattttttcttaaatataataaatttttaaatttaaaattattactttaagcactaaaatttgcgctattgcttctttgagtgctgtgaaaaatgtttgttcagtaaatatacaactaagcaagcgcacagttatttttagtaaaaaatttaaaagaaataatctttgatcatgccattttaaaaaaatggaaatttaaaagaatatcgaataaaagatgatatttaaaaaataaaataaatttttaatagttaaaaaagctttgcaaataattaaatttagaaatttagcaatcaaatattgtcaaaatttgatgaattatgttaggaaaacaaaaaaaaacttaaattaaaaattttcttcgaaaataaaatgctatttgtccatttgcactgcaattaaataaacgttaatatatataaatttttctcctgttgatcattaattcattatcttattatcaacgccattttatcatcgagtgtcatctgacggacaaagaatggtcagacgaaaattattatttttacagaaaagaggatcataaaatgatttttaaagattgttacccaccattttgtaaataatcatcatttgtatggaaagcgattacttttacaatttttgttcaaaatcgtgaaaaattttaatttaaaaacaaatcatagttaatgttgatttgaaaatacaaattttattggggcgaggagaatgtaaaagattcgttagttcatttaaaaattatggttgaaaaatccaatccacactgatg

SEQ ID NO: 110012 - DNA, 898 bp, Heterodera glycines
ccccccccccaagacccccctcggtaagggaaaaagagaggcggtacccccccccccccaacaagaccaaccagcgccccagagagaaaaagcaatgccaaatttaaattaacgccaaattatcataacgaaagcaacatattaattttaaattccaacgccaaattacaaagaaacattttgctggcggccaggggcggagcaaaagctgtaaaaatagctaaatttcaaaatccattgtgtaaacgatggaaaaaatgctaatttatcgtttcaaatacccccctattttcccagcgtcgctggtatgagcaaaaaaaaaaaaaaacggtcgttcgggcgaaagtttttcaaaaatacacccataagaatcgggcgaagaattttcaaaaatacacccctatgaatcgggcgaaaaattttaaaaaatacacccctaagaattgacttttcggatcggtaccccccccccccccccaagcccaaatcctggatacgtccctgcgcagaccccaaaaaaaaaatccgagaaatttctccacttgagatcgggaatattgagcagccatctcgactaaaatttttttttaatttgcagtttctgtttttcaacccgtaattactatgtcaaaaaaggcaaaaaattataatttttatggaacgaaaatttcttccaaaataattactttgttttttctcataaattacgatcatttatgccatggaaatgtttcagttaaaaaaaaaagttcaatgggtattattacaaaatccaaattgaatttttcattaaattcaattaaattaaataaatcatccatcctcaatcacacaggatgagtcggcggtggacagttcgccatggcccgaagtgtccacaaaagagacaacgccaatg

SEQ ID NO: 110013 - DNA, 245 bp, Heterodera glycines
tctattatttttgcaaaagaaacataaaacaattgcaaactgataagggggcctgtggttttttcatcgggtccataaaactgcgaatgtcctaaaattgttctggaacattcggctttatcaaaaaagccaagatctgctagccggtgaaaaaagctaaattaactcaatcatttcatgaatcacaaagtgattttccattcttctagactcaagccaatttcttactcattttcattctaatg

SEQ ID NO: 110014 - DNA, 296 bp, Heterodera glycines
tcactgacgaaatcatccactgtcgaatgtatttgaaagtaaataggcatttaaatatttaagttttttgcggtgagaaatagttaaattttatatactagtattatggtgcttaagccaatttttgaataaaataaattctcagctattaaaagtacccaaagaaaattgagcctgaaatatatgtagtcactgacgaaaatcactgacgaaaatattaaccacgttcaaatcacttattttctttagaaatatttctgtttttcaaataatccaacgaaaatccgcgtaaaatg

SEQ ID NO: 110015 - DNA, 1003 bp, Heterodera glycines
aaaaactgctataaaatttcggttttcgatttttaacttgtaagcaaattaacgatatgttttttgtaattatttaagacagaaaccccaaaaaattttttaaaataaatttatggttaattttccaataataataataaagtgccgaggacttgtcttttaatagccaaacgctaattacccccctcttccacccgcgggcgatcggcgcaattcgatcaattcaatccatcaatcggtgcgaagtgcgtagcctcctcccccctcccaatttgggtatttaacacaaatttggtccaacgtaattagcgggtggcgccgcatttattgtttgtaatgcaacgccaattggtacggcgaaacagcgcaaaacgcaaacaaatcgaacaaactttggcagagcgatcagccaaccatcgaagactacaacaaatcaacggacgacgatcagcagagaatcagcagatcagcggaatcagcatgagaagaaggatgacgcgggggggggggagagaatgctcaagaaatgtgattgagtcattaagtataattatgttataaagttagtaatttatacgccaaaacattcccacccaacgaaattcttaagaaagacttacttatttattattccaaaatcttaatatttgcttcattaattagttttatgcctctgattttcttaaacttccattaatttactctttcttttctctgctaatttgcccccttctcttcttcattttcattattatttttgtctctttttaaattgcgcttttctttgaattgctttcttttcgcttttccttctttaaatattcctgacgttagcctttcttttttttgtttactctccgataactttctccaaataatttaaaaaattccctctcaattagtctccaaatttaatcagatttttctgcaaaatttttattttatgtccacaaattcgaattcatccgaaaatgaaacagccaaagagaaattttgcagaatg

SEQ ID NO: 110016 - DNA, 1003 bp, Heterodera glycines
caagcttaagcctctgaataatttttgttaatgttatgagcagttaattttttattttagttttgtaattcaatatttccataaatatttgactttttttaaattgttctttttttacaaagattttataggttttcaattaaattttggcattttttaaaatgaatcaagatttttaaattttgctcattttgggcgaaattttgaattattttctctcaaaatttttccatttgatggcttttttgactaaatgaaatgacgacaatttatcatatttttatcacgccatagttgccataggctcagtcttaaatgtgttgccattcgacacttttggttttggatatggacaaaaaatcgcgaaatatggacataaaatggcaaaaatatggacataaattttccaaattgatgggtaaatcttccaaattttcttcaaattaattaaattttattaaaatacatataaaaatggctaatgtggtattaaaaatcattttagaatattaaagctaaaatttattaattttaagcaaaaaatcaacaggaaaagcaaaatttttgtatttttgtttaattttgacataaatttattaatttttaagaaaatttaaatttattcagtattctcgagaaaatttggcgaaaaatgatttttttggaaaattttcctgtttttgggctcaaaaaggccaatttagctgccgggggccgttttaatagaggttttttagaaaaatgcaaaatatgtacaaatgtggatatagaaatccatcctggaagcttctaatcaagctaaaaacatgtttttcgtgtgtttcaggcctcccacagtccaggaaaaaatacggatttccatataattctccgccctagtcattatggctgatataaacaattgaacggtaattagcatattaatttgtaattattattatattttatttaattaaatatatttttaatgatttaatattaattattttaggttcactcaatg

SEQ ID NO: 110017 - DNA, 179 bp, Heterodera glycines
ggggggtctttctcatcaaatgacaacgtcgggaccaacgccgtgagcaattggaggcgcattacaaaatttcgtgaattgctgaccaaagggtcaaggaaaaggttttgcttagaatttttaatatttttctgattccttctcagattgtccgatggagttattatttgccggctatg

SEQ ID NO: 110018 - DNA, 165 bp, Heterodera glycines
  unsure (1)..(165): unsure at all n locations
aaaaggcttaagcatcgtgcacagaaaagaaaagaatncctgcaaagcaaaaggttggttttgctttccctcccctccccctcaactcataattagcattattagactcatttccgtgtttaaatttaagacggaggggtcgtattaccatcgaagtggacaatg

SEQ ID NO: 110019 - DNA, 753 bp, Heterodera glycines
agatcttttaaccaatttaacatttttaaatattattttttaatatatatattaaaaaaataacttagttataacacacctatatagttagaaatagaagcctcactgaatcatgaattttcaggtcaaacgtattgcacataaacacactgaactttcggaagcggtcgaacacatcaacaaactgtctgtccaactggaacaacgggctttgcagacagtgtaaattgcaactttaaataaattagaaagaagggttaatttttgccaatccattgaaatttccaaaaaattttcccggcgtcgcctatcggcatcaccggactctatagaatcattatttaataaaaaaaattagacccaaaaatggcaaaacaatgtatttttttggtgcgagaaattactgtttttcgttcaaggctcaaaattttggaaaaaagtccggaaaacttgttcctgaaaaaaaaattgtttggcccggagagtaaaatttttttttttgaaaacatgaacccaaaaatgcaaaatttgtgctttttcgggcaaaaccgctactatttcctgctttttggctccgtccagcgttgaagaaaaataacactggtgcaaaaaaaaaatttggcccgaagagcaaaaaaaaagctcctcgaaactttttcctggatacgagtctgctaacaatagtataataattgttgcgttcattcatttaggccgagttccgctgctgtcgagcgggagaagggcgacatg

SEQ ID NO: 110020 - DNA, 165 bp, Heterodera glycines
  unsure (1)..(165): unsure at all n locations
cgaaagtgccaaaatcaaaatgaccaatagggaaaattcaaatgaaaaaaaaaattttgngcaaagaaattgagaaaagacaacttttatggtctaatcaacttttatgagcccaatcaatttcttaagtattattaattttttgtgggatttgttaataagatg

SEQ ID NO: 110021 - DNA, 146 bp, Heterodera glycines
ggttggacggggagggcggggggtagtcgagagtcttgaatctgattacattgatcagttttgagtcggataaataaatgctttaacgcgccattgaattctcaatcccatttctaatactttcagctttatgtacactaacaatg

SEQ ID NO: 110022 - DNA, 1003 bp, Heterodera glycines
ctattttagtggctaacttccaaaataagcatttctcgtcgaaataaagccgcagaaaaaatagttaaaaacctaaaaatactccctacttatgactttgttagagttgtgtttaaaaagcgaataggtataatgttcctgatttcatttgttttcctcgatccatattttttttcactaaactaatgtttttttatttaaaaatgcctgaatctacgggccgcccatgcccgatctgttgcctattcccgacgactacaaatcgaatcgtgaaaatgcaaatggtaaagcagcttgggattcatttgggtttttggtaaagggttatgaaattaagagcgattttatttaaaggagggggagactcaaaaaaaaataataattcagtggtcaaaaaacaggaaaagtaccttaattattaaaacctacgggattttatgggttttaataatagaaaatctactaagaatttagccattaatgcatattttcccttttaattccgagttgagcgcatttgttttttttcaaaaggaatgactgaaattgccgacgacgatttgcctgggccggggccgacgcccgccgactatgcttcttcgcgcactccaaattctgaacaaaagaaaccgaaaaagaagtcaaagaagaagggaggattcctcaactggctcaaatcagtcttctgctacttttagtccgatttgatagacgttgttaggtctgagcaaaaagctcattattgttgcactgtgttgttgtgaataaaacagattaaaaaatagacatccgaagaaattgatttattgtttgttgaacaatttggtcaccaccatgagtggttggtactcctctagtttgtatccacattttgggtcaaattttttcaaaaatttttttttctttttttattgtcgcaattgctttaaataacaaataaaaggagatttatgtgcttattgggtacaattccgcgatttgggtccacaaaatataaaaaatg

SEQ ID NO: 110023 - DNA, 1003 bp, Heterodera glycines
tttcaacttcgtttgttgttaaaatgcccggatgaactgtaaatatggaaaggctggtgaatataataattttataaaatagtccgaaaaagattcggacttatttaaaaataaatttgtaacatttttaaattaaaaaaaatttactgcattccacattgaaatttcttcacggatttgcaattcgtcgcgttccaaaatttcgcacaacattttttggtcaatttgcaaaaatccatccgatttgatcaaagtgtcggcattttcgtcaatgtaaaataaacaatggcaggcaaaattctaaatttgaatgaaaataaagtattaaaaaaaattggctcttgattgagaataaaaataagtgaaaaaaggaacattatggaaaaaaatcgatgcgataatttccgcttttaaacacaatttagaaatatcaagttaaattgagagaagtttttctctcaaatttccttactatttttctcttctctgcccgccgctaaaaatggtagcagcgacgagtcagagaagagaaaatagtaaggaaattgaagagaaaattttatttttttattcaaaacaatttagtgattaaaggaggtacaaaagtgattaaaagaggtacaacagtgattaaatttgaacaaaagttgaggccgagttgggatgggcaaaatgggaaaatgtccattcaaaatttcattacatacaatgatgaaatgttaaaaaaaaattactaaaaaagccaaaaaatgattatggatatttttaaataaaaacatttttttgcaaaagaaaaaaacaaaggcattgatgaatttaatagatacttgtctcagcaaaaaaaaatttgcggcttcagaattataaacagaaataggaaaaatggttgatttatgaaaaagatttaatatgaattcaagcactttaatttaaaattgttgaaaaattatttttaatttatgtttgtttaaaaacaccagtgattataaaatgtacaacaatg

SEQ ID NO: 110024 - DNA, 106 bp, Heterodera glycines
ttatcaacaaattttaaaggctgtgatgcttgcggccagtgcggcagcggggggtacggtagcggggcgattataatcactaccggaggcggtggatacggatatg

SEQ ID NO: 110025 - DNA, 632 bp, Heterodera glycines
cctatttctggggccaatttcggttttgggagttttttgagcttggtacaacctccgccccacctcctctaccgtatctgcccatttttgccttccgaatttaaattataattatttaaaaaaataaaaataaattttagaaggaaaaatggaattaacaatttttgttttgaaatatttagaatttgaacaaaattttatatttttaacatctttttatttccgtatttttaacatttctttatttttatcaatatttcaacattttcacaaaaaaaaatatatgaaaaaacaccccactaaaggtcaaaaatttcagttactctcttagagatggaaaattctgaaaaagaattcgaaattgtcgaaaattttcttgttaaaatataaacaaattttatttgaaaattacttttttttagtttctaaaaattaatggtttaattttttcaataattgaaattttttttgtccatatttctgaaatttttcggcaattttaaattaatttttgtttttgtttttgtccattaccggtgtctccattaatttctaaagaatttttaaaaaattggcacggatcagatgttacaaaatccccccccccccctcgcagtgccatcctgaacatg

SEQ ID NO: 110026 - DNA, 1003 bp, Heterodera glycines
aagaactgagaccactataatttttttattttcaaatttttgctatataatttttaggctaatctttgtcataaaattctttttttttgttgagtgtttgtcgtacattatagtaataaatttatactgtgggtgtattatactgtagggcgtttgcaattataattgtttagtgtaatctagggttaagccccgaccccgagccccccgaccccgacccccgacatttttgggacctattccccgacccgacccccgacatgtcgccccccgaggttcccggcccccgactttttgccccccgaccccccgacactaattcgggggattggggactccgagcgttttaaaaatttaaaagttatgcaaccaaaacatttaaattttacctatcactaagccaaaataaaagtttttttctcactcttttagaaaaattaataatatataatttgccaaattaaactttgcacagatttacaattttccaggaaatttaatagattttcacccaattgattacttttaatggcttcaaaagcatctgatatttggaattttttcacgaaaatttcttcagaggttgctaagtgccggctttgtgaaaaccaattagcgtgtaagaaatcgtgcacaaaaggattgtgggggcattttaaagcgaaacacgctaaagaatttgaaaactatttgcaaaaatccgacccgtcaacggtaatacaagcttccttttttattgaatataaaaaaattcagaaaaaccaaggcattacaaaattttttggcaatgaagacccacaaaaaaaggcggatgaacaaattgcaaggctgatgataagaacgaattgctcttttttatttgttgaggcaccggaattacagaatttgttctctttggcctacccgaaactccaagtaatatttttcacccatttttactattgtcatattttttaagcttcgccgaaaagattattttcggaggaatgtaattcccaaaatg

SEQ ID NO: 110027 - DNA, 59 bp, Heterodera glycines
attacaatttaatttagcctaacattggcaatgccaacgaaggagaggaggagaaaatg

SEQ ID NO: 110028 - DNA, 590 bp, Heterodera glycines
ttttaaaggctaaagattattacaaagtattcagtaaaagttgaagaaaaagcaaataaaaataaaataaaaatgttataacaaatatgagcatgccaaaataataataaactgaagaattcgttataaaaatttaattttcaaatatatccaattcttaggcaaagagtgggacttcgatgagtaatttattttgctttccatttgtgtgtatattttttgatcagttgatttttaaattttgatgcattttacttttctaaaagcgccaataatttttatcttcttttaacaaaaagaatatttaaaattggtttatcatttgctaaaaaatgattaagaaaaagtgccattttatgcgttccattttgtcattcgttatattattgattaagcaccacaaaagaaggggataattagccccgggctatgccccgtaattgcccactgcagtggagttaattattctggttaattaacttttaactttacataacataatatacagattgaacaattccgtttttacatacacatattcctttagattattatatttttttgaaatataattttttggccataaaatg

SEQ ID NO: 110029 - DNA, 657 bp, Heterodera glycines
tttgcggcccgacatttgcgtcccggacatttgcggccccatttcttaagggccattttcggacatttgcggcccaattttttgctgaattttgcggcccaagccaaaatcggacatttgcggctttgccctactttcttcatcataatatttaactttttcaatacatcaattaacacacaaaattcttttattttctaatgatttgctcaatgtttaacggtcttacattttcatccaaatttttaaaatcgaaattcaaaaaaacaataaaccaactgtgcataattattttcccctattatccaattaacccaaataagtatcgcctcgcagaggggcttcatgaatggggtgaaatatgaaaaaatgatgctcgttgggccttgagcaagccattggaaatataagaaatttatgtgtgttaattggataataggggaaataattatgtacagttggtttattgtttttttttgaatttcgattctaaaaaattggataatgaataggttacacgaagccgcaaatgtcgggccgcaaatgtccgaaaatggcccttaagaaatgggccgcaaatgtccgggacgcaaatgtccgattttggcttgggccgcaaaattcagcaaaaaattgggccgcaaatgtccgaaaatg

SEQ ID NO: 110030 - DNA, 203 bp, Heterodera glycines
  unsure (1)..(203): unsure at all n locations
tcaattcttaaagttttcttttntaganaatcatatgtgaattttatntaaacgagttttttatttctaatgtaattttttcttttcatgtaaaatctaaagttgtttagaattatttattcaaactacctaatacaaagaatagattaaaataaatgtttttaaattttttaaaaattttattataaaggaaccattaaatg

SEQ ID NO: 110031 - DNA, 189 bp, Heterodera glycines
gaaattcgatgaatgaactttcgatcaacgaagacctccccagaaaagtgaactattaattttacaaaattaattatttatatttaattaaaaattcaaccaattaagaaaggctcatcaacttcagcttcacatccctctgatttgtccaccaatttgacaattcatgttgatgaacagtcacaaatg

SEQ ID NO: 110032 - DNA, 256 bp, Heterodera glycines
tatatgagaaatgtttttacgacagatgttcagaaaaactattaattaaaggaagtgaaagcagacagagaacatttcccatgcgttttgggcgacattaaaagtctgaaaatttttggtctttgaacatttatctgtttggatgaagcggcttttgccaaattaattttatacggaacaaattttgcattcggtttaattacccaagtttgagatcgcaaaaaacaacaaatttctttcctaattaatcgaaatg

SEQ ID NO: 110033 - DNA, 1003 bp, Heterodera glycines
atttttcaaccataatttttaaatgaactaacgaatcttttacattctcctcgccccaataaaatttgtattttcaaatcaacattaactatgatttgtttttaaattaaaatttttcacgattttgaacaaaaattgtaaaagtaatcgctttccatacaaatgatgattatttacaaaatggtgggtaacaatctttaaaaatcattttatgatcctcttttctgtaaaaataataattttcgtctgaccattctttgtccgtcagatgacactcgatgataaaatggcgttgataataagataatgaattaatgatcaacaggagaaaaatttatatatattaacgtttatttaattgcagtgcaaatggacaaatagcattttattttcgaagaaaatttttaatttaagtttttttttgttttcctaacataattcatcaaattttgacaatatttgattgctaaatttctaaatttaattatttgcaaagcttttttaactattaaaaatttattttattttttaaatatcatcttttattcgatattcttttaaatttccatttttttaaaatggcatgatcaaagattatttcttttaaattttttactaaaaataactgtgcgcttgcttagttgtatatttactgaacaaacatttttcacagcactcaaagaagcaatagcgcaaattttagtgcttaaagtaataattttaaatttaaaaatttattatatttaagaaaaaatctttttaaacggatttatttaaaatccctgcaaagatttttaaatttataatttatcacaatttccaaaaagaaaataagaaaaaccatttattttaagtttaatattataaaaaaaaaagattttcgttggataaagaaaaaaaaaagtttttctcagtgtcctaattgaatagagatgattaattgattaattaattaattttagctataataaattcactaataattttttgaactcctcccatg

SEQ ID NO: 110034 - DNA, 985 bp, Heterodera glycines
aaaagagttatacatgaaaattgcaaaaaaaaaaaaatcggaaattttgaaattttttcttaataaattttttacaggcaagaaaatctttccgcgttttgtagggctaatagagctcttaaaaagctatcgaatgttacaacaatgttggattttgttgacaaacaaaaaaaaagatatagaggaaaaacattctggggcccaaacgtggaggcccaactgacagagtccgcataattagtagaaaggcttttttattagggaaaaatgttgatgattttgtaactccgttaatttcttgaaaacgacttgaaattttacagaaaaacattgacatatggactaagtacaaagtcaagattgccatccgtcctttgttccaaggacgtcctttgtttcttcggctttcaattcggaatttttccgatggacactcttctggtttaaaagtgtggtatttaactttccgaccaaagatgactgacgaaaatggaatatgtcacattaatttgtaagcatgaaaatgagacaaatcagcggagcttaaagtacatgttaagagctgatgaaacttggcttcttctgttttttgacaacaaaacaaaaaagaaagaaagaaagaaaatgattcacataatgatactgtacattttacgatgacacctctttaatttaagaaaggctaaaatctgactccatagaatgttttattaagctgttttaaatcttgtccaaattacaaatattaagcaaattaaaaaatatggatactatattgatctgctgtaagttcccggcattttcaattgttatgctttaacttcccaatcttagaattcgttttttggaaaaaacaatttcacagatcgatttggcctcttaaacattttttcaccgtcctattttggcaaaagacataataattgatgaattggaaaatattctcattaattgcgtgacaattgagaaaccgaatagaaaaatg

SEQ ID NO: 110035 - DNA, 53 bp, Heterodera glycines
gaccggagcccatacgaaccatgtggaatgtttttaggaagaatctgaaaatg

SEQ ID NO: 110036 - DNA, 153 bp, Heterodera glycines
ttggagaaggaaataggacgtgaaacaggaccagcgcaactttctgacaaacaattgggtgaattagaaggtgaaaaaccgcaaaaggaacagctgcaagccactcccattgttgaacatggtgaaatatctacgatagaccaagagcgcatg

SEQ ID NO: 110037 - DNA, 154 bp, Heterodera glycines
aaaacgatatgatgaaatgactttaaaataattgaataggaaaaaatccaaaaatcattctttgtttttcatatttctttttcttattatatttaaatattctatctttctacatatcaaaatactttttggaacacaggtcgcatcagtaatg

SEQ ID NO: 110038 - DNA, 1003 bp, Heterodera glycines
gctcattcttatctctttgtgtcacgcactctttctttaaacactcactcattcattttgtctctctgattactactagtactaatcggtatttgatctttctctcttactctaatcatttattttacgattactcactcccactctgatcaacttctgatcacacactcgcactctggcattgagaataataaaaattttaattctttattagtttataagacctttcattttaatgtaaataagtgatacattattttctcagcaaataattggaccaaagacaatgataatcatatttttgatccgaaaaatgattaatatcataaatataaaattatttcaagaaattctggttgctaaattcggaaacaaaataaataaaagtaataggaaattttactttataaatctaacattatttaaaactgctaaaatcgcaagaatagattcaaatattagctttttttgtatgcggaatattaaaattgcattttaagtcaagttttaacgcgttttgcatgcattaatttaataaaattaataattggttttattttactagctgtgcaccaacaagttttggtatgtattgagaataataaaaattttaattctttattagtttataattttcattttaatataaataagtgatacattattttctcagcaaataattggaccaaagacaatgatagtcatatttttgatacgaaaaatgattaatatcataaatataaaattatttcaagaaattctggttgctaaattcggaaacaaaataaataaaagtaataggcaattttactttataaatgtaacattatttaaatctgtttaaattgcaagaatagattcaaatattagcttttttgtatgcggaatattaaaattgcattttaagtcaagttttaacgcgttttgaggtacaactgtgattagaagaggtacaacagtaaatagaagaggtacagcagagattagaagagttacaaaaatg

SEQ ID NO: 110039 - DNA, 647 bp, Heterodera glycines
ttttaaagaatttgaataaagaatgatttcgatttcttgctgggaatcatttggtggtgcgcaagtgggcgtggccaaagtgcacacatcgtacacccggtcattttcccgattcattttaaaaattttcatcttttttttttgcacatctgctgttttcctctccgccctcacttgtcctgtgctttatggggaccgtatcatttaattgtgattttgggaccgtataattaaattaatatttttgctgttaaccagggcggtagctataattacaaaaagctccgtttatcctggcagcaatttgccttttaaggcttgaggtcgttcgcttgacttgactaatttcccgagtcgtttaggtgccctgtcgtcttgtgcttcatgggtggcggtgtgctgctcttcaggccatagtttgtttatgttttttgaaatttttccatctccaaatgtttatttattcattcatcatttcacgccattttccatgccggcgctcgcatataaataccgagattttactcattcctcctcactccactctcagattaaaaaaatggaaccacgaaaacgatcctctaacttttccattgatcatattctctccgcgcccaaaaagccccgtcaaggcttcctgatcaatg

SEQ ID NO: 110040 - DNA, 1003 bp, Heterodera glycines
gccgggacttggaaaattgacccgggcgagaccccgggaccgggactcccgtttttccgggactcctggtcccaatttagggcccggggccccgctgggaccgggactttttcaaaatttttaaaattttgattaaaaattcgaaaattttttttataattttatattttagcttagaattatatcaagcctataaatcggcctcttctgcttttcaattatcatccaacaaaattaaatcagtatttgtagtccaacattgggatggccttgttcaaaaatatcaacatttctgcggttttcggctttaatctcgaacgtcgataatcataaacaggctaaattcatatttggactttccattttctttacattctcggcactccgccattttgccatcctttgatttttcaaatagacctatttcgagattgatgcattcatttctaaaaaattttattgattaaattttctaaattctttgggaaataaaggttcgggccataaagaattttcgaggttttacaaaatctaggtatgttgaattaaattctacaaattttcaaaaatctaaagtcatatcttgaaattttgaattaaagacatttcgccaaatgttattaaatttttcaaattttgggcagtttcgctggtgaaatttaagcccgttttagcccggtcaaaatgaccgggcccgggctcgggccgggcccccgggcccgtccggtctctaacagattcacaccaaaaaatgacaaagttttgccatttaaaaaaatatatgacgccaaaaatgtgttcgcgtcaaaaaactttcatttttaatttaattctcatctcaacttattagttttctttttaatgaatttgaaaatttggtagtgggatttctttattttctagctaatgagaaaatccctgaacctgctccagaaatcccgtttatttttataaatgttataaataattaaaacttttaagtaaatttagataacggaaaatg

SEQ ID NO: 110041 - DNA, 141 bp, Heterodera glycines
tctaaaaaaattcacaaaatgaatagctaataattcgccgattattgttggtaagtcatgctcgggtttgaagaaagtgtttagtgtgtcatcataatctacgataaacacatcagcagaacaatatgctttctcaaaatg

SEQ ID NO: 110042 - DNA, 93 bp, Heterodera glycines
agagtttcacaaccacactcatccatacaaagcaaaattaggtcaatgtcaacggcaactttcggagggacaagccaaaggaagggagcaatg

SEQ ID NO: 110043 - DNA, 921 bp, Heterodera glycines
ttttaaatccacggggatggagtccaatggcaaatgtactctcattttaacattctccggcggcgcctacttaaaaattcagcattttatgtaatatttgtctgtccgttttgttttgtgtgccgcttcaaaagcaatggctttgagaacaaatgactgaattacataatgaatattattggaagtgcctttaattaattgattgtttcctaaattacataacaattattcttttattggtcattaattttgcgcttttccattaatttttgtttattttttctctttttttgctcttcgccttttctgccgcttttcgttgatgagttggggttggggtgagctcatttccctcgtcctttcgtcacaaatgaacacagcaaagcgagacggaagagacaacacatcacaacacgcgaattattggacttgcgtgccgcttttctcaccgcgtcctccccccccccccccgtttttcccctttgctctccctttttttgcccctcctcccattttcccgtttctcgtttccgttctttttgcagttttttgcggtcggtcaatactttcctttcctcccctttctctccttccgtttttcctttcttttcgtttcattggctttgcctttggcttcacctccaacggctccccccacgatgcatttgcctcttttcgtaccttttcccgtccttttggacttacgtcggttggcccttcgccggaactttggcgcttcaaatgatggcaccaccatccatcaaactcaaatttccaaaaagagaaagaccaccacttcctgcccttttttattttgaaatattttgtccgtaaaataacctaccacactttcatgtttattttaagtaaacatggtttttcaacatttttagttttgttttcatttctttcggcaaaatg

SEQ ID NO: 110044 - DNA, 562 bp, Heterodera glycines
taagaaaagcggttcctccaaaattgggagatgaccatataaaaagtaaatagtaatatatttgaaatttgcatcaaacaacaattcgccaaataaacaaaaaaaacttttgttttatttttcctacataggtctcatttttttgcagtttaatctttaatcaagaaattccgttgtaaaaacaggctttcaatcgcttttaattttatttttatttccaaacatgcgcagtattgtcaatttatagaacattttcttctttgtttggatcgattttgtgcaataaatatgcattttggtgaaaaatgaaattttgattttttgttcgaattcgggtccggggttcggaattggttgaaatggatgtcggattcgtgatcagcgaccccgaaaaccccctaaaacctgtttttaagcacttttaaaaattttaattttttttttgaaaaaggggggggataaactttactattacccccctttttggtagaggtgaaattttgcatatttttttacatgtcttatttaatttttgtcctttttgttaagtttctgtcatatg

SEQ ID NO: 110045 - DNA, 655 bp, Heterodera glycines
ttttagaccttatcatgaacaaagaataatgaaggtaactatgtgtctatgtaagcaagactatgtgaacttaagcctaagatttcacgaccgactaacgaatcagtgtgagtcagtcggaggaagaaaatatttttagttggcattttgtacgtgttaaattagtcacatccatatcaaatcgttctattgtaattggcccgagaaaagaacgtatttacatagacattaattagcaccttttataaattatctctctttaattgtaggtcaaatattcacatttaattaaaaaagatatggcactctctctattccttctgttggtcggaacaatcattgctaattgcaatggtgacccaaagatgaaatctgttgaagagaaaagtgtgccgcctgccgccttttggccttacattttgcatccaaaaacacctcggcataaatcagagtgggtttttaaatattatgccattttgagttttgacaccaaatatttgtatgtgtcagggataccattccaaggccccaaaaatttttgcaaatcggaattccgagggtcaaaaattttcgaaatcggaattccatgccatccctggaatatgttattcacaatataataattaaatttttaaattttccgacggcaccaatg

SEQ ID NO: 110046 - DNA, 601 bp, Heterodera glycines
tcctttctctattaatctttatattttttaattttctgtttcttttcctctatgaaaacaaaacaaggcacaaaatgtcatcataaaaatgacctaaataggtttagaatcacattttaacattttaaaaattaatttttgctagttttaggagtacattttctaaaaaagttttttaatttttttagaagaaatttctataaatttgcaaaaattctcagaatacgtatgtaaaaaatgaaaaatttgccgaaatttttgatttttttttaaggaattttaaaaattcccgtaaaaaatcctcaaaatatgtaccaaatatgtataaaatcccgaaatatgtaaataaaagtcccgatttttgtacgcaaacacagaaaagaaagtgtttttcctactatttagagcatggggaatcaaggaaaaaaatatgtatttacattaaattgacatccctagtgattttcgttaaaaaagattgttttccgctttgtttctcattatataaaaataaagtttccaacgcaattacctaattattctgctatatatttgtgtgactcgaaattcaacagcaaattgtgctaattgccaaaaaatg

SEQ ID NO: 110047 - DNA, 778 bp, Heterodera glycines
tcagcataagtcgtaatgctacgctaaataaaaacaaatgtgctaaattatagccacacattaagcggaggggggggggggagcacgcttattccagccacggaaagggacaactgggcaacacgaactaggaatgtgggtgatgtcattaactaaacctagatgaaaaaaataatttaaatccaaatttcttcgagtttttttcaaaaaggacggaaaacctttcaactatcttaaaagggataatcatgaagaatggttcacccatattttcatttactattttggaataaaaacttcatttaactttttataagtaagtttatttttcaaaaatcttaatagaaaaattttttaaactcatattaactttttataagtaagtttatttttcaaaaatattaatagaaaattttcctaatcttttacgtcagttattgacatgataatacggagcactcgcccattccggcttcttctcaaacgctggattaaaaaattgacctaggtaaatcttttttgtcttttttttcaaaaattgttagtgaaaataaaaaatcaataagaaagatatatggtccgctttaaaatgtgctattaaattctttcccaagtcgattttttttattataaatttttaaattgattaagtcaagaaaattatcacgtaaaattgtttcggactttttaaaaactatttttgtataaaaaggatttattttttatgatatgattttcaattagtacataggttttgaagaagaatttccaggaaatg

SEQ ID NO: 110048 - DNA, 87 bp, Heterodera glycines
tttttcagcgtccgtgatagagctttcggatgcagctcaagctggaagcgaccacggttcaaatagtgcacgtgtgcagcgagaatg

SEQ ID NO: 110049 - DNA, 142 bp, Heterodera glycines
atttttatatatgaccatttaatccaaaatattcactttttgccattgcttaaagtcgaaaattaaaaaaataaattttgtttcattttccttaaattttagtcagaaaactaaacaggtttattaagcgattttcttaatg

SEQ ID NO: 110050 - DNA, 442 bp, Heterodera glycines
attttaattgaccttaactttttctagaagtgtcataattaaaatacttggtaaatcattcgacagctctaaaagtcctctattagactactaccaaatttcaaaaattttgttgcgtttcaaaaaagttatggtcaaaaaagtttcaaacccgtttttgaagtttacaggcataatttttttgaaacaacacagaaattttttaaattttgtacactaatagaggactcttagagctatcgaatagttattccattaaatttgccaaattattttatggtcgtgtcttttttcatggtcgtgtgaactgcaatagagcccaatcgtcgagcataacattagcagctaaacaatatatgccaatttgtcagtgagcgattggaaaaatgatgaaaatgacgacaacacggagccgaagtcgtcatcactgaccacaataatg

SEQ ID NO: 110051 - DNA, 132 bp, Heterodera glycines
gatcattttctgatcagaacatagcgtagattaaatttttggcccattttatgccaatttttttaattgtaaaatcaattaattttaatttttgcaaattctctgatcactttttacttctgatcagttatg

SEQ ID NO: 110052 - DNA, 1003 bp, Heterodera glycines
aatgctaaaataataataaaataatgtaaataaaaatactttcacgattgattaaaattccagtcctactgatcacaaaaactgatatttttattaattttacatttttaaactgggcttaatttaccagtgaaattaattaaattccggcaacgccggtcttcagatcccacttacacagggatgggcgcaaggcgcaattacgcattttggaaatgatggcgtttttggacactgagattaaggattacggaaatgagggcgttttaatttcttgaaagcttcttggtaaaccacacaggcttttcaactgaattcagcggccaaaaactagagcacgaaattttgaaaaaaacaggacccggaaacccaagatgaacccgggcaggattccagattaaaagggcttaacagtttttttaaataaagaaaaacaggagccagactagggtctgggaaaatcctgtacaagatcatgccctgtctgggctctaataatgcatatcctcaataatgatttaatattttatacttgagtttttaaataaatttaaaattataaaaatggtaaaataattttttattttcaaaaagtacaaaaagcaaatcaacaaatatcgtaagaaaaaggcgatcaaagaatatctctttaattttcagttcttcttaattacttctccaaattgtttcttccaaataaaaacggttcgttgattaattttcaatattttgcaattttctcgtcactaataaaaaaataattaaaatatcttactttttgtgatcagtaggattgaatttttaattatttaccttattattataatattattaaatgtgagaaataagtagagagaaaaaaatcagtatacaatttaatgagtgttgtaataatgtcaatatttccacataaaatgtttaagaatttataagagaaaaataagaaattcatttgagaaattatatttaaataaatattcattttagaaaaaattcagcaatg

SEQ ID NO: 110053 - DNA, 70 bp, Heterodera glycines
aataggcttacatgacccaatcgtattgccgcttcgaccgccagaacaaaacagctgtgacacgctgatg

SEQ ID NO: 110054 - DNA, 256 bp, Heterodera glycines
  unsure (1)..(256): unsure at all n locations
cagaaaatnttttgaaaaaataaataaatgtcaagttctctccctttgtcagacagcagcattttcgcaccagcagaacggcgtgagaaaagttaattggcaaagaaatgggtgaacaaaaataaaaattataattatgatacgtatttattagttacaaaaattcacgagttggaagaaaataatttttgagaattatgatagatgcaatttttctttctctgtttttttagttcattattccttttttcagatg

SEQ ID NO: 110055 - DNA, 1003 bp, Heterodera glycines
aaataattttattttcatattatttataaaattataggaatcttgtataaatatttaaactaaatttaaaataacaagcaaataaggaataaataaatcgcactgtcagcgaatgtgaccacttattcatttagatgtgtgtccactcagcctctagtgaaatcacttgaaaaactataaaaaataaaaattaaattatactataaataccctggattaaaattggaaaaattttagtttccagataatttataaatcagttaaaaaaagataaataaaaaaaattaaactttttatcaaaatattgatttaaaaaggtattaaataattccttataaaaattttaaatatttttctttttttaaactataaattatatggatcaacatatttttttttttggaaaaagcgcgcctcaaaaaagcgttttattgatttttaaatttggaataaaattttaaaaaatgatttttgctttatgattttaactattaaaaagttgtagaaaaaatttcgcatttcgcattttcgcatattttagcttttcgcatttcgcttttttttgatttcgcatttttcagtttcgcgaatttcgcttttcgcatttagctttttatttttcaatttggcccatccctgctgtttagccgttttctctatctatcgtccatcggcctttgctttggctgtttagcctttttctctgttttccttttcctctgatctcaacggagattaaggctgctaagccgtttgcttacaaaactttgcttgactgtacactctcgcccccagggatggacgaaatttcgtttcgttttcgtttcgtcctacattttcggcactttttgagtttcgttttcgtgtttcgttttcgtctaccaaagttttttcgtttcgtgtttcgttttcggtttttaattttggattttcgtttcgtgttttgttttcgtcagagcaaaattggacgaaaaagacgaaaatatttacacccttaagaatg

SEQ ID NO: 110056 - DNA, 101 bp, Heterodera glycines
tgtattggtcttcttcgttgggcaactttccggtggtcacaaaatcgcttcttttgccgatgtatgtgcagagttccaattttggtccgcattccaaaatg

SEQ ID NO: 110057 - DNA, 831 bp, Heterodera glycines
cttccccggggggaaaaaagggggtttgaaaaattttattgggaaaaaaagtctttacaaaaaataatccccctgggagaaggggagggggaaacatgatttcaaaatttttcaattttttttagttttatttacccaaaccggttcagaattctataaaaaaaaacatttcggggtgggaaaaaagggggtttgaaaagtttatgggggaaaaaaaagactttacaaaataatacccctggaagaggggagtgggaaacatgatttcaaaattttcaattttttttagtctaatctactcaaaacggttcagaattcaataaaaataacattcacggtgcgaaaaatggggtttgacaagtttattggggaaaaaaagactttacaaaataatacccctgggagaagggagtgggaaacatgatttcaaaattttcaattttttctagtctaatctactcaaaacggttcagaattcaataaaaataacattcacggtgcgaaaaatggggtttgacaagtttattggggaaaaaagactttacaaaataatacccctgggagaagggagtgggaaacatgatttcaaaattttcaattttttctagtctaatctactcaaaccggttcagaattcaataaaaataacattcacggtgcgaaaaatggggtttgaaaagtttatttggaaaaaaagactttacaaaataatacccctgggagaagggagtgggaaacatgatttcaaaattttcaattttttctagtctaatctactcaaaacggctcagaattcaataaagatgctatgcacgcagcgatacgaaaatg

SEQ ID NO: 110058 - DNA, 201 bp, Heterodera glycines
cgattaaaaaattttaaataatttttttcgaaaaccgctttattttttgtatttcacttaaatttagaaatcaaaaaaatttttggtttaaaagccaatattttgatttcattgttttttaggaagtgattttttcctctatttctgatcccgaatcccattcttcaaagcaacccgtcccactctcgaccgtctaacatg

SEQ ID NO: 110059 - DNA, 285 bp, Heterodera glycines
ttgatggatcattcgatgggcaaaggtcggtctttgggtcaaaacaattgtcatttctcgatggcgaatgaggacttccaaattccatgcgcgttttaactgtttcaatggactgactcttagcaccactgacccgtttttatggtggaaaatttttatggaaaaatcacttttcgtttctccgatcaccaaaaatatttcttcccttttcttgcacaaatttcttcgattttcctttaattgccttacaaagtcacttttccttcacctaacagtgtggaaatg

SEQ ID NO: 110060 - DNA, 307 bp, Heterodera glycines
tttcgaccaattcggaacccggagccgaaattcgaacaaaaaatcgaaaataaaaaatttcaaaattctctttttgtttctaaaatagattaaaacaaccaaaacgtttttgcgccgacgttttggcgccatgtagggaggaggtagaaatgatgaaatcgttataatttttctgacgaagtctatcaaagagccggatttaattcttcattctctttttcgctttggcttatgttctcttaattttgtatttaggtaatgaatcgtcaaattgatacgaaaaaacaaaagcctaaaataacgcatg

SEQ ID NO: 110061 - DNA, 164 bp, Heterodera glycines
ttcctaagccagatgaacaggtccaatttgtgctttgacttctttacacattaaatttccattttattgtttttaatacctcatcacttcttttagagtcgagttcagaccacacaatcgcttccccaacactcagtccggtcgtagccattgagccagcgatg

SEQ ID NO: 110062 - DNA, 147 bp, Heterodera glycines
aaaataaagcttcaaatcccctttttaataaattataatcattataataattaatttaattaaatcattttaaataaacaaaataattattggagggaattaagtgaattattaaaaaaaacaaaaatatctttttttctagaaatg

SEQ ID NO: 110063 - DNA, 126 bp, Heterodera glycines
gacgtggagccgaaatagtcgctatggccaataagcgccagcggcaaatttgtccttgtgtctttatagacataagtgcaaatgtgggcccatgacgacccttaagggctcatggtcccaaaaatg

SEQ ID NO: 110064 - DNA, 121 bp, Heterodera glycines
atcaagccaaaattttttgtttcaccagtattattttacaaaattttcagcaccgggcaaaaaagcaggaaatttttgcagttttcgccaaaaaaagagatcaaaatttaaaaaaataatg

SEQ ID NO: 110065 - DNA, 117 bp, Heterodera glycines
agtttgggcgaaccgaggttggaaaaagttggtaaattagtgggttccttttcgggccacaaattgaagttgttgggaagtttcaaatgtgacgttctgttcagaggagtcacaatg

SEQ ID NO: 110066 - DNA, 265 bp, Heterodera glycines
  unsure (1)..(265): unsure at all n locations
gatgaaataatgcaccaaatgaaatttttgtgcttttatatatgaattatccgaaaaatttgactcttccgactaacaaaatttgctatttaaggctcacacattttgcttttccacgttcattccgttcattcattccatccacttaattattcgtcctcctccaccgccacttaaatcgtcagtttatttaggtaattaattgttttgttatgtgcattttcattgtgctaattccccccccnccccccattttcagcgaatg

SEQ ID NO: 110067 - DNA, 630 bp, Heterodera glycines
caattccagtacaaatttttaaaaaactactcataacttttgtcaaagtcaaccaaattaaacattcttggaaacattcgatagcctatgggttctctattagctcactttaattttaaaaaatttggtcaagtttgagcaaagttatgggtaaaagtagtcaaagaaccagtttttcagacatttttggtcataacttttttgaaattgaacgaaataattttcaaaatttatcaattttcttgtctttcatcaaaatcccgcaaaaattggggcaaattaatgttgcatttgtcgttttctttttgaacctctgaattcgttctgccacttgccacttttatggtaattgtctcattttactgttttattaatcacatttaccatttttaattattgccatcgtttggaaactattcattttaatcagcagcggctctcacttaatttgttaaccgtttcacttaaagattctttaaatcgcatttcaatcaaatttttgaagaagttatattcaatttttgcttcattttctttgttttattaaaagtaaattatgttcacgccatttattaatacataacacataaaacttgaaaaaacgcatcaaaaccaatttgttaaaaaatg

SEQ ID NO: 110068 - DNA, 91 bp, Heterodera glycines
aaatgtaattttattagagaattgaaatacccgcgcctttgacgaaaatggtggcggcgatttggatggcattgtgccggtgccgccgatg

SEQ ID NO: 110069 - DNA, 520 bp, Heterodera glycines
tcgtctgagtcttgaggttccctctcctcctttttgtctcctgattcttgagttttcaaattttacagccgaatataagtctcgatcttctattagaaattatgattcatttaatttatatttcttgccagagttttggtataggttttgcctcgcttgattcatcacatttacccatgtttcttgggtttttaaatttgaaactgtctaaacaggagctccgggctcattgaagttatgatgattttttggaatctaagcaatgaaacagcactaattacccagcgttcttgatacagacaaaatctttgtgacaattatgggcagatgatttggtttgttaatgaattcagggcccataatcttagtttcgtgagcactcagaagtttcggggcccatttataaaaaaaaattcaattaaaacccaattaagaatccattgtttttctacttatcgaaaaacctccgctcggtgccggtggtggtccaccgccgccaccgcctgcgcaattaacgatg

SEQ ID NO: 110070 - DNA, 1003 bp, Heterodera glycines
ggaacgtctaaaaatatctaatttataataagaatgtattttaaaaccatttaagcattttttgaaaacttgaaaaaacatcggtcagttaaataatagatttaatcacaccaaaaaaatattattttaatatgtacttgtaaaaaaaaaagttgaaaaaattttgaaacggattttcaattttttataggaattaatagtttttcgaaaacatttagaaaaaatcgctgaaaattttttcaaaaatttaatcttgaaattttcgtaaaaaactttttgattttttttttttgcacttttttcaaaaaactttttgagaatgtgtgagggaaccgctaggcgccgccggaaaaaatttgtaatttttaatgcgatttcttaacgattttgttcaaaaaatgacaaaattttacgattttgagccaatttaaaaaaaaaaatttcccatcccctggaactttttacggtacctacccctgtatttacggtatttcgtcactaaaaatgtcaatgaaatggaatgttttagaacataaaaatattatatttttgatcaccgttttttcaacactgatcacaataatgccgaacaatttacatattaataccaaaaagaaacatttaattgtccatcacatctttcgctgattaatactttaagctccaatcatattactttttttcaatttttgcataaaagcattttccctctcccattttttaggtcatcattttgctcaacagcccaagccaaaaaaaaaagaagagattattataaatttctaaaaagtattctaattgatgggtcataattttgcccaaattacttttttgccgtcaaatgccagcccataaatagaggggagattcagcgcaaaagatcaaatgttcattcattcatttacatgcgaagatgaattttatttccaattttcatattttttttatttaaaaattttaatttgtagccagtccaattaataccttattaattcgaaaaatg

SEQ ID NO: 110071 - DNA, 704 bp, Heterodera glycines
taatcggggttaagattattggactggagtcccggcttttggctccgttcgcgctccatcgtcaattcccgaaaattctggcctctctctcttctttacacccattttttgcctcattttcttgagaaatcgtaaagggaggaaccgacaatgccgacatgcaccacataatgggaaattaaaaagttttcttcaatttcttacaatgactcgaaaccgatcgaatttttgcctcatttttcttttttttttgtttacaaaaatcagaattatttttattttcggtaatttatgtaaatgattttttccatttatttttttattcgttttcattgcatttttttttgcttattcaacaaaaactgctaaatttgcgttcgtttttcccatttcttttcattgatcggcaaaataatttttttataactttaaattaatctttttattctttgaagagtacggctctgctggtctctttctatggcaatttaatctcttttttcgtacttttaaatttgtcctatggtaaattgtcgcattgcctaccgtaagaaattcttttaatttttttgttttttttaaatttttccttaaattttaaaagtttttatctgacgaatatcattgacggagtgcaagagataaaaatttgcgcatctgaacagtgcccaacgggacggataaagccaagaaaaaggcctatg

SEQ ID NO: 110072 - DNA, 748 bp, Heterodera glycines
acgccacccattagcacattatgcgggttagggggcgcgttcgtaaaatccgccagcaatttttttcactaaacatggtataactttgcttaaaagcaaccaaattttacattcttggtaccattcgatagctaagctttttctctattttgtttgcaaaatttcaaacaaaattatcaaatttaaactaagttatggtagaaatagtacttattttcatacaactttttctaaagatgaccaatttttttaatttggcaggctaatagagaaaaagctgggctatcgaatgatactaagaatgtaaaatttggttgattttaagcaaagttatgacatgttttgtcgaaaaattcgctaaaatggcggattttacgaaacgtcccagcacacattatgccagtaccgtaacaaaaactgcgcaaatgccaatgaccggagattccctctgctcataatgcttggacaataccgtggccaaaactgtaacagaaaaattaatgcgcggagaatggttcggtaccgtattttacccctttcgacagtcattggtacgataatggtgcgaaaatactgtagaaaaagtgaatcaaatttaaattatttcttcaaccataacggcgatttcgtggccaaagacgagccaacggaagtgatcaatgtaaaaaatgcccgtgaaagcgtagcaaatttgggtgggaatgcgagtgatggcaatctgaaaattgtgcaacaaaatgccaaaatg

SEQ ID NO: 110073 - DNA, 1003 bp, Heterodera glycines
  unsure (1)..(1003): unsure at all n locations
agcagggacagcgtggagccacccaaacatagcaatttgtgctgctcacccagcgcattgtaatcggcactctgtgcgaattttgagggaattgcaccaacggcatggggaaaaggaaaagccatagaattttacaatactatgatcactgattctgatcagtgatcattaaacattagcctaaatgcataagcaatcactaatcagtgatcacaaagggcaaggctgatcacaaactgatcaaactaattggcataattaccaaatcagttgcacgacaaatcattaaactgtctgtccattgtctgtcacctgaatggtcagtgatgagagaacggcggtgtaaagagaacgccaaaagctttcgggaattgcatttgtaaagagaagggcgctgaacagaagcagccaaagggagtgaaggccgagcagaagcaaagtgagaagcaaatggcgatgagccaacggacggnccaactgaaaaatgggcggngggaattttgatcaaaaaagtacgtctgggaagacggtatttacggtaatgagagtttgtgattacggtaatgagtaagcaccttttgctcaacaaaatggagcccaattcggcaaaggtcgatcagtcggtgggagacgacgagcaaagtgacgacgaaaaagggcacacccaacagacaataaaagagggcgaaaagctaatcaaaatagatgggatcaatttaaaaggatttcgacgatgcgattctctggtaatcccaactcccccctcccatccctttgccatttcccccgtccttcccaaagtgccaattccctccctcccccctttggcatcactcccatttacaaccacccctttttttactttcccacggcttcctcccaattttcacctccctgccccattaattaattaattgttcgtccatttgtcccacttgtcctccccgtgttttcggtgcccggtggccgtgtccgatggtcgtcagcagtccccacgcgtatg

SEQ ID NO: 110074 - DNA, 591 bp, Heterodera glycines
tctgtaaaaaaaagaaaatgtttttttaaacgaatattgcaattaaaattaatgggttacaccaccaaaagttcgccgccgaaattttctttatagaaacttagaaaatttccaagaaaaaaaaattcaaaaattaacagcgatttttttgtgttaatggcaactcgtagtacacaagcaactcttacaataaaaaatttcaaaaagcctaaatttaagcctaaggctaagcaagttttcaaaaaattttttttcatcgaaatttaaaaattgtgcccatttttttgcagtcggctcgatggccttcagcatcgattgttgttgatttttgaatcacgcggcgtattgacgacaaattgtttttgccaatggtccacacaatcaatcgcaaaaagttcaaatggcaggcgacaaaatatttggcatttacagcacttcgtccatccaatggacaaagtgtcgaaggatgacagctgaacaaaattttaatgatgttggaaaatcttacaatttgaatttcctttttaaattaataattcatataaaatcttgaaaaaatcgctaaaaaatgggtgccgaaaccgaaaaatg

SEQ ID NO: 110075 - DNA, 85 bp, Heterodera glycines
gcatgagctcagccgaaatgagcttctacactacctcagttacggacgactgggaacgaatttgttcgagacttattttgtgatg

SEQ ID NO: 110076 - DNA, 106 bp, Heterodera glycines
ttttaaattgtggcacattggccaacgaatttgtgtggtagggcataacaattaatgcagaatatgacatttaatctattaatttgatgagattgtgtacaaaatg

SEQ ID NO: 110077 - DNA, 374 bp, Heterodera glycines
tccgcgtttgctgtgtgcgttgaggttgaaatgcgcggcagagcgttgttgatcactgtaaaaggggaaaaaaattaatgatgtgcaaatggagggggtgaggggaaaacgggcgatggtgaagaaggcgcacctcagtaattaggcgcgaggcgtgtcgaaaataataggcgtgaattgaaggaaatggaataagtgagaattttgggcattttccgtccttttatatcaatttttttccaaattccttccagcagaattggatccgtataaaaggggtcgtctttccctccgcttcacatttcttcttcttcttcttcttcttcaccacactccaaccaacgaaccgcttcagtgcgcaacgcaacgcaatg

SEQ ID NO: 110078 - DNA, 960 bp, Heterodera glycines
  unsure (1)..(960): unsure at all n locations
ccaaaattgctccatttggcgcttgagtaaaaaaaaaataatattaaaaacctaaaaatcgcattcttaattatgaaacaatgtttttagtccatattcggacatttccgggcttttttagtcagtattttgggcttttttattccatataatttacaaccctaatgatcaattaattctgagctgggatgatcacatggtcatcaagatcaagatgctgctgctgctaatttgatgataacaaaatgaaggaacactggtgatcaaaaaaacaaaaagcacaaagcctgttcaatttcccatatttgtttttttttttaatttgcttcgccaaccgccgccgtcgccgccgcaatttttgcgataatccgccgccggcgccgcgccacacacgcggaagtaaaaagcgtttaacacaaacgcatatgttgtgtgtgtgtgatgcgcagttaatatgtatatactattaaatcaacgcgctaattagccattcattaattgaaaaaaaaaaataattatggaatgcggcggcgaaaacagttagaaaaaggggtaatttttggcgcgtcaggaccagtcagcttgggataagtcagttgatggatagataactaagccttacgataaattacaaaaattacaaaaataattaaataaataaaacattttaccattttttaacagattttcattaaaaatagtaattttatgatttctgggaaaatttagcaattttttttttcaaaattgaatgagngggggaggtcttggacgtgcggtgctaataaggaaaatcgaaaacagtttcaacagcatttttcccttaaaaattacgctgcccgcgcacgccgtgaatttttcttttttgttggcaaataaaatcattttggcttaattaattacctaattanattaattcatccattctttaattatcttacacacagtttataaaaaatg

SEQ ID NO: 110079 - DNA, 637 bp, Heterodera glycines
gaccaagtgatggaagtcgaaaatacgatcattgattttttaataataatgataagttcgataattataatgataaattcggtatttcaatatttgtaatgataatttcgataattataatgataatttcgatattaattgtatgcagctaattgataaatgttttttttataagatcttttttatttggtcatctcgcaacttctcgcccctaatctccattacctcccaaaccccctaaaaaaaaaaggcaaaattttgttttgtttgcatagcaacaaaaaatgccgagcgcggaagcaatttgaccttttgctcattccttacttgatttaacggctccgcactgcaagggatgtgcttattcattgccttgttggggtaattggcggtaacctaaaagaaattgcccttccaacagttcaagcactttaatcgtcccaatattcccccccccctaaatgcacaacggagaaatatgagatgtggcgtaaaatgttatggactgttggtgggcgggattaagatcttcatttattctgtgagccccttttggcatcttcctttttccctttttttttacctgctttatattttttattttttttttagcaataaaattaattctgaaaacatg

SEQ ID NO: 110080 - DNA, 318 bp, Heterodera glycines
aacacattggacaagcagcagcttcaacagaagaagctttttccgccgcatgagtcacgacaaccggacgtcatgctcggaatggacgtctggcatgacttgcacgttcagccaattgaacaattgcagagtggatttacgatttgtcagtcgaaaattggcaaaatcatcagcggcaatggacgaattgaactcagtcaaccgtcaaatgtgacattcgtcctcacggtcacagactaaaatgtcttcacaacggaagaagacttgaaggccaacgaaaaactcaacaagttctacggcctcaacatcattggcatg

SEQ ID NO: 110081 - DNA, 382 bp, Heterodera glycines
ttcctcctaaattgggggggggggcaaatgtcttggttttgttggaataaattgagaaatttgaggagaatgggagtggcgggtgcgggttttgtgctgattttggtggttggcacgacagcgtcggatgggcaagggaagggattggtggtggacggaggggtggagtgggggcactctccggaaggaagtgagggcaaagccaacttagccaagcgggaaacggattttattccgtttgttcttcaaaaaacgaatttgacattttataaaatttgcgattgtttgcatgaaataatggaaatgaaagtgaaagaaaaataatggaaaaatatttaatgggatcaacagaatgatgagacaaaaagcattttgacagatg

SEQ ID NO: 110082 - DNA, 252 bp, Heterodera glycines
catcacaaatgggaaaatgccataactgttcatctcagccctcttagcttttgcattctatgtaaacagctgtttgtcttgtcaggagttggaccgctacggagtctttttgggatgttgcaattcatattaccaccgtgactgctggtagaaataaattaatgaatcgaaaatattcccttttaaaggtacaatagtaatagagacgaatgactgaccaatacacaacaaacaattgactcaatgttaatg

SEQ ID NO: 110083 - DNA, 391 bp, Heterodera glycines
agggcacaaatggaggagggacataaagcctaatgggggagggaggaaaagcagataagccagcgaatgggtaataaagccagatgggtggaaaaaagggagtgaaggagtggataaagcataaagaaaaattgaggaaaagccaaacagagggaggaaacgcggataattcaaggaatgggtaataaagccaaatgaggaaagaaaatagtggcgaagaagtggataaagcataaaaccaaacgagaaaggaaaagcggataaagcaaaaaaaaaaaagggagaaatgaggaaaaacggacaacaccaaaagaggacgaaaagtagaaaaatggaaaaagaaaaaatgggctgccaaaacaaattcttccgcttccaggcacttcacatg

SEQ ID NO: 110084 - DNA, 534 bp, Heterodera glycines
taattaatactgttgttctcttatacctaaaaataaattttgaactcatagcggcggtaatataaaagagaaaagcaattcagtaattaggtacctaaacgattttgctcaaactttgtcggaaaactgtggctaggtgatgccaaaataaaatataaacataatgccaacaaaataaattttaaaaattccggttttcgttcggcttattcatttatttgttagctcttgacctaaaaccatcacggtttctttcttaattaatgcttttcgtgtctttttcatatgctttaaattcgattagattggttgactgctaatgactcattttctctttatttttactgcctttaagatcttaaattatttcatgacaatttccgaaaggattaattcctttggtgctaattcgttgcttctccccgtcgttttatggggtccaaaagcgccgaagagccgaattgtgcgcatttcatcggtccaaaatgggcggattattttaacgggtagcattgatggtcaagtgatgcaatg

SEQ ID NO: 110085 - DNA, 531 bp, Heterodera glycines
agaaaacaagagaattctaacattccaagaaagtaacaaacgaaaataatcagcaattacttaattaatcaaatcttttttggtaattgcctgaacgctgcgattttatatattttagcttcgtagattttgtgctttcgaatgataccaaaaagatagggtttgttcgaacatgaacaaagttattgtataaaaacccaggattgtcaatcgattggactcataaaatacttttggactcataaaagtcgattggactcataaagtgcattagagccgaaaaatcttagtaattcaccataaaaatttctcgaaaatttttttcttggaattttcttatgaaaaaactctaagattttttttaaaaaaaaatttcggggggaaacgatgcggggaggggggggggaatgaagtgcaccctcctgatacttcgccacctcttctatatcccttttcctcattttatccccctgtttccccccaacagcgctgtcctcatcatccacctcttctgcctcgttggccagcatg

SEQ ID NO: 110086 - DNA, 416 bp, Heterodera glycines
tttaatcgattcaacgcaacataccgtaattaaaatgataagggtgaattatttggaatcattaggtgcgtgatcgcaaggaacaaatcaagcagagagccgcaaatcatgcagatgctcccagaaatattaattttttaaaatgacgctcgttgggccttgagcaagccattggaaataaaaaatttatttttgtgtattaattgatgtattgaaaaagttaaatattatgatgaagagaataaaatatcttattcttaaattgataaaatctaatagtaatatttattcaaaattacataaaataaatttaaatgaaatgtagggcaaagccgcaaatgtcgggccgcaaatgtccgattttggcttgggccgcaaaattcagcaaaaaattgggccgcaagtgtccgaaaatg

SEQ ID NO: 110087 - DNA, 253 bp, Heterodera glycines
cctggaaaaatagaatttttttcctaaaaaagagatatgaaattattatttttaatggattatattcttattcacgcttttctaagaactttttgtcaaaaaaaaatcctaataaataataatattttggtatttaattgggggctttgtatatatttatttttacgtattctttatttaagcatttttaaagaattttttgaaaatccgaaaagaaattttaaatgctcaaagatcctgagccctaattatg

SEQ ID NO: 110088 - DNA, 192 bp, Heterodera glycines
ggtttttactcattccaattacgcatccaatgtcttttaggcgtccaatccgctagtaaagtttatttattgactgaaactgtatatatcaaactaaaacaaaaataggctgtaattccgattgagtcgtattggacgcacaagctagatattgtttttataattgaattttaattttatagttggacgatg

SEQ ID NO: 110089 - DNA, 146 bp, Heterodera glycines
ttttaagaatatttaagagcgacattaaaatttgtaatgcgaaaaatgaccacccataaatttaaaaaaccaaatctattgataaagcagctatttaattatcttctcatcataatcataaaataaaaaatttaatttttcagatg

SEQ ID NO: 110090 - DNA, 63 bp, Heterodera glycines
atcggtaaaattccttctgaggacaatgaagcacattccatttatttgttaggccttttaatg

SEQ ID NO: 110091 - DNA, 274 bp, Heterodera glycines
ttttggcgccgcacgctatatcttttgtcaaacagaatttattttttctaatattttgcaggctaataaagaatacttaggcctatttaatggtatcaaaattattttatttggttggataagaaaaaagttataacactttaaagttcgcggcgccaaaatggcccgcgccaaagtgaccccgacccatgcgccgaaggcgctaaccccgctagtaaaacacaaatgacaagcgtactaatttccaattaatctttttataagcatgaaaatg

SEQ ID NO: 110092 - DNA, 1003 bp, Heterodera glycines
actctttcatcaataatcataaataaaaaattaaattaggcgcagtcatttgggcatattattttgcgctctagcagcacaactaccccataaataataagtctacaaagatgcttcttgatggtaaataacgacgacagagcatgataagtcagaagatgtacacaatgtgggtaaataattagtgaaaattagcaaattaactattcattgcccccggcgtctctttcgccgcccattataaaagcgccactttcgctctcagcgacgacaaacgcgcatttttgcggtggccgcggagacggcggggaatgcgcggaatgaatcaatcattggagaaagttcggatcggcagatgagccgaaggatgggaggagtggtgaagagcagccctttgctgtgttcttcgctgatcagtgggatcaaaaatttacaaagaaaggaccaaaaatgggggaagagattcttttctccgatgcttttctcctcctcccgcctaatttgaggcgcttattattaatggaaaatgagctatttgtgcacaaaagaagcacagcaaaaagtctgtctgtgctggaggttccattgatgggaaaaaataatgtcggatcagatcagaacagcagaacgatggtcgaataatttggtggggggggcggctaatctaatgggaaattgttgcttaatcaacagatcgttgctaattgtataactctgatcaatatttaaaattgatgatgccattcgataatcataaatgattatcaattagcctgaatttcaaagaaatttattaaaattcaaaaacctatgagcagaagggttttaatttttgtccaattttttgaaacctaatctttttttttttgaaattttgcagccaaataatgaacccatgtttttgctaatgctaaatctatcgaataattcaagatctaattagttattatgaaaaattttaattataatagaatttagataaccacacaccaccataagaatg

SEQ ID NO: 110093 - DNA, 1003 bp, Heterodera glycines
ctagtttgcccccccatttttcaaaaaattcaaaaaagtgatataaaacattcttcctagggttttcggggtcgctgatcacgaatccgacatccatttcgaccaatttcgaaccccggacccaattcgaacaaaaaggaaaaaatatttttcaacaaaagtcacatttattgtccaaaattttgcgtacacatcccaaaattttaacatcctctgatgacatattttttaaaatttgggatgtgtaccaggggatggcacggaatcccgatttctgatttccgaaattggtaatactgtcgatggtaccccccccctttttgaaaaagttttttttttgttttcaaaagacataaaagcatgtttcctaggggttaaggggccgctgatcacgaatccgtcatctatttcgaccaatttcgaaccccggacctgaattcgaacaaaagttcgaaaattcaaatttttcgaactttgcatttttagttcaaaaccggttaaatacgcgtaataaaacaggaaattattaatatttgaataaaaaattatttaaaccattttgtatcaaaaatctgaaattcgaaaaattgaattttcgaacttttgttcgaattcaggtccggggttcgaaattggtcgaaatagatgccggattcgtgatcagcggcccctaaacccctaggaaacatgctttcatgtcttgaaaacaaaaaaaaactttttcaaaaaaggggggggggtaccatcgacagtattaccaagttcggtcctggaaaaaagcttgagccttaattacgtgtgatctttttccgagccgtaattcttctttattccattcgggcaattattttgcatttgtgcagaaactcttgttatttctcattgacaaattgtggattttctggcaattaatctgcaaaattttcagctaatccttcctttttcccctcttaaaacaaaaacggcgttatcaatttgcaccaagttttttcggcgcaccatg

SEQ ID NO: 110094 - DNA, 950 bp, Heterodera glycines
tcagcgcatcctctcggcccaacacctctttccctcattggtagcaccggatggttggtgttgtctgccctttcaggatgacaacgttactgaggatgggagcttcgaacaaaaggaaaatggtggaatgaatatgccgcgcggcgctctcacgagagctatatacggatccgataatttattttgagaaaaaccaaaaaggccaggccaaattaatttattttgagaaaaagaaaggccaaattaattcattatgagaaacaaagaaaggccaaactaatttattttgaaaacgcaaaaaaaaaaaaagaaaaaagaggcaaggcccaaattatttaacaacataaagaaaggccaacttcaaattttaagcatgtcttaggcaaaccaaattcaaatggaagcaaaatctaaatgttggcatgcaaatttacatattacgcccatattcatatgacattttaacgaaaatttttttttgcctttcaacggccattacaatcattcgctcgccattcctttctcaccgtaggcagtcataagagaaaaattttacataatcgctgttcacaatcataagcaagccaagcgaacaaaaagcattagcggcctacattaagcatttctcacgctttaaattttacaaatttgcgattatttctcgcttccgctcatttcttagcgccattagcgcttgatcagattaactgttgaaaggattaactgaaagggagaaagcaaataaaaaacagatgaaccatacatagccagccattcatttgcttcagcttactaacattaacaaaggctaaacatttaactaattgctctctcattcaagcaaatcaaagacattggacaacccagcgttcttctcacattcctcccaattttctttatttttcccaaatttttatctttttggcttttgagccacatatacgaaaatg

SEQ ID NO: 110095 - DNA, 176 bp, Heterodera glycines
aatctcttcgtgccgctggactttctttcctgactttgaatgtttttccgcttttggacgtgccccgctgtgttttgcttggcgctgctttccattgcatttcttatcttctccgagtttttcgctgttttcatagctctgccgactccaatcgtccgattggatggcgcctcatg

SEQ ID NO: 110096 - DNA, 914 bp, Heterodera glycines
agagttcgccgacattcatgcctttgtccaaaatcgggcctcaaacttaagttttttcaatccctgatcgcctaaacagctttaaaacaacttataatcctattaaattactaatttgtgagtattaaattcatgaatgtaacaattaaaattgtttaattttaatcgtaaatttaaaaaatttgacacaatttcttccattagataattcagctgataaagaaaaaaacatatgaaaataaattcttccgcaattaacccacttttctgtcattgttttgtactttaaaacaatcagcgaaatcgacgccatctctgaaatgtgtagcagagagctttcgcgcaaatctcacatttattctacaattttttgtatttaatttttatttcaacaaatttttaccaactttcaaaagtgtcgagaaaaaaattcttgaatcggttggataagatttttctcaagtcaaaccttttaagacttttttaaaatcaaccggattttttatatatattttgtattttgaattctttttgcgttttttcccgtatatattcgctatttttttaaaggcttttttaaggaaattttttgaaatgtccaaaaaatcaaaattttttcaaatatattttcatttttttttaatatattttgagattttgagattaattataaattcttgaacaaaaattcaaaagaatttttttgaaaaataatcctcctaaaaatcagtctcaaaataattttttaaataaataaattgttattttaagctgttttgttcctttttataatattttattccttattcacccttttctaataaattttgtccaaaaaagataatttaaaaaaattttatttacatatccagacatattaataacatttttttaaatttaagcgcactgacatg

SEQ ID NO: 110097 - DNA, 987 bp, Heterodera glycines
aaataataaaatatgtaagaatttgctatttgacatttgatttggttatgttttttgtcaaattgcaacgagtgggaattgaataatctaaatcctttatctatttattattttatagcttggatttcgaaattctcatatttaataaggtaaatattatacatttctatttatttctccaaaaaaaaaattgcattgctttcgaattttattatttttagaattatatctttagggattaactggctttttcaagaatttttgaataactatacaatcgataaacagtcattatagttatatgttctaattgcaatattttctatacactgacggaataaaattcacaatttaattttcaattaacttttatattgaataacaaatattcagaaaatgagacaaaaaataaaattataaaaaattaattaaaaataatttaatattttacatacttttttcgtcaaaatattaaaatatggtaatataagataattatcattgaaaatatatccacgaaaataaatcctgttcaataataaataaaaaatgtaattaaaaagacctaataaaaaataatattctaattttttcaatcaattataccaaataaaactatttacaaaattaattagttcaaaagaaactcattatttaataaatttattttttttataacttatattcacaaataattttttgtttttcaaaagctattttagaatgaataataatagacaatttaaataaaatttaaagatgaattaataatgaaaatacgcactgtcataataaattatttgtttaatttattttctagaaaggtcattttttctctattcatagccattttcgatgatctaattaaccgacgattttatcattcgaatcaaattaaattgcttctgagatgataaggattatcatataatttcagtttatgaataaaccctcaattattggtatgaacgatactttcctaacatg

SEQ ID NO: 110098 - DNA, 442 bp, Heterodera glycines
  unsure (1)..(442): unsure at all n locations
tgtggagggtatgtnttggacgnggcggaggacaatagcgccaaatcagttganaataatgaatcactatttcccagtaacaaccaaccanaaattaaatatttttggtggatttgattagtttagccttacgtgttcaatattgtttatttgccagtaaaattttgaaaaattttttattaaccaacaaaaagtttttttaacagattttcattagaaattgttaattcattaaccttgcctcaacttagggttaaggactttccaaggacgggtataattattattntaagtttttatcaaatttattatattttaataaaattttaaataaaaaaattgtttgtttatttttggatgatttcagacacgccaaaggggcaacggacgcgaagcggcactgctccggggaagtcgcgtcggctcgcacctgtcaacaatg

SEQ ID NO: 110099 - DNA, 119 bp, Heterodera glycines
ggtgcttctcatattatttttaatcaaattttgaaaaaaaaaattcatgaaattgttcggtccgtaaatttcagggcctcggttttttttctaaaatttttggtttttcaggtgccatg

SEQ ID NO: 110100 - DNA, 573 bp, Heterodera glycines
aattaaaaaaataataataaaatacaaaattatttaaaataatgctcaattcgcgctaaataatgaactatttctgtttttttgtctgcttctctcttttcgctctctctcttctgaaaattttttgacatttttaaaatgagtgatcgaaaaaatattttcttgccatttttcagggtgttttattaaaattcatcaaagaaatattaatgaaaaaaataagtacaatacgtatcatttcatttcatttattttctttttttttaatttctttcattgcatttgcaaaaatctttaaattattttcatttttgccaaaaactaataaaattttattgataaatggcatttatttgttatgtttatttaaaattcacatataaaatcccctccacaacaaaatccagtaaatttactagaacctccggaatttttaaattgccggtgccgggacttggaaaatggacccgggtgggatcctgggaccgggactcccgtttttccgggactcccggtcccggtggtttgtccaaaaataacgggaccgggaaaaattttcacatttagcaaatg

SEQ ID NO: 110101 - DNA, 1003 bp, Heterodera glycines
atggggggaaacgaaattatctacttatatatttcaaatattaaagctttttgattatcatgtgtgtgtattagggttgagcagtactggtacctgtaccggccggtaattacagggtttttttggtaccggtaccggttttttcaaaaatcaaagtaccggtaccggtttgtctagtaccggtaccgccggtaaaaatttgcactggtaagatttgtgagaacttaaatctttaaattgattttttattttaatttattagaatttttgatttcatattaaacggtaaaaaaattgaaatttttaaggagtttttattttaatttaaaattttattctgtaaaataaaaatttggaacttttaggttttagtttttttaattaattttattgtctgtcatttgaaataaaatattctaatttttttttttcattttaaacagcctagaaatcgaaaaagtaaccaaagatttggtcatttttttgtaaaaaacaacgtgaaaactgaataaaaattttgtatttgaaaaattttgtccaaaaatttttacgttggaaaattaccggtttttaccggtaccggtggaaaaatttggtaccggtaccggtttttgcattaccggtcagtaccggtaccggtggaaaaagttggtactggtaccggtttttgcattaccggtcagtagcggtaccggtggaaaaagttggtaccggtaccggtttttgcattaccggtcagtaccgtaccggttttttaaaaattaccgctcaactaaagtgtgtacacatgaatagaataaacaaaaaagaactacaaattttttgtgtctgtcgccaattttctcattggcgacgagaaggcgggtgccaacccgccacggcgtgcgcgagtgctcgcgttcaaccagggcacggacgggcagcgaatcgggaaagaacttgacacagacgaggaggaccgttacggggagtccgttttctcgggaccaagcacgagcacatg

SEQ ID NO: 110102 - DNA, 71 bp, Heterodera glycines
ggtgtgattggaagaaatggttttcattggctattgagataacaaaattcagttctccgctcgccaaaatg

SEQ ID NO: 110103 - DNA, 161 bp, Heterodera glycines
atcctttgcttcttccctttggctgtcagtgattgcagtgtccaccaccaaatcaaagcaatggataaaaccaaaagccccaaaagccccccccccactcatcgatcacttctcatgtgtcaatttccctttgctttccaatcacaccgcttaaagggatg

SEQ ID NO: 110104 - DNA, 197 bp, Heterodera glycines
gagaggtgttttttctctggcactctccctttattggttcatctctcgttttttgaaacgctgtctaagtgtataaatatgcaaaaatttgcagtcaatgcatcattattttcttcacttacaaattctgccttctgtgactgttgttcgcctcccctttgctcatctgtgacgacgacacttcgtgaacgaacatg

SEQ ID NO: 110105 - DNA, 715 bp, Heterodera glycines
agattttgtaaaatcactgattttatctttgatttttcatcaagtacttgatttttcaaaatttttaaaatcttctttacaagaatttgtggtgaaaaaatgttctaatcatgaatatgaactcagattttacaaaagccatcagtttgtctatgattttcatcaattttcacaaaagaataaactgctgccaagcgggctcgaaccccagaccccgtctcacatgacccgtaagggcttcgtaattaaatttcaaaaaatcgtaaaaaacaaaaaacaacttctccaaacattcaatagctcattcgaaagctctttttgagctctacaaattctgtatatgagttttttacgcccgattaatttttcttatttctatcgggaccgcaattctacacctttgtcgatatctgatattctatgatcctctcaatgtttacatcgatgaattttttgtggagctcgattctcttgtactaccgttttttcaaaataagaaaaaggctaaatctggatttaaccacaaaaaagacaaaaaattggcacattatacactttgaaaattgataacattaaaaaaatttccaacactcaaaaataaggacagtcttattgttagaagttagggtatttaaatttctgattcgggccatccaaccaatactaatcttggatttagttattacatttacaagccctgaatccagtgaaaatg

SEQ ID NO: 110106 - DNA, 396 bp, Heterodera glycines
atttagaatttctatttttataataattaattttgaatattccatgagagttaatccataaaaacattcaaatcccatttaatccaaaccaatttatatacagaaatttgtactcataacaattttttgtttcgatttttgatttttcgatttaaaaaattttctttttttatttttattccgtgccgaatttctttttcatttcttttgagaatatttcaggatgaagcaatttaacgtattttaggctcatttcgacgtcacagaagagcattttcacttttaaatgtggctttagtaattttactggcacttttggtcacggtttttgtaattactctcggatttatatttttccatgcgcgaatcaaccaattttttaatcgggcgccaatg

SEQ ID NO: 110107 - DNA, 478 bp, Heterodera glycines
tgcatcccgaccccgccccgaccccgaaccccgacatttttggccattttcggggtttaccccgacccgaacccggacgcttccaaccccgacgaccccgaacccctaccctaaccccgactcgggtcggggttaaatatacgtcaattagtcacgcgtttttccattatgaaatcaattagtgatggcatgaataaacttggcaattgtttagttatgagttaattaagaaaataacgctttttgtttttctattttccttcatgtcttttattcttttcacatgtaaacaaatcatttgaataaacaacgtttctctgaccttaaaaatattgatcatggaattgcatttgcatctttttaaaatgttttccacatttttaattatcaaaactttttctttgaaaatttgttttgttttttattgtcaaagttttttaataaaatattttttttaattaaaagcacataatcaatg

SEQ ID NO: 110108 - DNA, 505 bp, Heterodera glycines
attcttaatggtgtattttcagaaattttttcaattcttagggatgttttttttgaaaattttccaggttatttcttaggtgtgtattttcccgattttattccatttttaatggaattttccggaaaaaaatgccaaaaaaggcaccaaaatcgaaaaaaaaacgcctaaaaaggcatttaaggcacgaaaatcccgaaaaagacaaaaaaaaggcataataaaagtcaacgtagaagcctcaaagcaagtggaaaatgtgttagttatgcttaatatatcgaaactagtgagcagaaaaaaaggcttatgcctcaaaatgcggtctctaatcataatgtagattcaatcaattatatttttttcatttaacaataatatattttttaaatcctcctttcttctttgcgcagatgatatcgaaaagattgaagaggatttgcataatgaatatgatcagcaaataaaaccgaacacgtggtactcgaacgttgagcaacgaatg

SEQ ID NO: 110109 - DNA, 135 bp, Heterodera glycines
ttttacaatataattaactaattgaatttcaaaaaataaaattaaatttttattaaaaaatgaaaatgacaaacttagagaaagtgcataaaaagcgtcagcagaaagtgccaacacaaacaaaaatgccaaatg

SEQ ID NO: 110110 - DNA, 247 bp, Heterodera glycines
ctttcgtcactttgtcctggtcttcttttattatgtccttttatttgtatcttcccagcaaaatgatcactttcaggactttgtcaatggcataatgcatgatgtccttggaatcgaatcttaacttaagcctgatcgccgtcctaattctgtcactcggttgtgttaatgcctctaggtcgtctaagacccactgactgccttcaccaattgcgtattgaacttcgaaactatattcctcgtcatg

SEQ ID NO: 110111 - DNA, 1003 bp, Heterodera glycines
  unsure (1)..(1003): unsure at all n locations
tggctaatagtgggcgggtgggggggggggcaatttgtccccaatggagggttaattaaattctttaccatgccaaccccgcaaaatgctccttaaaattcccgcggcccacccacacctttcgcggggggctataaatttgcagacaatgttctcggtgatcaacatcatcatccatccattattgtcatntagggcatcgaattatatgcacatgtctgtcaattttggcatttttcaaaaaaaaaccctctcgattaaagcagctctttggaccctaatgagcgaacaattaaaaaaaaaaaatttaatttcatgtaattttctcaataatattagtaaaaaatttgcctttctaaaaaataggcaaaatataccaaaaaaaaagtccaaaaatgaaaaaaattcgattttttttatacacaatctcttatattaaaaatttttagctttatttttttattttcatctaaataatatcacaccaactattttcgatttttgtattttcttacattaacgaatttaaagtttggccgtcaatttggaaaatttatatgcatattttttactttttatatgcatatttggcaatttttcatgcatataattgtgtgtcctaattatcattatccatatttccggaggccaaaaaatagtgaattcgtaaagaaaaaatctgcccaacctggaagccagaatttcagacaaaaaaacgcaccgggaccaaccgaaatcctccgcaatactgaaccacccctggatatatttaggccatttcttttcaccttaccccctagaaaatttcaaaagcacaattttttggctacccaaccctcccagggatgtcatttattttacagcgcggaaccctatggaattttccggatttttttttggccggggggaggggaggcgagggtttggctagaaattcatcagcatccaacaaataaatttgcaaaaaaatcccgggccgcaggtatatatttttccaaaaatg

SEQ ID NO: 110112 - DNA, 654 bp, Heterodera glycines
cctgaaaatgttttaagatcaccgttttggtagctgatcagcagttttttgatcaaaaaataggccaaatgatcagcctgaccataacatcgtccgtaatcactaattaggaccgagccatacaaattacataggtcaatcaatcaatgtatgtatgacctaatgtaccggtcataagactaaagtggaaatttttgagaggttattaaagttagggggtgagagtgatgagtgagcatggtccagcataaagggaggggccaaaaaaatgacaaaaaatcttgcaaagtaaccaaatttttaattcttgataacagtcgatagctctaaatgttctctgttaggttgcaaaatttcaaaaaaattttaatgggagaggaactcaaaaaaccagctttttcgaaatttttcaacttaacgaaattttttgaaatttggcaggataatagagaaaatttaagtctataaaatgatattagggattaaaacggtaacttttttgtaaaattataagcaaacattttcatttggtggttttttgaggaataccaatttgatgtttttgagtaacgtcacaaaacgactgtcattcgaaacatttaaaaaaaaaatttattccataaacaaataatattatagaatgacgaggcgatg

SEQ ID NO: 110113 - DNA, 269 bp, Heterodera glycines
  unsure (1)..(269): unsure at all n locations
aaatatagatttatantggtctaaaaaccttcagtaaaccctaaaattttaacctagaaaagcttttttagtccctttcttcgtaacatataagcaaaaaaaaaagtaaaaccatacaatttataattctatttataatgtccggttttggccgtaacgatcattgtcgctgtccaagagcagcatataaaagtgtggctgcaataattagtgtcctccgcccgctaccttcctttggttctatgttaaatgagcttatattaaagatg

SEQ ID NO: 110114 - DNA, 67 bp, Heterodera glycines
ggtgtgttttaattcggactttcctttccattctttactatttccaggcccaaaaactcgtgccatg

SEQ ID NO: 110115 - DNA, 261 bp, Heterodera glycines
tcttgtacacttaaacaaatgcgctttttcatatggagcaagcttctatttcggaacagaggacaaaaaatcgccggaagcgagtttttggatcataacttttttttcttttgagaaccataaaaaggtataaacattcatagtaacactgatgtgtcggaatgccgatttcctataatttttgggctcggacttacgatttccgaaattttttgagtccaccggaattccgattgccaaaattttttagtcgtcagaatg

SEQ ID NO: 110116 - DNA, 426 bp, Heterodera glycines
aagaatggtttggaataagaaaacaagtccaacatgtacttctagtgaaaggaacggaatttgaatggatttgctaattctgtaaattttgagattaacttttatcgggcgctggcgcccagaataggcacttgaatttcccaaggttcgttcgtgaattgttattgatcatttaaattaatcaataaaatgctaatttgacgaaatataatccttaatttaaatttcaaatgtaaagaaaagtttttgtttcgcttcgcgtttcggaaagcggagtttgaaagttgggaatgctgaattacctaggtattttttcacgagaatagcccaataattgaagtttgaggcctcgatcattcatcaattactaattaagcaaatgccttcagattttgtttaatctttggaaatgtcgccgtgcgaatg

SEQ ID NO: 110117 - DNA, 82 bp, Heterodera glycines
ggaatcccggaaggtcgtcgaagacccactggcaaccttcaccaagtggttgctgaacttcgaaacggaagtcctcggcatg

SEQ ID NO: 110118 - DNA, 231 bp, Heterodera glycines
tgattcagtgggaaaaagtttcttcggatgttcgggtatcttcgcttaaaattggacttggcttccaaattataagacaaatgaaagaataaattcacatttagaccaattaaattttattgtaccaaatgaaattaaaattttattttttttaaagattaaaaaacattttcaaggcaaattggacttcgttcaccacttcgattgccgaaattgaaaaatgttcagatg

SEQ ID NO: 110119 - DNA, 124 bp, Heterodera glycines
aaaaaaaaaacataaaatcaaaaatttgacatcagatcactgaattacggaaatggaattaggccccacccaagttgcgttttgttaattgtgttattttcagggtggggttggcccgaggatg

SEQ ID NO: 110120 - DNA, 1003 bp, Heterodera glycines
atgtgtgacgcatagttttaaatgaaatgaaaaaagagcatcaaaagcgatgatggcaaaggcaaaaagcattttgtacccccggggcatttgaccccccccccaccctatttaattgttgggaagccgatcgccgcaacacagaggttgatgagggttctaattcccttccagtctaccattttttatagagttgagcgggaccgggaattttgggcaaacccgggaccgggaccttttcgggttgaaaaaccgggaatttttggctgggaaaaccgggaaaaaaccgggactagtcccggtcccggtcaaaaccgggacttcggtactcagttgtccgtgttcaggtcccggtcccgctcaactctaattttttacaatattttccaggaaatcatattgaatgttttgtgttttgtttggtttcctctctctggtatcacttgctgatagtccgttagagcagcagggcttcgggttcggtctagacaattttcaagaatttggcggtttttggatttcttcggaattttttagtattcagatagtttagtgcctagccctcatttttaaattttccatgtttttatgcacagacaagagaccggcccgtccatcggcattctttaatatttttcgggctttaaaaaaatcgatcgagcaaaaatttgagtttttcattttcgaagtgatcaagccatttggggtcctccggtctttaattgacagggacaaatgctttaatgataccaaggagcatatattagaggtaagcagcagaagagagtaaagatggggcccaattggtcctggggcccaccgcaccggtgactgtgcaaagcgatcaaaaactgaaggaatgggaggggagggggaatgaatggaagttggaacagcaccaccaccaccacaaaatcaacacagcaaccaaccaactcgtttgtttgctgattgatgatgataaaaatgcataattaaggcatactaaatatgtataattatg

SEQ ID NO: 110121 - DNA, 120 bp, Heterodera glycines
aaggcatttaaattgaaaaattaaccaattatttaattaatttaaaaaatcaaatattagcaaaacgcactccccgtccagcggaggagcgtcctcttcctggcccggcacacaaacatg

SEQ ID NO: 110122 - DNA, 454 bp, Heterodera glycines
  unsure (1)..(454): unsure at all n locations
aaaaagaataaagccgcagatttcctcgcacggtacaatatcncaggaaccgaagacgaaatagaaataaatttaagtgaaaagaaaaacaaaaaagaaaataaagcgcaaaaaattctgagtactgagaatagtgaaagcaaaaaagaaaatcaggacaatagcaacaaaataactttaaaagaaataattgaagaacagcggcaagtaaaggaattagcaaaatttttttatattttaaaaactggaaaatatcccaatgaaattttgaaatggaaaaaggtaatttggaatactgcctgataaacggcgcgatttataaccaaaaagggacagagaattctgaaaatccaaaattaatcatacctcactcattaagaaaaagaattttttgtgaaatacacgacaaaggacattttggatttgaaaaagcagattttattgggtcggaatg

SEQ ID NO: 110123 - DNA, 174 bp, Heterodera glycines
atttaatttattaattgttgaattccctaattagccaaaaagtacaatatccctggccttattcgtccatctttgcaaattcccatctccgaattgcgcaatgttttctttgcgtatgcccaagctctccttttcgacttggaggtgagaaaaacaaatttatttttaataatg

SEQ ID NO: 110124 - DNA, 53 bp, Heterodera glycines
tgtataaaaaaaatagagcaatttagcgtaatttttaaaatgttttagcaatg

SEQ ID NO: 110125 - DNA, 52 bp, Heterodera glycines
atcaattttgtttgttttttaaatttactcaaaaaaattttagaataatatg

SEQ ID NO: 110126 - DNA, 966 bp, Heterodera glycines
tggaaatttcaaccaaacctttccacgaaaatgtctctcttcaccaattcgtacacttaaacattgtcctttccctagttttctgtcaaataatcatctgtccaaaggcgaagtggcggccaatcattctcagaaagaaaattgcgtaagacaaatggatgcatatgaagaaataaaataagcaaagcaaggctagtcaacgaaaataattcttaggcgtctatttcgtgattttcggaaaaatccttagcaaaaaatgcaacaaagacgaaaatatagccctaagaaacttgaaaaactttcagaaaatacacccaatgaaaaactcaaaaattcatcactctattcatttttacaaatgccaaataattgatttggatgttggaacatttggacttttatattctttttaaaaacggattgaataaacggaaagatggtttactgtaactcaatcttttcactttctgacagttggtaaattattacttatttgactcgttgcttgtcattattcattgttgattttcacttactcttctgaattttttaaattctccaaccattcccgacaaattctgtagggaaatttcctctatgatcccttaattgtacttggagcccaaaattgaatcgccgtgtttgaatacttttaagaaattatgaagcgttgaagttgtcatgttttttttatattcctttaaactgcaatagtgccaaatctgacattaaattctgcttattcttcctcatccttaacccggattagaacgaagatttaaattttctaaaattcataaataatactccaaattgatttcaaaaatttcgactacatacagtcgaatccgggttacggatgcggaattgactttaaatcttcttatcttcaacaagcgacctagtctgcatcctaaatgtaataaatgctacttagaaattttttagagtaaataagcaaaaatg

SEQ ID NO: 110127 - DNA, 51 bp, Heterodera glycines
tatcgacgggtcgctcgaattgattgctgacgttgaactctactcaacatg

SEQ ID NO: 110128 - DNA, 429 bp, Heterodera glycines
tttgccctctaatttgggttcattaacactctttaatcgttcctcttttacactttcaattttattctctttttgttcatttcatttagtacattttctattaatgaatattatttttgttcgtttttatttttataaattaaatttattcattcgcttttttatctcttttccatcagtggatttgcacagtttttacatttgtcatcgctaacactttccgcttctatcaaaaacccatccggcaaaaatcggctctgattttgctaatgaatcatttatcgtccattataatgaataaaataaaggatgcaaaaaaataattatgttaattcaatactaaattatcgaaaatattgataaataaataaataatattggaattgaaaaatgaagaatttaaaaaatatacagtaatcacgataaatg

SEQ ID NO: 110129 - DNA, 708 bp, Heterodera glycines
catcaaacaaaatatggccaacaatcgaagagcaaacgatgctaaagcaaatgaaagcccataaaatatcaaataattttgttaggcttggaaatgaaagaaggattatgtattattaaaattattaaattatcaattttttagtaaaaaaaaattcgaatataaaaaaagtgggaatttgttttttacgccaaagagaaaaaacattaaaaacaggcgggcaagtagcgccgaaaaaaagtcaaaatattttcattttttataactttttttttgcaggtagtcaaatctttgtgaatctggatatgctaatagagtttttatcttttaagattttctatgaacaaaagaagtgaagttttacgattataccgacgcataattcgcctttcaaaggattgggtggcccaagaaccgacgaacacaaacgaagaacaaaaatacatcagagaagaggcccaaaaagggttcaaagcgtacaaaaacgtaattaaagagaaataaagactaaaaaacccaatcgtatcatcttaaggagaaggaccctgaaaagattagtgaattgctgaaggaagccgaaaagcgtctggaaatcgcctgtcattaccaaattccctacgaccgtcccttttatttgcctcctcgttcttccttcggtcggttttagtccgtttttggaattgagcatcgctttttgcccgtcagatg

SEQ ID NO: 110130 - DNA, 280 bp, Heterodera glycines
tcttacgcacaaagaattgtaaaagaaacaaaaacaaataagtaaacactcgccttaatttttaattaaacaataaaaaatgaaacaacaaatgtttaattttttgtgaggatactcacctcacatcaaataaattttgttagacaaaaaatgagatgacatgcaaattcgtgaagcgttccaaaatttacttcgtgacgtttaacttttttcctgcacgttaaatccacaccaaaatcttgtcgaaacggaatgggcgaaaacaatttgccaaacaatg

SEQ ID NO: 110131 - DNA, 95 bp, Heterodera glycines
ttttgttcttattttaggattaatttgtttttgtttggctaaaatagccaggtcttataggcaaattttaatctatatttgcgtagcttcagatg

SEQ ID NO: 110132 - DNA, 233 bp, Heterodera glycines
attttacaacgttttcccatttgccccaacaaattaactgatttatggtgaagctggagcaaaatgagtgcagcagaattagaagttggttgccgaaacatttgttgagcaagaattcggaatgtataaaaaggcaatttaaaaaaaagtgaattctataaaatataaataaaattattttttattatttttattaatttcaaaaattaatttgaaggtcagtcattaaaatg

SEQ ID NO: 110133 - DNA, 188 bp, Heterodera glycines
  unsure (1)..(188): unsure at all n locations
tngatttttaaaaattttaatcgattttttctgttattttaaaaaagtttatggttcaatcttaatccaccatgctaacaggataaaaaggttctaatgtgatacacatttcaatacgtttctttgtaagtttgttatattcttcaaatctcttgctttgaggtacaattgttggcggcatcgatatg

SEQ ID NO: 110134 - DNA, 414 bp, Heterodera glycines
agtacagtttaatttttccggcaaaagttgaacaggaccctcaaaattatttcaaatcttagaaaacacttaccagtttccgaacaaagtgccaaaatttccgtttatcgaaattttctgaaaatgggaattctgggctaagaattttgccggaaatcatcaattggaaatcggcattccttcacatccctggttagcaccacagacccatgaattttacaagcaattaagtaaaatcacgttcaaattttcagaaaatttactggcctgggtatttttctctcaaaagtctaagaataagtattaaatggctaacttatcaaatgaaaataaacgcaaaaataaatcaggcttttaataaattttttgtacgtggaatgaataagtgttttaacagacaaattaaataaaatg

SEQ ID NO: 110135 - DNA, 390 bp, Heterodera glycines
aaaatggcacaaatgattcatcagcaaattgcaaattgtaaagaaaatcagttcagttctgcatcttactgataattttgagttctattgtaaattgaacaaaagaagaccattcggtgtccatgcgccagagccctcaacgttttgggaaggaaagttgaaattgaccggtcaatggcaattgcaactgagacggcttaactcaccattaaaacttctaatcactagcgcggaaagcgtaaaggcgaaatgggcagtcatagggattttgtcatgagaggcacttaacgaaagaggacaatgccaacaaatgcccaaaattgtactttctccattgatttggtcatcacctccatttaggttgaagtcactgagttgtgtgtgaatatg

SEQ ID NO: 110136 - DNA, 374 bp, Heterodera glycines
tcgcagtgttttttcaatttttttgtgatcaatggcagaaaaaaacaaaaataattatttaaattaaataaattttccgtgttgtccaactaaattttgattttttatctttaaacgggtcaaatttggtttaaaatagtacaagataaagaatatcagaaatagttgatagtaaagaattttgtattacaaaaaatgaattaaaaaaaaatttaatttaatttaatggacatttaaaaagtgaatgaaaaaatattaaaaaataaaacaaattaaattgggaataattaaaattgttttgcattcacttttcaactcacaacaacaaaaacaacattaacaacaaataaaaaataatctctcgcgcaaaaatg

SEQ ID NO: 110137 - DNA, 513 bp, Heterodera glycines
tgtattttttttctctgtaagaaaggtttaatatttacctaaatgcctctaatgagggcataaaaatgacctaatccgttgccaataaggctgcaaaatttaatataattattttttagctcatagctaattgacttaattaatactaagaattttttcattttataagcgtcaaacaacgtcataaaaaacacattaactaatgttcatttttactaatatattcagtaattaatttaaatttaattaattaatttacaataattgatttaatgtggcctgtatgtgttaagcaattaatacaggtgattatttttaattaagactttaattttaaattagattgcactcttataattccatacaaatttagttggatttttgttcctcatttcaccgacatttatgtgcccgttaattgtaatttttattcatctcgaaattttagctaagccattcttagcacctttattccatcaattatacaccaattaccacgattagtaacccatg

SEQ ID NO: 110138 - DNA, 506 bp, Heterodera glycines
  unsure (1)..(506): unsure at all n locations
caaagatgaattgatgatttatgtttatggctgatcatgagcanaaaacaccccacaaaaaaagacagtgatcaatttaattttgaattaacgaaaatatactttttttggcgttttgaatttctaacaccggacggagtgtgccgatcccacaaattttattcttcgacgggatcccgttccgcttggttttgtgttctaccccatggctggatcccaagcagaacaaaccctactttattgttttattcggtgtttttttttattttaatgttttcgttaatagaagctttaaaaattttcatttgacattcaaaaacataattttgtcaaataaaaaaaacaggtattcaaagtcattatggcggatgtttggcctaagacggttccaaaagagcagcaccctttttacatcctccaccccgagcctattcgaatctctccgctgctccgatttgctcgttggtcggccctcggcctaggcattgtgtgagtaaaaaacaatg

SEQ ID NO: 110139 - DNA, 241 bp, Heterodera glycines
cagccttgaggaagagcaccgattggtgaacactgttcgctcgttgatccgcattaagaatccgaatgatcgactctgtttggccagagctgtgttgctaggtcttcacgattggcgttcacggtcaccaggcggaggcggaccgacagcattcaaaagtttcgcaaatcgccagcacacccacgggcctgaggcacgtaacttattgagacgtgccgcaattccccgcaacaaacacatg

SEQ ID NO: 110140 - DNA, 1003 bp, Heterodera glycines
tacagtgtaattaattggtaaattaattaatgtcactcccctctttttcgtcataattctagaaaataaccaaacaaattttagaactgaagaaatagtacttatttcaagttagacagacagcaaaagaaataatggccgccgtgcaattataacaaatcagaacatgaaaaaccagaattcgcagaattaaccagaataatttcagaactgttaaaaaaatcaataaaatatcagaattattgcagaaattaccagaaaaaataccagaactgttttaaaacacactagaacattctagaaattaaccaaagaaatttcagaactgaagaaatagtacttatttcaagttagacagacagcaaaagaaataatggccgccgtgcaattataacaaatcagaacatgaaaaaccagaattcgcagaattaaccagaataatttcagaactgttataaaaaatcaataaaatatcagaattattgcagaaattaccagaaaaaataccagaactgttttaaaacacactagaacattctagaaattaaccaaagaaatttcagaactgaagaaatagtacttatttcaagttagacagacagcaaaagaaataatggcgtcgatgtaattaccattatgacaaatcagaacatgaataaaataatagaatatgctagaaattaccacaataatttcagaactgtaaatagaaaaccagaacatgaataaaattccagaatttgttagaaatgaccagaattaataccagaactttttaatgaaaaatcagaacacaaatagaacactaaattatcgattgaagaaattaccagaataaaaagccagaacctttaaatacacgctagaacattctagaaattaattttcaccagtcgtttcgtcttttacgattttcacaatttttggttttaaatttaccttattaaatttgtttattattttattattttttgaatttcccgtttgagttttatttgttatg

SEQ ID NO: 110141 - DNA, 214 bp, Heterodera glycines
ttttggaaaatgcctaaatttgaaaggggatgtcaatataagtgacctctaatccgatcattcctattttattaccttttcaaatcataacactgttgatcagccagtctaattgcggtgtatctcgctttcagatcacctcattccgctttaagcaaagtaaattaaccccctctccattctttcttattgccaccaaatttatgccaaaatg

SEQ ID NO: 110142 - DNA, 406 bp, Heterodera glycines
tttttaaaatcaaaatgcaaacttaaaatgcttaaagaagcacacagaagattgtaatgtaaacaagagcaaagtaagtaaacaattggatcggacccatcgatcccacgatgagtcaccgtcggtgtcgttttaaaaaaagttaaaacggatcgccaatctaatgtcagattcgagattagcgtcctttgaaaactccaagttgttatccaaaaataacaaaagaaaacatgggaccctattcttcacgattgtcgacatttcatattatttgccagatttaaattctaaattttgtcagaaatgatatcctttaaataaaatatcatgaaatggaaatgttgatatgaacagcttaaaaaattaaatagattttaggatgcaagtatcttaagtattgaaaatg

SEQ ID NO: 110143 - DNA, 945 bp, Heterodera glycines
tatttgtatgtttttgaccaatttcccctgataaaaaataccaaattcacattttttgtaagttgccatttgattacagtcttcgaaagttgtaggaaggagaatatggtcgggggcttcctcaatttcgtatccaaataaatctgttcggcatttatgagttttccgtatttttatacacctccaggcatcaaatttgaaatcatcaggattgggccggaataaattaagaaccagtgagtttgaaggttgttttcaataaatttacttatcaaaaaatactttattttaatggttttttgagtaacgtcatagcacctgaaggcttagaactatggtgctagaggccttttcttaaattccgcccactaagggcgtttcttaaaccggacaaggggtaggaaaacaaacaaaaaatgtaaaacacataatttcataactttgctaaaattcaaccaaattaataatactttatgctatcattcaatagattacattaatagttttctaactatcaattaatgacattttttaaattcgtcagtgccaattttaatttttttgatttttatgattttctaacgaacaaaaatggggaaaaaatattttttataaagtgaagaaggaatttgactgatcaactttaaattgattttttaaaatttttctactcttctgatgatggtctttttcaatgataaaatgccaaattattggcaaatttattttttcatatttacataaaaagaaatgtttatccaaatttttattatgtaaatgaaaataaaataaatatttcttctgcctatgatttaacaaaatatattttttaaaaacttccgtaattaaaaaaggattattaaaatatttactaagattcttttatgcttttaataaaaccaaatgaattttttaatttttaaaaatctcaattttttagagatg

SEQ ID NO: 110144 - DNA, 379 bp, Heterodera glycines
ggtgtgtcgcttctcttttctcctaaattttctctttttttcattgcgttaattaattttaagatttaatttagtaaatgtatttatttgcttggaataaacaaacatcttttgtttcttgccattattttttcgataaggccatacgccaaaatttaagaaatcgaataaaaagtgcaaaaaagttaatttaagcggaaagactatgactgtgtaaatttgcgtgtttttgttggttttttaaaattttaggcgggtccataacgggaaacggaaagcaccattaccgctaatattgttattcaattagaattgtttttaatgcttaattgtgacttttaaggctgaaccgcttctgaacgcggcactgtccgaaatg

SEQ ID NO: 110145 - DNA, 441 bp, Heterodera glycines
ttttgaggggggaggggcaggttcggatccggacggtgtacattaattttctgtgcattttttgattacttttacatgtttaatttcatttcaaattaaataaatattatattattaattttcattttaataaatataaatagttttgtttaatccataaaaaataaaattttttaatttaaattaaattatttttttgtgatgttttaaattaaaataataatttatttacttttattaaagaactcctgtattttttaaattagaatttgtaaaattaatttcaatttaaataaatattcaatccctgtacatttcaaactctctttttaattaataaaaggaaatttattttatttttaaaaatttattaattacattcaatttttaatcttactttttaataaacgatttccttaattatttaattttaaaaccatg

SEQ ID NO: 110146 - DNA, 1003 bp, Heterodera glycines
tcgtattttttgttaagtgtttgtttgctcgtattggcctcaagccttttgctggctccgtgatgcattacaaattagctcataaaagcgggtaatttagattaaagaaataaaatgaataatatttttgtaaaatttgtctgtctttttagccgatggtttgttgaacacatggagcttttaaaacggaattattttggctgacaatgcattccatcacaattttttgacattttcgcccaattgaaagaggaaaaaacaatggcactgacaaatgatgaattgatcatcggcagatgtcaaaaacttcaacagtttcagtgtaaagttttttatttatttatttattacacataaccaatgtctttgaaaggcaacaaatcctgctgattctttttgttggcacaaccgaaaaggagaaactcccttgagcaagcattcttggagggtaatccaattcaaatttcaattaaagtccgtttaatttattccaatcaaatgttaagatcttattattgacagagaatggcatttttagagatggcacaattattttagtgataaaaagtccgaaatggtgtattttcaaattacaaatagagtgacattcaaattaagaattttcgggctaaacattgtttttcatcgttcatttctcattgatgaaaaaagatgcagaaaaatagtaaaaatgatccgtttcgtaacttattaatttgcaattttaaattaattgatacaatttgggaccaaataaaccaattaaaaaataaatttgggcatacaaatttaaaattccacgaacctcgctaattttaaaaactcctttataaaaagcttttattaatttaattttgacaattacatattcatatgtctgttgtcaaaaaggtacaaaaatatatatggaattagggagagttaaatattatataaatatttgtttgtatcatttccctatttaatgtgcctagattgaacgatgtttgccggaaaaaatatg

SEQ ID NO: 110147 - DNA, 71 bp, Heterodera glycines
attgcttttaatttgcgtttccctttgtttagacatttctccgtgccacttcttcagtcagttacgaaatg

SEQ ID NO: 110148 - DNA, 648 bp, Heterodera glycines
  unsure (1)..(648): unsure at all n locations
tcaatttaagtgcattaagatgaaatatagaaaaataaggatnttatggagtttattttggaatttctattacgaaagttaaaagatattctagaaatctggaaaacttgaacactctatccctcttgtaggttgggggggcggcttctaccagagggactttgtattgttgaatcccttcggacttacggtactcatcagattcaacgaaggataaatgctgaatttttttctcatttttaaaattggaacttatttgtcaagcgccttgaaaatttgaaacaaaaatccaaaaatgtaaaggaaaattaaatgaatttcattgtcgtgtttaaatttggcatcttttcaaaatattgtaaatgttagcaaaaattcacttaacgttgctccataaattaacttataaaatttttttttattccaaatagaaagattgacttttgctaagtaaatatggacataaaataccattaattattaaatcaattaagcataaatttattttcatcaatttgttcagctttccaattgaacccttttattcaggcaaatggtcggattgatgttgagaaatattaccattaaaatcaactatatgtttagtaattgacccaattaataataaatgaatttagaaaatcgatg

SEQ ID NO: 110149 - DNA, 1003 bp, Heterodera glycines
catttcttagaaacaagaacataaagaaaccctgtattaatcagaaaaaataaataaattaaaggaaaacgttagccggaatcgaactcatgacaaaagtactgttagtattgaagcactatccaccaatccacaaataaaataaaaaacaagtaaaatttattttatttcataaaaatttctcgatagttaaaaaaaatcaaaattgtctaaattttttgccttatttcccacgaatatgccattcttaggggtgtattttcacccccgtgcccccgcgggggtgaaggtcgcgggggcgggggttgcgggggtcagagtcacgggggcgggggcgggggcggggctcgaaccctaattttaaatgttaaaattatgattgaattcccattgaaaaaggaatcattttgaaaaattagaagaaaaaataattacttggagaggaactaattcaacgcaaaccttaggaacagaagcaagacacaacaacccactggaccacgcatatgagtaaagcaatgaagcaaaaagttaccaaaaatacattaattttaaatttgcaaaaagccaatcattaggggtgtaaaaaagtctcggtatagagtctcgaagacaggctcagggatttatttgtctttataagcgaagaattggtaagggaagagaaaatggaaataaagttttcgtgcttctctcgtgaaaagttacctgtaaaaaatataaagcccatccgtggtaatatatttatacgtattataaaaatagacataaattttatattgtatatataatttttatttaaaaaaaattgtcgatagtcacatttttgccatgcttttgattgcgtggcagaaacacctaaaaaaaagaatgatttccttttcaaatgccaaaattttattataggcgaattattatccatttactccctaatcatttgtaaatttttaaatgtaaattattttaatttttgccttttagcaaatccccgcttttccaaatg

SEQ ID NO: 110150 - DNA, 287 bp, Heterodera glycines
ttcattcgctcattttacatccgttttatattcccaccccaaaaaatcattttttgttttcgatgtacgataattacgacggcgattcttccaatgatgaacgctcttctgctattgccgaatcaaagaattcatcaataagtagcagaaaaactaaacaaaggcaaaggatcagcaaaagagaaggggaaaaggagagagcggcagagaaagaagaggcgacgaaatatgtagagaaggtgagaggaaacggcgagagagaggaaggggagggaaaggagcaaatg

SEQ ID NO: 110151 - DNA, 238 bp, Heterodera glycines
aaagtccaagtaccttattggacatctacgtgtcaatgagcacagtgacctttgtccagtaatgtatcggaaaaatgtgaatatcagacaggatcccttacaattctaaaaattcctcttttcgtctaaccatccctcccttttgtgcactatttcgtttcaaaattgaatcattttttttgtctttttgaaataaattgtgaaaaatatacgaaaattattttcgcttttaattatg

SEQ ID NO: 110152 - DNA, 285 bp, Heterodera glycines
ggaatactgtatgcgttacgggcactaattattatgtggtactattgtatgagcacgaattaattaacgggaacgaatactaattaatgggtttactgtaggagcactaattattttggtgggattattgaacgaccactaattatttaaccgggaacgagcagtaattatttgagttactgtagagcaataatttattttgctcgggttactgtatgcatgcgtttttttttgcctaattaataatttttcttttctcatcagtggcaacgtgaacaggcaatg

SEQ ID NO: 110153 - DNA, 310 bp, Heterodera glycines
aaatcaaatctttttggcacttatatagaatgaggggtcaaaaacaaattgggggaggcgagctttttggattcatttttcgaccctcccctcccccccacatttatctgagtgcatttcttttcgttgttatttgtttgtacgatctctgtggttttcatgctgttatttttcataccgtttttgcataacaatttcaattttaaatgttccacggaacaaattttcctattttttgcatttattttgattattcgtcatacattttccttttttgttattgatgcaattgccaccgatggacgacatg

SEQ ID NO: 110154 - DNA, 299 bp, Heterodera glycines
attactttatacgagttcaaccttagaaagtcttgttttatatttttcgtatgtttttaagtttgatcatcctcggtctagttagatttaaaaaattaaaaggttttaacaaaccataagaaaaacaactataattttaaattttagtaaaataaaaattgtgccaattttaatcaaaggattcagaaaattgtgaactttgtcaacttttataaatttcaatgtttgtacggataaacaacaacaaaagccattagcctcagtttattatgttttagggttccgatgccttgccaatg

SEQ ID NO: 110155 - DNA, 362 bp, Heterodera glycines
aaatttttgaaaatttgattaaaatttgttgacagatttcaccaaaaatcatcaaattttgtgatttttgtatcatttttctaatgagaaataagagttttggcgcgccgctgagaacagtttttcatcaaattaccaaattttgcgattttgggccattttctaagaaaaaataggagttttgggggcgcggcggtgccgataggcgccaccggggaaaaaaattggaaattttgatcatttataaacagtttttcactgaaaattagccaatttataggtaaaattttgaaaaattttatgggaatttaatccaattcttaggggtgtaaaagtcgcatttcgcgccaaaaagcgaaatg

SEQ ID NO: 110156 - DNA, 151 bp, Heterodera glycines
taattttgctgaatttatttaaacaaataaaaaaagaaatattttttattttaaatttatgaatttcgatttatttggatcattttaagtaccaattgataatacgatgaacagataccgtaaagtattgggaaaaatcaaaagaaaaatg

SEQ ID NO: 110157 - DNA, 293 bp, Heterodera glycines
tcttctcattgtttttcctccgtctttctcatttctttcaataacatacatcatctttaccagaaatggacacaccattacatgcgttgttttctgtactgttttctttctctcattttcctctttattttgcaattatttttctgtttaattaaattttattttttcccacgaattgttcattctcagaattccgaaagtaagtaaaaatatatgtattcatttagggaaattcgtcagcacatcaccaagcgacagtgaatagtgtggggacagtggcgagtggacaaatg

SEQ ID NO: 110158 - DNA, 125 bp, Heterodera glycines
ctctcaatgcaaacatttcgatggtggtcagcacatagtgcttatccgtttgcgggctgtctcctgtgaaaaaatgatcaattaataatcgcaaaatttaaaaaaaatttaaaattttcaggatg

SEQ ID NO: 110159 - DNA, 770 bp, Heterodera glycines
agaattaaaaaaataattctcttgacacttttcccgcacaattaagccctccccctccctttgatgtccccgcccaggggaaaaagcttcttttttttaaaatgtgcttatgttttacataagtaatctaaaagaaaaaaaaattgtcatgaattacataaatccctaattttaattagccaatcatagaaattaattatttgtaaaattgcgtcatcaaatttttaattagcatttttagatggaagaaacaatttggagacgaaataatggaggaatgaaaaacggatgattctaagaaaataaattgacaaattttgcctaaaaatgactgatgaaagtgtgatttaatggaactaaaagaatttctttaatttgtaacaattaatgttgagtagtgaacagggcttggcgtaattatggattacggaaattacggcattttttgaaatatttatctcaatacttggcatttattttgttgctttttggataaaattttacaaaacaggcgaaaatttttctaattaaattaacgtcatcaaaattatggattattaacaattttaataatattttttattaaacattatagaaattctgccaaattatgcattttattatcaatttaaagcaataaattttcatttgcctcatttgtgatgccaaataattcataaagcttaaaatttcctaatttccttcatcaaaattattaaactgccaatttataagtttagcaaaataataatataattaagaagaaaatg

SEQ ID NO: 110160 - DNA, 379 bp, Heterodera glycines
agtgaacatttttgctaatttaattgtttttttactcttaaagtggaccccaaaagcttcacggaaatcaaaattaaaaaaaacacctaaaatggggatacaaactaaaatagtccgaaaaatcggtatttgtatcgatggcccctcactttgacgaaaaaatatatgcctaaaaagtagtatagatttgaatttaggttcagaatttttgaaaatttatgtatttttaccgccttccgttaccaacaaattagaaaaaaaagttacgttttgtcaaatatctcaggttttggacatttagcgaatttaaaaatataatttgtttttaccaacaaattttccctacattatgcaatcccttccccggattaggacaatg

SEQ ID NO: 110161 - DNA, 615 bp, Heterodera glycines
agaatttgccagtgtttttttaaattttcacggctgcgtaaagcagggatttgtagccgttttttgtccccggtcaccctccctgaatttttgtttttaacaattttttagggtaattttatgcgctgaacacgaacctaacaccagttttgacgaatttttaaacccgaattcgaataaaaagtcgaaatttatatttttaatattattatctgattaattttatttgttttaatcattttttttgcaaaagataaatttttttttgataagtttgagtttttgattttttgttcgattcgcgttcagggttcggaattcatagaaatggatgtcagattcgtgcatacatatacaagggttgtctcgacacccccccccccccctcgtcgtaagggggcccggtgtaaaaacgcataagagctaaaaacaaacatcatattcgtgttagggcataaatttgcccttgaaaaaaatattacaaaattttgcaggatagggttaaggacaccggataatttttataatttaattgaatctttatccgataaaaccccatcgttccatttctattccgagtttttttagctttttaaagcacacaaatgcgtgatg

SEQ ID NO: 110162 - DNA, 649 bp, Heterodera glycines
  unsure (1)..(649): unsure at all n locations
ttgcatnngcctgcannggtcaaattgattgaaattataattttaaattaaaaaataatttctttaagattttcatttatattttgaaagaaataaaagtgcatcagggattggaagcgcgcacccaatttgcatttttctcatcgtttagggcgttctaaatcaattctgaacatttaatatttaacaaggcctaatcaatccgccaaaattttaacgttaattttattttaatggtgaaaaaacgactttacttttctccgtctaacatttttttctacacgttaaacccatttcgaattttgaaaaaatttctgcatcgaaagatataaaggttttttcaaaaatgaggctcaataaaaggttaattgatgaaaaaaaattgtgaattctttttctctcgttttggcgtaagatgaagcatgttatggctgaaaaaatgcagtgataaatatgtttttgaattagtgtaaaacattttagaattggcgttatatttcattgcctaatctaaccgaaaaataggtatgcaaaatataccatgaaaaaccttatttgttaggctgaatgtttccgatggtttacaaaaaaaattgtaaacataaattccgattcctttccagtcctttttaagcattagtcaattatg

SEQ ID NO: 110163 - DNA, 1003 bp, Heterodera glycines
acttcggtttttcatgcttggaatttcacaaaatgcttacatatttctaacaaaaaattgctcaaattgatcattagggccgcaacttttagtgacgaaaaataccgaaatagttaactaaaatagtgagtaaaaatcccaaaatagtgaagaaacagtgacaaaaagtccgaaatagtgacgaatagtgacataattttcagccaaaaattaagcaaaaataatttttattcactggttgcagttgcaaaagagctacattttctttataaaattctcttagcaaatattgacattttttaaatcaaaaattttgtcaagaaaaaaattttgggggagaatttttgaaaaaattttccaattaggggtgtatttttttttaattttttaggtcgattcttaggggtgtattttttgttcttattgcatttttgttaaggaattttccaaaaaatgtcgaatagtgaaaaaatagtgacaaaaccccaaaatagtgatttttaactattttagtgacgaagtcgccaaaatagtgatttttaactattttagtgacgaagtcgccaaaatagtgatttcagtgaccgataatgacatcagaatcgaaaatttttaatgcagaaatgcgttttttgagctcctttcttcaaaacaattgagcaaaaaaaaaagttttttcactaaaagttgtggccctattgatcatggacaatcaaaaatataacatttgaatattttaaacgtattttgaataaatttcgtaaaaatgaggtttttttgcgtgccaaatgaggctttgaaaatttaatctggctaccctgattatgttcggttttctcaaaaaatttttcaatccttaggaatttcttacgaattattgactgcgtaccgctccccctccactctaattgaagtgactcttttaacccctaaagattaaaaaaatttccgtaaattatatttatttaagatttttactcattttttcatttatccaacaatg

SEQ ID NO: 110164 - DNA, 427 bp, Heterodera glycines
ttctaacataaaagcaaattttcaaaaattcaaattttcgagttttggttcgaatttggattcggggttcggaattggccaaaataattgtcatagtcgtgatcagcaagctcgaaaagccccggatatttgtttctaggatcttttaaagcaaaaaaaaaaaatatttaaaaatttcgacccaaaagggggacccaaacccgactagtaccataataataataattaatgtgcttttaattctcatttgataattaatttattatgaagaaaaacataatgtgttatttttctttatctccaatccctgtttatattataattcatcattttttaattcatatttcaaatgcattcccatcagtgagttaattaatcaaggtagttgatttgtctaatcatttttaattagggagatgaccaaatg

SEQ ID NO: 110165 - DNA, 1003 bp, Heterodera glycines
ataatgtaaaccccaaaaaaccttcagcataaatccggattaaatattcatataaaatttctaaaattttcgatatttttggcattctgtcctttcatattcatcaaattcctttgctattttgtcacattgccaattctttctcataaaatacacaatgccaaggtatcatatttttactttgaataatcactaattttctttctgatcatttctcagaaatgcaatggtcgtctccctaattaaaaatgattagaccaattattaccctgcttaattgactgcaaaagataagcacgaaaaacaggttttccgcttggtttgggatgtctacgatgacttttaaaatgcctatttttgcctattttgggtttttgtgcataatgtgcctattttaggattttcggaaaaatccttaacaaaaatgcaataaaaacgaaaaacacaccccctaagaaatgacccaaaaaaaaatttcagaaaatacacccacccctaagaattgaaaaaattttcaaaaaaataattccaaaattatttttttttctcaataaaaatttttgttttaaaaattgtccgtatctggaaaaaaactttaaattatttaataatttcatttacaattaaaatatttaaatttttacgtgttttaatacctaaaaagcgttaattaaaattttttttgcctatttgatgcctattttgcgatttttttctgcctttttaggtgcctatttcgcgattttttgtgcctaaaaaaagaatccctaattattacgctattaaaaacacaaaaaattatactgactgtaccgaaggcgtcgggaaaagcgcatctcattaagtttcaaaatttttaaaatttgccaatttttcctggggaaaaaaggggtgaattccccaccctttccatctggttttcagtctttcaaattagatctattgcgaatttatttattttttaaaattgaaaaagcatttttgtttacagcccccaaaaatg

SEQ ID NO: 110166 - DNA, 195 bp, Heterodera glycines
gctgaaattttgatgaataaaaacattcaaacactatttggacgaaaatgaattgctcggggcccggctttgtctcgatcaaatttttaaatccgttgttaatcccaagcaatcctaaaccttagcggatatacctaatccattgttatgtaatatgtctgacattctcgaaaagttattattatttaaaatatg

SEQ ID NO: 110167 - DNA, 98 bp, Heterodera glycines
gacccttgttctttggcattttttcgaaattttttttcccgacagatccttcgccggctcgtcgaagaaactctttccacgacaacagcagtgtaatg

SEQ ID NO: 110168 - DNA, 143 bp, Heterodera glycines
agcaattcccccttaagagtccatcaatgagttcgctgacggaaaacaatttcactgacaacacaacgtgggacagccgacttttggactgcggctcgatgatgacgcggtccatttcgcctcttaagggccaatcggcaatg

SEQ ID NO: 110169 - DNA, 163 bp, Heterodera glycines
agggaataacgaatgcacagaacacaataccaccgaatgcccagcgcgggtctttcctttccaaactcacgaaactaacgaaaaggtacacaattcgcttattgtcagttctgtttactggcaattgccaaggtttcttcatcccattttcagaactggcatg

SEQ ID NO: 110170 - DNA, 1003 bp, Heterodera glycines
taccttagttctggtttgagaccaataaatttcacgataaaagctgattcatttttggccaattctatttttatcaggatagggatcgcccaaactctctccccctgtacaggtttgtcaagtacataacgggagaaatttatgaaatccaagtacatatacgatttttatctaaatgtaattaaaaagttgaagtttctttaaattactatttttggtaatgctgtcgatggtaccctccttttttgaaaaagttttctttattttcaaaagaaatgaaagcatttttcctagtggtttcagctatttcgaccaattttgaaccccggacctgaattcgaacaaaagtttcaaaattttctaatttcatatttttaattaaaatggtttaaataattttttattgcagtattaatgagttactggttgattccgcgtatttagccggttttgaactaaaattcaaagtgaagattttgaattttcgggcttttgctcgaattcaggtccgtggttcgaaattgtgtcgaaatagatgccggattcgtgatcggcgaccccgaaaaccctaggaagtgcaatattttttttcactgatcattttcctcattttcacaccgcttttttggcgcccttaaaggaataaaggggtaggtgatgccgatacatttgatggcgtccggagggagcaatgcgttttttttttgttttttttattcacaaaacttcgaatgaaacaacaatttcaaagaggtggtgaaacgacggagaatgcatggaaattgatgcgatgtctattgtttgacgaagcaatgccaaattaaagagacggcggtccattaagaaaacttgtgaacatttattttttataaaaagaaattgggagaaaaaaaaattccaaattataagaaaacccataaaaggcagagaaatttacagataatgtcattttttgcaataataacttacgacaaaagtgtgctcagttaattgccacaaaatg

SEQ ID NO: 110171 - DNA, 57 bp, Heterodera glycines
tatatatggtcaaattcgttgtcaaaatatatatattttaggttagtaggcgaaatg

SEQ ID NO: 110172 - DNA, 966 bp, Heterodera glycines
ttgcaacttaagttttttgtttataataaaagagaaattttttcatttgattatttttaatatatttcaaattatagcatatcttatgattgttcttttgtttaaaatcaaaaaggcattattccaagcgtctaacccaattttttacctgttaaaaaactcaaaaatggtcaaaatttcatattattgcactcactcacttgtgaaacatttgccccttttgatctatccactgagaattgattaagccgctctaggttatgggaaacgcaagtgagatcgggggggggggggggacaagaatgtattccgtatactactaacgttaaagccaaagttatcgcgttacttaagatcataacgaaattttatttataaccttgctcaataataatcaaatgtttagtcttgatatcattcattttctctattagaatgcaaaatcaaaaaaattcatgtacttaaaactctgcacttttttatcatttgtttttttctttttttttgttattttaatgctttttcaattatttttaggtcttatgcttaatgttttttaccttatatgaacaaaaattatttatattttttagtgttatatgataagaaatatcttattcctatttaatcttataaataatgttgattaatttattgttttttttgatttgttttacattgtaaaggttttttgtaatgtgaaccaaatataaatgtcttgtgctggtcaaaatttaattatgtagatgaatgaatatcaaattaatgaactactcaagaaaaaatcattattaagtatttatttatctcttttaaaaagtgttaatttatttttttatgaattcttttaaatttttactttaatagattgcttagtagtatatgtccacaaatgtggccccaaatgtggtcccttttcaccgaccccattattacccagattgattaatgcgaaagtggaaaatg

SEQ ID NO: 110173 - DNA, 74 bp, Heterodera glycines
ggtcatttctggcaacgaaaaatgcgtataaatgttcattaatatctttttttttagcaattttacgtgacatg

SEQ ID NO: 110174 - DNA, 110 bp, Heterodera glycines; identical to SEQ ID NO: 99093

SEQ ID NO: 110175 - DNA, 413 bp, Heterodera glycines
attttgtgttgtttttgttgaaaagcaaacatttgctgtaaaatcatctgagattcgacatcagcaccctcccagaaaccccaagatttgtgtttttattgcgaggtatcgtttgtgattccatcaaataggcatacaacaatgacgtttggaatcagaatttggacaaaaccatgacttcgcgttacgcggtcgctcgcgtttcatccttgccctatcttctatggattagcttctataaattagcttacatatgataagtttggtctaatgaaacgagggtgaatgttatcgttcatcgaatttatttcttatttaaaaatcattgtattacgaatttatttagcttttcctcgtttaacttttcctcaaccttttgcctctctttcctcccaatttttcttttaccaatg

SEQ ID NO: 110176 - DNA, 823 bp, Heterodera glycines
aacaataaaagaatgcaagaataatggaaattggggagcagttatggtggatttaaatatttcattagttttgcggtgagtgggattcaaataaatttaataaacttcatattttgaaattaaaatttttaaaattttaaaaaagaaagtgacaaaaaattgaatagaattttttgaaattttttggttataactctttgtaaatttttttctagattttaaaaaattaaataagataggatttgataggatatgtaatgcatctcgtaataccaatttttattaattgaactaaatttaagctaagttatggtttcttattagcaataaaattaaaactaataataaatttaaatgtttctatcattgacacttttgtaactttggctcaccatgattttatattacataattgatttaaaattaaagttataatcggaaacattgctgattttcatgttaaaaaaaattaattacaatatttgtcaaatttttgcatctccaaattcaaaattaaggaattgttggatccgggcaaaggattttacgacaaagatgaggacaaagtcacattggccattgatggaaataataattattttttctataaaattggtgtaattaattattgaaaagactcatgtaaacatttaacataaaattagaagtgattttttaaaggaaatgcgttaaaatataaatttgattattatttaatttgctttaagatggaaattggagccgcaaatgttcggcaacatttcgaattgtctctcaaaagagcggtgtggaggattttaagagagaatccagtgaaaaaatg

SEQ ID NO: 110177 - DNA, 621 bp, Heterodera glycines
tgctgtggatgaattatgtatggatgagttcggcatgactcatttgtactacataattcaataaaccctaatttttaaaaattaaaatgcaattatggccagcaattaaaaatggggagaaaatacctaaaaggcaacaattgcctcactaaaattagatgtaccaaattgttaggtctccatatataaagctgattcctttgagaacatttctcatttcctttctcttcataaatcataaacttttttatttgttcgacccttttcattttttcatcttttattttccattaattctaagaaacaaaacaaatattttttatcttttaaacaaatgcatcgaactaaaaagcgatcgcgcggcggaagaggtagaaacgcgggacaaaaactgctggcagcagcagcgcacgcagcttttcccgggggaaaaaatggtcagcattgggcacgatttgatggcattggcattatgttactatttttagtttcgattttaaattaaaaaaaacaaattttcttttctcacttattcctatccaacccaattcttacgtattcccttttttgtttttgtacttcaaattcactgctaatttcttagaattgcttcacacaatg

SEQ ID NO: 110178 - DNA, 236 bp, Heterodera glycines
attcatttggcaatgtctctctcccctctctctctctctctctttttctttctcctctccccatctctctctctctccccttctctctctctcgctctctctctctctcctcccctctctttcttttctttttctccctcctcctccttcttcctctccccatctctctcctttctctttctttctgtccttaattacttccgattttcgtttcagttctcaaattactcaaaatg

SEQ ID NO: 110179 - DNA, 677 bp, Heterodera glycines
  unsure (1)..(677): unsure at all n locations
gctactcgctcncgcaaaaagttttgaaaattttgatggttttgggtttggagaaggcacnncctnggttcgagtgcacaggtcgagttcattattctgttcaattatgtagaattttgaaaaactcttccgttcttgttgngagtattaagttcgacaattttacggaccctagttaggttagtcactgggctttttcttattttcctatgccaactttgtcggtacaaaaaataccaattccgacaatcgcggaaatagcaacagaatacgaccaacaaacatcacatgcattttaagaataaaagacaaatttatttaaaatttaaagctagaaattatattaattgtttgtgtaagttggtcttaatgaaataatttcgtaattattattttttatctttaatgatgtcatgaataaaaaattttgaatgcaaatagaaattatatgttggcaaataaatgaagaaatggccggaaatggaaaaataaaaataaatgataaaaaacattaaaaaaaatcggattctgtcgatgtcttttccactctctctctttggccaactatttactctaatatttcaaaataaatttggcatcggagcatataaaaagcaattgaaaatgccgaaaaaatatatctatcatattttcatttaaattatcctcccaaaatg

SEQ ID NO: 110180 - DNA, 92 bp, Heterodera glycines
ttaaaaaaaattaaatagtgcctttcattttacatgtaattaatcctttatttatttctttttatttccaggtgcttcctgccgatttgatg

SEQ ID NO: 110181 - DNA, 85 bp, Heterodera glycines
cgaacttaaagctattattagccgcttaactgctattgaaaaattaatttcaaccaacaacaacaacaccttggcaaccgaaatg

SEQ ID NO: 110182 - DNA, 126 bp, Heterodera glycines
tttgattgaatcttttttctttatttatatactttccgacagatttgattgtattattttctttaattatatctatttttaataattttgttattattaaattatttttagctcttctaagaaatg

SEQ ID NO: 110183 - DNA, 307 bp, Heterodera glycines
taaggaggtgtcctccggttctgctgatgatcagctttttgccgttttgtacgtgattgtacctcacaatatgcttttaattttacagtttgacagttgtctcaaatacactattagctattaataattgatctcttatgtctttctaacatttctttaaaatgtatcaataaatttttaatttatatttgcacgaaattaattatttggtaacataaaaatcagtttggtataccatattatttggtaatggaaattctctattccggccatatttgttttcgcttgaatatttccaccacgaatg

SEQ ID NO: 110184 - DNA, 108 bp, Heterodera glycines
ttttataattttctctttcttttcatcagtttcccaaatttttctgattatttttaaaatacttttataattaataatttatttttaattttaaaaagatcaattatg

SEQ ID NO: 110185 - DNA, 1003 bp, Heterodera glycines
atggattaggtaaattctctcaaatggacacttttcttcctttcgtcgcccattgcctttttctctgtctaattgcccccccccactttttttggctggtgggttttatccaattatttttatgtctccaaaaaaccaatgccttttctgactcattaatccctccctccatgggccattccttcacggcgttatctttcaaaggatttctcttaatttcttttttctctctttcttctctctttctctctctcttaatggacaagcaactgaggaggagaagcaattcattggggaattcggcataaattttcggcttttgggaagattttttggaaaagcgggcggggaaaaagggggagggaaagacgcaaaagagaagtggaagagatggagtgaatgaagatgggaaaagggaaaaacaagaaagagagatactgggagataagagagagagagaggaaagaaggggaagaagagcgaggggtgagagagaaatagacaggaagagagaaagagagggggcggaggggggaaagaaaaatgccacgggaaatccctcgggcaaatcgccgcggtccgctttttctctgtgcgctttccgtctttgaattttgagttgtttctgtttgtccatttttagcttcttgcaagtccaaattagcctccaaactgtccctccataattcgcttcccaatttgcccctcccattgtcgtcagaagaggcatttcttggcccaatttgtctgtcttcctaattagggccttcccccaatgacccaataatttaagctcccccctccctctgcttgtcaaacgcacattcttccaagtcaagcccatatcggacttaaattcgatattttatttatttaaattttattttggtgacatttttaataacaaaaaaggcagaattttttcatttacatatctaaaatatttttaattaattttaattagtttctaattatttggtgcctttttctgatattatcaatg

SEQ ID NO: 110186 - DNA, 312 bp, Heterodera glycines
acggtaatggaaaaatactcaaattttaaagtgattaatttaaaaatggaaagacaatttgctaattttgccggttgaattttgcgaaaaaattgtgttgtcctcagcagcgaatagccaaaaagatttgatggattggatgaaacaatttttcaaaagcagttcgaaagttggcaaaatgttttgccggagtttcggccagagttcgtgccgaagtaatggaattttccaagaaatataaaaaaaatttgtgatttaaaaaaagttctcaagcaaattgtacaatcttttgaagagaatgacaaaagaatg

SEQ ID NO: 110187 - DNA, 1003 bp, Heterodera glycines
aggttttttatttaaaaaaatgaaaaatttcatattttttttcttgtcattttaaacggtgcatttcaatattgtaaaacgtattttttaactgacccccacttcgtacgaaaccaattgcttcggttgtcctcgccttggacgtcgcgggtcatcaccaacaagatggacacgcaaagcgggatcctcctaaaaaaatgtgccaacaacagcaaaatatacataatgagcaatatattgtatttctatcattatttacacttatttgcttttcaatttaatcggaatttcaaaaaaaaactgttgggtttcgattcagttcagttttcattttggatttttcggacattttcccttttctcatttttgcccaaaacatttcctttgccattcatccacaaatccatcactcaatttgacccattttcccatttctctttggccaaccattttgtaatgtcactcgcttggcccctcccattatgtcagtatttaagctccccaattgcctctcgcttttaaccattcttttcccattctcatcctgacccttactcatctcacactaaaccaatttactttacttttcatcctttttcctttgcttaattcttaaacacaaataaaccaatcgcattcccccttttgtgggcatttggaaaagttaatatttggtgaaagttggaattaaataaggcacatcggagtctaagcttagtcaaatacacaacaatttttggtgccacgacccgggagaaggtcaaaaggctaagcaagactagatgaagcagttcagctgtggtaaaggctctgtgcctaaaccaaatccatcaaatttgagctggtcttagttgtgtactaccagccaggctgtttgtgccaatcaccaaatttaaaggagctggtcaagtgtgttttctagccgagctgttgtgctgaaaaaaggactaaatgtcttcaaaaaaaagtgttttaaaacaaaaaaaaagaattttggaaaatg

SEQ ID NO: 110188 - DNA, 220 bp, Heterodera glycines
atccttcactttctaatcaatttgttaaaaatctttttaaaataattttcattttaataaagattttaacttcccgattattattgtaaataatgtaaagtgattaatctcaaagcattgtatgaatataacatttggccattttatccacaagcggtggatggttggaaatgatgactaatcctttttcgacactttgctttaacaaaatgttgaaatg

SEQ ID NO: 110189 - DNA, 1003 bp, Heterodera glycines
tcaacattaataaaaaaaataaaataaaaattatgaaaaataattttcttatttttatctttgtattcatttatctttgcaataaatttttccttcatcaatttaaaaaaacataaatgaaaaaaaatacccaaaaaataaaaaataattggatgatttattttttgaagaccattagaatactttaatgttttaaagtttattttattagaaaatccaatttgtttttctgagaattgatttcacgaataaataaatgctcattaataataaaatttaatcatttgggttttattaaagaaaattaaacaaaatttcaagaatattcaagaaaatgaaattatttatattagtctgtttaattttcattttaattgctctaatttatccaaatgaaacagctaatgataaattggaacaaaagtcatttggcgaaatatttggaggaaaatgggaagaaaaagaagaagaaaatatagaagaaaaaagagaaataattgaaaaataccaatgaatgaataaattttcgacttttagtcataaacaaaattttttttcgaggccgagggcagaaagtcctaagcttaactaaattataagaattatttataatttcttaaaattaattaaaaaatttaaacgaaagtacgctaattcaaaatatttgacagaaatgaaaatttttagccaaagcattaattttcttaaatgcaacaaatattttctttcgtattataattttaaataataatttatgctaaaatatatgaaaatgaagacgcgacgctaaaataatattttattgcgtcgataaatcaattgttatgaatttatgaataaaataaaattacaataatttttgcgtaaaatattatagaatattacatcaaatttaattacatttatatttcacatcatgtaaaatcataaattttttgtatttcattcgaataattatcatcatttttaaaatttatttatatttagcaggaaaattaaaatg

SEQ ID NO: 110190 - DNA, 98 bp, Heterodera glycines
gaaaagcaacaccatccattaagattttaaaggaacttcaatcagcagtaattggcacaaatctaaccattttactggggataggcaagtggaaaatg

SEQ ID NO: 110191 - DNA, 63 bp, Heterodera glycines
ggttcaaaaattatcgaaaatttaacttatactttttgtaattttacaggttacacgttcatg

SEQ ID NO: 110192 - DNA, 439 bp, Heterodera glycines
aatatgtaagaaaacagcgtagtttcgcttaagaaagcaaattaaaatattcacatttttttttgaaaaattaaatgttagttatgcattcgggcaacttttgatcattttttgtacagaaataaattgagcctaagcttaagaaaaaaaaaagcaataaataattggttctcattttttgatttcggcgcttatttctatggctttttggcgcttttttaaaattttatctttactttttgacttatttattttagtcttttttattataaggtaaaacttgaccgggatcgaacccgggaatcacggttttccaaggtccaggtcccagtttttgaaaatccaggaaccaataaaagtcccggtcaggtttttctggttccggcaagtcttatccccacttttttgacacattcttttttagagatttatcaaaatg

SEQ ID NO: 110193 - DNA, 113 bp, Heterodera glycines
attactaaaaaaataaaatttacaaaaataaaaaataaagatttaaaataaaaaatatatatttttaatttaattattttttcaatttttaggtggcacttcgagaaaggatg

SEQ ID NO: 110194 - DNA, 455 bp, Heterodera glycines
tgtcgagggaacaaagtgagcagcagccgatgcagcagtagtcgtaccatatttcctcttggcattcacatactgtattagaccgtattcccccgaataaagtcttttccaactgaatacagcaccaaatttcaaaaaatcataacccacgggctctcttctctctctcacctctctctctctctctttctctctctctttttatctctcttcctcccccctcccctctctctctttctgtgtaatacggtatacaatgcacatgggatacggtaatgatgcacatttaattggatgatattttaatttatcaaatgctaattgcttttccggttgactggcttgattgtggcgagcgaggttgtgcccatggagaacagcgcgatcggcactttttggtggtcgattcggcacggcaaaatcaaatgctgaccggccgcatttacccaaaaatg

SEQ ID NO: 110195 - DNA, 419 bp, Heterodera glycines
aattaatgaaaaagtcagaatttcgaaaaattttaaaaacaacaagcgttggcattttttcaggttaagttagtcctttacaatggagaaggcctgcaaaatttggagagattatatcgattttagtgcgctaggttcgatgaaactttttaaaatataagcctaaactttttggcctgtttaaaaaggaattaaaaatttttaaaatatttattcatctcccttttgatagaaaaagcatcagagagccttatttaacttttaattaacatttggtgcgtttcagagcactttctgaaaaaatacttatgaattaattttgcaaaaaataaataagtaatgaaaaagtcagaatttcgaaaaattttaaaaacaacaagcgttggcattttttcaggttaagttagtcctttacaatg

SEQ ID NO: 110196 - DNA, 654 bp, Heterodera glycines
ttaaaacggtacaaaaccgtatgattttttcataagaatagccctaattagacaaaatatttgaattagcgcgttcagcaattgtcccagtgatcatctgatcaccgtacaatgacatattttggtaaaaaatatagcacaaatttaagccgaccatacaacaaaaaattgttaccatagacaaatagagtcggattttccgtgtgttctgcctgtattctgatttaattaattaattaaaattaatttgctttttaattttcgctatttttccgctatgccgcagccccctataaatggcatgattcaaacaaagaaaagcacgtttctagcataattttaggcactaattaagaatcgggcgccaaaactgcaaaaactctatgattttagctatgaatcatgaaatttttagaggggggggggggtgcggcataacggaaaataccctttttttcttacatttcatcaaaaattattccgatcaatcgatcaatgccagtgaaaaacattgtcgggtaaattccaccttaattttatcaaaataatatatataattttttgatttttgaaattatttgccaagtccaaacgctgagacaaaaatcagttttgtggccaaacgaaattcgatgaaattttggccagaaaatg

SEQ ID NO: 110197 - DNA, 291 bp, Heterodera glycines
tgacaggacggagatagagagaaagacgacagacaaattaccgattgattttttaatgtattgattgaccagttttgtaccaaaaatcttctcttttttctggattgatgcacaacgatgggaattgttcaaaaaatttcttgcagcttcgcacttcaaaagtttggacttaaaacgtagaattaaaaaaattatgcttcatttcgagcgataagccttaagatttttcaaaggtgaagggcactgatccggaatttttcaaaatttgccattttccagaacagactgatg

SEQ ID NO: 110198 - DNA, 367 bp, Heterodera glycines
  unsure (1)..(367): unsure at all n locations
agatgtcccgaatttcgaacagaatatnnttttagtgtctttttgcaaaaatgcttcaaaaaaaaaattgcgacccctgctgaaggggacagtggaaaatttttaaatttgaaaattaaaacaaatcataaaaattccaaaaaatttccctccccaccggcccctaaaaatccttatttttctttaaacagatttattgagattcaaatttttgcaaaatgaacgaatggaatgctcatgggggcgaaataatttccatttttggattgactgaattttcaaaaccatcaaacaacaattttttcctcatcagcaattgtacatcgcggtgggcatcagcggtgccatccaacacttggccggcatg

SEQ ID NO: 110199 - DNA, 58 bp, Heterodera glycines
ggtttttatttttgtttttttgtagatgattaatattttttgtggagaaaaattgatg

SEQ ID NO: 110200 - DNA, 97 bp, Heterodera glycines
gagacaaataattaactgattaattaccgattaattaattaattgcagttttataatttacaattagcatttggtctgtggcgacggcttcacaatg

SEQ ID NO: 110201 - DNA, 390 bp, Heterodera glycines
tggctaaaaatcgcaaaaatttggcagtttttggtgaaattctgttaacaaatgacttttttaaattttttgcttgataaatttttttaaatatggaaaatttaaaacccccgaaccctgaccctaaattctaaaggttggagcttttttgaaaacctttacagtcgaagaatgtatgttcgttgcaatttatgcaaaagggaattgaatcgaggcgatacatcgactaaaagaatgtggtgccaaacatatctttaataaaattgttttagaacaaacttatattgcgcatgcaaatttatgtttttaaccgttgaattttatatttgaattttttgtatatttttatttttagagtaattaaaggttaattataattgtttgcagatg

SEQ ID NO: 110202 - DNA, 337 bp, Heterodera glycines
aataattttcacaataattgaatcccccgctcgcggctcccattggcaccggcaattatttttaaaatataaaatttacttttttttttgccccttaattcaatttaactttcaaacccataaatttattagccaattaaaaaaaagaaaattaatggcaataattaaaaattcaatggaggaaataaaacaataacaaaatggttaattttcaatgatctcattaacaaaatagaaagaaattaaggcagtgataacaaaagggggaatgaatggagaaaacaaaatgttgaggaaattgtaaaattggcatggaaataaatccatattttagatg

SEQ ID NO: 110203 - DNA, 173 bp, Heterodera glycines
tggcaggagaatgaaagtgggatgaggttgaagaatttcacttttatatgcgtaaaagtgtggccacgcctacaccatttgaaaagagtcacggttttagacacgcccactaaaagccaaaacagtttgtctgccaaaaacacaaaatcattttaacaatttttgtcaaaatg

SEQ ID NO: 110204 - DNA, 57 bp, Heterodera glycines
tttgatttgggggaggggccattcaattgccaatttcttttgctgttcagcttaatg

SEQ ID NO: 110205 - DNA, 60 bp, Heterodera glycines
tcaactgagcagtcgacgtcgtcgagcagttcggatgagagtttggaggagtcggatatg

SEQ ID NO: 110206 - DNA, 1003 bp, Heterodera glycines
gtgcgataatttttttcattaaaaaatattacaaacacgtaaattttttgtcttttccggttatattaaatcattttttaattcaaaaatattttaataattaagtataaatatataacggagcactgggacggaaaaacattgagcatttaataaaatggatataactaaactcaaaaatatttgcgaattttcaacgcaattcatccgattttcttacttttttaataattttaacatatcaattctttctttttgttcaatttaatttaaaatatttagttacaatcgaagattggaaaactttttgttcgggtttcacaacaaaagacaaatgtgaaggtgaaaaagcaaagaaaaaaatttcaaaaggagagaacgctggtaaatacacttgtcactggatcaccaatacggaagaatgctgtcattatataatattataaaccgtaactgttgcatgatttgcacggatttttgcattttttttcttcggttttcgattttcgtttctgatgctttttggctttctgtttcacttttttacaaaaaaaaaactttcacttgctttgtatttttatatgtattgtataaacaattctttacaatttcaacttagtgtcaacttctggccccctcctttttaaggtagcaaatataaaaagtgactcataaaaattaaaagttaaatttaattaccaaatttaaaaaaatacaaactaattagtaattactattacacatgtacaaagtcctgatttatatataattaaatgactccaatttttcaaaataagctggcaataatcatggtatctgggaataataagcaccgtaataattagagctacgatttttaggtgctaaaaaacccccaaataggtgctaaaaatgggaaagtaggtgccaaaaagtttcaattttaggggggggggggggtgtaaaatcataaaatcaggaatatatgcggctggaggttgtgcgcgagcgaggcggacggatg

SEQ ID NO: 110207 - DNA, 773 bp, Heterodera glycines
ccaacgttctcatgattcgaatcgccacattttttcaaatttaaatgaaatgaaaatgttaatgcaaaaattaaacgtttttgctaatgcacaatttttcgatcaattttataacctctcttccattgtcattcgaattctcgaaaattgggaaaatgacggacaaaagtaaaaaatgataatttacaatattggaattttaatgggtttttttttgtttttttttgcatgttcagtccgactccatcatttctcagctcaccggcggacgacgatttgaagggtgaaattggctacaattcatgcaatttagccaaacccatcattttggaggggcggttatatccaaaaactattttatttgtttatttaaccaaattcattaacagagtgacccaatttcggaggcgaaatctgacttgtcgaaaaatattcaaattttactatttcaaattattttcaaacgttttttggggaaagaaatgctgtaccaaaaaagatttgctttgaagcattagaaaaaagatataggcgttcaaaattttgttttttgaataactttttagctaaccctttttttttgctcttaaaaccccctaggttttgttcgtaatttttttctttctcggtatgaaaaattaaaagaaattctgcccgaggaaaaaaagttatgctgttcgaaatgtggataccctaagcagaaaataaattgttttttattttgtattaaaaatcgtttcattttccatagccaaaaaaaaaaaacaaaaatg

SEQ ID NO: 110208 - DNA, 216 bp, Heterodera glycines
ttatctctcgtccattgatttcttttccttcgtttgccctgaaagtgtgccgttctcctctcttctccctttcaaaatttattctcaaaatttgccaaatgaagcttttctcttccaacaacgacacagtaaaacaatttctattcggctctttccacaatttatcaacaacgtttttatcattatcacataaaaatgcgtttttgagccaaaatg

SEQ ID NO: 110209 - DNA, 1003 bp, Heterodera glycines
ttggataatttaaacaaatttgatcaaaaaagaattgtgaatttgaattttttggaatttcacattgccaaattgtccgcttttcggggtgcccgggcacggaaccgctcagttgggcgcttacggttggtcgcgctaatcgcgaagcaatagcatagaaaaagctttaaacatgttaagctttcgaatgatgcgaatataatggatttggatgcaaagaaaaaagttatagtcgaaaaacatgctggcgcccaaccgtgcgtgcccaactgaggtagaccggcccggcattcagtctgagtctaattacataaacaagaaatcgtcaaacaacataaaattcaaggctttaaaaaaataattaagctcggccgcaaaagctgacatgaggatattagtgatgctcggagtctcggtcccgactcgagaaaagtcactgttttggattcaaattctcagttttttggttttgactcgagaaaagcgcctcggtttttggtgtcgagtctcgggaaatttgggtctcgagcatcacaccaaaaggaatgtacaaaagtgttaattgtaagcagaaaactttcactacattttatgaagtccaatcaatttttttttcttttcgctttttttgcccaatcgccgcctcggcacaaatgaaattggcccaaagcaatggcacctgaaaaagtgtgtggaaatgccaacaaaagtgcataattaggcaactaattaattagcaccggaattgaaaagagatggaaaagcgcgtgggcgtcgacaagccaaaagagaggcggaaaatcgaagaacacatcgaacgaagcggagaaccagccgagaaggaacttaaaacaaaaacaaaacaaatcactgataaaacaaagaatttaaaaaacattaaaatttatgcgattagcaaacttttttgttcaagagtctcggggtcgtgaaatgctttgggcccgccccggtgggttttgtcaagttttggtctcgagaaatg

SEQ ID NO: 110210 - DNA, 451 bp, Heterodera glycines
cccatctccccatctattccttcctcataaaattgttctatttactcgacgatggcaaataaaaaatgcacaaatctaagaagcactttgacctttttttgaccttcttattcgaattcacgagttccatgagcaaaataatatttgcattagacacaggcttggggttagttgcggcatgataacagagatagcggatcaacagttcaggcactgcgttcctatattggtcgcctttgagatttgagaagattttggtgattgttgcaaatatggaaggtttaggtcttagcgggcggaacgaacggcgagaataattcttgactagagcaatagctatggtcgctcattcagtggccttttaatatgtttaaattgtcattttatatctgcttattttatattttaaaaaataattaattaagaatccattaatcaactgatcaaaatg

SEQ ID NO: 110211 - DNA, 1003 bp, Heterodera glycines
agtttataaaataagggtactatcacttaaccggaaacaataaaaaaatattaattgttcaaagtgtaaaaaatattgtaaaacttataaaaatggctataaatatggcattaaaactattttagaagaaaaaaacatgatacaactaaaatttactcatttttagcgaaaaatcaacccaaaaagcgaaattttggcttttttgcttatttttgacataaactaaccaatttaaaaaaaaaaatttaatttaatcaatattctcgacaaaatttcgctaaaaatgactttttggaaaattttctggtctttaagggtcaaaatccaaatttagatgtttttcgtgcgtttcaggcctcccacagtccaggaaaaagatatagatttccatataggtaattggactccctacttattaggtatattgcaacttatgcaataggcgaaatactttttttaggctgaaattagatttttcagcatgatcgattttttttctcttgcagtgtttagaagaatccgtatttttttcggccgatacggattttttacggactacggatctttaatccgtaatcctgatcccgatccgtataaattaagacacggattacggattttttaaatttataaaaaatccgtatctgtatttttcctggatacggatttttacggagtacggattttccggatttttggtccgtaaatccgtatgtgtgcctagtccgtaatcccgatcctgatccgtattttctcaaaattccgatctctaatttccgcattttgaaccaattcaaaaactgttttaaagttgaagcgctttacaatttttgatggcttaatagttttatcagtgtataagaaaacatataaaagtgaatccatattttattgttttattggaatccttttcatccattccccttcaatgatccgtcattcggtcaacaaatgtttgctgccacaaattacaaatcggttgacttccaatttgtccgccatg

SEQ ID NO: 110212 - DNA, 1003 bp, Heterodera glycines
taaaattttttattaacgtttttaggtaacaaaacacgttaaaacttaaatatttcaattgtaaatgaaattataaaatattttaaagtttttttcgaatatgaacaaatttttaaaccaaaaaatttttattaagaaaaaatatttaattttgtgaacaattttttgaaaaattttttcaattcttaagggtgtattttctgaaatttttttgggtcatttcttagggggtgtgtttttcgtttttattgcatttttgttaaggattttttcgaaaatccttaaataggcactttaggcacaaaacccccgaaataggcaaaaataggcattataaaagtcatcgagacacctcaaaccaagcggaaaacgcgtttttcgtgctcatctatgcgtatcaagtgcgcaaaaattttaggcatttgcctaaaaaaggaagccctattaataattaaaattttatgctttaaaaaaggctttcaatataaaaacgcaaggaaaaactatttttgaaatttttgttcataatttttaaaattattcttcttttagagaacccacacttatttgttagtaactatttgaagctaacaagaacataaaatgtcgtaaattgaattttatttttggttttttgaacatttgcatatttataaaaaaataattacattaaattaaaagaaatgaaatgttttaaatctaaacatttaaattattttgtttaatttattaagcaattaatctaaaaatcaaaaatgttttgaattttgcataaagtgtcctggttttgaaataatgaataaacaggcgaaaattttctaattaacgtcatcaaatttatagattaatattatttcaataatatatattcgatattaaacaaattctgccaaactgagtaatttttttttgataaaattattataattcaaaaagaattcatttaattgtataaattttgaaaatattttaaaaccatttagactgtcattgcataaaaatg

SEQ ID NO: 110213 - DNA, 324 bp, Heterodera glycines
ttagtttgtcggtgaccgacaggcgctgccgaagaaattttgagaaacgtaatctgagctaaaaaagaccaattttgtggattttagtcaaatttttaattttaccgccgcaggggaaatttttttgaaagtttagtcgaaatttgttaacaaattttcactaaaattgccgaatttttcttattttcatcgaccattttggcaatcggaatttcaacggcctaaaaattgtcaaaaatcggcatgtcgcatattctcgttacgagctctccggtgtttcctattttttagttggaacaaaacctacttgcccctggcacaatg

SEQ ID NO: 110214 - DNA, 690 bp, Heterodera glycines
acagccgacgaccgatgaaccgatgagccaccgccgaaggatgaagcggatggacgaatcaatttttttaagggggaaggtgttaggccggtacccaaatgtccgccttactttatttattttgtatgtttccctcgtcccccttatctctgtctctccctccgtccataaatagcccgctttttgaccttccctcgtcatttgtctcattcgcatcattttccccaattttgttatttctttttatttgctccataaatattgatttatttgtttgccactcaacggcataacaattggcgacgcccgagcagatatttgtttgtttgtaatttgaaattacgtctctgcgggcccccttcaactgatttgaatatttattaaagctgcttttggaatttattggagtgctttcagcatccaataaatcattccaatttcgacttctttttgggaaagagtcgaaggcatttgtttgaagccgattgtggattgctttgtttattgtctaggcgacattaaacattttcgtcgttccctgttaacagtttggcactgtttaacagttgtaaagtttgcgccgctgatattgtgttttggcaacataatttcagttcgtccacgcgcacccactctgataatatcttggcgctattatcaatagagtggtgaacgacaaaaataaaaatg

SEQ ID NO: 110215 - DNA, 128 bp, Heterodera glycines
ataataaattaattaattaaatcaaataatattttaaaattaaataaaaaagtattcaaaaaaccaaagaacaaccataataaaaaaaaatttcattgatttgtttctattttagtgaacaagaaatg

SEQ ID NO: 110216 - DNA, 77 bp, Heterodera glycines
ggtcaaaataattaaatttaacaataataataatttaaataatctattttattgttcccattttagcaatcacaatg

SEQ ID NO: 110217 - DNA, 266 bp, Heterodera glycines
ataatgaagcaactaattgcccaattagaaagggtccggaattcaatgaaaatttcaacaaaagtttttttagcgattttttcaaagaattctaatgaattagtatttttcaaaaaaattttcccaatttttttttgtataaaaattttgtgtactttcactaatgacagttttatttacttattttttcatccctttccctttcaatgcgcagcgtaaaacctgatcaaaaattgtcacatttgttccccgacaatttcggcatg

SEQ ID NO: 110218 - DNA, 150 bp, Heterodera glycines
acgacgactcgtatgaccaaaaaatgccacgacgacgacttgtatgaccaaaaaatgcaacgacgacgactcgtatgaccaaaaaatgcaacgacgacgactcgcacaaccaaaaaatgccacgacgacgactcgtatgaccaaaaaatg

SEQ ID NO: 110219 - DNA, 78 bp, Heterodera glycines
  unsure (1)..(78): unsure at all n locations
aagagtgatttaaaatntatttccaattaattnntagaaatcttgaaagcctaaatttntgataaaacttcgaaaatg

SEQ ID NO: 110220 - DNA, 696 bp, Heterodera glycines
cacataatgatcgatactaagtattaacaacacaattatggtgaataaaatgtatattcacgatttttatccaaaaaaaatttacaaaacaatagggtcccccctatggtttttgataaaatacaaaatttatcactttataactagcgccaaatttgcttaataggcccaaataattgtcatgttcgtaatcaatgacctttaaaacccccgggtatttggtttcaggactttttaaacaaaaaaaaattttgaccaaaaaaaagttgaaaaaattttcaaaatacacctctttgtaaatagtgccttctaattcatttaacaactatttagtttgatgtaaaacaatgcttaaattgttaattggacaaaaatgcgcaatttgcgtcctaaatttgaccgattttaacgaatactttgcaaattttgccccgccccgactccaaaattgtacaaagttatactcgattgctgacaatccctgttattttttccactcttacacagggacaaaaccattgtttatgcgttaatttgtgtttttgtttgtgcggtttaattattggcgttttaatctattttgaatttattaaaatattttaaaaatcggaaaaatttgtaaaccaaattccaaaccaaagcaaaaactttattcatcaaattttcttctattacaatattttatccttcacaatg

SEQ ID NO: 110221 - DNA, 878 bp, Heterodera glycines
ttttttcatccccccccccccaattgctcctcaggttgtgctgcgccgtttgccgcccggcatcgttcccgccgatttacacgcgcagttcgccccgttgccggccggcgagccgcacgccttttggttctgcgccgcgcccggcagcgccccggttggcggtggcgccaacggcaataccagcggggacggaacgaacgcggccacaccggtggtggaggacgacgcggacgaagtggcggcgacgctgcggcgcgcccgttgcgccttcgcacgcgcctatttggtgtttcgggaggagaaaaatgtgcgagaaaagttgtaaaaatgggataatttttaaatccaaaaatcaaatagaaaaaaaggaaaagtcggcagcttggaaaatttgtccccctattaaaagttgcatttttaaaattaatacaaaataaacatttggtgggactctttttgtttggaattttcgggggacaatttaaaacaaaaccaaaaatagcctctttctgaaaaaaaaatcaaatacaattaaaaaaaaattgcggcggggacaaatttttaaaattatttggaaattttttttttttacattttttaagcactcaacatttatagtaccaaaatgttttttgtacataaattgttttggtttttgttttaggctttgtctttcgctgaacgtttcaacggctatgtgttcgtggacagaaacggtggcaccgaaatttattttttagattttttttttttgctatttatttttaatgctaacaaaaaagtacactgaaattttccccctctttttcggcattgaatcgatggccatcgtcgaattggcgcccaaccaaacggtgccgaaacactccgccgaaatg

SEQ ID NO: 110222 - DNA, 77 bp, Heterodera glycines
ccaaagattataacttttaaatttacactcttttgatgaaaaaaataattattttattttgagctttattattaatg

SEQ ID NO: 110223 - DNA, 121 bp, Heterodera glycines
tcactcgtctcgtataaaagccgcccaaattcactcccaatcagttcaaccaaaagttggatttttgctaaaataaaattgtgcgtaaatatttagaaattattaaatattattaaaaatg

SEQ ID NO: 110224 - DNA, 858 bp, Heterodera glycines
aaagggggaggtgttgggtatgactaaagtccatttcattcccttccttcttttattgcatttctctatcctttattattgattgtgtctgaccatttcattcgcatataagcgcatgcattttcccccattttggttgttcgctctcattcattcatttcattttatgtttttcatctctctcttctttcgcatttattttatttgtgttttccaaacaataaatatttgtcgccaaactatcggacataacaaaatgaaaatggggaaatggagggggaaataactttggcatatacaagttggcctgaagccaatttaatttcattaacatcattggttccgacaaatttaataaaagatcactgggaagtacacacaaatgaatttggaaaaagatacattacggcatggctttttgggataagttttgaattatttttgagcgatgagcctgacagggttgtcctaggaattcaggcacaattttcaataaatgacgaatggcactcaaaaactgagggggaaagtgaaacatattgggaacaattgggtgagattgacggacgaatcctcgaaattcagagaattcccgacataaccattacttattccgaaaacccattaataattgattatgaatttgatcaaaatgatgatcagaataattcaccgacaattaatgttatttccgaaggggatttattcatgagcatattggacataaatacagaaacagagaaacaaaaagaaaaatgtgcggagatttcaaaaaataaaacagaattaaataaaaaggccgaaaacccaaaaaaaattgatcaaaattttgctgaacatacatcaaatttagtcatg

SEQ ID NO: 110225 - DNA, 53 bp, Heterodera glycines
tttcggacgacatcccattgatggaagtggccaaaggcaggggtccgggaatg

SEQ ID NO: 110226 - DNA, 300 bp, Heterodera glycines
aacgaacggtcagtcaaatgaaatcaccgaatcgaaattgggggaaatattttttcattagggagctatgctgatgtcgccttttagtgctaattgaggtcaacgccagagaatttcatttagaacatttcactctttcccctcccccgggattttttataaatatttttccgtccccccccccccctttaaattcaggcggaggatgaacaaccgttgcaggaaacgcccaaaccgatgaaggcccctcccccgtccatcccaacgaacatttcttcgccaatcgacaagaaaacgatg

SEQ ID NO: 110227 - DNA, 1003 bp, Heterodera glycines
gttttgaatcgcttaaatataataatataaacgcagtttctcattataggtttttaattcatcatcaaaatataccgcccgaatttctagagagaagcttcagagttttccaaaaaatatgctggtacccaaccacaggcactaaaagaatctttttacaacgtcatttcatttttcccaagaataattggcaataagaaagaatttccaatgttttttggcacacctgggcaaataataaatatgcaaaggttttataattttcttattaaaatacttaattatataatggaatttgtttaattcgtttttcctttttgttgaaaggaatgaatttaatgatgatttcagaaaattaatagggtttatttctaaaaattcacacttaaacagttttgaatcgcttaaatataataatataaacgcagtttctcattataggtttttaattcatcatcaaaatataccgcccgaatttctagagagaagcttcagagttttccaaaaaatatgctggtacccaaccacaggcactaaaagaatctttttacaacgtcatttcatttttcccaagaataattggcaataagaaagaatttccaatgttttttggcacacctgggcaaataataaatatgcaaaggttttataattttcttattaaaatacttaattatataatggaatttttttaattcgtttttcctttttgttgaaaggaatgaatttaatgatgatttcagaaaattaatagggtttatttctaaaaattcacacttaaacagttttgaatcgcttaaatataataatataaacgcagtttctcattataggtttttaattcatcatcaaaatataccgcccgaatttctagagagaagcttcagagttttccaaaaaatatgctggtacccaaccacaggcactaaaagaatctttttacaacgtcatttcatttttcacaagaataattggcaataagaaagaacttggaattgcaatg

SEQ ID NO: 110228 - DNA, 251 bp, Heterodera glycines
aaaaaaaaaaaatttttacgatttttttgttcgaatttgagtccgggggttcaggaattagtcaaaaatgaatcccgtatttgttctcggcgccccgaaaaccttatacaaacatgtttttgtgcaatatgtataattattttttatcagttttttgttgctttgcgtgttatttgcccaaaaatggatatataagcaaactttcccccccccctcacttcattattattatttgtgtcgtcccaacaatg

SEQ ID NO: 110229 - DNA, 108 bp, Heterodera glycines
ttttttatgtcatttgaattccaatttctctaattaaatgtaataaaatgctttaatttcgatcagaattccttttgacaagcaatcaattcgtttttattaaaaatg

SEQ ID NO: 110230 - DNA, 982 bp, Heterodera glycines
aaaagtgcgctgaggccaaattcggacgaaggcatttacaaattatgcttctcctccggtgaccaactaattacagaacattgataaaccattgttgatttattcattacaccaattagcaaattgttaaaacctaaggctaaatacaatctcacccaaaatggtaaaatgccctatttgctggtcagcattgagcagttttgtttacattatatttataaaaacgaatatttaaaaaaaccatagttaattactttttcatctgatttttttaatccatttgtgtatgtatgttgctctggtcctcattctttgttcaatctaaaaaattatgatcaatcacattttttcaaatttaaaacaactttaataaaatgtcaaaaaaaagtcagccaatttttttaataaaattaaacgatgttaaaaaaacttaggtaaaaaatgtcttatatgcaacggttttgatctgttatgatttatcaagaatgttctgattttgattaatgtcgtattttatctatttttatgaaaaattggttaattttatggtaaaggatatatttattaaaaaattttgtccctccctcataatttttattgtttcacactttaactttaacattgcgctcactaataataacaccgcccatcttttataaaaaaggttgaatgtttttatccgccatggttttaatgtggcgtggcgttttgttattattttgcgttaaaaaatgatttgaaaaatgtaaactttgttttactttttttttcattttggttgacgtcgtttttttatccatgcctattaggtgttttttagggttaaatggtactaggctgtttttcgctaaaaaaaactgtaaaatattttgatgttttgttaaaattcaaattttatttgcaactttgtctcattttatgtatattcatatttatagctatacaatttttacaaaaattacaattttcatctacgcaaatg

SEQ ID NO: 110231 - DNA, 96 bp, Heterodera glycines
tttcgctgtctgcgccgccccaaaaaaagccaaggatagtggccaaggcaattaaccttcgccagctcagatcgcacgcggacatcaaagtggatg

SEQ ID NO: 110232 - DNA, 133 bp, Heterodera glycines
ttttcattttctgatttttttctctcaccatgctcgtttatgaacatttttcccctcttcttagatctaagcaaaaattaattccaacaattctcctatccccttagcctgcgggcaagaaacagaaaatatg

SEQ ID NO: 110233 - DNA, 55 bp, Heterodera glycines
tagttcaccctaatttaggttcaaaaaaaggcaacacaaattgacaaaggaaatg

SEQ ID NO: 110234 - DNA, 1003 bp, Heterodera glycines
tttgcgtcaattttaatttttctatgataaccgtaaaattctaattttttgaaaaaatcaaaaataaacttccgaaaacttccaatcttttttcaaaatttcagaaaaagataatggcatccgacacccaaaaattttccctcgattcatagggattgattgccccgcttttcccccgctttaccacaacaaatcattcattcattccttccttttcaattgttcaattgtctcaattcattcatcgcaaattccactttttccgcgcttttcatcgccacaaatttctccaatcggttcaccgatttctcagattcgtttcaattggattggctttttcacccctctcccgctttttgcgactttccccgctttgcgtagtcctaaaatattttcgcgccacaaaaatccgtttatttttagccctttcaattctttacgacctttgaattttttaaaatttataaacaaaaattatactaaaatgattctaagctttgtgcttatttaaccctttacaaataatttttccaaaaaaaaaaattttttttaattttattaacatattttaatacctctttgttggtttttgtgcatattttatacacattttagcatttttttatacatattttatttacatattttgtcatcgcttcgcagagcgatgacgaagcacgaaaaaagaaagaaagaaatgactaatcataaagcgaggacggaggccaaattgactgttatttaaccgccacccttttgccttttctgtcagttgaagcataaagagcaaatttgttgggcttttcaatcaataggcaaataatttaatattgttcatttaagcttgtaaaatttcgggttcctctggcggctataccagagaaggttcacttaatttattataacagtaaataagacgtaacaaagtggtgcaacggccgaatcctaaggcaaaaagtttgtgtaaaataaaaagagtgtagtgggtgaaccgttataaatg

SEQ ID NO: 110235 - DNA, 137 bp, Heterodera glycines
  unsure (1)..(137): unsure at all n locations
ggatcagccggattcataagcagtgaaatttnaacttttgttaattggcacaatattaattccaaaaattagtcccgaattgtgattcttaatgtttcaaaaaattttagtttcttcccattttcttccctttgatg

SEQ ID NO: 110236 - DNA, 276 bp, Heterodera glycines
attgttaaaatttttgatatgatattcaacattttaaaataagcaataccccgcatactacatggccttttggacacattgttaataccaattaaaattttaattattttctacatttttctcgacttaatcacccatccttccatcaatcactaattaatgtcttggaaggtttaaattaaattgagatatctttatatttttgtatggttttgttttctcctaggctttgcccagcgtccgttgcctgcgctgccggtgcgcaaactgagcatg

SEQ ID NO: 110237 - DNA, 142 bp, Heterodera glycines
tcgccgccgactcatttagcctcacccaacaaggggagacacaaacggccaccagcagccgaatcttcgagtcttcaccaacaagggttaaaggactccggccatcagcagccgaacctcccaaagcaggagaatcaacatg

SEQ ID NO: 110238 - DNA, 469 bp, Heterodera glycines
  unsure (1)..(469): unsure at all n locations
tcaaatcaaaaatgggcatgttcaaatgttgatactgttttggttgtacttttaacataacatttttttaaatgttatganctcggcatagttaaaaagatttctaatagatcccactgaaaaaccattaaaaaattgcattgagcgattcgttatttgaaagaatttctcatgcaaaattgttcacttttaaatattagtgggggagggcaaaaattaaggcaaaataatgatctaaaagatgaaagaataaattatcttttttttataatttttatttgtgcaaaaattatccgataaaattttctcacagagagagagagagagagagagagataaaatttaaattgaaagaattgtttggctacttgcacaaagtcgtgaatcattcagacccggaaaatcgttttgttggtatttaaattaatattaaattatgatttatttgtgtaaattatagctgtggatg

SEQ ID NO: 110239 - DNA, 425 bp, Heterodera glycines
agcaattctgattggattttggagttaaatttcgactctattgcttcattttcgaaccccgtctcggaaaaatttcgaggaattttttgaatgaaaatgagtccttcatagattttgctccaaggtgttattttataacatttggctttttaaaaaattttacggttttaaaaaatcattttttataataaaaattctcggagagaaaagttcccgccccctattaattaattaccttgctaaaattgttctaagcactaataggggccggcttcaccttaataaatccaatatccaattgaactctgccgttattactttggtatatcattcaaaaaacaaatttgttcattttgtcagatgactattcacgctcttctctcctgtcctcaactgctgactcgggcacggagtctccgccaatg

SEQ ID NO: 110240 - DNA, 235 bp, Heterodera glycines
gcgaatgtacggtacgataaattgggaaatggtgtaagagaaagagagagagaaaaggaaaaaatgagagaagagaggcgagggggaaagggatttttagcatgtgttattaagcgatttaacagaaatcgaggagctcgaactgtggcgcgtcagctgttcgggccacaattgcagtcggcgctgttttggcttagaagagtgggaggagcccattctgtgtgccgatgacatg

SEQ ID NO: 110241 - DNA, 478 bp, Heterodera glycines
cctgataattatgatttgattttttatctttatcttctatggagtggatctaaaatccagtgggtactgtattgtccgtccgagaatgaacgacattcaactagacaactcgtttttattgactttttttatctttggaaaatctaaaaaaatacaaacaaaaagtcgaaacgaaaaatttatccggaacgcaaaacccgaaactttcgaaaccgtacccgaaaataacgaatctaacactcattgactattcgcgatctctaacccgaatgccgaattagtagtccaaaatggttttatgatttgtgatctgcgactccataacgctagcccctagaaacacgttttcgcaatttttaagataaaaaaaaccctttggtttttcataattttataaagaaattagactatttttaagcagacaaacgcgcaaattctatttgaatatgtctggacacgttaatatgcagcaggaatg

SEQ ID NO: 110242 - DNA, 515 bp, Heterodera glycines
tatgtaaaccaaaactagccactcgaaggacggcgaatctcaaacgaagggggcgcaatactcacaatcaacttgtggtgtggccaacaaccgatgggatgttgaaggggaccggaataccctcgctcacttctctcataactcggaagagcatcgaatttcatttcaattttccatttcttacctaatatggttgtccattgcgagagtcgtctgcttgacttatgctggccagtctgcactcattttggaaataggtaaacaaaaataaattacaaaaatgtttttttttaatttaggtttaaggcgttttgctttgtttggtggtgaccacctgcagctcactaaaagcgtaaaattttaaaaactggaaaggtcagcttttcaagctcggctcattcgcagcacaaccgaattcttcttaatttcctataaaggttcgtatcttttatcgtaaaatacttaaaaaatgtttttagctttctcaaatcattcagcgacattatttcgaaatg

SEQ ID NO: 110243 - DNA, 112 bp, Heterodera glycines
gtcactggaaaaattccacttccggtgtttttcgtttctaccatctcggccaaggttcggttactcctctcatgtggacggggtcgaccacctcccggctcttcatcaaatg

SEQ ID NO: 110244 - DNA, 148 bp, Heterodera glycines
aggaggaagaaaataggaggaggaggaaagggaaggaaaggaagaaagagtgacaaaagggagacggaagaggagaggagaaagaaaagagtgaaagggaggaaagaggaaggatgaggaagaggaaaagaggtggaggaggaggatg

SEQ ID NO: 110245 - DNA, 552 bp, Heterodera glycines
aacggacacttgaaaaaatcgatttttttgttttcggggcagtccccccgagccgatgcgcctagatttatggggagaccgaatccttccggaatagcttccctatagcctgtactttaattctgcgttggatttttgctccccataattgtttgagtaccccaaacggacacttgaaaaaatcgatttttttgttttcggggcagtccccccgaaccgatgcgcccagatttatggggagaccgaatccttccggaatagcttccctatagcctgtactttaattctgcgttggatttttgctccccataattgtttgagtaccccaaacggacacttgaaaaaatcgatttttttgttttcggggcagtccccccgaaccgatgcgcccagatttatggggagaccgaatccttcgggaatagcttccctatagcctgtactttaattctgcgttggatttttgctccccataaatgtttgagtaccccaaacggacacttgaaaaaatcgatttttttgtttcataaatatttttttcagaaagtcatg

SEQ ID NO: 110246 - DNA, 344 bp, Heterodera glycines
ttcgtcgaccatgttgttttacttctaaaataatcaacccgggccggccttttttgaaaaattctgtccttaacaggcactacaaaaaaaatttttattttctgccccgacaacgcttctctgagtataagagggatgagagaaaacagcttgaaggcgtgcaggctctgggccaggggtgcaacattgacatgcacctgcccttatattccatagaggaatatggagaaataattcaggcacaaaattttttattcttcgtaatatttatcattaaggactattatgaggtgctccatcccggaatgtttcggcttttctgctttgagacgtttggaaaaatg

SEQ ID NO: 110247 - DNA, 67 bp, Heterodera glycines
gctgtaaaaaaggtgaggggattacgcatccaaagagaaaccaggggagaaagaaatttcaacaatg

SEQ ID NO: 110248 - DNA, 130 bp, Heterodera glycines
cccccccccccttcagattttctccacctttctgatccccggtgctccgctgcaattgtcaaacattgcgcagcgcgacattcagtccattgacaaagtgttgcgcgcaattggccaccaccagccaatg

SEQ ID NO: 110249 - DNA, 484 bp, Heterodera glycines
ttttttgagttctgtgaaatttttcagatacattttttaatgggtttcaccatgttaacaggcgggaatttttgctttgtgaaaagtgtcatggtaaaatttaatccgaaaaaattgcaaaatttgaatgaaaatggaaccgaattttgctattgagtaaaaaagcaagcaaagagaaaggtcatttcatatttgataaaatgagtttgtaaaaaaatagaaaatatcgaaaatttatgggttttatacgcattgcagaaacaatgaatgatgattgaccgcgctgttttatgcatttcttaaaaaatttcattttccgctttttgcactataaaaatccttcttcttcccttcctctcattcattcattcactcatttttatttttttccttttttatgccgcaatgttttccgttttctgccccaaattcttttacgctttgagcactatttaaaggtctgggaaatttcgatctaaaaatg

SEQ ID NO: 110250 - DNA, 94 bp, Heterodera glycines
ggttggattatgacagacagaactttggatgaataatcacgacgaatgctgatgatgggaggatgaatatgaatgggatggaggatgatggatg

SEQ ID NO: 110251 - DNA, 211 bp, Heterodera glycines
tttttctggaatatctattaaatataaaaattatttgcaacataaaatggccatggcgcaccgcacttagtttcatgttcgagagcgtttgacgcatagaacatttctcaaaaaacacgataaccatttttctgaatctctattaacggtaacgtttcttcgtacgctagtatcaccagtggcggcagcccggctggcacccagcggaatg

SEQ ID NO: 110252 - DNA, 234 bp, Heterodera glycines
tttgctctgctgtccaatgtccttccccctaaatgctcgcccttcctacgctcactccgtcattcactcacttcgtccttcatatgtttccgtctctccccttctgtccttacccgtgccatcttttcgactgtccacttacctttctccctctctctaatcatttttattcgttaaatttatagtcatttttcaattgctaaggtcattttcaagtgaataacatcgctcatg

SEQ ID NO: 110253 - DNA, 549 bp, Heterodera glycines
ggggcgttaggcgccgcaacaacagcagcagcagcagcaaaacgaatcgattacaaaaacaacaacaacaacaaccaccacaaaaacacaaagggccaaggccgagcaaatacatttcgcgcaatcttgccttcttcaaactgttgagcaagtgtcgatcggcacgcgggcgggcctatcgaaagctggtcagaagtgcgactggtgagcaactgctgtgtctggtggaaagtgcattgaacatcctacgctcccgggtgccgcttcgtggaaagcatttggacggactgcgtgcccaggcccagcacgtgcgtgcgctcgtccgaacccggagtggacacggggcgcgccgagtgctgttaagacaacaaacgggcaggggtgtgccagcgttggctggcctcctggccagcgtcgttctgcccctagtggttgataagctgatcaaaaaccagcagaagcagcagcagtagcaatacatcaacctcgacaagaaggacaacaacaacaacaacaacaacaacaacaacagcactcattgacagaatg

SEQ ID NO: 110254 - DNA, 310 bp, Heterodera glycines
atttctatattttaattgtttgatttgtaaaccaaaaatgaaaattttcgttttaagttaaagggctcaaaatcgcatttttacgataacattttttgttttatgaaggtaaatttattgaatatttggcatttttcgggttttgagcatatttgagggatttttaatgcatattttatgcgcatttttagtgcatatgatttatagcccatgtgacaaagagagatttttgtatgggctgccgtaaaataaaaaaatttcattagttaatttatagaataatttatgcaaattttagactaattcaatg

SEQ ID NO: 110255 - DNA, 785 bp, Heterodera glycines
  unsure (1)..(785): unsure at all n locations
ttttgatcttttaaagtctgaatattatttancacactttcattttaagagaatttgacagatttaattaattttcaaaattccctgtacaactttgcatgcgagattttatttggccaaattttaatcttttaaagtctgaatatttacacactttgacattaaaagaatttgacagatttaattaattttcaaaattccatgtacaactttgcatgcgagattttatttggccaaattttaatcttttaaagtctgaatatttacacactttgacattaaaagaatttgacagatttaattaattttcagaattactatatttgaaaaaataatgttttttaaagtagttttttttcaacaatttaaagtggttattgacctccataattaatatataaaccaaaacattttaaaataaaatattaattatttaatttatcgaaaattagtaaaattacactttatcaagcgcatggggttatatttataaaaaagcccttttaaagaaaatatactaaatttggcaattttgatttattatcttaattaaacgtatagaaagagataatagctatatttactcatttgagtctattgtattcgttagattttatattctcattcgctttttcattattttttttataatgtttttatgtgcctccctactaaaaaaatatttttttaatgctaaatcactaaaattcaaaaaatgcgcagaaaaacgtgcttttcgtatctttctcttaaaatatatctgaacaaatatttagcataaaatg

SEQ ID NO: 110256 - DNA, 84 bp, Heterodera glycines
ttgtttcaaattgatagaaactctccgatctttccaaatttgacacaccacagcaatcatggattgattttacagccacaaatg

SEQ ID NO: 110257 - DNA, 482 bp, Heterodera glycines
taaaatttaatttgttgttttttgatttattgaacgaattattaatttaaattttaaaaatttaaaagctataaaatttttaaaagtgaaaattttggacctatttattaaatggattacattatttacttcaaataataaatctgttttttaaagaattaaaagaaatttaatatattaattaaaaataatataaatattctgtgttttagtacaaagaatttgagaaaataataagaaatttaattttataataaaatattgagaaattattgaaaataaaagtaataaaaactttttcttcatcaatatgaagataaaaacgcattgatgaatgaaaaaaactcgataatgatcatgaaaaattaattaataaaaattacttcaaaagaattaaatttgaaatccggcgagaatactaagtaaaaaaatacattttatatcccttttttgtaaattattatttatttaatttaagaatg

SEQ ID NO: 110258 - DNA, 166 bp, Heterodera glycines
acgataaatttttggggggaatttagtatttttcgccatttaaatggtgatacaatatatgaaaattaataaacataacataaaataatatttaatagcaataaaaaacatttcccgtcctcaacccgtttccccgcacttcccccaatcccctgctggggatatg

SEQ ID NO: 110259 - DNA, 389 bp, Heterodera glycines
acttttggtggattgtaatatatttaataaatttatagttttttaaactattttaaacttttcttatttagaaattaaaaaccactttagaaacaaattacacgaccctaaacctcgcttattgttttttataaaagtcaataggccgtaccatgattaaattgttttacatgatgaaagttagtaaaagtggccaatttagttttccctaattacgcatccaactggcacatcgttttcttgatcaaatacatttttttcggctttttaaacaattttttaaataataattaaaactgattaatttttattggcttcccccgtcaccactgtttcgccgtcatttttgcgcttgtgtcgcatttgccgactgacggccatttgtcatg

SEQ ID NO: 110260 - DNA, 592 bp, Heterodera glycines
  unsure (1)..(592): unsure at all n locations
taacccnttgtgactcaaacggacagacagaagacggacagacgaaagaggtgcttcttttaatgttgatgataagaagagatgaatcaccaatattatgaaagaaaaatgtataatatgagttgttttacccttccgagactcaagaaatgaggacaaaaactcaagagtctcgcaaagccaatgagcaatggatgcctcataatttgaaggtggaatataatattgaaataatgatttaattggcatgaaaaaagcaatcaaaaagtgaaatttgaaaaaatagacatttacagacggtggaaaagtggcaaaaggagtaaataaatataaattaacacaaaagacactaatgattaatcaatcattcgttagtgtgttattctataagtaataaatgcacatacaataattatattgtatatacaattagaaagtaaaaggaacacatgcaaaatgcacgcccaattagcattctcattaaaaagatcattacaaaagcattacctaatcaaccggtggtgaacaagcaacgaataaaacagaacaattaacggagagggagcggagggggcgagggggggggggaatg

SEQ ID NO: 110261 - DNA, 455 bp, Heterodera glycines
cttaggcttaagcttaggcttgcttaagcctatccccccctaggtgtcaacaacctcgaaaacccctaaaaatatgcttttcttttaatttatgaatttagagtttttgttcgaattcggttcgggattcggaattttgcaaaataaaggtcatattcgtgatcagcgccacaaattaccctagaaaattctttaaaaagaaaaagtcgtttgagtgctttttatagtgcggtcacttgagtcgtcccagctgagtttggcactccaattccggcacttttcagcctgaaaaagggcaagcgcgccactaattctatttttccaacccatttcgaacatttttacatgattctgcctgtttttaagcatttttgagtttggggactaagatcaatattttccacatattcagtacagtgatcaaactaattgataaaaaacaagtactaattatg

SEQ ID NO: 110262 - DNA, 90 bp, Heterodera glycines
cgctccaatgtccgcgggggggccgaagtcggcgcccataagcacttccaaagcgcggtattggcgcgtttgaatattttcagtgtaatg

SEQ ID NO: 110263 - DNA, 91 bp, Heterodera glycines
  unsure (1)..(91): unsure at all n locations
tttagcatatcgtttcttgggtcgctttatgctggattacatatggaactctgattacccggagcatgtgtgnaagagcctattcttgatg

SEQ ID NO: 110264 - DNA, 321 bp, Heterodera glycines
attttattttaattaaaaatgaacataaagacaattgaaaatagaatttgaatggggattatattcagctgataaactaattttgcaatttttttttatcggtttacgatttttattcagaaattttttgtctatattttcgtatttcttggccatatttcagcgcttttcgtctattttttttggccatataaatcttcgccctatttaggaactgttaactattcgggatttttaataaatataattctcagccctaaaaacaaattttgctattttacattttgcaaattattatttttttcatatttcaatgaaatg

SEQ ID NO: 110265 - DNA, 335 bp, Heterodera glycines
aattttaaatgcgggatttgcgggatttcgggatttgcggtattaatcccgcgggatcccgtcccgaaattttgagttccagtcccgcagcgggatccgcaaatttgaaattttcggtctctactcgtaaccacagggggaacggggatggaaatggtggatatatgcttcagctaatttacgattaaaaaattgtcataattttaataaagaatcgattcacttttattatttgagtttttaaatgtcttttaggatttaaaaatatatattttttaacatttttttattattcataattatgtattaattttactaaatgcctttaggcgatg

SEQ ID NO: 110266 - DNA, 332 bp, Heterodera glycines
gtaccgggtaaagatatagtgaaaatttaacgccaaatttttaccctattaacacacctaattaattttttctaatagctatattatggggttgggtcaagaaaattatcacattttacaccaaaattacttccataatcttttttcattttaattatcttcaaaatttttatttaactgtatctatctttttcatttttttatttaataattcatcctgtaaattcggttcgcaaatgttgattacccaataaacgtttaattgtgaaaataaaaagcaaatttaatcaaaattttattattttatttctttagttgcattgcatgggatg

SEQ ID NO: 110267 - DNA, 541 bp, Heterodera glycines
ggtgtgtattaacattattttaatatttatgaattggttttgtaaaagggggctgatcagagcaacacaccgccgtcgacgtacgcataatttattttctgtttgatttttgaggagccatttcagcgcgggccaattttgtacgggatgaggattagctatagatcaattttggcatgggccaattttgtaattttgtacgggacgagattagcggttaagctattctggcaagggccagtttagaatagaccatattagtacgtgagacaatgtccaccattttggtgcagttccgcttcagcacgaggcccattttattacggggcctcgggcactttcacaatgggacccatttttgtacgcaattagcctatggctattttggcatgggccaattttatttaccatattactaactgagaccgtgtcctttttagcatagtgccgtttcagcgcgggcacattttattactaagctctacgtccatggccatcggcgttttagtgtgggacataaatttgtacgggattagctatg

SEQ ID NO: 110268 - DNA, 1003 bp, Heterodera glycines
atgatgggatatcaccaccacaaccatttatttgtctctcgtccgaaaattcgggacaaatcaaaaagtgtagacaaaaaggggggaggacgcgaaaacccagggatgtaagagtaagccccgctaagattttgggaatttcaaatttttttttcaagggaatatgcaccagggatatgtgccgatgccctcaaaaatttagccaaacggaaatcggaattccgacggctcaaaaaaaaatttttggaatttttaatagttaggtaatgtcatggcaacctctgagctgttctgcatattaatttcaggaagaaattagcaaatttttagttgattttcacccttgaatctattctaagtgtttccgatgccaaaaaaatttgtaattttccccgaaatttttaaatttcatgaacctttgtcgtggaattttctccccaatctccgactttttaatccccgccgaaggacggggagtaaacctaccagaaaatcatttcagggcgtaaaaaaaatattgcaaattggaatttcgaaaattgcgagaccccaattcggaaatcgaaatttttaacacaataaaattttacaaaatgtccaatttaaaagaaacggaaaaattatttttatttaaaaatttttgaagccataaatctgttgagttgctgtttatttatcttataataaataaaaacacttttccattgttacaattttctaatgaaaatttttccgataaaaattttttttaattttaagagcaaaaaaatttcccatcgccacatccccaaaagggcgggcgacgcaaatattcgacgccaggcataatgttggacaatgacaacaataatgccacaccgagcacaaattttcacaacagcatcacggcaccgtcaccgttgtgccaaagtgtgtgcaaaaaaaaaaaaaatttgaatttttttcggcgaaaatccaatttttttttcaatttttcgtctcttttggcactggcccagcaatg

SEQ ID NO: 110269 - DNA, 764 bp, Heterodera glycines
cggcgcggatgggagggggtagagtgggtaaacgcgtgcgggtttcacgcaggattgaatgcgtgcgtttttgtgtgtgtgatgcgtgtataggagtgggtggaattagaagttagagaagaggaaaactatagagaggagatgaaaagggaagcgagagaggggatagaacgaagattcagaaagaaaggtgagagagacagagaggaagagaagagagatagaaaagataaaggaaaaaagcgagaatacaattaaaaagagagcaaaagataaagagcaatcgagaagtgggaaatgggtaacgatagaaagagggggaaaattgatagatgatagagagagagcagagaggatgggaaatagaacagagggagagcgaaagagagagagaagagaaaaaaaaacagagaagggagaaagcagtgagagagagagcgaagagagagagagagaggtgaaagagagcagagagagagcgaagggagagagagagaagagagaaagagggagaacgaaagagagaaaacgaaatatagagtgaaaaagggagagagaaaaagaaagagcggttggcgccgctcgtataattttaagaagcaaagggttaattttttttgaagcaatatacatatgtacatacatataatgcaaattggcaaaatttaaaaagaaatgaattccttagtttgtctgcatctaaaaaactgatcaaaaagcgaaaacagttatctaaattaatcacactttccttttcatagatg

SEQ ID NO: 110270 - DNA, 956 bp, Heterodera glycines
  unsure (1)..(956): unsure at all n locations
acaacacttaccccccncccctccccctgcaactgtgcacacccccgcaactcattttctgcatcggcaatgacgccttgtcaacaaaacacccccttagcagaagagtaattccctcccccagcaaattcagtcggaaacggaaaccaatccttcttcacatgtgaaaaaagagcgtattctttccctcaatgagagtcctcctattttttcttctgccgccgccgccgccgtttgatcatcggcggaaagggagtgatcggacgacggacagagtgattgatctgctgcccacccacagatgggccatcaaaatgagaaaggaggggagagccggccgatcacatcacttttccgcccacaactcaatccctcccccatttccatgcatttcattcatttcttcccaaaatagcgcccctttctccgctttttccttctgtctatcagtttaattgctcatcatctaatcactgtctcaattcatcaacagcaaaacatgcaacattatttcccccggggtcttttaatttattttcctttcctttaatccgttgaccccccccctccccatttgtcctctttttcccttctcccattacccttattaggtttcgtttgttgggaaccacctcagctgatcactgatcacctgcgggaggagggggagggaattctgcgtttccattatcatttggtttaaaagcgcacgtgtgggacgaacgaacagtcgagggagaattatcatttaaaattttgggaagttcaataaattggtatctgctattattattatatcatttagctgaatacattccaattaatttgttttatttttattgcctgacacagcgcaacaaaaaaaaacaggagaagaacaccacaagttggagcagttcgaaccgactatgataactatcagcagtttgggggacagtggccgaagggaaggaatg

SEQ ID NO: 110271 - DNA, 116 bp, Heterodera glycines
aaacgacatgggggtgtgccaacacacgcacgcgcacacaaaaagcctataaatagacagcgcatacctgttctaactcactttgcaaaacatttagcacataataacataaaatg

SEQ ID NO: 110272 - DNA, 77 bp, Heterodera glycines
aaacaattagaaaagaagacaaagaaatttgcgattgatgaggaaacattgaaaaaaagaagagctcccaaattatg

SEQ ID NO: 110273 - DNA, 627 bp, Heterodera glycines
attaattaattataaattattcattaaataatagtgttattataaaattagccaattataatttatttatttaattaaaggttcgtggtgacttggaactgttcgcggaaccttcattgctgaacgatataacagtctgattttggttttaaaactaaaaaattaaaataaatattatggtacttatttgttagctagtttaatgggttaaatgccaataaatgtacaaatataattaattttttaatgtgtcaacacacaaatacttaactcatgaataaataatatttggttttttttataaatttattataatttttaaattgtataatatgtatttgtacattttataggcatttcaaaatgtaagatgtgaatctgcttcttaaattaggtaaatgacagaaaatcatacgatctaaaagaatatttttttaattttcacaaattcataattttttgcttagcatcccattcttcccgtgcttattttgcatcggtatcacctttactggtaccggtagttcattttttcgctaccgtaaccctaaaaaccgtaacctttaccgtccccgcgccgtgaaaccctttcaaatttagaatgacgagaacacggaaagaaaaatg

SEQ ID NO: 110274 - DNA, 838 bp, Heterodera glycines
attaataaattataacgcgccgacttttttttgccatttttagcccaaaatggaattttgcaattaagcgcaattagtggttcaaaagagagcttattagaacatagataatatattgggcagaccccctaattagcccttaatgtatatttaatttatctccctaattaagccgtgtcctaattaataatcgcgcgccgactatttttttttgccaacaaaaatggaatttgtgttgattgacaaaaacgggaacttacccgccataaatcgatcagtctgtcagttggtccccgtgctcattcccagccctcccgccccccgcaatgatacaaaataaatatagtacatacatacagccctcaaaccgtaagcgcccggggcgtcagtgtcggcggtcggcggcccgtccatttttgggtgctctgtgccccccacccccgccccgttgtccctctcccctctccctccccaacaacactcctcgagactctcgacagcaactaatgatgatgatgtgatgtgatgatgaggggacggatgatcgagactgttatcactccgttcgctgccgccaaacaaatcgcacaaaaattcgcaaattatgaatacgaatgaatgaatgtggcggcggcggtgttaaaatatgatatgtaggtgctgattggtgatgatcagcacagcagatcagggcaatcattcacgccatcccatccccaatcactcctcactcacaacacatcacaaacacccgccgccgatcgccgcctcgtcccacccctgggcgaaattcgggggggggggggggggggggaacctgtcgatcggtcggtcgatg

SEQ ID NO: 110275 - DNA, 545 bp, Heterodera glycines
ttggatttgattttaatgtcctgtaaatgcggaatttttttccattttttgaaatttcttgattcagccgatcctactattttgactatttatcagttcaacaatttcacaaattttgtttgatcgatgaatgaaagcaataagcagaacatttgcttgccatctactggagatttaatgaaagcagcagctgttgaagaaatacgtataaagtcaaaggaacatttattttcagtttcatctgtttattaattattttaattttgaacaatggataaatatacatattatttttatatgtttttccacatatttttgtatgagaatgcacaaaattcatttttgaccgaaatattttgtgtaaaaacaattttaaattaaaaaaaaattgtactccgtggtaaataaatattaattcacaatatttattattattatttatttccctgttttgtattctaatacgggaatcattaatttttgattacagataatattttaaggtatttttactaaaaaaaacaattaattttttgtgtaaaatg

SEQ ID NO: 110276 - DNA, 1003 bp, Heterodera glycines
catttcaacaaaaacacatataattagtgcagttatttaaatttcaaatgaaatgaaaaaatcaaagaaatattaattaaatcaagaaaaataagcatgaatgttcaaaaaataaagcgatactatatgcgtttaaatgatgaagcaaagtaggtaccttacggtttggggcagtcacatgtgagttttaaaacctcaatgaaaagcccacagaatatccaaaaatagcgcttcaactatttgggaggtataaaaaagtaacaatttgggcattttgcagtcctcacgcaaaaaggatccgcacagataggagttaacattttaccgaaaagtctcataaatttactcccttatgtgcccatgctaagtaatttatgccgctaccgatggtgaaatttgggtgaagccgtaaatatcgggccgcaaatgtccgattttggcttaggacgcaaaattcaataaaaaaaattgggcctaaaatgttccgataatgtatcttaagaaatgggccgcaaatgtccgggacaccaatgtcgggccgtaaatgttgggccgcaaatgtccgattttggcttgggacgcaaaattcaaaaaaaaaaatggcctaaaatgttccgaaaatgtatcttaagaaatgggccgcaaatgtccgggacaccaatgtcgggccgtaaatgttgggccgcaaatgtccgattttggcttgggactcaaaatttaaaaaaaaattgggtcgacaaggtacgaaaattgcccttaagaaacggtccgccaatgtccgggacgcaaatgtcgcgggccgcaaaagtccgattttggcttaggccgcaccaaaaaaaaactgggccgaaaatgtccgttaatggatcttaagaaacgtgccgcaaatgtccaggattcaaatgagaaaaaattaccaagaaaatccaatgatgaaaatgcaaaaaaaggaaatattaaataaaggaaatttggatttttaaaatcctttttttagaaaatg

SEQ ID NO: 110277 - DNA, 1003 bp, Heterodera glycines
cactatatagtatcagcataagatttacttgtagccgcattcagaaaattattcagataccagaatacaaaaacccagaaaacatattctttggttccgggcattcttgactattttaggattcgtgaagccttttgtttttgctaaatcacggttaaccggataccggaacttcctgatttttttgggtccggaagccctgaaggatttaagtacgggtatttgacataaattttttggagaaattggcatgttttcaaacgcaaaaaaggccacatttaatacataaattctactttctaccggtggcaattaccgtaaaacttgcctaatccaatctcatgtacaatgttccaccaatttttataacgttcatgaagcagtttggtgtcagaaagttcgtagtttctttcatgcagatacttggtcgttattttgttaaattgttgtacaaattgctcgtaaaatgtgtttaatttggacacataatcctgctcttcaccattgtccagtgtctctttgatagacgccacagtaagcggcggtgctacagtatcttagaaagaatgatcaaaatgaattgcgagcgtgttggaaaattgcaaattcctacaccctgcatttttcgtaaatcagcaacttagatactgtaaggaagaagctggctgggcgattaaaacgcggaaagcgggggttgttaagatccataaaagaaagggcggatgtgcctcggtagcggtagagctgcccacggaaagggtgcatgagtgggttcgattcccacccgaggtttaacattttgcccatttcttattatactttacccaccaaaaattggcgtagtttttcagaaaaattgagtagcaaatagatatcattcattctagccctatgtattctttattaggaatttcaaaaattacattaaaaatcaaattaaaaaacaacaaattaaagacactctcattcggtttgaaatgcaacagacgacttcaaaacaatg

SEQ ID NO: 110278 - DNA, 473 bp, Heterodera glycines
atttttaagatttaaaaatttcaaggaaaatcctaatttttgtaaacaataaatcataactttttggtgagatgattaatcgcttagcttctgcttaatgatagcttttaaacacatgagattagaatgataccaatcttgaagaaattaactgaccaacaaaaaagttatggccattcccatttgaaattgtacgaaacgacattgtacgaacctgccttgtgaacctagaaatacgtcctataggcttcaaactaagctaaaaacatgtttttcgtgcgtttcaggcctcccacagtccaggaaaaaaaatatggatttccatataattacaagccctagtaatttattgtcaattttatattgtaataattttttgatttaaaataatgttagtttgactgatcctttttgcttaaatttaatcattggtctagatttgtgacgttttgggttgctgaccttttggaatg

SEQ ID NO: 110279 - DNA, 104 bp, Heterodera glycines
attctttttttgtatttatattttgaactgacttttcaatctattggttccatcggagaaagcgatttccctcacattttccctgtttttaagacccaattatg

SEQ ID NO: 110280 - DNA, 95 bp, Heterodera glycines
acgaaatacctaaaatcgatacggtttaagtcttagataatttactaatcaaataattactgttggtttttgacagcaaattgtctgattgaatg

SEQ ID NO: 110281 - DNA, 727 bp, Heterodera glycines
aacaattttatgcgccatgaacagatcaaatagctttcgcctattctcaagtgttggcagttgcaggtattctaatcgattttggtatggaattggcggaaggctacatttaaaaaatactcttttggtgaaatattaaaaagtagcaatgaaaagaaaacgattcgaataatcccaacaatacacctgccaattaattaatgaaattacaccttttcttcaaatcaactaaatgaattataaaaattgaactcaaaaagggcaaacttcaagggattttttgttcaaattaaaataaaataatttaactgacatagaaaaatgaaagaaaagttcctttttatgcaataataatataattttattttgctcatttcatcttaatcaaattttgcactttttgttatgtaatggcgtaattaaataaaatgcgactctgagaaaattattttgattaaattttgtaatggaatattaaatgaagcaattagtgaaccagcagcttacactttcagacgttaatttatctgaaaacaaattaaaaatgaattactaacaaatgaacatgaaagcgagtcattaattgaattttacataattccaaggttaaacacctgtattaaaggaaatattagccgaaattcccactttattttttaacttttcatttaaaattataaaatttctatgaaattttagtttctgaagcatttaaatatcaaaaatg

SEQ ID NO: 110282 - DNA, 366 bp, Heterodera glycines
tggcatgggtttccctcccctgcgccgccccttccgatgctgtccctccctttccgcaaaattattttatgctttgcttgcataagtcttcccgcccggagaaggcgggcgaaaagggacgaaaattggctttgaagccccgaaaagcctttgccgaaaggcggggggggggggcgagggtcgcggaccgggtcccttagattgggctcaatattagcaattccccgctcaaaacgagattagccgctggcccattccctctgccgtgccctcccccccccattttggcattcccctctctcactcattcattcatccgtccaattgttgctgagttagggaaaatcaaaaacccgtcctaaaatg

SEQ ID NO: 110283 - DNA, 875 bp, Heterodera glycines
ttttttaagtgggacgacggcactttttactcattaacatcaaaattcggccgatgggaaagccaaaaaggcaaatatttgctctttttgggtaaatttaagccaattttttgattaaatttgacgtgatttgattattttaaggaaatgctaaaaaagtaaatgaaaatgacgacgaaaaacatagcaaattaatgacggaaaaaacgaagcaaaggaaaggagcattgccaaatgccaaactgaccaccctttggactggtgctgggtcgtttcttaaaaactgccaagttgtaggaaaataaaaaatgtaagacatataaattcgtatcttggcttaaattctaccaaataaatttgaggacacatagggttatcgactaataacaaaaaaataaaaagcgaaaatacttactaactaaaatttattattcatcaatactctaattttgatcatctaaaattccgaccttaacatgctcaaaacgaagaaaatacactgatgttgtatatcacatctctactccttatgggtccatccatataaactgtaaaatttcaaatatatcgtaaggaattaaccttaaatattaaatatatggtggattattcattattaaataaaattgcatttattatttcacactgactgcttttactgggcatgtcgcttcaaaatgtgttaattggcttagtaacgctgtccgacgaaatttaaggctcggtgaagcaaatgagcctaatccaacaccatttttgcgaacactaagtgcttcagaattggtttcactacatgtaatgaattaacaattaatttatttatttattactgattttcgcttatatatttgaaattgaatttttagttccaaatg

SEQ ID NO: 110284 - DNA, 1003 bp, Heterodera glycines
tccttccgggaactttgaaattcagtgttaacacagcgtttgatttggctgctttaggcatttaaatatataaagaaattttctaaatgcttaagaaacgtaaagtagtcaatttttagggtgcattttcagattttcttgtattttttttacgatttttctcaaaaatgccaaaatatgtgcaaaatatgtgccaaaaccccgaaatatgtgccatatgtttttatgtgccaaaacgccaaaatatgtgtttttatgtttttataactcgctctaaatcaaaaattgttcggagaaaatgctatttttgggcttctctcgccataactaagccgcaaaaaaaatatgttaaaacataaaaatcccagccctactcattagtgttaattaaatttggcataatgtcttttttcgcgtttttctcacttaaaattgtattctttgtttttttccacctttcattccaattttattatctggtaatttttattgttttgtgccgtccaatttcttttgactttaaaattgatattcgtcaaattgtttctcatcgatatttgtcttttggaattaaagtgtttggatttgacattggcctactctgtgtttggtataattgcgtccctgtcttaagtcagtagcaaaagtacaatttggcgctcccgaggaaacaggtacaaaagcggcgatttttaaagagtttgagggtgagatcgggaataaaaaaattttcggacgggttttaatttggagtgtattaagtatcagtccggaccggacgatatttaagttctcaagtggaaattgactattccggatcggaaagttaaaaaaagcgacaaaaaactccagcgcaccgaaaaatttattgtttatcagaaaatttgagttcgggccgaaccttttttgctgtctacatcgccgtataaactattgacaccgggtcggtgcttagtttttctccgtcttctcgccgaatttttacatttgaccttgttggatg

SEQ ID NO: 110285 - DNA, 1003 bp, Heterodera glycines
acatattttggcgttttgtcacataaaatatgttagcacatattttggggtttggcacatattttgcacatattttggcatttttgagaaaaattgcaataaaaatacaagaaaattgaaaaatacaccccctaaaaatcgacttttttcctaattattaacataattttcaaattaaaaaattttttcttcgattgtagaaactaatgaaatctcgaattcattaattcgtcattggatttagaagttctctgctggaactttcaatttatagaaatgatttatcaaaaaaagacaattttaccccaaacacttcgaaatgtatttgatttgcgttgtatgggctaaaaatgataaagaatgagatttttgggaatttttatgcaaaaacacacttattttttcaatttttaacacatattttagcacatattttggcatttttgggggtttttagcacatatttcagcattttttagcacatattttattacatatttcaggatttttagcacataaaaatccgggccctactaataactcgaaaagtagcttaacaacagcccaaaaaaacatgtttttcgtgcgtttcaggccacggggagctcaggaaaaaaatatataaaaacctaaaaatcgaagccctagtccacacaaaaaaaagttttaggctgcgcctaccgggtcccttaaagttgattaggcagctgatccctcctccatctattcaaatattattatttttgccacaattttttcctctctctttaatttgggataaaaattagtttttgtcatttttgtaatatttttcctatttgcttatttctgaaggcacggattgtgtgatgtatgtgctaattgtagcggaaaagccaactattgcagaggaaatcgcaaaaattttgtcaattggcaaatacgaaatacggagaggtgaagaaattcattaaaaataaaataaaactgaaaactaaaatattaaatttttttttgcaggatg

SEQ ID NO: 110286 - DNA, 416 bp, Heterodera glycines
cctttctgttcatcgctctgatcactttctgtctgctcccacacagtgacccagtccggcggcgtcttctgccacttcctttattcattcgctcatttgccccccattttttgttatttctctcccccccccccattgatccgtcttctgatcactttttctgctgctcctccccctccaatcactgcttcatcattttccgtttttcatcgtccgctgtccccattttgccttttgcccctcccatttaaagtgtcaggcgaatggcgcatcttcgtcagaacaccgccgccattctctgttccccgccccctcccttccccaattttatttctaaattaataattttatttttttattttaatttgtttccgttcttcctttttcagtttctctctctctgtgcctttaccatg

SEQ ID NO: 110287 - DNA, 94 bp, Heterodera glycines
ttttttaataacgcacttttttgatggctttttttataagggctcggcaccctttaattaaccttcattaaaaaaaatattcagaattcacatg

SEQ ID NO: 110288 - DNA, 1003 bp, Heterodera glycines
agtgaattattggaaagaattttgcacctgaacaacttttaataggcgcctcgcataagcctggaatattcttaaaaatatctgttggttagcatagttggtaaaatattataaaatttctttgcatgttcagcttgagcttgctgctcaactaatagtgagtcagagcaacatcgaaaacgtatgtacataggaacattcgacacggcgattcaattttgggctccaagtacaattaagttggtcttttcgtcttagtggtctgtgagttagtcaccaaaaggggggtcccaggttcaagtcctccctatgttgtgtgttaatttcaatttcttcttttaaagaagaaggcagaattattttttcattaatagaaaattctggagaatattgtaaattttatttggtttggccttaaattgtggacttggctaaaaaagaattaaaattattgaaatgtttgccctgggaaaaaatttttcctgtgggtaacttttcttgaaattttgcctaggctagttttttggcaccatctgtcgaattctattttgttttttgaaagtatcccttactctatactaagtgagaggaagctccgcccctttttgtgtttttgagtttgtttggcgttatgttttaaaggaagagaaaaataaaataaaagattatgtatgaagggaagagaacacttcattattttgttatttacgtttttgatttcatcatttgttttttcgtttccccttccgaatggatttcttttcctttgtgtgtccttcattttaaaggaactttttatcattaatatttttcttttaaattattatcacatttttgtgaatgtccatttttttctaataattcattattatttttgttttaatcgttttttgatataattttttttgaatttcataattttttaaggtgtttttaatcttttatgaaatgctctcaatagctataaaaatatattcaaaaattattttttagatttgcaatg

SEQ ID NO: 110289 - DNA, 330 bp, Heterodera glycines
ttttcatattttgtgacaacttttgagtttgatcgacagaatttattggtgcaatactcatgctctgccaggagcagtttgggccttggaatatttttttcaacgtcaacataactaaaagaagtagtttctggatcagtgctccgacagaggaaattgatgctgaaatttatcctttgaatttttaggatcagtaagttgcttattcttctttttgttgagaattatggtaatatttgggtgttatgtcattaattaaaaatcatcataatcaatattagcgcaactaattacatgatttaattgcaggaaatacgtcattaaaaaatg

SEQ ID NO: 110290 - DNA, 411 bp, Heterodera glycines
  unsure (1)..(411): unsure at all n locations
atgcagaattcttttctctatcgatatgcaactcccccctggggtttaacgtatagaaaaaaagttagacggagacatgtaaatgttgttttttanataattaaaatgaagagatagtacgccaaagtgagagaaattacaaagaaaaagaaaaacgacgagatagtactaggcttttctctgcacagtggggcgtacccatagtgtatttacaatcccttctccatcttttcactttttgctcaccttctctttcttaaaaaaacatcaagaaatcgacaaaaaaattcgttctctgtgtacaaaacgcatacgtctctttatttcaattaatttgcttataagcaaagtttcctaaaatctgataactgaattgtcgttgctccgcatttgacaaaaaagaagaaaatg

SEQ ID NO: 110291 - DNA, 493 bp, Heterodera glycines
  unsure (1)..(493): unsure at all n locations
tctgacaaatgaatggcccaaccaatgcaatattttatttttttatattaactttaattagggaatgtgccccgtgngtggatattagtattatgaaagcagaaattatcttatttgttccgttctaattatcttcattttgacaccaagagttaaaaagtagagcgccccagcgaccgcgcaaaatttttggcaggatttctggtcctgttcctgattttgttccggcattttcaaaatcttgatctttattaaaaaaggtttgaaccgatcagtgatcactgtaaaaacagttttctccgtcccttcccccaccttaacactgttgtcatccgtcggcgtgtattgtgcgtcaaaatgcagcgcctgcgtctcggccggaccgccttcgccttgcgtggccaccgtcagctgcttgacaatctgcggcgcctgcttctccggctccgccggctcttccggcagcggacgcggcgcttccaactcggcgatg

SEQ ID NO: 110292 - DNA, 394 bp, Heterodera glycines
aagggggggaggtcgaaagctaagggaaaaagaggaaaatttctgaaaaactggctattttcttaacaaaattcattaaaaattctgaaaaattttccccggcggcgcctatcggcaccgccggcccccaaaaaaatagctctacaattttactcagaggtgatctttcgctttttctattgataaaaatggtttattgttttttttgggaaaagataaaaaaattcaaaaaaaccgaaaccgaaacggtataccgaaaatttttcttcggtttttttcggtttcggttttttttggtttttaaccgaaaccgaccgaccgaccctcttgtccggtctctaattttaaccgcctcatttcctcctttttttttgcatcgcaggatgaacaaatg

SEQ ID NO: 110293 - DNA, 502 bp, Heterodera glycines
ataaattattttaaaaagtttaattagcgtcgcgatttttatgtgttaaaatcactgtcacctgaacccgtcagtttggtcctcacgattggacccctcgattggccctcatgttgggccccacacatttgggcccaagcatgtttttccacttataacttttttctttggcaccaaaattcaacattcttggtgtcattcgaaagctcttaacatgctctatttaccttacaaaaaacgagaaaatttcaaacctggaaaaatttattaaaaagtttcaaaatttttgatttttttttgcaacttccatgtataacttttttggtaattgtgtaatcgcgaagctatacatagtttagaaattattatttttgttccgagagttacaataaccaactttcccaaccatctaataacacgtaaaaatcgcttccatatattaatatatcaatgttcaatgtatcaattttatcttttactgaagcaaaatatttgacagatg

SEQ ID NO: 110294 - DNA, 428 bp, Heterodera glycines
tttttagcctaggaatttcacacagaaaaaaaatttgcaaaaaaaacaataaaaattctgacttttgcggttttcaagcgattatttttttgtgagttgtttaattgcttacaattagcattagcttaaaaatatcttctaaacacaagagctttcgaatatacaaaatatcttacataggttttatcaattaagaaaaaatatatggctcttaaccttggctgagacggagttggcccgacggagtttttaaataaaaattaaatagttttagtttatttattttaattcttattttcatattgattaaataaattgtttaacattgcatttttttaaaaattgtatctttccttatttattaaattttttcacattttttttagtctgaaactccttcaaagtcaaataaaaagaaagcatcgatg

SEQ ID NO: 110295 - DNA, 1003 bp, Heterodera glycines
gagaaaaatattttaaaaagcattgaaatacttttgattggcatgtgcttgcgaaatggataaagaatgtgactttcttgaaaaattcactttttgagcagttttgtttcgattttttgcaaatattaaatgcctattctttataatgaccttaattcaaataaatgttccaaagtttgaaaaatatttattctttttgggtttaaaatattttattccatttttttctgatttgtcttttgatggcacatgagaatacatatgtatgtggaaggccgtaataaatagtaacagtgcaaaagcacaatcagccaacagaattttcgaaaatttccattttttttttgcgaaaatgctgattaagcttttggtactatgtattacaaacaaaaatatatctgtgatttgtattttgaagatcattcatatataaaatggaaatgctttgaagaaaacggattttcacatctttgaacggcaaaaatggaagataatttgctttttgcgaaaatccatttcccagcacttttgcactggatgtggtgtggtggttgaggatcataatgagaggtgtggtggagggggcgggaagggatcaacaattgaaaaatattttgaaatttttgttttttgaaggcagagagagcgagaggaatggggacggcacgaaaacatcttttgattggtcgaggaacggggacggcacggcacgattggtcaacattggcaaatggggcgtgatgtggtgcggtggtaacaaaatgaggagagaatgggggacagagatgtgccataaagtagatggaggagaagctaatctcggaaactaattagtcttttctatttgaagggacatggcggcaaggctttcgtctgttggacttcggcgaaaactgccgcggcaaatgggaaaagtgattcggcaatgtgcggttgacagagtggatatgcgtcgatgaactgttggacgagtcgggcggcgtcaatgcgtccgttcaaaatg

SEQ ID NO: 110296 - DNA, 70 bp, Heterodera glycines
gacccgagactctcgaactatttaagagataattggaaaaatgtcaaagtcctgcctaaaaataacgatg

SEQ ID NO: 110297 - DNA, 213 bp, Heterodera glycines
tttttgtgacttatttattatttatctcctattatttcgttgctatcttactgtttatcaattaactgaactcatttaacagtgtcacaccaacgcaacgacaaattgaataattttgcttgttttatttaattgtttagtttttgttacacgatcaaattattaattgccttctttattcgtatttttccttgtaattctattttttagatg

SEQ ID NO: 110298 - DNA, 1003 bp, Heterodera glycines
aataacgacgagaaaaaatacattagaatggataagaaaatggggggggggatacgaaaatacattaattataaggagaaaggtatgataatacattaattagggatatatacaaagaggggagggacatgaaaataaaataattataggcggggatatgaaattaattagaacattaataagaatgggggggataaattatatatttatacattaaattaattaatgaagggggggggggatacatatggaattacattagaattaatatgagaaataaggaattacattagaattattatgagaaatatggaattacattagaattattatgagaacagtatgttgagaactcatacagaatacagagttttttttaaatattgcaccagaatttggcaaaatgttattttaaatttcccagaccaaaaatatttatccattagtaaaactctgcattctgtatgaggtgggcgtataaattagtgaaacgggtaagttccagcgtgtgggcgccgggccccccggtgttgttagcgtgttggagggaggcattatattcattacgcctatcctcatcaagaagtacagtgttaaatcccttccgggccagtacaaaatttgctaatagccgcgagcagcgtccgttgccgtcggcaaagggatgaatgaaggtctaaatattgaatgggtgaacaaaagagacaataaaactaaacatttttctatttatcattcattatttgaattatatttttatgtgtgtatagcttattttgccatttgtgttatgcatttaactaaatttgctttgcagaacagaattttggcttttaattacatattttgtttttaaaatgtctgctaatctaataattaaactgcattactagtcgataatgcgtctccgctgttagtgtaataatgtcagtagtgttctcgtggcagttgaaccaatcgagaaattccattagtttttccgggacttcctcgtaaggacatg

SEQ ID NO: 110299 - DNA, 386 bp, Heterodera glycines
tagtttcgtgtagttattgtcctccgaggcataacttcacgagggacgtagcggacttagtgtttaccctctgaggaagcacttcgtccgaacagagggttgaaaggtgttgtgtagtggacgaagtacttgccctccgaggaagtacttcgtacaaaagggtgttcaagcgcgcacaaggccactgacaaataaggaaaaaggcaaactaacagtcctccgaggctttagtttagccataaggcaaaaggcaaacaccttgtcctccgaggcagctgtttagtcacaaaaggtccaggaccaaggccagactgatcccggaaaaagacacaaaacaacaagtgcaccacaacacacacacacgcacaaccaaactgcacgcaatg

SEQ ID NO: 110300 - DNA, 520 bp, Heterodera glycines
gcatttttgactcactaccactcgaaatttttgattgatattcattcccgaaattgcacagttttgtgcgaaaaatttgttcctttcccctctccaagcttacgagtttgaagggtatcaattgtttttcccacaaaacatttttgcttcaaattgactggcaacactggtggatcacttttattttgcttattactgatttaatttattactttggtaaagtgcattttaataaacaatgttcaaggggtgtgtaaagcgttttttaaaagggcaaaaggcaccaaaaaaatatttctaggcattttcagtccaaatgttgtgtagaaccatacaaatttttccttccaatttaaaccaaattttatatttcattatttatttttatctctaccgaataaaaaaattgtacgtaaaaaatgagagagtaaaaaataataattttattttcccactatttttgtttggttcacttaatttttaaacaaattacataggggtattcattttttgtgcaatg

SEQ ID NO: 110301 - DNA, 186 bp, Heterodera glycines
aattttacaccaaatcacaaaaaaaaacaaaacacttttacaaaaagagtagattacactttccggtcggaagaagaaaattcttaccaaaatataaataattctaattcactaccactaaacaaaggggatattaattctttagaaggttttatctgttgcttaactaatattcgctctataatg

SEQ ID NO: 110302 - DNA, 234 bp, Heterodera glycines
  unsure (1)..(234): unsure at all n locations
gaaaaatgacatatcaattatagaaataaagaatagctttataataaatcaatttcannaatgataatgattaaatatntaaagcatcgatttgggagtagtgaatcgaagtcattttttgctacgttttgatggaaatctgaaggattccttcacatttatttcaccacaaattagtggtttgttttaattcgtttcaattaatttaatttaattataaataattttcagatg

SEQ ID NO: 110303 - DNA, 125 bp, Heterodera glycines
ttgttaatgccttacatgtttgaaaaattttttgttatagtcctcttgacaattttccccctattttgcacccacaaaattttttttcccctccctttttttcgaatttgccggccctcggaatg

SEQ ID NO: 110304 - DNA, 1003 bp, Heterodera glycines
cagcatcctttttgccaatttcgaacccctgacccgaacaaagataaaattagaaactttcgtatgtatgatatcctcattggcatcttgctcatgagggtactcttggtattggaagcctatcaattccttgtccctgtacagctcatgtagtgaacggtagcgctgacctgggcacggattcatgatcagcgaccctaaaaaccccttaaaacttattttctttaattttaaaaacacatttatgtataggcatttgaaaatctatgttaaaactgtccggtaaactgcaaaagtagcctggtttttatgaaaaatttaacaaaattttttggaaaagttggaagaaattttcgttttgacgctcttttaaaaacccaaattattaaaatgattgtcaaacattatgacaatttatcaaaattcataaaatttaacagattctgacgattttccctaaaggcctcaaaaatcctcaaaatttctcaaaaatccctcattttgaaaatttatcttcactgaatattaaaaaacaacaaaatgaggctaaagcctcagacctgggaaccctgattaataacaagctaattatgagcaactttctgtgattaaacattagggcttccattttttctaagaaactgctaatttttttttttgaatttggacctaattaaatttgttttacaataacaaacggacattctaaagacaattttttaaaatgaaatgatattgtttgacctcataaataattctttttaatttctaagattatgcactagttagttttttaatttcatttaatcgccatctctcagtttgatatatttctttaataaattagttgacattcttcctttaaaattaaagaagaatcggcacaaataataacccaatttgatatttaaatcaattagttgatcattaattaatcttctatatattattaataaaagtattaagctatttttcatcctcaacaaataattataaaactatg

SEQ ID NO: 110305 - DNA, 385 bp, Heterodera glycines
tcccagcctgattaacaattcctgcctgtgaaaatcgggatcctaaacctaaaattttgggctggaatttatggtcttaagatttccattaaaaatgccaaaattttttgcattttcttattagttttccaaaataattgtttattgaaatgttttttaataataattcatgaccctttagaataatgcatatgaaaatcacaaaaatacaacaatttccgtttttcgataataattatttattcgatttttaccaattttttgcgccacttcctttgcattataatgttgtcaattacattcaatttagtaaatgcaaatatataaatgtaattgcgttccattcattttattaatttaaaaattaaaaaaatagtgaacaatg

SEQ ID NO: 110306 - DNA, 304 bp, Heterodera glycines
attggggagcagctcgttttaaaaaaattattaacttcgaaatttttcaagaaaaaaatattaggttttttatatgaaaattcttcgaaaatttttttaatttaaatttctggggggtggggctgatacggggtggagaaacttggtgccgatgatttcatatggcatggatatgttgctgttctgtccgttttcacctcctcccaccattgtcagaagccctttgattgtcgcggttgaacatgaaaacattgccgtcattgacttacttctgcaacagctgcccaagttggacgtgaacatg

SEQ ID NO: 110307 - DNA, 214 bp, Heterodera glycines
ggtaaaccgggaaaattctttgtggttttaaataaaattttaaaataagatcacttacaaataaaattaaataattaatttataaataataactccattaaaaacaattattctttgatgaaaaaagagaaattgttgaaaaatatataaatataaacattcacgaaaggaatggaatgaatttagagcaaaaattaaacaaataattgatatg

SEQ ID NO: 110308 - DNA, 326 bp, Heterodera glycines
taatgattttgttttgcattactaaaaaaaatatacctatcacataattttaaaaaattaataatccgatccgaatgagtgctatcatcgatcaacgatcgcgatcagaggatcaggcaaatattaagaaaaaacatattgccaaatcaatgccaatttaaattattcccaacccaaagggcaccaaaaacagctaatttgtaagagcgcgcccataggcgtcggtgtcacccagcagctacagtcagctaaatttttttccatggaatataataatttaacatgagaatgaacgaatttatattttagcgaaaaaattgaatatg

SEQ ID NO: 110309 - DNA, 59 bp, Heterodera glycines
aattcattttcgttaagactttcggaattcgcctcagaatccgacggggaagcaaaatg

SEQ ID NO: 110310 - DNA, 242 bp, Heterodera glycines
ttttgagaatttggaagctacaattttgaaaaaaattaacgaatggaagagtgcaatttatagaggaaaaatgcaatattaatgagatgaagacaacaaaatgaaaaaattaagggataatatgctatttataataatttttaatggtccaatttattttataggttaaataaacattgaaaggtataaaatgcaaaatttttagttctttgtattattattcttccattttcctaaaaatg

SEQ ID NO: 110311 - DNA, 441 bp, Heterodera glycines
  unsure (1)..(441): unsure at all n locations
taaatantttgattgggactcataaagtgcaatagagccaacataggctaaattctgacttttctgcagttttcaagcccatctttataggttaattaggtgcttagaaaaaagacatacctattaaatatctttgaaactttagagtattcggagacacaaagtttattttgctttttacgaacaaaaaaattatgctttattaaagttgtcttcatacactgttaaaaaaagtgagtgaatgaaaaaaaatgggggagggagggagggcttttatagtcgagaaaaaattggaaaatgcaaaagcgtacaaatgagcataaaaattagtataaaagtggttgctcctcatcctccaccttccattattattcattcgccatttatttgcttcgtctctctctctccaactttttctctctgacaattcctttaaaaatg

SEQ ID NO: 110312 - DNA, 350 bp, Heterodera glycines
ttttttattatttattattattgtctcttcgtaaataaatatttgttggtcttattcactcggacaaagacacaacaaatttggcgcagtcagcagtcgtcttcaaccaacaagaagacacccggactgcacaccaacaaaaaaaccaatagtccctagacgggtgaggtctgcaaatactgcagtttttcgccatcaacaaaaccaatagtccctaggggggtgaggtctgcatatattgcagttaatttgccgaaaaaccaacagacctaagaaaggttgcggttccgcaataagcggtttttcaactttggactctcaaattcggcaccggcaaacaattcggcatg

SEQ ID NO: 110313 - DNA, 453 bp, Heterodera glycines
tttacaaggcaaagtatggggttcttcaaaactaggaaccaataatggattatttgatttctgaacgccttccaatagctgcacgtaagtagtgtatggcaccttaatccggtgtaaaattccccccccccctgccctccacccttccacatcctttctttctgccttttcacattccatttcaatttcctcctcgcaccacttttcacccttttcttccgcgcagtttgttagttgttgccccccaatttcaacgcctaattgcgcacaaatcgattgctgtccttcgcaacaccccccccccccccgacgaatatccttcacaaatacaataagttgcggagatgattctccttttacattttacgttttgtaggacgtttaatctatgtattataatttttttattttagcatcagaaatgttttaaactctccaattgtcttcaacatg

SEQ ID NO: 110314 - DNA, 51 bp, Heterodera glycines
cctaaaatatattttttaataaagattcttttgcgcgacattgtgacaatg

SEQ ID NO: 110315 - DNA, 114 bp, Heterodera glycines
tgttcgtgccaattaactccgaccagtttcatcagatttattattcgctttcagtttctatttaccattcgattacggaaaacggggggccgggcttttcaatgagctgaaatg

SEQ ID NO: 110316 - DNA, 1003 bp, Heterodera glycines
tttgaatttatgggttgatttttgaaaattttttgaaagtctgatcattataattggatttatgtatatgtatataattatttcaacattttaatagccagaaaaaaaattacgggggggggggggggaatccgaagaattttttttggtaaaatttatttagtgttttttaaaaaagttcagcgccggacagcaaaaacaggaattgtaaccatttttagccaaaaaaagactactttttgccattttgtagtcaaaattttaaaaaataaggtaaaatcgagtaaatcgtggtccggcggtgccgataggtgccgccgggcaaatttttttttttttaaattttaatgattttattaagaaaaatcgacaaaaaaaaatttaaaagtcccaatttttcctgtaaaaatttttaatttttcatttcgggcgggggagggggggggagggaattcctcccctcacctggctaaggttttatgaattttcataaaatgcgtgaaaaataggtgtgacaaaaaagtgatgcctctattttctaggcgaactacccaaatagccttaacaacaaataataaaaaattataaatctattttaattcttaaataaatcgaaatacgggtagccctttaaataaaaaatagaaaaatttgttttttataaaaataatcttacaagaaatcgtctcgaaaaaataatccaaaagtcaaattacggatcaaaattacggaaaaatcccaaaaatccgtaatccgtaatccgtaattgcgtgcagccctgtttccaacacaaacataattatctaatttgttatgtaatggaaaacatataaaaagcgacgaaagaaattttcattattattttccattcgccttcgtctctctctctctgcgactttttcgccctgacaatgtctttaaaaatgattctgtacgtttttcgtatttcttcacaatttcaccattttccttttcattttttagtctgtttggtgtgccaatg

SEQ ID NO: 110317 - DNA, 104 bp, Heterodera glycines
ttcggtagttgtttttgggccaattttctggccaatgcctttatcttttcctaaaaaaacccccactaattgaagttaccgaagaggaacaaactgtccctatg

SEQ ID NO: 110318 - DNA, 1003 bp, Heterodera glycines
tcacttgttctcgacttgaaaattcttaaaagtttgattaatgctcaattttttttaaatatttgaaagttttagcgcgccgaaaaaagtgataaaaacaaatctgaatttctaataatattcgatcatttgagtcaaaaaaagattaattgtttgaataattgaagaaaatttgatttgaaaattttcattgatttaatttagtttagttttggatttataaaataaaaaattaattttgtattattttgagtagaaaaagttttaaaatgtgaattttaaaatttccggttggtcccggccctgaagaaaaatctaggtccccggtcccggcttctcaggtcccggcaaatcacggtatcggttttgcccaaaattcctggtcaagcttcactctaatttttaatttgaaagtcaaattatttcttatttcttaattaactatacgaaattaattgttcattcatattaatttctaacaaaaaacttttaaactttgaaacgttcttttatattttcagcaaattccctcttttttcttttttttttaatttgccactcaattagcctccaaatttactaaaataattttattgaaataaatttgtgagataaatagacggtataaacattttaaaatttttatttgtttttttttaatttttaaaaattattttgctggttgttattcataaattgatattaattaaaaatgtttttaaatttatttttgtgcttattcatcttttttcttcattccgacattttattttattttttattttttggttttttcatcttcacatttttaaaactatgaacataaacattttttgctgaattaacagcaaatttctcaaatttctaaagatgaataatttatgaaaatgtttatttttttctatttaaacaaaattataatttcttttataataaaaaattaataaaaatatgaagataaaatttattttaatttaaaatttgttaatttaagttgattatg

SEQ ID NO: 110319 - DNA, 242 bp, Heterodera glycines
tttttcattttaatttcgaagcctcgagacctgtccttggcccaatggaaccccggaaaattcatacatcccttttatgctcgtcttgttaatttcgcgcacgcgcttaaacctccccagcgcttcatttcaaaacataattttattttgtgccttggatattaaattttatttaattcaaatttaatgtttactcaatagcataatagacataactactttgaatcacacattgacaaatg

SEQ ID NO: 110320 - DNA, 245 bp, Heterodera glycines
attttttttttaaaagggcctttattttagagatcaaaatccttttttccgagcatattatgaatactatcaacgacataatccgcgcgttatgtcgacctacacatggaggcttacctgaagcacgagagggcggctgcagaacatttgaaggttttcgaaggcaaatacaaaaaaggagaaaaggtttttttacaaaattttaaaaattttatacttttgtgttaaagccccgggacactatg

SEQ ID NO: 110321 - DNA, 225 bp, Heterodera glycines
tagagatcggtattttgaaaaaaacctggacctggatttcctggacaaaaatccaggtccaggaaaaatccaggttgccaaaaaatgacctggacctggatccaggaaaaatccaggcctggatccaggtccaggccaatcttagtgatttagtctctttttaatatgcggaattttttttttgaatttgaccaattttagccgcagttgctttgccgcacaatg

SEQ ID NO: 110322 - DNA, 639 bp, Heterodera glycines
ctcggctgtgcccaattggcggatgatgacaaattattgttattccgccataaccaaaggaagaaaatgagcgagtaaatgaacagccaaaacaatatgaggacaaacataattaaaatgcgctttcttcgcatcgtaaaagcagaagcacattcatgcctctaaaagaattttgtagacaaatgtacaagcaaaatgagtaaaagaatcacagggtataacaaaatatagagtcagacttatgaaaaattggaattcggaccccggatccccaaaatatggttctggaattaaaagccagagaaggacccggatacggttccagacttaaagtccaaccaagattcacaaaaaagaaccctaacaaataccgggctgaaaagatccggagacggacggttccggacaaaagaaaacaggaaagcaaacaaaataatatattcaaaaaaagaacattatgccaacacataaaataaacattggcataacgcgggaaaatttttttttcccaataatcgagaaacgacaactgatcgaagaattcccgtattttttcttggtcttgaaatattttagaaatacatttttagaatttttagtgctttctctttttaattgctattttatacaacaaaaatg

SEQ ID NO: 110323 - DNA, 178 bp, Heterodera glycines
cagcccattccaccttccgactgggcagagatcgtgtccctttgacaaacttccaagcattccacttgagagcttctttgcccgacggattcgtgaagcacaactcatcatcattgatgagatcaccatgcttcacaatacggtgattgaggtcattgaccgtgtgtgcaaagaaatg

SEQ ID NO: 110324 - DNA, 740 bp, Heterodera glycines
ttgtctgtcattcgttctttcactccaatttctctccgtcagccattggaaaatccacgggtgtccgtctattctcgaatttaatatttagaacaacttcgcgagagcctacgaatccaaaagcctctccaagtgtattggcccagaaattattatatggatacagtaggtatatattatgttgaattttttttgctctctgcctttttggcgttttgtttgcgtcccgccccctttttctctgatctctcacagggaaattaatcaatcaaatgctgacgtgttacgaaatacaaaaaagaggaggatgtgctgtgttacactttgcacctgtatcagcgatcaatgatgtgcgaagcaccacccagctcgacaagcgttgtttaaagtgaaaaaatcatacgaaaattccaaaaaatatatttttacggtaggaattctaaattttttatattgatttttatggtgccctcctcgaatttccaaattcaacaaaaatattaaaatgattgatagtgagtggactgttctttagcaattacctaattcgataattgttggtgtcctggtactccccctcccccgttgcaaactaactacctaatttgcataattaaattggggcctcttttcatgaatgccgccgattggcatgtcctaccaaaaatagacattaattaacacaaaaattaacgacagcaccaaatctctgttataataagcattttgagtgcaaaatg

SEQ ID NO: 110325 - DNA, 1003 bp, Heterodera glycines
ttggcattataatgagagggccgaaataaggcatgaaacaagaggaaagaggcatgcaaaattgacaacaaagaagcaaaattatttgcacgaaaacatggggagaggcaaaaatggcatcggggagagagcgagagaaagggagagagagagagagaaagtgagagagaaagggagagatagagagggcgtgaggcaaaattggcatcattgtggggagaggcaaaattggcatgaaacatggggagaggcactttgagagggccacaattggcattattcaacaaatagagtaggcttaattgacgtgttttaatgaagcgcattatgtgcaaatgacgtatttactatacaatttagaagtatgcattgattgcattgattgatttttacattacaatttaaaaatgcaattttaaataaataaaaagattgtacaatttatgtacaggaatcccaaaaaatttctattctataaatttaagttgcgcagcaaacaaatctgagtgactgacttataggctctaatcatctaataacagcacataataaaatatggatgaagctggatgagcatttgaaaacacggaatgcgggattgatattatccataaaaagaaagtgcggttcccggatattttttctcagtatagtgttttcgttggtgctgggacgtttcttaaaaaccgccacattgggcgtttcttaaaaccgccagggcgtttcttaaaaccgccaggtgtgcgtttcttaaaaccgccactttgggcgtttcttaaaaccgccaactcatatgattatgtatataaatatatatatatatatatatatatatatatatatatatattagaagtttacataacaataaaaaatttaaaatacatatgcatatctagtgacggtaaaataaaataattatttttatccttctttaaaacgttctccaaaaatatgaactgaccagcataatatattctaaaaaataaaatatttaagatatg

SEQ ID NO: 110326 - DNA, 61 bp, Heterodera glycines
ttgttaggttttcgatgccctcgacaaagatttggcctcctcaaatgctggcgaggcaatg

SEQ ID NO: 110327 - DNA, 224 bp, Heterodera glycines
tgttcgatcagtacatacactattccaactcagcttcaatggagtcctgtgtcggataataacaatggattattgagagattcgtggtcagtctctgtattttttgcgtgatgagtgatcgatataaacggataaagcggtcataacgatataataaacaatcataccgcacttggaaggtctgcatgaaccggcgcagttccacttgaatgcgcgggaagatg

SEQ ID NO: 110328 - DNA, 241 bp, Heterodera glycines
  unsure (1)..(241): unsure at all n locations
ggaaggcanttgaagaaaaatttatttaatttatttccttcatacaatttcgcaacacagaataatggcacttggataactggatttttaaaaattaaacaaattctgggatagaaaaaaatgtgataaaagataagaaaatgatcagcattaaattgctcatgatcagagaaacaattaagaaaggactgatcaaaaattgtacgcaattttcctgatcaaaattgcttatgggacaatg

SEQ ID NO: 110329 - DNA, 177 bp, Heterodera glycines
agtgagcaatttgatcactaatttggcataattaacacttcatttcaacatttagcttgaaaatgtcagttttggctataaattgcattggcaacgcaaccacagagtaattaaatattccatttaacttaatttaaataattttcaatttttttcattttgaggatttggactatg

SEQ ID NO: 110330 - DNA, 1003 bp, Heterodera glycines
agatttgacgaaatttaaaaaaatggataaattttgcaattttttaatttattcgatgtataaatagcgacttaaaaattttttgaaattttctagcaataaccctcaattaacgtttataattcaaaaaattgaccatttttgatcaaaaaaattaacaattcttaacttttccggtgtaattttttaaattataggcaaagcttaaatttttttttgcctttttagttcgaatagtggtacagtatttgtttacgaaatgaaaaagcatttaaaaagcctattttttcgtggacgggacataatttcgccgccgaaatttcgcagggactaaatttcgcggaaaaatttaaaaaaaaattaaatttagaaattttttaagaaaaaaatattagaattttttataagaaaatttcaagaaaaaaatttttcagcgattttttttgaaatttatggtaaattataagtttttcgaaaatttttcccaaaaatcgttaaaaattttttttctaaaatttaccttgaaatttctatataaaaaagttttctaagatttttttcttgaaatttttcaaattaaaaaaaaaatttcttcggcgaaattttggcagcgaaattatgtcccggcgaaattttggccggcgaaatttcagccggcgaaattatggcggcgaaattttggggtgcacccattttttcttgctttaatttttcaaaattactaggcaaggcgaaaaatagaaaaagaacttatttcagctcatactaaatataagcattcattttttgaatacagttttaacgaaatttgctactaatgcatttccctcccacccttccccaaatttatggccagatttcattaatcataggcatttgcttttacagcctcatcggcctatctccaacgcctcgacattgtcgggattgactttcgtgccgtggacatccgttggtttggcatgcgccgtttgcaacaactttcgtttgctgccaacaaatg

SEQ ID NO: 110331 - DNA, 297 bp, Heterodera glycines
ggggaaaaaatcggcgataagagtaaataggtcaacagaaggcaaaattggggatcaacaaaaaatggacgcagaaaaagagaaggagaagaaggaaaaaggagggggcgccgtgattaaatagcccccgagcagaatatgcaaaaacacgtgaataaggagaaaagtgggcatttttgagagacaaagggaaaaaggcatcgctgaatatgttggggggaatcagagtacagaaaatggatgaaaagaggggatggagggcaaaaagataatggtaaacattttgagaaaaggatg

SEQ ID NO: 110332 - DNA, 192 bp, Heterodera glycines
  unsure (1)..(192): unsure at all n locations
cagtgattgtaccaaaacaatttactgaatgattacctcttactgatcagccgtcattttgtcacacaatttntgtgcactctttctgaaacaattagtgtattttataaatttattcaacaaaaaaaaaaattcgacgaccatttcatttttgtatcaatcggactttgagtttttcgagtatcataaatg

SEQ ID NO: 110333 - DNA, 325 bp, Heterodera glycines
tctccaaaaagtatttatttattgttattatttgtgaccctttcattttggtaggtaaacaatttgtttttgttcatatatatttgttctaaggcggatctcttccggactctctgggtgcatgtccacgagaaggtatccaaaattttttgcgcatgcgtcccggtaggcctcaataaaatgggcagtccttgacgggaagaggtgggtggcgatggtgcgtatctgcaacgcccccgcaggattacgcattaatactaaatagtgtgaattagtgcgcgccacacgcagctctttgttgaacaggtgctgagttaccaaaatg

SEQ ID NO: 110334 - DNA, 77 bp, Heterodera glycines
tcgaaaaagacaacgcaaagatatggacaaaattgttgagcattgaccaaatattgagcaaaacacaattcaaaatg

SEQ ID NO: 110335 - DNA, 256 bp, Heterodera glycines
aaattttttgaaaaaaaatttgaaaatttgagtgcactttgttacgaaaaattgcctatattcaaaaatgtacccataaatttttttaattctcgtttgtggggagaaattcgaagaatttttccattatgcaattttgagtgtaatatgttaacagaaaataataaaatgaagcattcgttttaaaaattaaattttcaaatatattcatttcttaggggtggaaatttcgcatttcgcgccaaaaagcgaaatg

SEQ ID NO: 110336 - DNA, 296 bp, Heterodera glycines
tcggcccaacagactcaaacacctctaggagcagcgcaattgttggtgtgtaatgtacacaatttacaattaatgtatattcagctgctaaaagaaaagtgcccgggatttcctgttaaagcacttttataacctgagaaatatataatttttcagaaaaaatataaaataaattttacaaaaatctgcaaatcaggaaataaaaaaaagtgaaaatttttagagtcgagggaaaatattttttattttttgaatccgcgatttctatatatcacatatttttaccagaaaacatg

SEQ ID NO: 110337 - DNA, 246 bp, Heterodera glycines
tcgccctttgatttcacaatggccggcacatttccatttgtgccgttctcaacggtgagccaatgtcgtgccgacccgagtgctggggggggtcgagaatttggccctgatcacctccgaatgttgggaaatatgcctaaatcagacattttggttaggaaccagatcttattgataaattccccatcatagaatgggatgatgtgtcatgggtcgatgcagcgctattgccacccgggaaccatg

SEQ ID NO: 110338 - DNA, 62 bp, Heterodera glycines
aactaattatgcccaattaattaatgtagatgggcacaactgtggtcaatggaacacagatg

SEQ ID NO: 110339 - DNA, 154 bp, Heterodera glycines
aatttttaacttaattgacattttttgccatttttctgtcccatttcccccgcccccttttttccgttttaatttcgttttccctttcccttaggatcgtcccccgttcgttcccccgcagcaattcgtcggaagtgtcggccccgaacagatg

SEQ ID NO: 110340 - DNA, 697 bp, Heterodera glycines
cccgcccattcaattagtagttcatacttgccagactaaccgctccagagaaaattccaaaaatttggaaccaattctaggcgaaaaaatgttatccacaaaaatgtaaattccaattatttattctctttttgggagccggtgaaatttttttattctttcaaattaaccatgatgtttcgctaacaacaactttgttttgctgctagaaaaactcaaatattcttgattttttcttcaaaaagattatttgaaaaataattgtaaaatcaaccttaaattttttttttaatttttctaataatattttgattttttcctagaaaaaattctaaattttctttgaaaattaaagagaaggcccaaaatatatggggatcgagagctgggagctcggcgtcgtggcttaacattaatacaaaaactcattaccgtatctcgtttttttcaagaaattctgattaactccgcattttccaccggcccatttccggtcacacaccgaaagtaatttacgacgaacgattagggtggggggggggcgaacagagctcgttttctcattaaataattgttaatgctttaattttttaacccaaccgccgtccattttaatcaacattttttgttttcacaaatatataaattaaaattgaaattttcaatttcatattttctgttcagactaatgctaatg

SEQ ID NO: 110341 - DNA, 63 bp, Heterodera glycines
aataaaatgacgaaaaaacgagtgttccatctaccaaatattcaggaacttttagacttaatg

SEQ ID NO: 110342 - DNA, 193 bp, Heterodera glycines
aatggctgaatgacattgttttgctcttttctaacccttcccatggccacccttcctcccccagggactgtcgttcaccaacacttcgcccatcattttccccactcgctcttcccaaattggccttggcaccaacccaatcagttgttgtgccaattcacgcgaaaaaggcgacggattcattttggacatg

SEQ ID NO: 110343 - DNA, 116 bp, Heterodera glycines
tgttggatgatgaagcaaaaaagtatttggcagtatgcacgcacaaaggattgttccaatttacgagactcccttttggcgtagcgtcagcaccggcgattttccagcaggtcatg

SEQ ID NO: 110344 - DNA, 1003 bp, Heterodera glycines
tctttttttctctgttttctctcatttctccatgctctctttgtttgggtggtcaaaaagggggtcaagaataccccccccccttatactactattgtgtatatgtattatagaataattttctcatgaaatttctttgttcttgtagttttttaattcaatgactatattttagttttataaattattatattgtcattcttttatttataatttatattattagcattaggattttaataaatgattttcaatcaaagaaaaaaagactaagtaaatacatatttatattattcgagaaagagaatagaataaattatatttatattttgaaaactctttttggcaattaaattttggactatatttttaatgacgttttttggcaaataaatgggataaatttaaaatactaacaacatatgtaatatttttacaaaggcagaaatgggtaataaataatattaataaataatatgcaaataaaataaaaagggtatttaattttagaattttaataacagtttcaattttaaatagtttcatttttttattgaaaaaacccattcacatacaaccctgggatgttaaatagtcgcaaatcattgatcattcgggcagctgattatattacaaataattgaaaaaagaatgtaataattcaatttaaaaataaaatatatcgatagttaattattaattaaaatcttaataaatttcatttcttttgaaaataaaactatttttagtccatccttacgcctttgcgccgggagagtgaggaactggttcaaagtaatgaatcacaaaaaataaaggtatataaaagcatataagtgaattgaaaaaattttggatcaacgcaagaaaaataaaagagaacataaagcccactggagcaacagtactgcaagcgaaatttagaaaaagctaccgctaccggttattgtaattcgcatttttaaacaagaattttaaagtctcagaaattgaacacagcatg

SEQ ID NO: 110345 - DNA, 116 bp, Heterodera glycines
ggttggcgtcgtcgtcaaacatcgccacactgcctttttgaggtgccaatgcctcttttccccatccgttattattcgctttcagtgcccgaattcaacggttgggtttcaatatg

SEQ ID NO: 110346 - DNA, 97 bp, Heterodera glycines
tgcacgtggaacctgaaaacatttggaaatatttgtttttaaatgcttaaaatttgattgaccaagcaaattcggcgagagtgatcatccattgatg

SEQ ID NO: 110347 - DNA, 506 bp, Heterodera glycines
tgtaaaattttatttaaatgaaaaaatcagcaaaaatgttttttgtggcgccctttttccaaaaaaacttttggggagaaacaaatgagttgcaaaaatcagcaaatcagcacctcaaaaaaaaaatcagtttgaccccttgaaacagcaacatgctgataaatcagcagagttgggaattatggttatgggggaggggtgaaatacgtatccctagagaccggagaagtcattctcgatattttaataaaatctcaaaaaaatttataacgaaaagtatcgaaaaacacgaaatttctcataactttttttggtgaaatatcgaaaaatatttatcgaaaacggtggtaaattggaccaataaaatcccttaccctcacacaaatgcaaaatttaaaggaagatggtaattttttaaattgaatatgccgtaaataatgttatgatattcttgtttaaatcggcaccagtggcagcctaattagtgactcattaatcagctaatg

SEQ ID NO: 110348 - DNA, 233 bp, Heterodera glycines
taaagtttatcataaaaatatgggtggattattaaaacttttttttatgggcaatatttggcgttaaaatgggtcttgaacccaaaattagacaaaaaatttaacgatgagatacagaaaagtttattaatgaatttgaaaaaagagaaaaagaaaaaattcaaaaaagaaaaaacagaagactatatagacttggaagcattgtaatattactatttttatgtttgacaatg

SEQ ID NO: 110349 - DNA, 300 bp, Heterodera glycines
caacaacaacggccaaaactccgttgatgagttttactacaacaaatccaaaacaggaaaaaactcagaagaatatttcggatttcgtttttgagaatgaaaagttaaaggagggaaataagacaaaaacagagataaaagcgaaaaaggaagaaagacctcccaaaacggtaaaaattggcaaagaattaaacggaaaaacaatgcctaggaggaaaagattccaaaaataatgaccacacaaaaaccaaaagaaaaaatggtaacaaaaacataaccacaacacaaacacctaaaatg

SEQ ID NO: 110350 - DNA, 834 bp, Heterodera glycines
atatttttttgtgaatttctgctggctgttgcagtgcaggaaaaatatgcataattccgaaccatttttattatcaattatcacaaatcctaaaagtgactaaattttaaacatttcttttcttcttttttgaaaaaaaattttcctacaaatttatttttttttttgctaaaaaatgtgtttttttatttttgtgttgaataaatttccccaattttgataattccagcttaattatgcagtatagcagcagtgcttatgattttttcgagagagaatgatgattagctttcgttttcattatgtcgttccatttgtaatcccaaataaaattgtcggcttcgtcatcattggaagccatcagcagcaatcagcggcagaacacagcagaagcacatccatttcattttcaaaacgatttacgaagaacacattttttgtatattttttcattaccgttaatggataaagtctaaattattattttttgtttttacacattgcattttttattatatacaattcgttttttctttataccatcgtttttatatggtccggtttttcagaaaggttccttttgggaataattgttaacattttgtcttgattatctcatttcttaattcaaaaattgctaaatttgttaataaaataccacaaaattactgaaaatgaaaaatattttgcgaaaagattttaataatttctttccacctgaaatgctgttatttttcataaatcttctgaattattaaaatccattttttcaattgaattttctgagttggaaaattttagatcgaacccttttcgttgtactgcttgaaaatg

SEQ ID NO: 110351 - DNA, 885 bp, Heterodera glycines
tttttaacaggcctttcgccaggccgtatccagaggggtggggggggggggggcacatgcccaatgaaatttgaaaaattttcaggaaaaaatgggcaaaatcttgaaaatttaaaacattttatgtgccatatttccattaaaagtttcaaaaatctttcccgccggaggcgcctatcagcaccgcatggaccccattgagccgaaattttttgaaaaattgacccaaaaagggcaaaaatgtgtcttttttagcgcaaaacagaaacaagtttatccactattacccaattaaaacaaaatttaaaataataaattcaaaaaaaataaattttcataccagtttaattaatttaaaaaaatggtttagaaataaatcgcataaaagcatacagttgcatacaattgtgcggatttacacatttatagtaattcttttattatatttctccgaaatatttcttccataatattcttaatcaatgtccttttatctatgcgatttttttcttcgttatacgctttaaacaactcgttgccacacattcatttctctccctttgctaaataaattctcaactaatggcccattaataaataaatattattttctaaaaaatttcatttaaatattttaataaattttgtttgccaaaaaaatatgattatcattttcctggggaattttgtcccatttgagaagagggctaggaagagaggctggagagatggcatacgtatagataaggatggcacgcccaccgcgcaaaacctcaattaaaatttcccagcctaattatcttatcagcataaggaatcatcttttcctaattactaaaaatgctgaccaaataataataattttgcattttcccattaaaaatg

SEQ ID NO: 110352 - DNA, 966 bp, Heterodera glycines
ttttccaaaatttgaataaagaatgatttcgatttcttggtgggaataattttggtgcgcaagtgggcgtggccaaagtgcacacatcgtacacccggtcattttcccgattcattttaaaaattttcatctttttttgcacatctgctgttttcctctcctccctcacttatcttttgctttatggggaccatattatttaattgggaattttcgggaccgtataattaaaattaatattttgctgttaaccagggcggtagctataattacaaaaagcaccgtttatcctggcagcattttgccttttagggcttgaggtcgttcgcgtgacttgactaatttcccgagtcgtttaggtgccctgtcgtcttgtgcttcatgggtggcggtgtgctgctcttcaggccatagttggtttatattttttgactattttccatgcccaaatatttattattcattcaccattttacgccattttccatgccggcgctcgcatataaataccgagatttttgctcactcctcaccctttctcagattaaaaaaatggacaatcatccctgaaaacgatcctctaacttttccattgaccatattctctccgcacctaaaaggccccgacaaggcttcctgatcaatgaactcttgggcgtagtccacttccttggatctgttcaacaaggcgaaggaacatcaaaacaggccaaggactacgttaaaaaattggacaacagcattgaacacgtggccaaattccactacgtaaaagtcaagtcaaagttcaccattacggatttgccaagcacgcctgaggcactgttggccggaattttccaacactgcatcgacgaggctattgctgacagccgtgagcgcaacatcgaacctacacacctcggctgtatgatcagcagccctctgttgaaaggcggcgacatcccaactccagtgcgacagatg

SEQ ID NO: 110353 - DNA, 83 bp, Heterodera glycines
taatgaaaaagtcagaatttcgaaaaattttaaaaacaacaatgcgttggcattttttcaggttaagttagtcctttacaatg

SEQ ID NO: 110354 - DNA, 69 bp, Heterodera glycines
  unsure (1)..(69): unsure at all n locations
ttccctcgtaagtgcgctatattttaataatgattttatgaatttttagaagaaagtgcaaaanttatg

SEQ ID NO: 110355 - DNA, 508 bp, Heterodera glycines
actgaaaaacgaaagaataatgaatggaatgggaaagcaaagaaagtgccaaggccaggaaagccaaatgtggaattttaatttcattttgaagttttaatgggcacactggggtaaattctcaaataaagttatgaaattcattgaaaattttcatcttggcaaccctggccaaattttggagtaaaagaaatgtgatacgatgtaaacgtacggaattctcgaagacattacggcaataaaataaccggaggaaaattataaacgaattaatgaaatggaggaggaggaaaaaggttattttatatgaaaaatgattcatttttattcattcatttagtaattgctcctcctggcaattcaaatttttcgtaaattatttaaaaattttaattccgtttttatgactttaaaaatttttggtttttcaattttcgtttcgcggaattattctgctctttgtgtaatcatttggaaacggcaaattgtgctaattgccgtaaaaatg

SEQ ID NO: 110356 - DNA, 86 bp, Heterodera glycines
tgcgctcggcgggaggcaacgagacgcgcagtgcgggcggctgcagtagcgccggtagcgctgcgcgacgcacatttcgcacgatg

SEQ ID NO: 110357 - DNA, 349 bp, Heterodera glycines
gctaaaattttacttctgtaaacattttctatatattttaagagttatgtcagtaaaaatgcagggtgccccaaaagttctgagagcctattaaaattgttaaaactttatactcatctgtctgtcagccaaaatttccggttgcaaactatctttttaactttttattatcctgtttaaatgctaacctatatagctggggttgtcagttaagcaaacaaaaaaaaggaattaaaaaactttttttttttcaaactccacaaaaaaaatgtccattgataatttcctgcttaaaattataagttaacaaatagaccacacttttcatattgatcgatttccagacatg

SEQ ID NO: 110358 - DNA, 399 bp, Heterodera glycines
tggaaatcgtctatatgaaggtgtggtctatttgttcactaataatttaagcagggaattatcaatggcccctgttttgtggagtttgaaataaattcttttaaatttcttttttttttttggttaaatgaccatcccatctatataggttagcatataaacaggataataaaaagttaaaaagatagtttgcacccggaaattttgtctgacagacagatgagtataaagttttaacaattttaataggctctcagaacctttggggcaccctgtatttttactgacataactcttaaaatatatagaaaatgtttacagaagtaaaattttagcgttttttggaatggcgtaacagaagaacaaagaatatttgaatatgcccaagaattgcctatg

SEQ ID NO: 110359 - DNA, 1003 bp, Heterodera glycines
ccttttgaatggtgcgtctatgacttacatccgctgagatatgggtacttcaatttctgtgtcttcaaaaagtactgtatttcttaagaaaatagtgcattttacagtaaaatgaccaacactgaaattgaagtgcccatacctaatttggtttaagtcttagagacttgcggtttttgcatatcgtagcaaattttgtcccctttccaatgggctggttaaaattttccaaaaaatttcacaaccccctagggatttttttcgaaaatttccccgattttcactgtatttttttttaatttgggcccaaaacgccccaaaaagcgttcaaatttgatcaattacggagtctttaacaaattgcttctatttttcaaaaatgcaaaaaaaaaaaaaaattcagatgcggtgaaattagcaaagtgatcaccaaaaaaaatattggaaaaaattcattccagcgaataatacaaattcactaatttttcccattattagagcacgactaaaaaggcaccaaaaatcgagaaaaaggcactaaaataggcaccaaaaaattgaaaaaaaggcatgaaacggcacgaaaagcccgaaaaaggcatgaaaaaaggcatttaaaaatttttattaaggatttttagataagcgttacaggaacccggaaattctaatttttagcaggatcctgtaacagaatcttatatttttaaatattgcaaacattatgccaaaagagcatttttaagctagagtttcgcaaatcgttctaaaatttcagaaaaccaatcttagcatttttataattctgcttaaaaatcccccccccccctccccgtttacacacacaataaataataaatttgtcgaatttttgcatttgtccgctgacaaatgaacatgaattatgttgatagaaagaaggctcgtggatgatatgattgttgttatttataaaattaaaccatattcactttactaatcgaagtttagcctaattataatg

SEQ ID NO: 110360 - DNA, 107 bp, Heterodera glycines
cgtatatcattattaatccgcatagttgcatagttaatttggcgcttattttcttctttttttttgttaaaggcacaacaaagtgctgtgaaaatttgttgcttatg

SEQ ID NO: 110361 - DNA, 524 bp, Heterodera glycines
  unsure (1)..(524): unsure at all n locations
ccccccccccccccaattctcgtcattttccaccaaattcgccgaggttgtctttcaaaagtcaacatctgcaaaaacattatttactgccggggtcagaaaaaggacaattttttttttgggatggactcaccagacaaagaaaataggaaatattgctctcgttttttgaacttcctttattgctctttaaaatgtgggattttttccgttaattgtcgtaataattgacccctccccctcagccccctcccaatttccccnccccccccccctccggcggtatttgtcatcatcactcttccaccagcctaccgcccactgacctaaacaaccgctgataatccatcccatcatcacacggccgaaaccctactaaattgcccgtgggatggtttttggaaggaatctttgggaagtgatcaatgaaagtgtccacctaatgggactaattattagggagggattctcaagttgatttatggggtctttcttaaattgcaattttcgagaaaagccaaatg

SEQ ID NO: 110362 - DNA, 528 bp, Heterodera glycines
ttaactatactaatttggtctgtccgttcgtgtgtgtgtgtgtcacacttttttcatggatttttgaaatatttttcgacacgaaaacattgtcttttctttctttcctcatcctttcatgtaaacaacaaaaaatatttagttgatgaaatacgtaatatattttttaatgtcgcattcagacatacttacttatttctaaattgctttatcaaagttttaaaaccctttaaaaaaacaaatttttatcattatttttttctcaattacttaaccaaaaattgagttttatataaatttgttatttaaacaaaagctgttgatttctaattttcaatttttgttgtagtcctatataccaagaaatgtttctttttattttttaaattgtttttttcaattctttttttgaaaaattgggttttatgttaaaaataatttttcaagaataagagcacaattttccttcgtttatcttcaccaggaacatttttttaattgaaatgatttataattacttttcagatg

SEQ ID NO: 110363 - DNA, 54 bp, Heterodera glycines
gagagatgaatgtattaaagtatttattatttatgctttaataaaaaataaatg

SEQ ID NO: 110364 - DNA, 579 bp, Heterodera glycines
  unsure (1)..(579): unsure at all n locations
ccctcacattcctcaaaagttttntggaaaaaagggccgcaataaaaattgttaaaaatctggttttttttatccccattgcactaaattacacatataatttgctaatttccttcccctaaacaatttttgcaaaatgttctgattctcgacccctaatctgattttttgcccgatgttctgattttgaaaaattttcgatccgaaccctgaccctatcggcaccgccggaccctccccctgcacctcaaaagtttttttttcattccggcgaaaattacaaattatttgaattaaaattaataatttttcattgcttatgacaaacttttaagttgtccttgaatttagtgaaattttcccgttatgtccttggtaatcagtatacccgtcctttgaaagcgagtttttcgaaaagattacattttttgctttaggacacgcaaaaaaaggtgtgaaatttgaataaaacaattaattaaatcttgttaaatggcacgcgattttttgtttaaactgcgctacggatatttattcttttagaacaaatgaaaaaaaaagaaaaaactgaaccaaatg

SEQ ID NO: 110365 - DNA, 207 bp, Heterodera glycines
tccgtatgttttccttcgtcccttttcagttctcacacaaacattcgcccgttcgcctgtttgacttgcaatttctccttcaaaaccaagggtaacaactcattgttattttgttggatgaattgtccatttttattcgtccatttgtcctttttaggcaatctcaccaaacatttggtgtccaaagcgcaccgacgcaaagtgatg

SEQ ID NO: 110366 - DNA, 1003 bp, Heterodera glycines
atttgtcttttttgatctgagaaaaagattgaaccggaaaatgcagagattttgttttttttgcatcacaacctcaaaatctatgattttactattggtaaaaaattttgaaaaaaatttcgcgtttcgcttttcgcattttcgcatatttttggcttttcgcatttcgcttttttttcattttcgaattgtgatttttttttgttcacagttgatgtttccatacatttaaaaataaacaattattttttaattgccctttaaactttggaaaattttggtttttgggctttataacaagaaattataattcaaatgatccctttattaggctttatcaatttaattatagtcattattagcattttgtccttcagaataaaaattgtgtacaaattgtcaccataataatagcattgaaaattttgttaaaccctcgtaattataaaaaaattactttttccgtctggtcatttccgtcagtttcaaaattggaccttcttcagcatgataattgaagtttaggttacccttaactacaaataaatttaattctactaatcaccaaagaatttgtttaaatttgcatggtttttcggtacttttgcagtttagagggcaactttcacatgaacttttaataaataaataaaattatgtttaaaaattatgaaaataggttttaagcacttttcgtggtcgatgacaacgaatacggcattagttttaaccaattccatatcccttgcccaaattcgaacaaaatgtagtaaaagtcaaaatttttgaatttgcatatacgagaataatttaattaaaaaatggcagctgaattttacattcccgttgacggccaaacattgttcaccattcttttttaccctagcaacaaaagaatgtaatcatttcttggcatttgaaaaaaggttgttaaaagtgcacaatttctaataatattttgaacaaccaattcaaatataagcaatggcagatttaaacaatg

SEQ ID NO: 110367 - DNA, 1003 bp, Heterodera glycines
atagtgaaaaaaaaactattttcaattactttggcgttttgcccaaaattattaacaaaaatgcaataaaaactaaaaatacacccttaagagatgaaaaatttctcaaaaattcatctccaaaatttatttatttactttcttgagaagaatttttaattttaaaatttattttctcaatactggtttggcttaattttgttttgtttttttttgaataaattttgtcatttgacaccccctaaatttgaaaatttttagcaattattttctcatttttagcacccattttggagtttttttagaacctaaaactaactattttggaagtttttagcaactgtaaatattagagtgccacgggaccgggaattttgggcaaacttattaaaaatttaattttaaaagttataaaaagtgatgtcattgcaaattaaaaaaaaattaaatatttttcatacattttttacacaaatttgttcaatttatgccatggatgtccaatgcttgagcacatttgatgcttaaaatgggacaaacaaaatgcatgggaattagcagtgattttgtgctgttaattgctgcaatttatgctgaacagaagccgagacgaagccaaatttgggaataaaagcactcatttttattggaaaataatcacatttttaataattttattttcgtaataaaattatttattttaaatattaaattaaatgccacaaaattccgatgcacaactctttctggtccaaaattaattgtgtgtatacattacaaaaaatttgtggttccatttttttttgtagtaaaattattaataactaaaccctacccaaaatttcaaataaaacgcaaaaatttttcaaatttttctgttaggcttaggattccgacacgctccaattctatacaccgtaaatatgaaaattaaatctttgaaaccattacctcacctatttaatcataaaatttctcagaagtatactctctctcaaaaatg

SEQ ID NO: 110368 - DNA, 86 bp, Heterodera glycines
cccccccccctttcaggtgatcaaccctggggacgaagcgcatcggctacgccttcaagaccaccaaaccgaagcgcatcaacatg

SEQ ID NO: 110369 - DNA, 71 bp, Heterodera glycines
ggtgatttttttttgtaataaacagctcatatgcaacttgagtttaataagtttgttctctttccaggatg

SEQ ID NO: 110370 - DNA, 856 bp, Heterodera glycines
tcattattagggctgggatttttatgttttaacatattttttttgcggcttagttatggcgagagaagcccaaaaatagcattttctccgaacaatttttgatttagagcgacttataaaaacataaaaacacatattttggcgttttcgcacataaaaacatatcgcacatatttcggggtttggcacatattttgcacatattttggcatttttgaaaaaaatatctaagaaaaacacaaaaaattcaaaaatgcacccctaaaaatcaactttcttgccatttttataggccctttcaaaattttctttatttatttcgtgtaccgaaaatcgaattcttcattaattcgttactggatatcgtagtttcttgctggcacttactcaactgatggaaaaattatctttaaaaacaatttatcaaaaaaggactaattttacccccaaacacctccaaatgttttttatttgcaattgtgcgggcaaaaatgataaagaatgagttttttggaatttttatgcaaaaataccattggtttttccaatttttagcacatatttttgcattttttaaaaattgaaatgctcaaaaatacgtggatttctcaagaaaatctattccttttttttatccatttcactagcataatttgcaaacaaatgatttcaatgctttttggggtaactctttttttcgctctctaagattgaattattttcgagattttcttcgctaaaattcaaaaatccggaatccgacccaacatgagtgccatcatcacattctgctttcagtttcattgacggcgctgtgctctcatttctacgccgctttaagccactgtttgaaatg

SEQ ID NO: 110371 - DNA, 105 bp, Heterodera glycines
atactgtatttattcaataaccccctgaggggtgaaaaatgatttttaattttcaattttttttttaatttgaattctcaacttttagctaaaaatgtgctgatg

SEQ ID NO: 110372 - DNA, 373 bp, Heterodera glycines
ggccactttcatttcattttgtccaatcctatttattaaatgaaataatatttctatttttttgtttgattgccatttctctttcttcggattgtttttcatttgtttcgtctgctgatgaatgccttttttgctatttgtggcctttccccccgaggcttttttccgtcgatgcgttagtcaatcggcgaaatgattcagcgcataaaatggtgaataacgtaaaaatggcgtatttaagtgacttgcaaagatcatcgttgcaattgatgttcacaaattgtcgttggaatgtctcccgtcttccgctgccatttccccgcctttgccaattcgctgaccttcgctttggcaattttccgtcgataaaatg

SEQ ID NO: 110373 - DNA, 468 bp, Heterodera glycines
cggcacagtcgtcatcagaatcggtgtaaaacacttcaaacggatgccgatcatcggaggagccttggccggaaaccttttggtgttgacaaatgcattgaaaagccgccaatttttagaaattctgagccgaggctatcaaaaaattttcttggggcaggtcaaagtccacaggccacttttcctcaacctgggtttttcctgggtgggattttccttggtttttgttcaggaaacccaggtccaggctttcaaaatatcgaactctagaaattatagtgaaaactgctgataattcccctcgcaaaagtgtttttgtcagggtttctacggtaaaagtaaatggttccaccaccgtaccatgcgccagctaccctaccgtatgctcctcatctgattgcgaacattccctcgcctgctgcttttgctcctctgctgctgctgtttctgctgctgctggcggtgatg

SEQ ID NO: 110374 - DNA, 265 bp, Heterodera glycines
ttctaaattattaaaatatttaaacattttattgataaaaaataaaatggaaatgagcaattgtcgtaacggataatcggaaaattttccgccggaaccattaaaagcctttttttttgcctttggactttacaacataatcgcacggacatttctcgcgagataaagatttaatctagtgtttttagtaatcattaaagatgagatatggtaaggccctactgtatccacctcataagtcaaggcccgcgtgcctttagaaatg

SEQ ID NO: 110375 - DNA, 675 bp, Heterodera glycines
cggatgagaagggaagctaaacattgaatacctctcagtgccaggaaccaatgagtgccgatggggactctttcattttcggcgaatagtatttgccaagagagagagcaacgacctttcgcttccatataataggtgaatgttgattggctgaaggacagggattaggacgatgatgatgattggttgaatgaccattcctctaggtttaattgttggaaaaaatagagttcgggagcaaataaaataattctcctttggaaaatgtttaaaaatgaagaaaactcttaaattttattcataatttggaaaattatttttttaaattaaagaaaatgtcaaaatctcctccgtctaaacgcgctcgtcgttttttcattgaagagctacttcgtgagccatacaatgagctgtcaccaccacataaatcgcctaaggaatttgttaaaaacttgctccgaagttgaacacgttccaaaatttcaatggatgaaaaccaaatcaatctaagacgtgcctgctgaaccagaagggcttctaatcggcattttccaacagtgcatttatgaaacgattagtgacagccggttgaggggagttgagccgacccacctcggctgcattgtttccagtgcgctacttacatcagatatttggatcccacttcgacaaatg

SEQ ID NO: 110376 - DNA, 357 bp, Heterodera glycines
ttgctaaaagctttggaaaacacagttttattcgtcagactgaaatttgctggaattcaattcaattaaatttgaattaaaatcacaaaaatttgtgtcatattgtatttgccggaaatacataagctctcgtggccctatttttcaagaactctcgaaggaggggggaggctttattagagggactcaaattcggcaagcacagtaatcgaataaaatttttcaaatttttatgggattttgcggttgaaatgtaaattgagacagagacgggtagtggatgggtgctctccattatcccatgaatttggggattgggaataaataacggattatttgacccttcccctccaaatg

SEQ ID NO: 110377 - DNA, 310 bp, Heterodera glycines
ttcagcagagagaaaatgaagacggaataggtaaataacacatattcattcaatgaatgaatgaatgaagatgtcaaaaaatggttaaagatgtcccccccccctcccttctctttttcctccatctcctccgtttgtcccaatcgttcattttcttcttctgctccctccctcctttaatcgtctatcattttcctaattccaattatcccaaatggacagcaacgaaaccgatcgaccaccgcttccgttactttttcagctgttttcgcccaacaattattcccattccgctgttttgcctaaaatg

SEQ ID NO: 110378 - DNA, 53 bp, Heterodera glycines
caaacgcaaatggaattggtggtcatttgagtgcggaacgtttagacgaaatg

SEQ ID NO: 110379 - DNA, 428 bp, Heterodera glycines
ggcaagtccaccccgaaataacttagtccaagccatcattgtaccagttttggttgggcagcaaatccagtctaggctttagcagatgcgaattctcagcttttttggggccttcttatgttggcagcatttaaaaaggaatcaaaaatcaaaaatttttgtaattttttaataaaatttgtccatgtctcaaacaaaaaatttttaggagtaatttaacgtaatcaaaataaattaaaatgttgatactatttattttacaaaaaatatatgtagaaaaattgaaataaaattaattgaaaattgaactgctttttggaaattttgaacgggtccatccatatttttaatatttacgccctatgccgggtgagcaaaagattttttgacgcttttgcagcttgttctgcgatttttgtcgccaaatg

SEQ ID NO: 110380 - DNA, 581 bp, Heterodera glycines
  unsure (1)..(581): unsure at all n locations
gtcaacccgtacacattctcatattcagcaccgatttatgtgagagaattggggatcggatgacattaggggangggatcaggaattgtgcgcgatacggggatacggttgagtacagtatcaaaatgaacaaaatttgcttggtattttacaatatgtataaattaatgagatgggcgagattgagagaatattgctcgatcatataggatcgattaatcagcgtctcaattgatatcccccatccattaatctcttcttctataattgttggttttaaatattttttgagtggaattatcaatttttaaagtgttgtagagagcatttttgttttggataaagttgtaatgagttgcttcttcagggatatccctcaatgttcctcggcacacaacatcaaacaattgttggacgtgcctacggtcaagagcaggtaatcgggatttgctccaaaatgccgaaagccggaatttcacaaaaagggccgaaaccggttggttttcgggctccaaaatatgtcggaaggcggaaccagggcaccaataatgccggaagtttgaattccgggctaaaaaatg

SEQ ID NO: 110381 - DNA, 937 bp, Heterodera glycines
gggaaatacaaattgtaaaagttgtcgtttggtctccttaacccccgggtttatctcctctaaactcgaagacgagcaacagcaggccccaaatgccgcagcattcaatcacaaattaattttaataattgctattaattattattatttatttctttccatcttccagtgactcatcctcggcccgaaaccgacattagtgaaatgtaaattgaaaaaagaatcatatgtcggcatttcattatcaatataaaaaatgtaattaatcttttttattattttctttttagattcaattaaaatttttgtcgaattaactggcataaatgcgaaaagtgccgctgttcgtcgacaccattttgatttgaatattctgctgttgttgttgttgatcagctgttgtttttttagaatgattgtgaggaggaaggaataatttttgtgatttaatttcaaaggaattgaaaatatattaattaataaatattatttataaaatcagtcaccgaaaaaaaatttgcatcaaaaaagtttaagtaccaaagaagccttttggataaaattgagtcaaatccgatcgaagagccaaagatttagaatttaaaaggtacaaaatcatttttaatgataaaaatgcaaaaattataacaatgagacgtccagtaaaattcagtcctctttcgacaacacaacagtattgaggacaatttggacaaatagcaccgatttttctggaaagaaataataaatgataaaaagcaaataagtattaaagttctaaagattttactcataattgatttggtttagttatcaccctttctacttttaaaaatcattattttcaaaatgaaaataaagttaattattattttgttgcttttccctcattagtcccatcccttttgctaaacgaccgtttatccgctcaaaaatg

SEQ ID NO: 110382 - DNA, 139 bp, Heterodera glycines
cgatggtttttcattttttaattttattttttgctcattttccaacagtttcccatccgccgattgttgccttttcttctccgatgtgcaactcacctttttctgtccgtcctccgctcctttttaaagtgcggcgatg

SEQ ID NO: 110383 - DNA, 350 bp, Heterodera glycines
  unsure (1)..(350): unsure at all n locations
tgattgccaaaaaggaactntttgaaaaaatttacaaactttctcaaaaaatcgccaaatatgtgccaaaaacgaccaacactccaaaatttttgagcttttcatacgatagcatatgcgcaaaaaaaacatataaatccgttccctggacatctcaaatgaaaattttcaaccgttttttggggctcttttcttcgaaacattttttttaaattttcgagcaaactccaaaaacgattttaatggataatagcgttgcttcgtctgctggaaattcgctgtatgatacgccgcttgaaccatttttggtcaacgggccgatgagtctttctcagttcgtccaaacaatg

SEQ ID NO: 110384 - DNA, 457 bp, Heterodera glycines
atatttaaatttgaccatttcacaccaaatatttgctctttcaattgcatagcaaaatgaacaaaaaaccgttcatttagtgacaaaattaagcaaataaatcaaaaattaattaatgtccaaatgaatggcaaatggacaaaaggcattccgccggaggaaaatttgcaaattaattaattaattaatggaaaaatctttctcatatcatttcctgttttgttgtctggccaaacaacaaacgcttcttctcccttatcactttttctgtttggcataataaattaaccaattgtcactttttggtttatcagtgagtgattaaaatttgttatatttttttgattgctttctcacattttttcccattatttttcagcttttccttttttttttatttctccattagcttccaattgaatgatgttttttttctttttttttgtcggcgaaaatg

SEQ ID NO: 110385 - DNA, 185 bp, Heterodera glycines
  unsure (1)..(185): unsure at all n locations
tagaggcagttntaaattaacaaattttaacattttaagggtcaaaaatcaatacatcaacatttttcgatgtaaaagaaaatggaagaattgtggtcaaaaattcagacaaatactgtcttttttatagtgttgttttgagtcaactatatcaaacaataggcactgaaatttcgtactcaatg

SEQ ID NO: 110386 - DNA, 681 bp, Heterodera glycines
aatgaaattcagtcggaaaaccggtacgatgatgaacatgtgcaaattgcagtgaccgtcacatttttggccgcaataattcaggcaaaattttattaatatgatttgcattaataattaaacgttggcacaaaaggcaaaaattaaagttaaggaacttttttaaacgcaataaaacccaaacagaaatgatgcagaaaatgcatttatattaagactgttatcttaccaagtctcaaaaaatgctcagatatgaaaggattataagggaattagcatatttttaagtgaaaattaattattaaaaatacgatttttgtaatcaaaaatctaaaagaaaaatatttttaagatgataacccatatacaggtgcaaattcaatgttttttccattgaaatgatttaagttataaaatcatcattttcctgactgaattttgtgcctttttctgccggctctatcaataataatttattattcaattaatcaaattaacaaacaaataatatgaaagataaaggattattttaaatttcaataaaaattaagaatgtttagtcagaaaatattttaaaatttttagatttattcgaaaatcaaattataagcaaagactgaatcgtggattatttagggtctggtctatttgtttcacgccgacttcatcttcagcttcatg

SEQ ID NO: 110387 - DNA, 1003 bp, Heterodera glycines
catagaaattgatccccaaaacttaattattttttcttgttaaaaatttttggtttaaaattgtccttatttgaaaaaactttaaaataattgaaatataagcaaaattaaattttaaattaagttcttatgtatttttctacctaaaaagcgttaataagaaatttttttgcctatttttgtacctatttgaggatttttgattgcctatttaatgcctattttgcgatttttttatgcctttttaggtgcctatttcgcgatttttgtgcctaaaaatctcagccctaaatattagcataaatataataaaatatttctcgcaaaaacaaaatattaattaattaattggtcaacaacaaaacacagcaggggtaatctttgatgcattaatcattcggctggatgagttctattttttggcacctcaaagtgatgagtatcggcgaagcggaagtatttaataaccgaattcgtacatttgatgaatagtcctcattttgtggcggctttttgatgggtcaatgaggtttttggaaataaggggtttatgatttttataatttttttgagattttcctttgtctatcggtaagtggtaaatttgtcgggtttatttttcttttcaattttaacgagttgactttcattgtgcctaccattaatttgccataaaatttgatttatttacatttaaatttgaattgagttattttgtttatttgttttcccctctatccattcaattcactcacttttcttttcgtcctttcacaattatttttcatcactcaaaagaaagaccaatttattctttcgttaattgtgtaaaataaaaataagccatcggcgaaagacaaatatttgataaggaaatgaaaaagtcattcattcattcaaacattccatttcacttcgtacaatttaattgtattttattttgaattttataaaacaaatattttttagtatttttttaaaaagaaaatttcaatttgaaatg

SEQ ID NO: 110388 - DNA, 396 bp, Heterodera glycines
agctaatcaccaacaattgtccgcaatgacgttaaactagcctaagccatcaacaactgtccgaaacgctaatcacccggctgccacgagtccggaatgacgttaaactagcaaagcatcggccaacccacacaacaatcgtccgcaataacattaaactaaagaaccaaccaaacaacaaatgtccgcaaagacataaactagaaaagcaaacaaaacatgtccgcaatgacgttaaactagagaaacaaaccacgcaaagtccgcaatgacgttaaactagcaaagcatcaattgtccgcaatgacgttaaactagcaaagcaccggccaccaaacaaccattgtccgaaaagacgctaaactagcaatccatccgacggtcagggccgaaatg

SEQ ID NO: 110389 - DNA, 87 bp, Heterodera glycines
ggtttataattaaaataaaaataaaattttcatatttttttttagttttaataatttttcttttaagttttcttccctccgtggatg

SEQ ID NO: 110390 - DNA, 141 bp, Heterodera glycines
cgcttgaggatgggacggggacggaataataacggttggttggaccggaggagggggggggctgttcaatattttaggtagtaaaaaatagcattttcatccctatttttcatttattgctcacattttttgactaaaatg

SEQ ID NO: 110391 - DNA, 223 bp, Heterodera glycines
tttaaaaatgaataacaataaattttgtgtcttttcagcaagaatgaattatttggtgttaataataaaatgcaaatttaataatttttaaaattagtttcattagacatcgacattttgaaaaaagttggacctgggttccattttggacctgggcctgaattttcgggagaaaaactccaaggaaaatacaggtttaaattgaaaaaaaattggtcaaatg

SEQ ID NO: 110392 - DNA, 248 bp, Heterodera glycines
atttaacaattattttaaaaaaatcatttatttagcatgaggaccgcaaaagaaaaattattatttttgatcgttttttgctaaaatttttagaaatcatataattaaaatatttattaatttttgtaaaattcaaataaagtatttgttgttattataattaaattactttcattattatttttaatatgcttatagagctattgttaaattaattaattaattaattaatttcttaattaggtatg

SEQ ID NO: 110393 - DNA, 1003 bp, Heterodera glycines
tctgggtcccgactcgaaatccttccggtcccagttggccggtctctactacaaatctgtcagcaaaaataaaaattttgtaatttttaaaaattagtattaaataaatcttagaatcgcttgacctaaagttcctttaaattttaagggtttttacgtgttcaactaaaaaggcagaaaaaaactgcaaaataggcactaaataggcacaaaaatcctcaaataggcaaaaataggcaaataaaattttttgttaacgctttttaggtagcaaaacacataaaaattttcagttgtaaatgaaattattaaatattttaaattccaaaaattttttaagaaaaaatattaaattttctggatcaattaggcacattaggcacaaaaaccttgaaataggcaaaaaaaaggaaaaaaaggagtccctaattattaggtatttgtattataaaaatatttcatttttttttattgccatttattattttattgatcgattcaatttacaattagcatatgcataatccatgccattttcttatgatattgggcctatttctttgtagtttatgcaatttgatgtctttttgacaactacaaactggataagaagatcagaaacaaaatacaaatatttgattagaaaagtgccgaacaaaaaatgatcatttaaatgctataaaatataacatttgaaaagtgccaaacaaaagtgatcatttacatgctacaaaacacgaaatagacgttcggcgttaaagctgatcattttttatggtccatgcagaataattttttgcataatgatcatttaaatgctacaaaatacaatttttttagagtgccgaacaaaaactaataatttaaatgctacaaaatacaaactttgaataaaattctgccccataaaaggggtcccttgacctcagtccccacattcattcattcatccccaatttccccctccccattcgttcaaattaccaacatatttccctcaatg

SEQ ID NO: 110394 - DNA, 1003 bp, Heterodera glycines
ggatcccgtcccgcaaagaattttgagttccaatcccgcagcgggatccgcaaatttgattttttgtgcgggattatgcgggattttattgatttttttgaaaatttttctaagacagaatgccaaatatttttaaataaattaaataataaatttaattaaagttaactcatttttcatcgcaaatttcattcaaaatttgtgaaatttccccggcggcgcctatcggcaccgccggataggcttttcttaataatcctgtagaaattgagtcaaaaactgcgtcatttggtcaattttagacaaaatctgttaccaaatcgctttaaatttcataaaatttctcgcagatgtcgataggcaccaggtatggcacggaaagacttccgatttccgacatttttggggtaggaattccgacttccgaaatttttgatgaaaagtcggaaatttttttaatttttcttttcaaaaaactagcaagttttgtacaatttctgttaataaattgaactgaaatttttaaaaatttcccggcggcgcctatcggcaccgccggaccctaaaaatccctatttttcttgcaaaatttgctcaaaatcgcaaaattttgtaattttttggacaaaatctgttaacaaaattttcccggcggcgcctatcggcaccgccgtaccctcctccaagttcccaaaaagtttttgaaaaaatcgcgctgtataaaacgtgtaaaaatagtcactccttttcccaaaaatgttctaaaataatgaaaaatgacaaaaaaaaaatttgataaaatattgaataattttttcaagcgtatactaaaaacatttgtgaaataccttttacttggttaagaattaaaaaatttagcctattaaaatatttagaaattttttattatattgtatattttttgaaaaatttccgatttccgacgtttttggggtcggaattccgatttccgacttccgaaaatttttggggcctcggaatg

SEQ ID NO: 110395 - DNA, 210 bp, Heterodera glycines
  unsure (1)..(210): unsure at all n locations
attttactcgataaattcttcttatttatttctcgaggttnacacaaataattaatcattttaaatagaaatntaatnttgttaggtaccctcaaattccaattcaattgtcaaaaggcaatgccatttcgccaaatgccaatttgttcctgtcagatgcccgcgagttagaaatgcctgttcttactccaacttctctcgtgcaaaatg

SEQ ID NO: 110396 - DNA, 522 bp, Heterodera glycines
gctccaaatctgttttttgaaatgaaatgccaatatagagattaaaagctaaatttctaaaaaaaaattaaaaaaaaatggaaaaagtcgaaaaagtgcaatgccaaatttaaaatttacagccatattttgctcattattagcttctatttggcgcctgttatccctttaaaatgggtgtgtacttttgatggaaaaagttaataaaaaaaaggagaaaaatttaaaaaaatatttgtggacaggcaaagtcaatagagcgagggcacatctaaaatccttgaaaattttcaaggattcaaacccaatgaatgatacattctcgagtcatatatgcaaggacgtccttgagatcaatgactttgtgaactgccaagaacaggagttttgcgtgggccgccacagatttcaaaataaaactgattgagtattttgaattcccaagaataggaggggggagttgattttaaggactgtccttggcactcaagggcagagcggagtgagtgccgccgagtcatg

SEQ ID NO: 110397 - DNA, 403 bp, Heterodera glycines
agggaaggggaggacaatgaacggcagaaaaagaacgagttgtgcatcgacgacaatccatccgccgtttttcgctttgctttttcgaatgatggatggccggggggaggggagggggagaaggggcgtgggaccgttcccatcgccacaacagcagcaattggtgtgaattacgtggctaatgagtgtggcggtatgtgcatcggatcggtcggtcgctgatccgtccaatatccaggccccgacgaggcgaacaaccggcttttgtcctccgatcgatgtgtaaaggcaccgtcgggtgggctggggaagtccaaatgatcggcggagatcgcccgcccgcggcaacagcaaaaagcccccgggctgtgggctcacacactgacctaattccccaaaaatg

SEQ ID NO: 110398 - DNA, 599 bp, Heterodera glycines
gctgcaaaaaaagagaaaacattattacaattactgtaaagattactgtagaaactatataattgagggattgttgtatatcaaaggatttattacattgtagcaagtcttattgtacagaatttgcgtatcattttgctaattactatcactaattaattggttatgtggtacacacagatcagtgctgttcttgaaccaaaagtccctgagagttggtcacatgaattggtacctagactccaaaacagccaatttttgtcgagaatttcgaacaaattaatcttaaggttactgtgtccataatttttaatagacttacatgtaagcgcggtagaaaataaaaggaaaattgggctgtattttttaaaagtgaacttttcggaaccttggccggacgaacgcaaaaaaaaaaaaagaaaaaaaagctagaataagaaaaattcgtaataacaatgaattttatattctggataaaaacaaaactcgtcgcatctgtgtgcatgggttttcccgtcaaaagctgcttttcctatccaagtaattaatcacatgatccgggccataaatcccgatcggtttttcatccaaaataaatg

SEQ ID NO: 110399 - DNA, 316 bp, Heterodera glycines
  unsure (1)..(316): unsure at all n locations
atacatatttgtctcccctttctctttcattcctgctctgttccaatcgcaatttagaccaccactgatctgnagtcttaaatagagatcggacatggagcatgcccgtgcacgggttttacggaccccgtaccccgtgttttttaagggctgacacagatttcacggggtcacttagttttagcctgtgacccgtgtcgtttccaaccccgtagcccgtgtatgtggaaaatgccgatctctagtctaatctataatttaagtacataattcattttccattgtttttacagtcacctcttttcaggttattatg

SEQ ID NO: 110400 - DNA, 120 bp, Heterodera glycines
cctcagattttcgttgtaatgaaaagaaaaagtttttgaaataggaacctaatcccccatattttttttcatcagcattaaaaaaatctaaaaaaattcaggtaagcataactttggatg

SEQ ID NO: 110401 - DNA, 839 bp, Heterodera glycines
atctttttttaatattttcccatctttcaattcaatagctttggcacaaacttcgaattgaaataaatcaggttatttgagtttaaatggcaagcaacacaatttatttcttgcttattgatggaaaaaagcataaaacctttgtacttgatttcttccattgactccattacggaaatttgtttttggaaaatttaaggtcaaccctacccatttaaatttgttttgagcaaaaacttattagctggcacaggcacatcctcattctctatctaaaattggctctctgctctaagagagtctcggctcggtgccaaataggaccagcacggtaattttacagtaagagcacgggaattttcgccggaaagtttccctcaagtttttcggtcaactagatcccgccggcaaattcccggtaaaattttcacactatttttgaagaactttttatattttacaatttgttctcgcttaatttaaccagaacaatttcttcctgataattttttttacttgttttccaaattttgtatttatgagcaggattttgcgcttctggcgtgagagaaagtttagaattttatcgtgtatctgtgcaatcgaaaactctttagatatttttccattggaaaaggggcaataattattgaaaatgaaaaaaatattttcaagagcgtaaattctcgagaaattttgagtcgctctaatgccgttaagcaacccttcgttttcagagcatttcaactttatttaattaattttcatttttttgacatctttgcaaacacgatgtgctacgaggtcgccctgaaagcatcagcatcagtgtgataatg

SEQ ID NO: 110402 - DNA, 129 bp, Heterodera glycines
ttttttctttgattagccaaaatccgcttcagttaaactccgaactgtgctttgggcttatgtcacggccaatgtttggtcggaatttggtaattaatattttaattgaaaaatatttatgtcaaaatg

SEQ ID NO: 110403 - DNA, 849 bp, Heterodera glycines
aatgaatatgtattgttgagaagtgatcgatcaatttaataattatggaattattaaagtgctcataaaaattgtcctttttttcgttggactgatcaatttggatttgtgttatgccatttgaatatttgtcgttttctgaaatgaaaaaaatttgttaaaaaaagctcaatcgtttccaagattgtacttggaaatcgtgttttttgagtatgaatgtaaatacatatgtacatttataaaagtttaaaatttttggcattttgtcaaaataatgcttctctcgccataactaagccgcaaaaaaatgtacagaaatttctgaatcagaaccagtttttgcggtaccgttgaaaagattggtatccggcttctttgaaacaaataattaagaaaattcaattttattagaaattttttatttttatccattaaattaaaaaatatatactcgatcattttacacaaagaaatttttaacagtttcaattataatagtttcacttgtcgggaatcccgtttcccgtcccgatcaatatctaatctgcgctggtagcacgccggacccaaataatcattatgaaggggtcgcttttatgcttttaagggaccagaagaccagcagcatatccggctttttcaaaaatttttaatcactataaaagcccttccttctctcttttttttcatttaggtacttacttttcctatttgtttaccttacgtcgtctttcatcgtcgaggctccattttgcccttcttaactgttgattttacaaatttattttcagttttgctaatttaatttaatccaccaagaaccgtcttaataatttgccccacaaaatg

SEQ ID NO: 110404 - DNA, 215 bp, Heterodera glycines
tcccctcctcccccgacccgtactgttcggcaaatgttccgaccttttgccggtgtggcacaaatttttgcaacacgccgaataatccaggctttctgttagcactgaacaggttgaaaaagtggggggagggcaattggaattgttcaagagcaaaattagcaacattcagtactctaagcaaaattgtgaagccggaagagccgggcaatatg

SEQ ID NO: 110405 - DNA, 174 bp, Heterodera glycines
tttttgacccaaataattgagaagagatgtaaaaaaatttgaggaaacgcatcagctgaatttttcgaagtttaagctggacaaaaaagctcgactcttacatacttttcgtttggtttcagattttccaaacaaggatatgtttcaaaaaatctgcaaaatgacacaaacatg

SEQ ID NO: 110406 - DNA, 97 bp, Heterodera glycines
ttatggtcacaaatctaattaatagattaaaaatttctattattaattgatcattagtagggctggtaaaaatatggatataaaatcgcgaaatatg

SEQ ID NO: 110407 - DNA, 144 bp, Heterodera glycines
cgttcgcctcctcagcgcttcacggaagaggtagaaaaatttttgagtttttcaaaaattaattttcccccctttttcccccaacagatcagtgacgatgaaatccgccagctctgcaaagcggccacggacgtcttccgaatg

SEQ ID NO: 110408 - DNA, 1003 bp, Heterodera glycines
ctaaatgccagcctttaatttgcttataaccttctaatttcgagaaataaaacctcggaataatttggaaactttagattatattgtctaaaatggatagaaaatccacagcctcgctccttatagagcaaaaattcaacaaaatagacaacgacggttctggacagttaacagccgttaaattgcagcgcgctctaacaaatgggacatcgcggccgtttaatctcgacacatgccgtcttttagtagtccaatttgacactttaagaaatggatatgtcggctatgaagattttaaggcgctttggaatgtaggaaatgatgaatttattgttgtttactgaatttacagcatgtaaacgattggaaatatgatttcgtcaaattgagcgagaaccttggctttttgtctatgcggcagcttcaaaatgcattagcccaatacggtattttttatttaaaaaaaattattgtacttttcaggcttcaattttactacgccattttttcaaattcttctgcgccgattcgatcggacgcgtaccggtagatttttcttgagtatttttgacttcgtcaccttttcatgttgtttattgtttgacgactttatgcatatgtgcattatgcttcagcggcttatgccttcatttcgtactgtcgatgtttgtgccacaggccgcattaatatccgtaaaattttatcagtaagtgcattttataatatagcttattttaagattttgaagattttctgctcatggttttagccgccgatatttaggtaatgaatttccgtaatgaaaattaataatttttaattaaggatatgaggcacttcaaactgttatatatatagcatttatttcaccgatatttcattttgatcagtataaaaaatattttaattagcatttttatttttatttgttaagctaatcaagctatatttaaatttatataaaatttttataactggttttagcacattacccataaaatg

SEQ ID NO: 110409 - DNA, 1003 bp, Heterodera glycines
tttcatgctttattataaatatgtatttaaaaacttttttaatgtttgcacttctaataaagaaatattaattaaatttttttattatttagatataaaacaaccaaaaaattttaaaaattcatttcccatttttataacaacacaattttatgataataatattttaaaattaaatgtttccacttaaatcaaaattaattttattaattaaaataattttttaagtgatttactagttttgtttatttgtaataaaatatttaacatattaacttgtctatatttttttgctttttttattgctattttaattattattatttttgtaacaatttttgaaaagaattatttttttcttaatttttttaacttaaaccaaaaatagatttttgatttcttaataaataaatttgccaaatttgaaactgagaatttgtgggggaacccaaaaacattgccccgaaaagcggggcagaagagaagaaattggatatgcctaagctgatgactgactgacttactgaaaatgatggcccggcggttaatctcccgccccgagaaaggccaatgaatgcatttcataggccacaaattacacaatttggcctgccttatttgtccctagccttattggcatgacactgagaattttttgcaacaaaaatagaaattctgcaaaaaattgtattaaaaatggaaaattttttatatttttcatttgagaatttttttatatatgtttttttttgaaaattattccagtattaattcatttaaaaataattatttcattttaataataaacttgagatcttatattttatgaaaaattttctttattcaaattaaaataaatgctatttaaataaattataggtaattactttttatggccctgtctattaccatagaatgttttattattttaaaaactattttaggataaataatttatttcaactataaaatttcaacaatccattcggctaaacaaattatg

SEQ ID NO: 110410 - DNA, 229 bp, Heterodera glycines
tttttcatctttacggtcgtaaagagcgaacagcaaagtgtcactctgaaatgactttggcattttattcgactaattaaatgatttctccccctcccccccccaatttgcctgaaggcgaagcatttgaacgctcagtcgccgatagcccgggaaatcctccgcccacaatctctgctgcacttcaattgctccatttgaatgttcattagcaaaaagtgtcaaaatg

SEQ ID NO: 110411 - DNA, 1003 bp, Heterodera glycines
attctgaagggttctcggggggcgttaaccagggatctgacatccattatatccaattttgaatgtctaacctaaattcaagcaaaaaagcaaactccgaaaaacttagttttctatttcactcgagttcgggtaagagatttctcaacattggtgtaagattcgtgtttagctacccccgaaaacccataaaacaagttttcacgaataaaaaagggccctcaacctatggtttttcggagtgccccaacagcaaaaaatgcattaatttaaaaattacgcttaaacaaaaacagaattgaaaaactgtaaggaaactgcataggatataatgatcaatatcttttgttttttaaacaaaaaacttcacactccaaaactgacagggcagccaacttttgttacacattttcactacataataaaattctttcaatttttgcaaattcgggggtaacatataatacttattgttagtatatttggttcccccaaattctgaagggttctcgggggggggggggcgttaaccagggatctgacacccattatatccaattttgaatgtctaacctaaattcaagcaaaaaagcaaactccgaaaaacttactagtagtttttgatttttgttcgagtccgggtgagctttgtcaaaattggtgtaagattcgtgattagctacccccgaaaacccataaaataagttttcacgaaataaaaagggccctcaccctgtggtttttttcggagtgcccgaacagcaaaaataattcccagggaaagaacaaattgaaaaattttttttatttttaaattaaatttgtcacttatttattctggcataatgttataagttaaacaatttgaacaaaaaaatgactacctacttctattactgcttactagagcccggaattttgaattttgctctctacatttgtcactttttattactcattttccttttaaagaaaagcacagatccaattccgctgacaaatg

SEQ ID NO: 110412 - DNA, 204 bp, Heterodera glycines
ggggcctagggtagggatttttaggggcctagggcggggatttttaggggaaaaccaattttggggcctagggaggggatttttaggggtgcaaaaaaaacaatttaggggcctaaaaatacttaaaaacctatgaattttcccacccccctagccattacggaggacgacaacggggccaagaaggtggagaaaagtggcatg

SEQ ID NO: 110413 - DNA, 65 bp, Heterodera glycines
ggtttgaacaatattttcaatagaattttaaatattattttgttttgtttttaggtccttttatg

SEQ ID NO: 110414 - DNA, 68 bp, Heterodera glycines
ttacccaagtgattcctattcaccacctacctgctgtcctgttgggctagcgttggcacaaccaaatg

SEQ ID NO: 110415 - DNA, 130 bp, Heterodera glycines
agtaagtaagaggtctcatccttcaaatcagaacaaaaagggttttcttagaaaattgaatgtcggattcttttgtagccgtaagatttgctttctttctatttagcatttgcttcaatgtatccaaatg

SEQ ID NO: 110416 - DNA, 145 bp, Heterodera glycines
tggttttttctaatcaattataatgtcatcatttaattgattttttagcattggcatgaataaaatcaaaaaatttatataatatatttatttttttgttttactaatatttttgttttcatatttgaagcatttgcaataaatg

SEQ ID NO: 110417 - DNA, 1003 bp, Heterodera glycines
tggttgctattgagcaaagttatgggtagtttttttgttggaaatttccatttgattgttttttataacgccctttttgatggcttttttataacgacatagcaccaaaatatttaccaaatatgtaaataaatttttaaaattgttattattttggataaaaaaaaatctttataaatggtgaatggatgaaaacaaattttaggggaaaaattttaaatgaaccaactcttaattgcaaattcatttcaaaattaaataaataaatgcttttgattttatcaaattacgcgaattcatttaatcatttttttatgctcataataaattagatttacatattaaattattttttttgatacaaaagaacaaaacttttcttttttataattttatttgcatttgtgaaggaaagaccaaataaaattattgttaattgacagtttggctttaaattgaattcatattcaaatttggtgcgcttctaatcaattttttaacggattcgagaaaaaatttcaaaaaatgttataaaattatcaaaaatcgaacaaatccaaaaacatatcccctctgggcatgcatgggccaagaaaattgagttcaagcaacaaatttaaaaaggtaatttatttaaaaatattttattttcctttttttagaattcgaaaaaattgttgaaaaatttcataaaatagaaaattttttaattcatttgggaaaaaatgttcaactaaagaatggcaatttaaaaagaaaagtaaaatgaaaatttggcaaaaatcaaaatttaaattttgtaaaaatataattatcattaataaattttaaattttatttagataaaatattaataataataataagcaaaaaaaaaatatgcataacatatttcatcaatatttaattaatatgagtaggaaaaatgaattttcataaaatcaatgagaataaaagcaattaataaaatgaatttctaatcatttttattttatgaaaaatg

SEQ ID NO: 110418 - DNA, 375 bp, Heterodera glycines
ccattttagaccataaataaaaaattcgataatttatttttcgactttttgctcgaattcaggttcggggttcgacttaggtcataataaatgtcagattcggattctccgacccttaaaacccctaatatgatcttttcttgaagaaaaatttcaaaaattttgtttttcgaaaaaggggagggggggcaccatccgtactattaccgttaatacttaatattcatcattatgtgtataaaaatacaaaaaaaaaaattcgaccaaaaaaaagttgcaaacaaattttcaaaaagtaccttctttaaagtagctccaaaaaggggcgtatgctaccatctaaactattacccaagatatttttagcacgcaatg

SEQ ID NO: 110419 - DNA, 420 bp, Heterodera glycines
caagggtaattacagtaatcgttgcatagttcgtcgagagttacggtcaagggtaattacagtaatcgttgcatagttcgtcgagagttacggtcaagggtaattacagtaatcattggcatcgaggagttatggcaatggaagcaataaaaaacatttgtatttgggtggacgttttttgacaggaaaaattgcgttcaactaatcctttgaatttggggatcattaggaaaactaaaataatttctctcaatttcagcattttcatcataatttagttaattattttgggaattttcacttagatttttcttcaacattttggaatttatgaaggtatttctaaattttcattttttttaattttaaaaatttatttttttttaaattaaaattcgttggattttctttcaggtgatg

SEQ ID NO: 110420 - DNA, 1003 bp, Heterodera glycines
ttcagcttctttttatatattgcacatttgttgataagtaaatgtgtcgtaaacatgattgattattgtttttcttaattgccatctcaaagaaaaaattttcaaaatcgtaaagtaattaatgacgctcgtactcccgaccggcgaacaaatattttaatttcattgataatttatttgcaaaatgaaaaatttatttaaaaatttaaactgcgaggtcattcaatggttttgtgtgtaattttttgtgaattttgcatttatccgtactgatttgtgagtgagataaatcgcttttttggcgttttcccaatttctataaaaatgtaaattttggaactaccaattcagcgacttttctgttttgggatccggttttttattatcaaattgaaaattatttctttggttgttcgttaattatctgagaattctaaaatgtcctaaattacaaaaatgttccgaatattacaaaaattttctgctttttaaaaagccaaccagaaaaatgacaatttattttttcttcatcatcagggatgatatgtatagttatttcactatttttttcctgagctccctatagcctgaaacgcacgaaaaacatgtttttttcggctgttgttaagctactttttgagttattagaaactattttctagttttttatttttagcaactaaaaaactataaaaatgtgatgtcgaacgatcttttcaatttacaaatctattttaactgataatcgctcacgtctatctcccgaacaactcgacatgttacttatttgcaacgtgaatctcaataatgatttggattaatattgtttatttttgaataaaattttgttattttacacccctaaattcggaagtttttagcaactataaatatcatccctaatcatcatacattaatctatttttttaaattttccaatattaaataaattctgccaaattgtgcattttatttgaaaaattagtaatattttaaaagaatg

SEQ ID NO: 110421 - DNA, 143 bp, Heterodera glycines
cgtgaatagtttagaatctgatactactccccttgcattctttgactcataaaagaacaatttccataaaagcacgattatctcatattttggccatacctgcatcataactaatcattatttctaggctaacaatcgaaatg

SEQ ID NO: 110422 - DNA, 390 bp, Heterodera glycines
attctacttaaaaataaattaatttcatttttttaaatattccattaattttaattgttttttttcggcactccgttggacggaggaaaaatgccgtgaaaatggcattgaatgttcagcagagaatcgccgtcaattgcttggcccggcactgttcaaaattcggctcccgcttttctcacatgtggaatttactgttcaaattggtaaaaagtggatttaatattaaaacaaagtaaataatgggatatcaattttaacataaattacctatattaactatacagaaaagcaattagaatatcgtttaaaatttatactttattagttagtaaaaatttataaaattagacatttttaagggttgcttaaaattaattgcttagaatg

SEQ ID NO: 110423 - DNA, 111 bp, Heterodera glycines
tctgatcagtcttttcaaccgaatttgggagaacatgcacgtgatctggctttacaaccatcgaatttgggagaatcaacagctaatcaagcttttcaacaattgaatatg

SEQ ID NO: 110424 - DNA, 1003 bp, Heterodera glycines
ggacagtgagtgagccccttgcattgttcccccgttttttccccccccccccccccaatttcgccgccttcgcagcgaatcgatcattttgggcggtgattataaaaaaaataagacaaatacgatgataaatggtattgataataaaaaaataaataaacaattgaataacacaccaccacccccacctaatgagaaggtatttatcatttattcattcattcgttaattcactcgcttttatttaatcactgataattttcggatgattttattttgctcattgcaagcagcagaagagcagcagaagcatcaactgtgttgttgtacatatgtattacatttatttgcctcttcgttggacatttaaatgatttataattttaatttaaaaaataataagattttcaataagtttttgaatttgaataatccctccagaaataatttgccaattaccatttgatgtaatcctttttggtccagcattaatatttttgtaataccctgcaaaacattttcattccatacacatttttgtgtcaccaattcgtgctcacttttcagccatcaactgcaagttttaatactcttccaaaaacacatattatcggtcacgcctatttgagtcatatcgaatttcccaaaattttgcaaaatctcctcatttttaaaatttaatttctgtataagttaatttaatcttaaaatatgaactttaagatcttaaagactagaaatgaaaggaaaatgaattgaaatcatttaaaaaagatacatatgacaaagtgtgtagtaattgctcatctgccgagtgagctgctgttttggtttggagcgcaattatttatttattatttgacgaatgaattaattggctgcgcgaaaattgatcgattgacccggactttttctcaaaaacatcctttattattaatttaatttaaaaatatttattaggatttcttaaatattttttccgccagcagaggaaataaaaatg

SEQ ID NO: 110425 - DNA, 496 bp, Heterodera glycines
ttggcaaattttcatgtgatttggcccagcagtatgcgcaattatgctctgacggaagcaaacgaaaatatttgggaagaaaccaaataaataaaaaatgtacagcgaaatagcagtaaaatgaggagggagatagagaggagaaagaaatagtgtgtgtgagagagaagcgagagacagcgagttaaaaagagagagagagtgagaaaaaaagagaaaaagagggtaagcataaaaatcattcataattgtttttttctataaaataaaagtgcaacaaaattaaaagtgcaaaaattggtcaacaacgaaaacccagcggaaatcggtggaaatttaataaattttgggagggaagttgcgaaaatgaaaatgttcacatgaattccccaagctcagctgatttttgctgagccaagacaatataaaaggaggaaattctgaaggaaaatcacttcaaaaattaatttactaaaacaaaataaaatcgaaaatg

SEQ ID NO: 110426 - DNA, 141 bp, Heterodera glycines
ggtttattaaacttaagtttttaagaaaaatgaaggttttcggccttatggtattgtcgaaggattcatcgacggcgaaagttcgtttgttgaaaggggcttttgagttgaacagcttcagttttttcacaaggaaaaatg

SEQ ID NO: 110427 - DNA, 473 bp, Heterodera glycines
aaaaaaaatccaggtccaggcaaaacaggaaaaaacctggattttcctggacaaaattttagaatttattatttcaagtgaccgatattttttcaagttttcaaaaaatgattaaatatatttaaaaacaaattattattgtaaattagatatttttagatgttcccaagcaattaattgaatttttcaaacatttttttgatttttaaaatgagtttaaaaaaatccaggtccaggcctggatccaggtctcgaggagcctggatttttcctggacctggattttcctggatttttgtccaggaaatccaggtccaacatggaatccaggtccaggtccaggcatttttcaaaatgtcgatctctatttttgagcaataaaatcaaaaatcagaccatccatttttgaattactcatttgtcagttacttaatattttggcttcaatttcactcatttccctcttcagtatg

SEQ ID NO: 110428 - DNA, 505 bp, Heterodera glycines
attttaattgatttataatgaaatatttttgcttcaataaaatgtatatttttgttggtcatttttaaataaaataattaggtaaattcatttattttctgacaagggtgttgtaatggctgatcgagaatagcctgtaggagctgaaagtgctgtaggagcaaaagcaacaggggccaaaatgaaggaaagtgtttcgatgaaaaatgcacgaaaatttcttttttagccccgaaattcttcgttttaatgttaatagacattaatttaaaaatttttgagtttttttaaactatttacgaaaaatttccaaactttatagtaatttttagatatttacagatttatccctttttaaaaacaagaaaaaatttttttactcattgcttatcggcatgatttggcgccggagccaaaaaagccgaaaatttacaatagcaaatcgactatgctctacacgataaaagtggttttaaagtgatttggacactaacagttcgatatg

SEQ ID NO: 110429 - DNA, 191 bp, Heterodera glycines
aaaattcaacgccttttatatggctaaatttccaaaaagaaattcattcccaaaaaaagaatataaaagcaacaaatctcctccaatccctcactaatattcattttcgtcattctgccttttgctggccaacgacacacacacattttcctcaacgacgttcgaccgactacgacacgacgcgtacgatg

SEQ ID NO: 110430 - DNA, 364 bp, Heterodera glycines
tatttttaaatctgtgcagggattgaggaggagtgaacaaaatttcggtatttatatgcgcaaagcatggaaatagtgtgaagaataaaaggaggtgaaagacggaagatgaataaacatttaagcatgctcatataattttaataaaatttaattatacggttccctaaattcccaattaaataatacggtgcccataaagcgcagaaaaacagcaatgtgcaaaaaaaaagtgcaaaatttttaaaatgaatcgggaaaatgatcgggtatacgatgtgtgcactttggccacgcccacttgcgcaccaaatcattcccagcaagaaatcgaaatcattctttattcaaattctagaaaatg

SEQ ID NO: 110431 - DNA, 640 bp, Heterodera glycines
  unsure (1)..(640): unsure at all n locations
tttatgggcncaatgaaaaacaaaaaacgggtgagtaaatcttgaaaatattgcaaatcaaaagccataaacccacctcgtactgcgatttgagataaatttctgttttttcacactatgagttggtttttttaccaatgattttaccccaaaaatccccccctccatccctgtgatttttttcgtaggggctcattaaactgtaaaagtgccgaaaaaaccaatcatttaaaaatcctcacattttttttcttaaacgtcggttcattttgcggcaattagcgcacaattattgtcgttatttgtgatcggtaggggtcaactgcgtctgagccaactgctttcgtaccggcaaaggttcacagttttcggaatatgaaacaaaagggtccataaaatacaaaaaaaggaatttaaattttttttaggcattaaatctttttttccgagaattaacgtttttctgctttttttttgtaaaatttgcggaattacttttacaaaaatgttaagaatcaaatttaaaagagtcaatacgatttatgagaaaatttatataaaaggcagagaaattgacagttaatttcatttttgcaattataacttacgacaaaattgtgcagctaattgccacaaaatg

SEQ ID NO: 110432 - DNA, 571 bp, Heterodera glycines
taatttcgtatgttttttccggaaaatcaattcgaaaatcaaaaaataaaatctgttttattgtatgtgtaaattgatggagaaaagaaaagtggaaaatttgaaaagccataattaaaggaaaatgaaatttttaataaaatttatttggcaaaataaatggcataatgttcgtaaattgttttgacacttaaaacatctaagagatgataaggactgccaaatatttgaacaatttcaaagttttgtccctattaaaggcaaagatacctaatttttaaataaagcaattttcaattccaaatctcataaatttgaaaaaaagacttggaagccctttgaatgttgggcggatttgatacagtacgcaatgtgtatggtaatgtacaatttaaaaaataacatttaataatcgagaaaagcaatgaataaaaaatgaaaaaatacccttatttgttaaggaaaaataacaatttttttggggggggagagattgaccaatcggtggaagggtgatcaatgacaataacactactgtctgatcacagaatgataggcatgaacggaaatg

SEQ ID NO: 110433 - DNA, 282 bp, Heterodera glycines
ggtaagaaatgtcggaaaaaaatgaatagttgaaaaatctttggcactttaaggaatatgttcaccaattatccggttggccacccgaccgtggtgcagtttgacaaggacgtggaatggaggcgtccagaggacgttgttggcgacgacggcatccgccttgagggcatcatcaagtgcttcgtagtgccgccccgccactgccactacgatatcccggtccttccgtaccggctcaacaaccgcacgctgttttccctctgccggacgtgttccgaaatg

SEQ ID NO: 110434 - DNA, 1003 bp, Heterodera glycines
tccccctttttcccttttttattttgtcacttttcactctgcctcatgtttttgtaattggactttaacccccccccccccccccggggggcaagttgtccaaacatccccttttttaacactttttctctttgtctctccccgtccttctcctgcgttttttcgcctctctccttttattcaaatgtgccgtcgcctttctcagcttttttcctcccccttcttctttcttctttgtctccctttggccaatttttgttcacatctgcaaatcgttttttccattttcctatggtacttctgtcgcccgccccctctgtgtctgtttacttaagccttgggctccccccatacacacacacattatataatcactgctcctcttctccccaattttccatcttcaatgccgattgcattaaccccctcggcctttcttctcgtgtcaaataaattgttgttggtcgaagtgttggttggatcagggacggtagagacgggaggaacacacccccctctcgtcactcacaccgcgagaacggcactccgtctgccccccccccccctctcctctcgcctcgccactctctcgccttcagcgtcgccgcccagcgtggcgagtcttgtcgtcctcttcaattgacccaatccctcccccagtttgtcgcccctttctcgacaggttgcagcaaagttataaagagattaatttactaaatgaagaaatagcgttgataatcactacttattcagttccggttggaggtaatcgaatataaattttgttttaaaaatatttttaggtcaatttcaaccgttagatttctttcctccaaaagaaaatggacggcttttagtaaagaataaaacaaataaatattgtctattttatagtgtaatattgagccaattgtatcaattgattaatagtgacggatcggatagaattacatataaacaattcacattaatatatcaaaatgaaaaaagacaacaaaaaatg

SEQ ID NO: 110435 - DNA, 68 bp, Heterodera glycines
taatcatttaactttaggctaatatattttaaatgggcctttgctcaacagactgtgccgacagaatg

SEQ ID NO: 110436 - DNA, 96 bp, Heterodera glycines
tattcaaggacatagaaactgtcaagaaaaatgtagactattttttattttaaagaaataatatttttttagaccaagggctatccgagcgcaatg

SEQ ID NO: 110437 - DNA, 1003 bp, Heterodera glycines
gtgattgtttaaaataggtaaacaggttacaattttgatggtattttatgatttgcgaatttacggttttacttccgatttggtgctgttctataacgttatataaaagacacaaaaagggacttatacaaaaatcacctaattaatgtattatctcagtcggttagagcacggcacggattgctggggtcgtgggttagagtcccagctggcgagttattttttatgttcaacacggggctcctggggtttttttttctgagcggcacggtcccgttggtttgtcgaaaaaatggaacggtaaagcccgccgagcgcccgggcacgtcccgcctctaaataacagttttcggaaaaatttaaccatccaattttgatgctcacatattttggatttctttcatacatatttatgttatatttattttaattaatcagtagggatgctaattttatgtaacaaattttgcgaaatatgtaaataaaatatgtataaaaaatgctaaaatatgtatgaaatatgtacaaaaacccccaaatatgtactaaaatatgtaaataaaatttttttaatggttattttttggaaaaaattcttcgtaaaaagtgaaataggcacaaaatgccataaaaatgaccaaaataggcttagaatcacatttgaatattttacaaattaatttttgatatatcattttttgaaaaaatcgattttttagggatacattttcaaaaaaaattttttaaattttttacaaaaaattttataaattctcaaaaatcctcaaaatatgtaaaaaaatgaaaaatatgtacgaaaaattgcgaaatatgtacgaaaaagtccaaaatatgtataaaaatatgtacatatgtaatatgtagaaaaatcccaaaatatgtaaaaatatgtaaataaaagtcccaacttttgttcgcaaacacaaaaaagaaagtgtttttcctactaattaggctatggagaatctaggaaaaaaatatg

SEQ ID NO: 110438 - DNA, 72 bp, Heterodera glycines
ccctgtgccgaattcctttgagcaaagtgtaaagaacctcccagaacgcaactaaatgtggcaaaaacaatg

SEQ ID NO: 110439 - DNA, 780 bp, Heterodera glycines
aataatttttttccaatccctaagaattttctgaacggtctgtgcgaacacaagccatcccaggacttgtggaactacttcacactttcagccgttacataatcccatttgccaaatattaacctataataatataattaattgtttgttgttataatatgtgcaataatcttttatcattttttcattttgatctcgggcagcatacccaaaaaacttaaatatcaattagtctctttttcttaattatgttcatatatatatttgtatatttttaaatcaactattcaaatttcaacaaaaaatattattgttattattattggcaatttaagacaataaaacattgaacatatttatctatgccttaaattctaaaatttatgcatttgtttagctatttattataatttttaattattattaaattaaaatttcaactcttggtccataaatatttatttaaatgttaaaatagtcttccggattctttccgttagtctgtcgattctattgaattttactctgtttcactttatgcatattcaaaggaaaagcatagaagcagcagcaacagcagcaggcattcttttccaggctttgttccgctgcttctccctcgccccctccggcagttcgctgcctttggcccactctcctcgccccaggggccctatttgcgtgtgagaaaatataatggtgatggttctgttggttggtggttgtggataaaatttggcacgaaaagccgagcatcgaccaaagacaggggaaggcatg

SEQ ID NO: 110440 - DNA, 556 bp, Heterodera glycines
ataaatgtgttctagaaattaattaaaataactattaaggggtattgggggtcgctgatcacgaatatagcacccatttttgccaattttgaacccctgatccgaactcggacaaaaataaaaattcgaaattgtatggatgatatcctcattggcatcttgccaatggggtattattggtacaggaaacctatcaattctttgtccctgtacagctcatgtagtgaatggtagcgctgatctgagcccggattcgtgatcagcgaccttgaaaaccccttaaaacttattttcactaatttctaaaacacatttatctgaaaatgtatgttaaaaatacccggtaaactagaaaagtaccagactttgattactttttgcttgtttcattagtttaaaccgtatttatatcaaaattgagagagactaaaaaataagtttcgactttttgttagaaattgggtccggggttcttgagtcgaaatgaatattagaatcggattttgaatggaatttttagatcttcttttttcctgttctaatccaccgaaaaatg

SEQ ID NO: 110441 - DNA, 916 bp, Heterodera glycines
tcattaataattagggatgggatttttatgtgctaaaaatcctgaaatatgtaataaaatatgtgctaaaaaatgcttaaatatgtgctaaaaaccccaaaaatgccaaaatatgtgctaaaatatgtgttaaaaattggaaaaatcaagtgtctttttgcataaaaattcccaaaaatctcattctttatcatttttcgcccatacaacgcaaatcaaatacatttcaaagtgtttggggtaaaattgatctttttttgattaatcattttataaattgaaagttccagcagagaactgaaatccaatgacgaattaatgaattcgattttgttactttctacattcgaaaaaaaatttaaaaaatttgaaaattctataagaattgtgaaaaaagttgatttttagggttgtatttttcaattttcttgtatttttattgcaaatttttctcagaaatgccaaaatatgtgcaaaatatgtgccaaaaccccgaaatatgtgccatatgtttttatgtgccaaaatgtcaaaatatgtgtttttatgtttttataagtcgctctaaatcaaaaattgttcggagataatgctatttttgggcttctctcgccataactaagccgcaaaaaaaatatgtaaaaacataaaaatcccatccctattaagaatgcacagcttaaagaaaactttctaattaaacacagatttcgactgtgagtaccatttttgttgtttttggtaaactgtgcaaaagttagggagaaaacaaatttttttggtccgttaacggccgagccgctgtcgaattcgacatttaaacttttttgttgtttttataaattgttttcgttttcccaaacttaagagttcatattctttgctgaccaccgttaccgtctgatatttgaggatg

SEQ ID NO: 110442 - DNA, 348 bp, Heterodera glycines
ttgggccacaattaacttctttaatgaacggattgagctaattaatgaatgagccataaaacaaagatttaaaaaacagttcaaaatacattggatatggagcagtagaacagtaaaaggctggctggttgacttaaaccgaagaacgaagccggattttttaaatattaaatttaaatggcataatgttttcatgccaatttgcgccatgccaagcgccaaacctaaaataagaaatcaaattttttttaacgctttaaggccacattcccaatccaattggctttctacagttttataagcttcatattttaattaattatatttaatttagcgtatttctaaatg

SEQ ID NO: 110443 - DNA, 216 bp, Heterodera glycines
  unsure (1)..(216): unsure at all n locations
nttcaatccctttttntttttnncnnnnactaactnaccntccnatcatnnccatntantnatcantttctcatttncctttnnnctnatcnntnnnnntnncctcatcttcatttgtttttttgattcaattaactgtcaaaggatcgtcttcgcactgcccaattggactcccagcggaaggacgaacttgtggaggcgctgtacgaggagatg

SEQ ID NO: 110444 - DNA, 1003 bp, Heterodera glycines
atctccaaaattatttatttactttcttgacaagttgcaattgtatgggtgaaattgataaaaaaaatctcatttttggaatttttgtgcataaaaacagtggacccaaaatcataaaatattaattgtgcaaaaaacgaagccctaatgattaataagtagggatgtcaattttatgtaaatacattttttttttcctggcttctccatgctctaaatagtaggaaaaacactttcttttttatttttgcaaacaaaaatcgggacttttatttacatatttcggggttttatacatattttacatatttcgggattttatacatatttggtacatattttggactttttcttacatattttgattttttttacataatttgcgggttttttacggaaatttttggaaatcctcaaaaaaaaatccaaaattttggtaaattttttatttttttatacatattttgagaatttttgaaaatttttagaaatttctagtgaaaaaattaaaaaaaaactttttttaaatgtacccctccaaaaataatttcttaaatgttaaaaggtgattctaaacatatttaggtcatttttatgccattttacgcctatttaacactttacgaaggttttttctcaaaaaataaccatttaaaaaaattttatttacatattttcgtacatattttgggtttttatacatatttcttacatatttggggattttttttacatatttatgtacatattttgaccaatttttgtacatatttttgacatccctatcaataactaatttagaaaaatgaaataaaaattcttttacttcgcagcctacaatataaaagccattggaaataagttttcatgatttttgataacaaaattttttccaaaaaatgtgttcatcaaaataaacattaatttcataattaagattaattttttcggtagaatatggccatttttgtgacatacattcaccagttatactttcgcaatg

SEQ ID NO: 110445 - DNA, 159 bp, Heterodera glycines
acaattctgtggcagattcggaaatagtacctccgattttcctgctgaagtaaagttggctagaatgagaccaataaatcgaaaattatgccaattatttttaggcggtataaataattatgaaacgcctaatattttcagacttcttccatcccaatg

SEQ ID NO: 110446 - DNA, 1003 bp, Heterodera glycines
gaattgattaagcaaaatttattccgggaaaaagcctcaaacttgggtaattaaaccaaaattttgaaatggtgaacgaattatcacaaattgattacagaaatgccatcaccggggaattatcacaaatggaattgggcaccgggatgggacaggaaatggagggcactggggccacagaacaaaaatcaataaccggggggttaaagaatgatcacaattggggggccatcacagttaaaggcaaatggaggggcggggagagaaacggcaaaaattgccaaatgaaatttggttgtgaaattgggggcatttttggccgcttaaataacaataaaattagataaaaagtggcaaatgtgagcagaacaaaatgggccgaaaatttgggcacaaaatgaaaaacgggggacaaaaatgaacgaatgaacaaaatgggcggaaaacgggaaatttgggaggttcatcgttctttggagtcgattcgccaaattggggacgggggcagaaaagttgcggtttgacaaattggtcattaatttgtgcgcagggcgggggaggaacacacaaaaacaattgacaatttgaaggaaaagggggacagagggatgaaacggcgaaaacatgttgcgcggcgggcgggggattggtgaagggcctcctccctcttaattccgccgatcattgatcggcgataggaataaaaattccgacatccgcgatagttttctgggctttttattgacaataataactccaaataaattgtaattatagcattttatgactctttgtatgtataatgagagtaggaacattttattggtatgccttttttaatatccaaaaaagataaattctgcttttctgttaaacataccactaaaaattttggatatgtgtccaaacaatttaataaaaattcactaaattccgcgatagttttctgggctttttattgacaataataactccaaataaattgtaattatagcattttatg

SEQ ID NO: 110447 - DNA, 1003 bp, Heterodera glycines
  unsure (1)..(1003): unsure at all n locations
tgcgcttaatcttttgccattattttgtaccaaaaaaacagacagaacagaatttgtgcatattcacatacactgataatataatattataataacttttctcagtcttttgtaaatggctaataaattgaattgccaattgacacgacaattgngggaaaatgggcaaaagttttttgggaaggtatcactgatcagatttgggatcaaagttttacgaattataagggcaaagagcagatgtattggatacttttaccacgtgtaagaatgcacttttaattccgccattttcctctccaaaattcgtttttctccgattaattggcncaattaaattaattaatggggctgctctgttggtgtgaacattttgactacggtatgggagaggacacactttcattacgttgtttctctgttgaagtttattgccctgcctcgtgccaaatgccaactgttgcttctgtcccccccaccatttggccaattctccattattttggctaatttcccgattctttttccgtctccccgctttgataatgccaataaaacggaggcgctggcggaaatcggagaaaacaaaaattttcacaaatttcgcaccaaaataataataaacaaaaaaattaacctaataaaaatagattatctaaattctactaatttgctgtgttttttctcattttttttgcctaattttcaatttttttgtgcctaaatttgatgccgaaatttaaattatatgcaattttaaggaaagcactttcttatcatattgtaattatgctgctgcttctctccattttttcgcttcttcttccggtgtttttgactttttcccccttttcaaatgcttttcccgtcctttcggttcgctttaatttttatttttaaatcggtttaacaaaattattgctgttagcagaaaacaacagaaacagcaacaaattacaatgctaatgacccgtggcgatcattgccccccgagttggacatg

SEQ ID NO: 110448 - DNA, 457 bp, Heterodera glycines
aagaagtgatcagtgtgaaaaataccataaccatctgtccgacggcatactgtacttactgcaatttcgaatcggaatcgatgttcaagtttgagacacttctttattattttggtttaccaatatatacctaattagggaatttaaaatgcaattaatctctacattttgttttacttctttacctgcagggctttttctcatctcctgccttgaataacacaaaaaaagatttccttttcatttcttttcacactttccactattaaggtggcgtagcgcagtgggtaaatgctttgctttagcttttgaacatatgagttctattcccattgactgctcttaatttggtctagaccgagcgcgccgcccaatttttaaaattttttttttgatccggaaacgggatttttccttttttttttacagttccctccaatgttttaacggcggaatg

SEQ ID NO: 110449 - DNA, 142 bp, Heterodera glycines
agtgggcgggggagggggggggcaacaaatcgtaagaacaacaaaaaaattgcaacaacatccccctcccatgatttaggcattgccgcgccgtgttcgtgaggctgttgcacaagtgaatgcgcagcaattgcagcgaatg

SEQ ID NO: 110450 - DNA, 1003 bp, Heterodera glycines
cattttctcggtgcagatcttggaaaggtttaaaaataaaattggcaaatgagaatagcgaaaaaaaaataaaaaatatagtgtggcaagaaattttaaaataaacgtatatatttataaaaattaaattttggaacagaattacaataaaataattcagttaaggttaattaaattgtatggtaataaattagaatggaactttgattaaagctgaataagagatttagaaatgcataaatatttcattattatatgttttgttttggaaatttaatataaaaatattgtttttctttttttcattaataaagaaaaattatttgtttgctttttcaagaataattgaatgtataacataaaaataacacacatataagcaattttaacaaaaatatgaatgaaaattaaaacaaaaatatattaaaaacagacaaaatatatattggaaaaaattggagctaattaaggtaagttaatcgttgcattaacaaggggggtgcaacgtatgatagggcgggatataaatcatccctttaactatcatttaacccctgaaagctccaatgatacccgatgctttggtgcgttcacgccgcgggtatcgttagtaagccaaaaggccgaagccaaatccaaagcagaaaaccaaaaaattaaattaaagaaaagaaaaaaatatgacattctatggttttttaaattttagttttgaaaaatattaaaattaaaatatatataaatttaaaaaatagattgttttaagttattattatgatttttaaaaaggttttgtgaacagattattggccgataaataggttaagtggtttttgatcattaattgttagcatccagtgctttgttggccggtaaatgtgttgttagaaaagttgtcgcggtgttttcttcaaaagtaaataaaaacaacttttacattaatacatattatgttaaataaataaagttaattcattcttttctttaaaaaataattcaaatg

SEQ ID NO: 110451 - DNA, 121 bp, Heterodera glycines
  unsure (1)..(121): unsure at all n locations
gacagatagatgatgattgcttaaagcatatgattatttaaaataaataatangataaaattaaaaaaagcatttttaaggtctctgatgtggatgattggaattcgttctgtacggcatg

SEQ ID NO: 110452 - DNA, 278 bp, Heterodera glycines
aaattaaacaatttttaatatttaaaaatcagtgaattatcgatttgtaaattaatgccaataaattgagaaaaattgggcaatatttgatgaaatgaaattgcaatattaaagaatatttcaaacaaatatttccattatatgtaaaaataaatttgtggcatttattatttattatatttttctttatttttgtaattgaatccggcaaaatccgaccgaatttcgaagaaatatttggcaacggatggaacaaaaaagagagaaaagaaattatg

SEQ ID NO: 110453 - DNA, 86 bp, Heterodera glycines
aaattcaaaacaaaaaattgttgtacactttgccaaatgccatgacaattgggccaaaaacgccatatttaaagagggaaaacatg

SEQ ID NO: 110454 - DNA, 322 bp, Heterodera glycines
tttcttattaaattttttgacaaaaaatcgtgaatatacttttattcgccataattatgctgttaatacttaataaaaattaatgaaaataagctttaaggggtttttgaggtcgctgatcacgaatatagcacccatttttgccaatttcgaacccctgacccgaactcgaacaaaattaaattataaaatttatatggatgatatcctcatgggcatcttgccaatgagggtacccttggtacaggaagcatagaattcgaaatttgtatggatttattttcattaatttcaaaaacacatttataggcatttgaaaatg

SEQ ID NO: 110455 - DNA, 736 bp, Heterodera glycines
ttttaaagcaaattgcctcggggatttgctaccctaaatatattaacactcccccttttttgcacgaaatttccgacaaaattaaattgcagcaaattttgcgcaagtgtcatagaaacgccgtgccaatttcggccaaaaataaattgcccgcccggtaagaagccccgttcccgtttagtgctgtctttcccgccaaaggttttttgtggcaaaagcttctctagggggtaaagagtggggaaagggatgaagcaattattaaaatgaaatgtgatcagaattggcaccaatttagagcttctggggccactgagtgagcttttcttttccgaaccttctcgaaagctcgcaaagggaaaatcttcaattaacacatttcattttaaaattattagtaataatttatgctgtttatatggcattgtttaatctcggagtttcggtatacgttagaaaatcattttaaaatatgtaaaatttttggaaagaaatttgaaactgagaattattaattccgtgtttaactttctattaatttttggctttggggcttcaattattgtgcccggcatcggaaacgattttttctaaaattttttggatcgcaactcttttttcatgttttaacttcgacataggcttaaacacaaggcaataccatgcctaattatcgataatttcgaaaattaaaatccgtaagttcgtttttgtattaagcacagattttattatg

SEQ ID NO: 110456 - DNA, 184 bp, Heterodera glycines
tacatcttttcgttgctttttttctacccgaatttttctagttcggtttcaatgactataaaaataatacagaaaagaaaatgttgcttattgtttagagaaagacaattattattcagcatttttgtgacatcgatcagttgtaaaacggcaaattgttgtgctaattgaaccgcaaaaaatg

SEQ ID NO: 110457 - DNA, 605 bp, Heterodera glycines
attaataaagacccaattttatttgcttttaattgcatgcatatgagaagcatagaaatagaatttcatcgacagtttttcaaattggagcgacattttgcaccaaaaaagacattttgtagttttggcaaacttttgctcggcgatttgtaaaaaaaaaattagaagcgaaggctttctaatgatgtcaaatttatgaaatgtgaccagcagagaaaaatgctttaaaattggctcagactaaaccgacccccaccccaattttccatgaaaactatttgtgatggacaaaaattctaattttcccccggcggcgcctttcggcaccgccagacccccaaactttttttaaactggctcaaaatcgccaaattcagttgggcgccctacttaccttagacgtttttcatggacaataataatatcaatattaagtgctttataaaactgacaaaactcttaatatagcagcattaaattttttaatttcatttttatttgattgaaattatttacgatgaacgacttgaaatttcgatttatggaaaaaaaatttaggtgacattaaagaagtgttgcgtatttcgcctattttaaaagagatg

SEQ ID NO: 110458 - DNA, 53 bp, Heterodera glycines
tgtcatagaaaaatataaatagtttccaaaaaaattaaaaacaagaaaaaatg

SEQ ID NO: 110459 - DNA, 99 bp, Heterodera glycines
tcggtcgaatcgtcttcctatacaataaataattcccgtcagtttttttttgtttcattttttaaaatgaaataaattttgtgcccttttttcaggatg

SEQ ID NO: 110460 - DNA, 681 bp, Heterodera glycines
aaagctggatcaaattcaaaataaaaatttcaatcagaaagtagaaaatttcatggaaaatttgagggttttatcacaaacaaaaacgtgtcgtgctacgtaattgaaagtaacataatagaacactacgtagtacatattatggttggtataaatcgatcatttcgttattaggttgccgctggaggggctagaatcgccgcgaacgtggacaacgttatcaaatttgcgacttgggacatgtttttcgaagcgcgtcgcattttgcaggctgacatggaagtgcgtcactttttctacaatcaaatccggcaaattgctcttcaaaacaacattaaccaatttccgatcgtctctacaaccgtggttacgttttggtcagatgactcgcagaaattgaagacgcagccgtgtcagttcttcgagttttaaaggatgatccattgttcattcagcattttttgttgcaaataaagacttattgcctttaaatcatttgagtaattagagtttaatcatgtacctaaatttttcaaatagggttggtctgctgggaccaaattgatgcttttggacccagtcaatacagaatcgtgtaaatatctttacccggacccgatttgtctaaccctatttccaggttccaaaaatatcgaagaattacttgtacactttattatg

SEQ ID NO: 110461 - DNA, 595 bp, Heterodera glycines
gtcaattaaacgataatatcggtgcggaggcgggggaataaatgacatgacaaattatatgtgtgaatggtggacaaactttgtatattggcaactcatgcaaaatatttttttgcccgaggggccattcgaaaatttaattgcttttagtgtccgatggttgcctaataagcacctcgtttaatttgaaaatttaaatatattttgttttgaaacaaatattcaaaaaggctctattcagtttatgcgtccgatcaatgaccatcctcactttcttaggctataacatttttttttctttcttatttgggcaactaaatcatggactaataacaatagacaaaaatcttcatggctatactcggaaaaagctaaattcatatgttccatattttttaatttttctataataattattattatttcttgcatggacgcctaaactgaaattagtgccaaaaaagtacaatttttatttaaaataaatgttttcaatgcctaccaatgccatccataacatactcttgaaaatagaaaattcgatcatttccacccgtaggcttacccgcctggctattgtgtgccgccctcaatg

SEQ ID NO: 110462 - DNA, 205 bp, Heterodera glycines
ttgggaaaatgtaaatgaaaaagtgccgctcaagaagacagtacctaagtaacggcagagcattttacaatttttgactagcggaaaccaaaatggactttactgaacttggcaaatgattaaattataggaattagtgtctcgactaattgcgactaataacttttaccataatgggaaaaggacggaaatcagtcgatcgatg

SEQ ID NO: 110463 - DNA, 419 bp, Heterodera glycines
ctttcgcgtgagcattttcctttttatttcttattgcattttctccgctttcatcctctgttcgttgcttcaaaatgcaaaaaaaaacccctaaattttgggttgaaattgggagtggtcgtcctactgcttcgaaacgaaaatttttatgtttggtgcaatttttttaaacggactgctttttagagaattgcacctcccccccccccccccccacgacgccacagaattattaatacagttacaattacaattaattttgtttcaaaattaaaaaaaaaaatcttcaaattcccgccaccaaaatagaatttggggtctcaaaatgacaaaagatctgctgacgaactaatttatgtttaattttacactttattttgcctctttttgtcagtttccgtacgcatacccaccaaatg

SEQ ID NO: 110464 - DNA, 864 bp, Heterodera glycines
atatgcagatgaataaataaatgtgcaaaataaaatattttaatcttttcaaataattgaaaagcggaacatttgaatgattaaattatataaaatatttttataaaaagataattaattatttaagattaaaaatttatttaaaacatcattttacttttaatttgataattaatattcataacgaaatcttagattttttcaataaaactttaaataatttgacaaattataatcccgacattttaaaaggaattttattttttttaataaataatattttttaaattaataaataaatccaacaaattatttttaagcgaaataattgaacttattttaattattttaaatatggttataaaaattgataacgtggaatatgaaaattttattttagaatttgagttttaccatttttaacttcaataaatttaaatcaaatttaaatattgaaatttatcaataaaactttaaaatatatgctcaacaaattataacccctatatttaaaaggatttaaattttttaaataaataaaatttttaattaaataaataattttaaaattataaaaacattaataaattaactgtttaatatgaaaactatcttaattttcattttcatttttctaaattaaagaaattttaatattttcaacaactgacaatgcgtcataaatttctcaaaaaaccttaaatagatgcacaacaaatttaatttatttgcaataaataaatgtttttttcattaaataataaatatttaaaaaaattttcatttattttaaataaataaattaaataataaataatttaaacattttttgccgattttcagcgtgtccgggacagtctcatg

SEQ ID NO: 110465 - DNA, 91 bp, Heterodera glycines
ggtcagttggcacggcaaaccccgcgggtgtcaataatttaatcctcccccccccccccccaactctgtgcaggtctctctctgctcaatg

SEQ ID NO: 110466 - DNA, 56 bp, Heterodera glycines
aatacctctcatcattgttgaattttgtgaattccattattcatttaacagagatg

SEQ ID NO: 110467 - DNA, 651 bp, Heterodera glycines
attttctttttcttcccatttttccccaaatatttcttcaaatgttttttgttccaattttttcttttccgctacaatttcaattgagcaattaaaaaggcaattgcaaagattaatgggaataatttcattgttgacaatttttctttttcttaaaaattaaaaattaaaatttataatttattcgatatgaaattaaaataaaaaataataaaattcctcaataaattactaaattcgaataactgatttttgcgcaaaattttccttattcatctatttttctttctttttttctgcaaaattataaaaaagttctggaaaaaaatgagagtcagaatttatttttgggacaactgtcagtataagcctttgtacagattcaacattcacttcaatagggaactattggggaaattgcattcatatcaaggctgcacgcaattacggattacggattgcggattgcggattacggaaattacggggttttgggagttacggactacggattacgggttacggatttttgggatttttccgtaattttgatccgtaatttgacttttggattattttttcgagacgatttcttgtaagattatttttataaaaaacaaatttttctattttttatttaaagaaaatatg

SEQ ID NO: 110468 - DNA, 127 bp, Heterodera glycines
tttagaaatagaaattcaaataaaaatagtaaattcttcgcatttttcaccaaaaatcttcggaaaaatgataaatttaatcgaaaatatcatcagtagtaaaaaatttttattagagcccaaaatg

SEQ ID NO: 110469 - DNA, 127 bp, Heterodera glycines
tatttttgatcagatttgatataattctttaccttaatccaattaattcactacactgccaatgatctgaccaatcgattaatggttgactgacgctaatttgatttgtttttcagcggccgatatg

SEQ ID NO: 110470 - DNA, 628 bp, Heterodera glycines
tgatgtatgggccgcaaaagtcgggacaattttcagaaaactatagaattaccgttttcatatataaaaacaattgtctgagttgtcggctcaaagtgcacgaatttgttaaagatttaaccaagattaaaaaaagaccaaaaactaactattttgccacaaaattcataataactaaaatattgaacaaaaattattattaggctaatttaaatacaattttcattaaaacataatcaattaaaaattaattttacgaatcatttaaaaaatagatggaaaatttgtaggaataaaaatcatttaattatttttttttgagtaacgcccattttgatggtttttgagtaatgacccggcaccgttttgagcccctttcttcatagcatatgcacagaaaaaatatgttaatccataccaagggcgtagccagacccttggcttcgggggggggggggctgaagtcaaaaattcgatttttaagggtgtatttttcttttttcagccgatttttaggagtgcatttttgttttttggaaatccagaattagaggggatgtattttgcaaaatttttctccgtttttcgccaatttttgcttttttggcatcaatttttcaaaaatatg

SEQ ID NO: 110471 - DNA, 397 bp, Heterodera glycines
atccctcgggggaaaatgagctcataaacaatggcagcgattatcgggagtagcaaaatgacaccaatttcatcaaattgttaaagccgggtagggaacaaaatttggagggggcaaaaaagagacaattagctgaagctgatcaatctcggcatgttccgaaagggatcgctaatccctatcactgaacaatctcgaaacaaaactaaccaatggtgcgaatctttctcaaaaaattctaaaagggatcattggccaggtcccgaatccaaaacttaccaaactccgatcatttccgatcagattcactttcgaaatttcaccaattcagaaggggtcatcgaaatgacttctgtcgagaccaattaacaccaattaacgcttttttctccccatg

SEQ ID NO: 110472 - DNA, 487 bp, Heterodera glycines
agaacggacgaatcaaacggacgtgtcagacggacgaatcacggaagaaccgagggaaaagatttttttttaagggggaagatgttgggaccggtactctattgtccgcccatattattttcattcctttatttctctccccttattctctcctctatctctcttcccttctgtcccccataaataccctgcggtcctctgacctccccgtcattcatttgtcacccatttattttgcttatattgttcaatcaatattcgccctttgtcctccgtccctcttctcttcattatttatttgtgtcttcccaacttgaataaatcctttatttattcacttcgccggtttgggatttgacggcacaacaatgttgtattatatgttataagaattttaggcagacaatttatttatttttggtttaattataaattaatttaaaaaaataataattatttttaaagatatgctttgggattaaaaatg

SEQ ID NO: 110473 - DNA, 1003 bp, Heterodera glycines
aaaattatccctaaatttaatatttttttcttaataaaaattttttggtttaaaaatttgttcatattcgaaaaaaaactttaaaacattaataatttcatttacaattgaaatatttaaagttttaacgtgttttgttacctaaaaagcgttaataaaaaattttatttgcctatttttgtgcctattcgggcttttttgtgcctatttaatgcctttttaggtgcatatttcgcgattttttgtgcctaaaaatcgcatccctataaatatcttatgaaatttttatttcgtgtcaaaaaacttttttttttaaaaagatttcgtgtcaataaaaaattcgaaatatttgtgacacacatacattgcaaaattaatatattagatagataactaaaaatttgtcttttggtgaaaataataaataatggcaaaattttcttatatattgaaatttttaaagcgaagaaattttttaaagctgaaaactttttcgtaattaaattaatatcttatttacacattcgaaagccacaaaataaagaaaaatcattaaaaataacatttttatggatacattttgaaaatttctattttagagcatttttttggcatttcataggggtgtatttttcgttttttagcattttatgattacttaactttgattaatgcaaaaaatatttaacaaaatcgtaaaaaagccgaaaaattatatatttttaaattttgaagtatattgatgttaatcgaagaattttcgctctaaaaggctgtatttcggcgtgcatataacaggcaggaagtatacatatttaaaaaatattaataagttcctccccaataatggtcattttatgtgtgtgaataggtgaatcatataaatgtcgtcactaaaacagaataaataaattataatgcaattgattttggttggcataattcccaaatcattcaattcattcaatattttcaaaagaaatttatatttcttaagaaaatg

SEQ ID NO: 110474 - DNA, 1003 bp, Heterodera glycines
ccttctgctgctcctctttcttctgcttgttcttccaacttccaattgcgttccaaaatgtttttcgttcttccaattcacttttattttcgattctgtcctttttattggctttccaaaattgtcttaatttaaataatttattgctaattaaatttaactaattaaatatattaattatcatttttggtggcctgaattatttgtgcgctttttgaacgctttgccaaatctgtggcagcaaaagttgcgctgtctttccatggcattttaatgtttttcaactgattttgctcgacgactcccaaaaacggcgtaattatctttgaaaattttctttaattttttcccatcctatataataaagttgagtgtctgtatgtatgtacggatttttgaatttgtgtggcgttttgttattattttgcgttaaaaaatgatttgaaaatgaaaatgtttttgttttgttttgcgttaaaaaagcatttgaaaaatgaaaatgtttgttttttttttgcgttaaaaaatgatttgaaaaatggaaatgtttgattttgatttttcagtttgttttgcaaaaaacattcttagtcatttattcgcttttttgtgtatgttaaatataacgccaaaatcgtccacacctccattcatcattttaattttttgtttttgtctttcattgtttaatttaaaggtttaatattgcttatttttttaaattcaaagtctgtttgtcgtaaaattttatggttatgtattggttagaaaaagtatttatttttgttgtatacacattatttcatatattactttaatttttgttttattttagaattgttaaacaattagagaattgtttttctgccgatacggctcattttttctaccagttttgtcaaaaatctggtgactaaacaatttatcgttgtttttctgccgctacggctcattttttctaccggttcggttttttcaaatctggtgccagcctgttgccatg

SEQ ID NO: 110475 - DNA, 724 bp, Heterodera glycines
tgataaatcccctcttcaatgctcaatttttttacttatatttaagcgttgcgacgaatattttaataatttttaatgaaaagaaacaaaaaattatattattattttttaaatgattcctactcacattttaaatatttattattcaaaattatatttatagattttggaattaaatttgatttgatttactttttttgttgccgtaaatttgcgtgggctttggttttcattttaatagcatcatagcatgtttttaatgtttaatttcttcaattaaaataattaaattttaaatttaacatttccggggtttaaaacgaggaagtgcgttaaaaaaagcatcagacaaaaatgcgaaagtagcttttatgaccgtttaactctctcattccttcccattttttccatttgttggataaatattaattattattttcaatttttgtttctttttttaaacaaaaatatgattttttattattatttccattaatttccgtctgattgaatttccctctccaatcggttcacttttttgtcgattgatcagagcaacaatttcatttgtttttaaatttaaagtgcaattgacggtgggggggataaatgaatctaagaatacttccttcctcctcttctctttttcataaataaaatttaattttcaaattttaatttactttttatttaatttttgttaaatttgttttcagcagaaatg

SEQ ID NO: 110476 - DNA, 65 bp, Heterodera glycines
ggtgggcatcaaaagagttcaaaatttggcaaccattttcaggcaagcgcggtgagcctgggatg

SEQ ID NO: 110477 - DNA, 133 bp, Heterodera glycines
ccccccccccccaattaaaaaattaattattctttgttcctaataaaaaaaaccaagtttatattaaataaccccattaaaaattttaaaaaaattaatctaaaggaaaaacaggcgctgattgccaaggatg

SEQ ID NO: 110478 - DNA, 143 bp, Heterodera glycines
tccttactgattagcttttagcaatcagtagaagttagcgctgctgataatttgtctaggcgacatttattagctcatccacgcgcacccactcagtttgtatctaggcgctgcaaacataagagtggtgaacgacaaaaatg

SEQ ID NO: 110479 - DNA, 156 bp, Heterodera glycines
attaattagttttaattaaaaattaaattaaaatttgccatatttttataaagtgttttaattacaaaatttgcatttaaattcaatgaaaatttagaaaagaaattgttcaacgaaagtgctggtcactttaattcgcaagtgatcctcaccatg

SEQ ID NO: 110480 - DNA, 613 bp, Heterodera glycines
gttattgctctaataaatttttttttctctgcggcatacaaaatataataattgaattttattatcataaattcacatttgataattaaataactaaacgtagccaataatgataatacattacttttactaaatttaatatttttattcatagcaaattaaaaactctctctctctctctctctctccgtgctgaaaaccgacaaaacaacgtgaattgacgtgtgcagactcaagaacgacgaaacgacgaacaaattggtggcatttgcagtgttgctgacgaagtaaatttatttgaattttgcctataaaaaatatataaaaataaaataaataaaacaaaaaataaaaaatctcttgtgactcattgggtacggtaattacagtatacaataaaagttggtaaattgaatttgtgagggttaaattgacgaaaacggacaaaacctcaaagggcaagatcaggaagaatcagtctgaaactcctgattatttagcaaggagattcaaagataagaccgagagtggtcgagaaagggaaataagacatttaaaaaggaagagaagtacaagtgtcgagcaaaaaagtaaagagggtgtaaacgaaatg

SEQ ID NO: 110481 - DNA, 1003 bp, Heterodera glycines
  unsure (1)..(1003): unsure at all n locations
atgataccaacaatcttggatttggatgccaaagaaaaaagttatnagcgaaaaacataaaaatttttgaaaatctgcccacaaataacacacaagcaccaaaaaatttaacattttctttcgaataaggacaattttaaaccaaaattttttccaagaaatgatatattttagggaatccttttttgggatattttgtttttttttgtttttttgctatatattaggtaacaaaaatgccgaaataggtatttcaatcagacatcgcttgtccttaatttaaatacacttttgtctttttagcacttacgccgaggcgggaaaaatcacgaaaagcgctatttgtgccgattggtccccctcgggttggttaaagcattttattcctaacggaaagtgattcattttcaggtgaattgcttttttgtgctatcagccgttccaacccaatttgtttcaatgtacaaaatcacatttatagtatttgccaaattccgaatttcattgtttagttgcaaaattccgagcatttgcggctatcagacccaaaatactcaaacatttgcacaataaaatcgtgctcttttgctggcgatcagtatttggtcacaggaagtgacgattggaatatttacgtgtggaaagtgccgagcaattggggttagtggggcatttcgaataaaaattaggcattttctatatctttgcaatgcttttcagacgatttcgccaatggcactgtcaatgttcactccgttttggagggccatcgctctattgtgaaccatgtgaagtacggaccacgcagcaatttgcttttgtcttgcggtgtcgagaaaatcattaaagtgaaaatccaaaaaagaatttatttataatttttgctcattgtcagtgttggagtgggctgcctttgcgtgactcgtaccaaaatccgaaaaaacgcgagcgcatttcgacgattcttcccgactttctcggtgatcccgaccacgggtcgatg

SEQ ID NO: 110482 - DNA, 195 bp, Heterodera glycines
cgcggggagaaaaaaacccttaaaaaaaggcttaagcatcgtgcaacagaaaagaaagaaatccctgcaaagcaaaagggttggcttttgctttccctcccctccccctcaactcattaattagcattaattagactcatttccgtgtttaaattttaagacggaggggtcgtattaccatcgaagtggacaatg

SEQ ID NO: 110483 - DNA, 621 bp, Heterodera glycines
actgagtgatccatcgaattgatcaccaaacgacgaacccgaagaagaagcttttgaaggaaaagccaaacgaaaagccaatgtcatgcgatggttaattaattcttaatttgttgcttaatctaaaaaaagtttaaagtctcacaataaaaatcatttcatgtgttgagaaatgaaaacgaaaaaagctaaaaataaataactattttttaatagacgccctccgtttatttcaaagcagtccaacgttcgttttatttattttcaatggaatttaaaaagtgtcaaatttcttttccattttctctctttttatttatttattttttatttttggattgacggattttttattctttggtcaaaagacagaaaataaaagcccaacagtgaaattaacggaaaacccaaagggatggatcagtgtatcgaattcacttttccattgtttgatcgatgctataaaatggacgtgtaaatgcttaaaaattaaaattattttaagtaatatttattaaaaacatttattttatattaatataaattattattttatattataaattttttacatttaataatgcctttatctttcagattttttattcaatcaaaaaaatg

SEQ ID NO: 110484 - DNA, 110 bp, Heterodera glycines; identical to SEQ ID NO: 98226

SEQ ID NO: 110485 - DNA, 191 bp, Heterodera glycines
gtgattttttcaaagaatatttactggtatctctcaaaagaaaaattttccaattttgtttggataaaaattttgtgtactttcactaatgacagttttatttacttattttttcatccctttccctttcaatgcgcagcgtaaaacctgatcaaaaattggcacatttgttccccgacaatttcggcatg

SEQ ID NO: 110486 - DNA, 190 bp, Heterodera glycines
atggcacacaatccaaaaaaggaagagagagagtgcccggaactgctccgaaaaattttttaactttagaaattttcaagaaaaaaataacggcctggatcgtccggaaatattcaaattgcccaattcatcgctttattcattcattcttcggtcttaattaagcttcgaagtggacggacaagcaatg

SEQ ID NO: 110487 - DNA, 406 bp, Heterodera glycines
  unsure (1)..(406): unsure at all n locations
gattttctcatatttggttttataatttttagttnggaattataatacttatttataatcattgtaaaaattactttattgtttaattatttttatatttcatattttaattatttatattttccatttaattttatttaaaattacactatcactaaaattcatttttttattgtcttaggttctatccagtttgacagcacacaatttttaacttatttgccaaatttttttttaatattttgggggttttgtcaattttttgtaaattaacacttttgttgttagcattttgagaattgttttgtgattatatgaaatctttttattcagtctacaaaaatttttttttgtttattttaaaatttaccaaaaatttttgcttttagggattattgtgaagatg

SEQ ID NO: 110488 - DNA, 660 bp, Heterodera glycines
agtgtgcttatttctaagatttgtgcttatttcagcattacgtgcttattttgggatttgaaaataaaaaaaatgcaaattttaatgaatgttttgaattatcgtcttttattgaagcgaatatttgaattactaattcgattttgaaaaaattcaaatttatttcgttttattgagtgtaaaatacccaaaatttcagagaaaatctgtaaaaaacagtcaaaatttctatttttcctccggcggcgcttttcggctccgcgggtccccaaaacttatttgttttcttaaaaattggctcaaaatctcaaaaattggtcattttctggcggaactctgttaacaaattgggcgctacttaaaaagagtattcttttgaaaatttcacttttttttggtcaaaaattttttttgttagttttgatacagaatttgttttttttaacagatggaacgaatgacaaaaaaaaacaacaaaaaaagtgaaagattttgaatttatcaaaaaatcatagagacccttttgttttgcaaaattttgtgaaataaaaaattgtgaatatatttttattcgcaaaattatgctcaatgcttaaatgtgtgtaaaagtcaaaaattctctaaaaaaagatcatttatattatttttagaccaaaaatg

SEQ ID NO: 110489 - DNA, 106 bp, Heterodera glycines
agtcgtggaccaaggtcttaaatttgcaataatccgtttcaaatgatatttattcttttatgcattttgtcttgcttatttagttggtttggaagaggcatcgatg

SEQ ID NO: 110490 - DNA, 799 bp, Heterodera glycines
cggctaaaaacgtcttttatgatttttagcgcatttttaggtatacatattgagacaattcgggcaggacaagaaaagaatgaagttgatttctcatgaaactcggaattggttatgtttagtcgaaaatatgcttacatgatactcataaaaaatacaaataattcaacccacctattctatgaccacattctgaaaaaaatcccagaaatacgaggaaagatatgcttggtcacaataaaataaaaaatggctagtgtgtaaaaatttgcggtcactaataaaataaaaaatggctaatatgtaaaattggcgtccagaaatttttagactaatccgaagcaaagcacgaatgaattaaagaggcgaaagaattcacagtatcgtttctaatagggaaatattgacaggatattcggctaaaaacgggtttgatcatttttagcgcatttttaggtatacatttgagacaattgggcaggacaagaaaagaatgaagttgatgcctcatgaaactcggaattggttatgttttgtcgaaaatatccttacataatactcataaaaaatacaaataattcaacccacctattctatgaccacattctgaaaaaaatcccagaaatacgaggaaagatatgcttggtcacaataaaataaaaaatggctagtatgtaaaatttgcggtcacaaataaaataaaaattggctaatatgtaaaattggcgtccagaaagacaacgacttggcaaaacgcattgacgagaatctttacgtcgataatattctaatcgaaatg

SEQ ID NO: 110491 - DNA, 1003 bp, Heterodera glycines
aatttaaatttaagagcaatgaagttggatatcaaaagcctttaagaatttaaataaatttcttccacatttattaattttctaaatcttattcatgaaattaaaaattaattagtgctgttttgattgagaatatacaaatttttccaataaaaattattcatcaactattttattccttctaattgtttttcataatttgtaaatttacttaaattttgtcaaataaataatcctttctgaatttggccaatttcttttcatgatcatataaattaccatttttattcgagaacttaaatttaaatttgagaaaaacaaagatatatttttgttataatgaaactaaattaataattcgatttaaattagtcaatataatcgaaaaaaataaaaatttggcctacttcttctcgtgatacatttatttatcattttattctcgaatttttccggttcttaacaaatattgaactataatgaatcattattttattgctttcgttcccctttaattcttttcgtttttggtgatgatttattcaatcaatttttccaacttttctcgcgcaacgcacaaaaatttctccatgaaataattcgtcccgtaaatctccaatttattttagtgaaaatagttttcacgctgaatctgccaaaaatgactaatcattttcaatttttttgtaattttaatttttatgcatttaaaatgcattaattgttatttgttttcttttaaattgatgctctaaaaaataaaaaaactatttaaaatttaaaaaatttgattaaatgatatatttttgttaaaatattattttttataaattaatagcaagaaaatgtctaatttattcgtaaattttacataaaataatattttttttaaaacaacattaacacgattttaattagagtttcaaaaatttccgtttaatctatgtttgtttgtaaaactactttttttatattgggaatttgtaatttcagttaaataatg

SEQ ID NO: 110492 - DNA, 120 bp, Heterodera glycines
aaaaaaataaaaaatatagtttggcaagaaattttaaaataaacgtatatatttataaaaattaaattttggaacagaattacaataaaataattcagttaaggttaattaaattgtatg

SEQ ID NO: 110493 - DNA, 73 bp, Heterodera glycines
ttttgcaaaaaaaaaaatattattgtaatattttaattttgggaatttcacacttatttttgaggaacaaatg

SEQ ID NO: 110494 - DNA, 348 bp, Heterodera glycines
aacttggtcattttccctatcgaattttaaattgggtgattccgacaaacagaaagcttattttttattgattttaacggacaataatattaaattcggccgataatgattttttttcttgtcggaaccacaatttctggaatgcaatttttcggaaactaaaacttgtttttctgaatttgtatccgttattcattttattttaaatttaaatcattgtctattcaattttttaatcttttttttgtcaaattatattcaatatatatttatttcgtttgttttttataagacttataattaactgacaaaagcaggttaataaatttctaattcaaaaaaaaaatg

SEQ ID NO: 110495 - DNA, 153 bp, Heterodera glycines
aattattttttgttttgtttatttgtttgcaaaatgtaaaaacctaaagaaaacataaacacttaataattttaattattcaacagatttttgtttcaataccttcaaaactttttgttttattttaaattaattttcaggtttattattatg

SEQ ID NO: 110496 - DNA, 141 bp, Heterodera glycines
  unsure (1)..(141): unsure at all n locations
ttttcatcgcaggttcttccaccgtccgagtttcaattcgttgtccaccgctcatcaaacattcgcttgtcgccncacctgttgggcctccaaatttggcacttccacccacccgttgagatggcacaccaccaacaaatg

SEQ ID NO: 110497 - DNA, 401 bp, Heterodera glycines
ctcaatacttttttttttctcaaaaattcttaaaatccggaaaaagatcctttttggtgtaaatctataaagaaattgcattattattattatttttttgtaagtcctttgtctttgtgggtcctttgtccgtgggtcctttgtcactgcaccggtgagacagagtttgaagaaatgggacggacataccaataaattaaaattgctttgttcatttaatatgttaaatttttttgtttaatttggaaattgggagcatttttaatacatggcacggcctacgcacggaaattaattgggttatcctttaaaaaagattttattttatatttttcagttgctaaatccgtccggttttccgtgcgcgcgttataagcatcttcgccaaattgttgctgatg

SEQ ID NO: 110498 - DNA, 102 bp, Heterodera glycines
tttatgatggtgttccgtgccatccttccgtttcaacaaagtctgctcatcgctgccgtgctcgcttcagtgatcctctgtcgctgctgcagtgccgaaatg

SEQ ID NO: 110499 - DNA, 204 bp, Heterodera glycines
atttcttgaacaaataaaggattaaattttgctaaaagggttggaaatttccgccttgacggatggatcgagactcaaaagaaagggcttgagatccatggctgcgtttggcacgcatgttcaaaatgttatccggatgataacgaaattttgccatgcggtaaaagtgcaggacggattcgggagaggaacaaacaaaggatg

SEQ ID NO: 110500 - DNA, 141 bp, Heterodera glycines
ttttctttgattaaaaaaaaatcctgaaattattttattatcaccgcgaaaacattgatcactggcgtcgaaaatttatgagtgaatttggcattgtttgaatttaaattggcattcttttatatacggcacatagaaatg

SEQ ID NO: 110501 - DNA, 181 bp, Heterodera glycines
ctgtacgcgtccatttgctgctgttggtgtgctgtgctgagcatctgtgcgtacacatgctcgtaaatgtgctgttgcaattccaagtgtttgtggtacaatcgcagttcgctttcgtcgcaactgttcgcgtttgtccgtatgctttgctcctgttggtcttccgttcgctgctccaatg

SEQ ID NO: 110502 - DNA, 919 bp, Heterodera glycines
tccctgactggggccccgttggcactaccttgtgcaattttttgtggggttctccacatcagtgaataatattttgaaataaatttctgtggcataaagtattgtaagaaaaagaaattccataacaacattgctctgaattccgaaccccggacctgaatttgaataccaaaaatatacaatttataaaaggaacataaggttcaattcttcaaaagcattatttggatactataaaaaaatataagaaatttttttttgtacatttttatttattaaaaataaagttttttctttaaaaaattttgagctttttttacgtaggtttagaccccttttttcattttttttaaacctgggtttgaatccataaaataagagttttcaacaaaagccttataatttttttaaaagaggccgacatgtggaagaattgaacctgagaaagaagtaacagaatcaaaaagtcgggtccgggtaccgagtccgggtcttgaaaaagccgggtatccgggtctggacccggtcgggtatccggacccgtgtaaccttattttatgcgaatatttttcggtttacgttcattacactttgccaaactgttattaaaattcgaaataatcacaaattcaaaaatattggggggtcgttgtggtaccctagttcaaaaacgggaaccaaaatataaaaaatttatcttccaaaatttgacatatttgatagctgttttagatataatataatttaattatattaatatatgtaattgatgcatcatattatgatacaaatgactaaatgtggttaataattgatcgaataatctagccatatgaaaaaatgaataattacaaaattcatttataaaatattattgttataaatcttttcattttatttttacaaaaaaaaaataatg

SEQ ID NO: 110503 - DNA, 1003 bp, Heterodera glycines
ttaaattaatggaaaattgaaacgatttttgtttccccccccccttccgtcatcctcctcttctcataatcatcatcattttcattttttattctcatctcccccagcccctcccaataagccaaatgcgaagggtaaatgcgatgatttggaattattacaataaatgctttagtgggtattggtctcacaattgctgacagatgacgggggaggggggaggggatggatttaagcgaaaaatgctaataaaagcaaaaacactggtgggggaacagcagcagtatttgtgaagagcacatttctttttattaggcaaattacgaaaaaattttatcaacaaaaattgtaggtgtttttcaaaaaaaaaatttccctgcgccgctaatcggcggcacctccgtccctcttctttgtaacctaattttttaaagcatatctcaaatttattaaacgttgatcataaattctagggtcaaaaaaggacgaaataatcaaatcttggtcattcaatcacgaaaacgaaagaattcgaagaaaaaaaataataaaaatcatatttacccaaaaatcccgaattatttagggagcctaaaacaaacaaaaaaatataaatttctcaagtgtaaaaactatacaaataccaaaaatggtaatttttattcaaaatttttgtgtttttcggcggaatgaattttttcaaaactttttgtttccgctgctcattttactcatttcacagcatttgtactttttttgcgtacctccgggaaaatttttttgaaaatttgagtgtaatttgttaatggattttgtccgaaattgatcaaattttaacacttttatgattgtttttggaatcaaaaacggattttgattaaatttcgaaaccaaagttttctgattcgattttgacttttggtatttgagcaatttttacaaatttattttgactaatattttttttattttcctttttttacagtcaatttccaataaaatg

SEQ ID NO: 110504 - DNA, 53 bp, Heterodera glycines
ggttaatttaaaaaccttttacatacaaattctttaaattcagacgaaagatg

SEQ ID NO: 110505 - DNA, 373 bp, Heterodera glycines
tgatactttttttctttttttcggcattttattttgacttttgaaaatattataaataaaattttttacttagggtggaacataattttgatacccaaattttttccaatttttaaaaatcataactccgttatttctgcgcctatttaaatgattctttttttattttgttcttcatggtttcctcttttatatcttactatcgtttcactttttatttgattgatagatttttctgccttttttcccgaccatgccaaaattgaaaattggcccactaatttttctcgaattttttatggtcaaaaaccaaagctgatataataaaatcttggtttttctatacaatttagaccagtagaatccgaatatg

SEQ ID NO: 110506 - DNA, 422 bp, Heterodera glycines
aaaagaataattatttatctttgttgtcttataactttttaaaacaacagttaagcgatgatagtgaacataggaatcgatgtagaatatttttctctatcggtatgttaaatttggtgtggatttaacgtgcaggaaaaaagttaaacgtcacgaagtaaatgttgctctttacagcttttttttcttttttaccgtccatggtgcagggactttccccaatcaaagacgcttccaattaacgatcatcctcagtttaccataattttccatactaagtcgaacatacgttcttggcataaaccaaaagattaaagtttaggaaatttgtaaatacaaagaaatgagcaaacaatgatttaattaaaagtttaacaaataaatgatttttaacgtttttcaaacaagcaaattaaaaaatg

SEQ ID NO: 110507 - DNA, 1003 bp, Heterodera glycines
aaaaaatgcgtttttaaagcagaaaaaagtcgtcgcaaatgaggaaaatgatcagccgaaacaaaaaaaggttggaaaaatccattccgatgacaaatacaagccattaaataaatattaactatttttcattgtatataataaaaaattttaaatgtccttgggtttcatgaatttttcccattatgtccttgcaaatcggcaacccgtccttgaaaacggagcatggacgatggcagccctgggtaaatctttagtaaatgaagttaagataatgaaaaatgaatgagagtcgtggtggttggttgggttcgtctgtgaagatgagtgagtgaaagtgctgggggtgttcccattaaataatggactttgtactccttttttattgctgatcgagtgagaaaaaatttgagagaaaaatttaaatttccgctaaattttgcactaaaattaagtttgaaaaataattggcattattaatttgcatgaaaagagtcactctcccattcactctttttaaatcgcttgttgacaatttgcattcattcatatttctctaattttcgcataaaatggtccgtccaaattattgaatttttttttgatatctttttgatatatgttttattatgttttatatttcatagaagcatatgttattaaaaataaaattataaaaaattttgctaaaagaagaaaaaagaataataattttttttttgagaaaaattttccttcataatttttgtttaatatttgcttaatgggaaaaattttacttaaaatttcaattttctataaggctggacattttttctaaaaaatctgacctagatttcataatttgtttaagcatgtatgtcttggaccaaatccaagcattgctattttttccaattttttttttcaaattaatcactacttccattttttcttttaaaacttttgttcagcaatttgttaaacaactttttgagcaataatatcaaatcatatttgaatg

SEQ ID NO: 110508 - DNA, 577 bp, Heterodera glycines
tgaaaagctcaggtcccggtcccggtcccggtagggcaaccgggaaccgggaaaaacaagcactggtaagaatgggggtctgagtgcaaaaattagtgagaaaattggagttaaaggaaaaaatttagaaataataattaaatatattcataaagtagcaagaccaaaaatttatgtgaaacttaaatctgaatttctaataatattcgatcacttagtccaaaaatgattaattgtttgaaagaaatgaagaaaatttgatttgaaaattttcattaatttattagctttaacttttgggttttattaaataaaaaactaaataaaaatttaattatttaatattttcacttgaaataaattaaaattggtaaaaacccaactcgttttttgccaactcgttttttacccaactcgtttttgacccaactcgtttttattaccccaactcgtttttattatcccaactcgtttttttgactggaaaatggaaaaaccaaagaaaacgtttaaatttttaaaaatttttagttctaaggtaatttttatttatttacagactaatttacataaaatg

SEQ ID NO: 110509 - DNA, 131 bp, Heterodera glycines
tgaagtattggtcagctaaacaaaaaaaataacaaaataaaaaaggcatttgatgaccggctatgaaaacttcgaacaaaatttcgcctttcacttctgccatatcgccacagtacaaatagaaaagaatg

SEQ ID NO: 110510 - DNA, 305 bp, Heterodera glycines
agaaagtgatcaaaagggaggagggaagtgagaatgatcagaccaaatgagaaagtgatcaaaagggaggaggagaaggcgtcagagcggacgtaacgcgtcgcgagaggggcaaaagtgcggcgggggaggacgcgcaaagagaggcggaagtgagaaaaacagtggttaccgagctggcggcgaagttcgccacgcaaggcgcatggcctgcgggaagaaagcgcgaattccctgccaaaattttccgacccacgccaattgtgccgacatcgaaataccgacacagtgtggcggacggaatg

SEQ ID NO: 110511 - DNA, 1003 bp, Heterodera glycines
tcttctttgtctccctttggccaatttttgttcacatctgcaaatcgtttttttcccatttttctatggtacttctgtcgcccgccccctctgtgtctgtttacttaagcctggggctcccccccccccacatacacacactttatataatcactgctcctcttctccccaatttttccatcttcaatgccgattgcattaaccccctcggccctttcctctcgtgtcaaataaattgttgttggtcgatgtgttggtgggatcagggacggtagagacgggaggaacacacccccctctcgtcactcacaccgcgagaacggcattccgtctgcccccccccctctcctctcgcctcgccactctctcgccttcagcgtcgccgcccagtgtggcgagtcttgtcgtcctcttcaattgacccaatccctcccccagtttgtccccccttcctcgacaaactttttggtgccacgacccgggaccacgaacccttcgcccttcaattcactttcgaccatccatcactcttctctctgccgccagccgaccctttaggctcccggcaactcaacccttcgctgtccgccgaccatcttaggcctccggcactcatcactcaaatcaagtcgccagccgcccttttaggctcccgacaaaccctcaccgagtcgtcagccgcccatttcaggctttcgaccattcatcactcttctcccagccgccagccgccctttcaggctcccggctttcatcactcaactctttgccgccagcccccctttaggcttccgacaagccctcaattgagtcgtcagccgtcctcttaaaccgaccctttaggctcccggctttcaccactcaactcttatcgtcagccgtccctctcgggctctcggctaatctccactcaacccaccaaccgacagccgccttctctaggctctcgaccaaccaagcccgactcttgcgtccagccgccaatcctagactttcggaaatg

SEQ ID NO: 110512 - DNA, 301 bp, Heterodera glycines
ttggttatgaattaatcacttttaatatgtcattttcttgtaaattttgattaaaatttaaaatcttttcaaaatccaaaatagaattatataatttttttaaactttatttatttccccctttttcgtgtccgttgttctgcatctgttcgaactgagcctctcagcacttggcattctgcccgtttacattgaaaaaccattggcactggtcattgaaggcgcgccaatagactcgccagacgttcaatggcaatttgaattgttaacaaaaatattacgccaaatggatgccaaaatg

SEQ ID NO: 110513 - DNA, 53 bp, Heterodera glycines
tgtaagttctggccattggcttctggtgtatttccgtccgttccctcaaaatg

SEQ ID NO: 110514 - DNA, 403 bp, Heterodera glycines
agtaagacaaaaacatattatatttttttattaatatacataaattgaataattttttttgtcatctaataaagctaaattacggttgatcaatttttgcctagtgatcaatacataaaaaatgtgattaggcttttgggaacatttgaacaaagcttaattaggttaattacggtcggtctagtcaaagtgacaattcaaaggttaactgttttcgatatttttttttggtgatcaattgggtaatctatggattctgaaacaaaaactcaatgaaatttgatccttaattaatcaattaattaattacccaaaaagttaaggatcgatttctcgagttttagagacaaaaattaattgcagcaatttatagtccttatcgacgaggaaggcactggcgatg

SEQ ID NO: 110515 - DNA, 317 bp, Heterodera glycines
aacgaagtgaaggggaacggatggacgaaggactcacaaacatttgactcaatttttgaccgttcaatgaatgatctgatctgccctctgttcaactgatcttttcttttgcctcccatttgtttgttccgttctctgttttttgctttgtgcgatcacttacccattttttgttcacttttctatttattaattgaaaaaggcacgagttttctcttccgtcgttttgaccttatgactttccaaatgtttggtctgtcatcaaatggctcattttcatttttcccaccccattacttttcccaattaaaaacatg

SEQ ID NO: 110516 - DNA, 258 bp, Heterodera glycines
tcctgaacacattgacaacaagaattgattgaaaaaaagaaaagcgcaaaacaaaaagcaaaatcaaaaactcactattcccgcgctaacgccctttttcggatgcggaaggcccaccggcgtggtcttaaagtgggggcaaataaataaatgcaaattatggaaaagcgctgtgctcactgcggttgatttgagtggtttggtcgggcccggaggacgcgaaggacggacgacagccttaaaaacagaaaaaagatg

SEQ ID NO: 110517 - DNA, 1003 bp, Heterodera glycines
tacaacagtgatcagaagaggtacaactgtgattaaaagaggtacaaatttgatgaagaggtacaaaagtgattaaaaagctacaacggtgattaaaagaggtacaaatttgatgaagaggtacaaaagtgattaaaaaaggtacaacggtgattaaaagaggtacaacagtgattaaaagaggtacaaaagtctaactttttatgagatgtacaaaaataatttcaaaattttaaatataattttatagaattaggtttatttaaaaatttaaaaaaaactaaataataaaaaatgtaaaagtttattttttaattaataaacggaataatttattttactttattttgaaaggaattattatgcatccaaatttttaaatctaattttgcttaaaaataaatctattcatcaaaagaaaaattaaatttaattaaaattattttgttattaataaaaacaaaaaataatttttttaatttaaaaaaaaataaatttaaataaattaaaacgaatcttcaaattaattaaaaacagtgaaaataacccaaaaatgcatagaaaaataatgtacaccgtccgggtccgaacctcatcaaaaaaaaaataatttaaatataattttttatttattaactcaacaaaatattttaaattaattaaaaaacaaaaataaaattaaattaattaataacatcgaaaaaactaaaaaataaatcaaaaaataataaacacggcccggatccgaacctgccgccccacccctcagaatccccaatctttttgacttattagaagaggtacaacagtgattagtaaattcattaaataaaaatgaaaaattttttaacaaatttaatttaaaaaaaaattaatttaaacttataaaatttattcatcaaaaaaaaattaatttaaatttaattttttatttattaacttaacaaaatattttaaattaattaaaatcattaataaaacaatattaaatacccaaaaaatg

SEQ ID NO: 110518 - DNA, 703 bp, Heterodera glycines
ttagaacctatttttaggacgacggttcaaaactcgaaaaattgagagatttggcactctaacctttttttaaacgatcgaatcatgaaaaatttggtatcatccaaaagctcttcttgacgtgctaggtctaaaaagcagtgaataaattttcctgtatgttttaaacatactgtttattaatattcatactttggtatggaaatggcccaaatgccttagtagggaatttggcgatagggaatcggccggtaggaattggctggtagggaattggcggtagggaactggctcgatcccaaatcaaagtgccgaagccgacaacttacaattgtttattgaccaacatttccttaagcacaagctttcgcgtataaacggaaatgcaattttcagctttaaaattttatggaatttgaatttaatttgtcaaacaaactacttggcttagaatttcttgtaaatagtatcctagtttctaattgcagtccaaaaacatattcacagaattctgtagaatcagaattaaacattcctattttggtctttttgccaacttattttccaccacaagcgcatcttgcacatccgagtgattaattcgttgttactaaatggagagtgaagatattttttattatgcaaaagtcattattatcttactgactgctttgtgattaaagatttgaaaattttgaaaatg

SEQ ID NO: 110519 - DNA, 323 bp, Heterodera glycines
tttaaccctctaattcggcactttttcagatttggcaagatcattggtcccacgagacgctttcccaaattgccgctctctctctacaacaaaatggtgctgctgatcggtccgatcagtcgtcctcgtggcttttgtccgcctttgtccaactttttcacttggcaccagcggagagtcaatgcccagccaaatttgctcattttgtcgacactttccacgctttgatcagttccaaacggacggccgtggagggtcggctggcgcggctaagggcgggcgtcgaccgattgacggagacgcgaaatgcggtggcaaaaatg

SEQ ID NO: 110520 - DNA, 306 bp, Heterodera glycines
tttggaacaaatacctatatattttatctcttcattttttaaatatttttcgtcttatatatatattttttgttactgatcaatgcctacctacatacattcttggaatcaaacgaaagttgaattatcacgtttatcgaatatccggggcctatttcaattcccgtcgtatctccgatatgatgtcatatctccgatacgacatcgcatcgtgtaattctgtttcaataaaaaacatgcgatgtcgtatatttctgtttcaattcatcgtcccgatgtcgtatatacgatcatcgtaacatcatg

SEQ ID NO: 110521 - DNA, 71 bp, Heterodera glycines
  unsure (1)..(71): unsure at all n locations
tgccttgntcatttattatttttattttcatttgttttttccgtgtttttcctttttggtttttctaaatg

SEQ ID NO: 110522 - DNA, 65 bp, Heterodera glycines
tctcaaaaaattgtttaaaaaattctgtgtcattctctccatcaagtgcgacccaccttcaaatg

SEQ ID NO: 110523 - DNA, 144 bp, Heterodera glycines
tattggacataaatacagaaacagaaaaacaaaaagaaaaaagtgcggaaatttcaaaagatacagaattaaataaaaatgccgaaaaatcgaaaaaaatgatccaaattttgctgaaccaaaatcatatcaaatttagtcatg

SEQ ID NO: 110524 - DNA, 566 bp, Heterodera glycines
aaatcagaaccattacacaattaaaactgttcaaaaatgttaaggcaacgtcaaactcataaattcgaacaaatgcgtaaataccgataatttgtttgccgagaaaaggaaccccggcaccggcggtttgaaatgttatgacgagatcaagcaccaatcttatgactgctcctgtcacggtgataagaaatgccttgctgaagaaaaatgggcgcacgacgcctttctttgtccaataataaaggtaattaattaatttattattaattaatgccaaaagacaccgccacagacaaattcatataatataggaaatttaatttttaagtagagtgaagcgggaccgggacctggtagcggacaactgagtaccaaggtttcggttttgacatggacctggactagtcccggttttcccagccaaaaattaacggtttttcaactcgaaaaggtcccggtccggttttacccaaattcccggttccgcttaactctattttttttgtatcaaaaaaccggaaataataaaaaaatagggacgataaactggaataaggataaatatg

SEQ ID NO: 110525 - DNA, 140 bp, Heterodera glycines
acaaataattgtattattatttttaattataacaacataaaattgaaaaaaataattgaattaaaaatcgaaaaaaataattttaaagaataatgaacatctatcaaatttctttcaggtggatcgcaaataagtttatg

SEQ ID NO: 110526 - DNA, 94 bp, Heterodera glycines
cattgctgagcggacaaacttgggctttgtcaaacgacaagtgaccgctgcagtacagaagcggaagggaaacgtcagcgagcggaacgcaatg

SEQ ID NO: 110527 - DNA, 519 bp, Heterodera glycines
  unsure (1)..(519): unsure at all n locations
atctttttttgtcatttttcattattttnagaacatttttgggaaaaggagtgactatttacacgttttttacagcgcgattttttcaaaaactttttgggaacttggaggagggtacagcggtgccgataggcgccgccgggaaaatttcacaaattttgaatgaaatttgcgatgaaaaatgagttaactttaattaaatttattattaaatttatttaaaaatatttggcattctgtcttagaaaaatcttcaaaaaatcaataaaatcccgcataatcccgcacaaaaaatcaaatttgcggatcccgctgcgggattggaactcaaaattctttgcgggacgggatcccgcgggattaatcccgcaaatcccgcatttcccaaaaaatacgggattgcggactgggatcccgcaaaatcccgcgcgggatcccgtcccgcgccggtctctagaagagacaaagccacaaaaaaagtcacaaaatgccaaaagtttaaaaagttcgagtgccatg

SEQ ID NO: 110528 - DNA, 1003 bp, Heterodera glycines
tcagcatctatatacctattgaatataacattctaatcataacaaattttaattacttaacctaatactctattagaataactaggtgtgtaaaaaaaccgcaaaaaaaaatatatttatatattctatttgtttttattgtgatgcttttcaacaaaggaaaaaaaagataaagcagaataataatacaatttttaaagttatttttaatatttaaacaaagaattaaggtttaaatcctttttaattttagccatcccagaattgatcaaaaatatggagtatagcattcaatagtcacgctttacgcacctgaggcagaggcaactgctcaaaatttgaatatataaatcttaataagaattatattttatattaaaagatagattgttgtagatattgttatttaaatatattttatataaattatagttaaatagcaagagaaaataaaaaacttttctgttggtttatttaaaataaaaattcatataaaattaaaaatataaaatttcaatcaattatatttgcaattctcctttaaagaaattaaataaaataaattaaaaatttgttcattataaatagggctcacatttataggcactaaaaaccgccaaaataggtaggctttaggctataaaaaaacccccaaaataggcactaaaaaatggaaaataggcactaaaaaaactcatttttaggtgtgtgaaatgacaaaaaattattcaaaaaagtaaaaaaattaggccaagacagtattgagattaatagttttttaaagcataaattcttgtcaagaaaataaataaatacattttggagatgaatttttggaaaatttttcatttcttagggagtttattttttaaatgattataaaacaaaatagtattaagaaaatcttttcttttttgagtaagaaaaagtaaaatatataaacccggaaataaatttttaaataaactcatatagtaaataaattcagcagattataaccatg

SEQ ID NO: 110529 - DNA, 278 bp, Heterodera glycines
  unsure (1)..(278): unsure at all n locations
aattcatttattataaatttntggaaaaacattaatttatctatatataagaaataaataaaaactaaaaagcattaaaaaagcttttaataaaggcacgtttcttactaagttagaatttagaaaaaaatatattaaaaacaaaatttcatcaatatcgtaatactttttggttaatatataataattattatcaaataaataaaatatttctaagtttcttaattttagcttttccaaaatttcgacacacaaagaagcaaattttgttaaaaatg

SEQ ID NO: 110530 - DNA, 683 bp, Heterodera glycines
ttgcgccacggagtcggcagatgaatggccagagaaaagatagacaaagagatttttaagggaacggaaggaaaagaaatggaaaaagagagtaacgaaattggaaaatatatggccaatgtgtaaaaatgatgagaaatttatagtttttttgaatgcagcttttttatacaaatttaatgagccattttggaagcgcttttaaaagaaaaagaaaaaaaaattaattttattggtgaccaacaggcgccgccggagaaatttgaggatttttgccaaatttgctaacagattttgagctaaataggccaattttgtgggttttttggttctagtcggttttatgcgtcccatgaatgatcatgccagtttcttaggccataacttttttcttacttggtcaatacctatattcttgatattgaacaaaagcttaaggtctatagaagcttttgtataactttatttttagctaaaggcaatagacaaaaaattatactcggaaaagttgaatttcgtattttttcattgtaatttcttttttaatgccagcatttgcttttttcttgcatttataaaatctcgagacttttgtctttcgcttggtaccaagaatatgggtattgaccagagtaagaaaaaagtggtactaatggcttacctgttccacatttgcctcaatg

SEQ ID NO: 110531 - DNA, 100 bp, Heterodera glycines
cttccgagggtttaacccaggtattgcattttttttctctattgaatttttcattaagacatacaacaacaatgccgtgtttgctgaaaagagcaaaatg

SEQ ID NO: 110532 - DNA, 598 bp, Heterodera glycines
  unsure (1)..(598): unsure at all n locations
cgtgaattttgatttgactaaaatataaaattaaaaaaagaaaaactgcacaaaaaaaagaaaaagaaattaataaactcaattatctatcactttcaatattngaaggacaatcaattgaattattaattttggatttattgtcactttttcccctaagggcaaaaatatacaaaaaaataatgatgggaatgacatgagaatgaatgtgcagaagcagtgtaatgggtgagaatttattcattaaatatgtagcatttgttgacaataaaaaaaatatgagatagtcaaattgaaacataaataattatgtaattaaattaattttcattggccccacggggcgccatttggacaaaaagaaaagggaaaaaaggggggaaataatggaaacaaaaattaaacacgcgttattttttatcaatggtggaaaaaagttgttttattccaaaatgattaaatgatttttcgataggaaaaagcacttaaaaatttcaaaacaacttacccttttcaatatctcaaattttttctcgataaattttactaaattttgcatgacacatcggtttactttcagttgggcctaatgaaaatg

SEQ ID NO: 110533 - DNA, 558 bp, Heterodera glycines
taacggtgactttaaaataagagaagaggtggttaataaattacaaattaaatatgaattaattgacagaggaggaaggctctttttaatttcacaaaagcatcggacagattttctcttttaagctttagtcttataaggcgtcccataaaacgcccttagcaaccaattagttgtgattattgtctgttaaagaaggtcaccgatcaatggcaccaaaagaaattattactggaaaagagtattctcataaccaatggataggatcaatagattatgaagtataattaaactcaacagacaataattggcttttgttctttgatttgcacaacagtcataatttatcaaaatataaaaaatccttctcacaatcagacacaaagcaatcgatggattaggtgaaaagttcgtagtctcttctgataagaaattctcctcttaaagaaatggctgctgaactgattgtctgtcatctcaaaatcacgcgatcactttgacgatgtaaaacgcattattgccctgcctttttatcgagtattcctatgacggaaaatg

SEQ ID NO: 110534 - DNA, 1003 bp, Heterodera glycines
gttacttgatgaatatcttagacaaaatgaaggttcttgaaaaatcagagctcatatttggcattttatttttcgaattcgctacaaaaaaaataaataaatgtaagtacacgcgattcaaattggcagttggcactattggttggtccattactcatgggtcaagcccagtgttagacaaaactcatttcgccaaaattataaatggcgtaattttttgcgagctaattcaaaattcacacgggtaaataaataccttttttcttttttaatgaaaatgcctaggcttgagtcccattagttcatgccattgtttgctgcatatacctttcagtgcatcaatgtttttcatgataatttctatggagttctttcgcaaaacaatgacacttttggaatataaaaaatagtgacaaatgactcctggtaacagtaacggcttttctgtgcgcagctccgtatcattaatcttaccctttggcaaaaattatgaaacgattatttcaaaatgccactcacaatgtttcggctgacggcatataaataaaatatttaaaagagcaacacgaaaacttgccgtgacactgcaattaatttttttgatttttcatttgatcatatgaaaataagtactatttactgtcataacttatgttaaatttgataaattagtttgaacttttgcaagctaatagagaaaaattctggctattttatgctactaagaatgcaaaatatgattgcctttaagcaaagttatgccatatgctttgtcgaaaaaattgccaggttttgcgcaccttatgaaagaatataaaagtagtttctttctccttattttctcataatcataatgtcctcaattattaatttcataagaagtttttttggcgtttttttgggccggcgcgccccccgccccgtcaattgggagcggcatcggcccttgtgcaaggagacggctgtcaagcggcttcctggttccaactgattttcaggcatg

SEQ ID NO: 110535 - DNA, 1003 bp, Heterodera glycines
gagccaattctctgctaataactttatttttacatttttttgattcatttaaaattaaaatttttgaaaattttctttatttttaagcacatcagaacttttcccctcccaatctttgctttttctcttccgttagcatcgtaaaccattcccattttccgcttaatacccttacccaagtcaataatttcaattgaaaaaagtaagtacaccaaccgccagcggcgccttttgcctcgggccaaatgattggggggaattagcggtgcaaaggccccgaggggtaattttgatgatgccaaaggacaacacccaccggaaaaggaaaagccaaaagccatttttggcatcttagaggcaagcaaagccactgggaaagctcattcgcgtcagcagttgtttttggcaaatttaattgccgggacaaaaaaataaacaaagcttcttcggggcacagtttttgctttgatcagtccgtcgccggaggcacaaaaagcggtggcggatgggcgatgctttttatgtgctaatcggcagcggaatgtgtggtgttcttctcacccattgtcagcaacgacattcgccgcccgcccatccgccgccaccgccgaatcatcggccgtcaaaccgtccgtccgccgtccgtcactttcaaacgccacgtttcgctatttattataaaaatcgatcaatcatcggcccatttgtcctcatttttcacccgttggccaaatgttttttttgtacaaaagtaaaagcgttttttttttgaaaatgtttccgaaggccaaacaattttgaagcgtcgcgcagtcctcaaattaaattttgataaaaaatttttttttaaattaattatttttatttaaatcattaaaaatggaattcttttcgttgagattgtgccaacggtgtctattgtttgtctctttgcattaattattgttttgttgccctccatttgcttgctaattgcctctcctccatccttcacttgcaaatg

SEQ ID NO: 110536 - DNA, 426 bp, Heterodera glycines
agcaaagaatttgtgacccaagattaccatcgacaactgctcaatggctggcaagatgctgaagtcttacaaactttgaattctatttttatttttatgaaatttaaattaaaaatgtgtcagagtgtcctcaacgcatccttttggccatttagccacaaaaaatgggcctgccaattcaaatccgtccattccatttttgccggcttagcaatgaaactgtttgcgaggccacaaagtgcaaattatagaataattaaattaaatttaaatctaattttattcaaatgtaagaaaaaacattttttttgattgatgagacgaaaaaattattaaataatttaaatttaatagttttaaatgttttaaaaaaattttgaaatttccccagaaattttgccaattttacactgactctgttcaatg

SEQ ID NO: 110537 - DNA, 165 bp, Heterodera glycines
tttctgtttgtgtacaccgcattttctggccagaatttcattgcgaatcatttagcagcaaaaattttattcattcctgtgattggacttggtatttgcatgtagaaaattattaaataaatattttaaatacatttaaattcaggggcaatttttccggcaatg

SEQ ID NO: 110538 - DNA, 234 bp, Heterodera glycines
aattttaagttaaaaattatttatacacaaataaataaaaataattctctcccgttttcttccaattgtctttgagtttcaaaccaattctacatcttttatgatttttttaaagttaattttaaatgaatgtgaaggaattttgtacttattaaaataatttttttagtcaccataattaataatcttcacttcgttctttttacttaaaaaaatatttctcagcataaaatg

SEQ ID NO: 110539 - DNA, 472 bp, Heterodera glycines
ggtaaatccaaaaaataaaataaaattattattattaatttaatttatgtgataagccggcgaattaaaatattcatctgtataagattttttttttttgaatttttagcatagtcctaccaattttggcgtttttcatcctattttgccatttttctcaagattttggttccttattttggcatttttctcaagattttggttccttattttggcatttttctcaagattttggttccctattttggcattttttgcccctataacctgatccttagtaatatttatttaaaaaaatgtatgccatatagacgagcaagtccaaaaataaaatttcaaatgaaattcagaaaattgtgagactacagcgggcgatggtgacagtccccgcctctcactgtcaattgatcagctgtcagcacgttcccgatccggcagccaagcgtcgggaagccaatcgcctaacaaaatg

SEQ ID NO: 110540 - DNA, 79 bp, Heterodera glycines
ggtagggcaaacatttcgagtttaataatcaaatagctgctatttagggtacaagggcgacattggccgagtctacatg

SEQ ID NO: 110541 - DNA, 330 bp, Heterodera glycines
tttctgcgtccatcatttgatggccatcactcggaggagcgccctctaatcaaaagggaaagtggcaaactcacgacaaataactgtaataataataccaattactgtaatgaaggcaccgcgataaagtaggaacaaaatgccaacaggtgccaatttaaaatccattgcattcggcctggggactaaggtggagcagccggtcatttacatcagtttcctgggattcaaaaccagaaaacagttattcattacgccagaaaaagcaaaaatttaaatttttatagtaaaattaatttttgaaaagcacttttttaacaaactaacatg

SEQ ID NO: 110542 - DNA, 1003 bp, Heterodera glycines
gatttaggaatggagtttaaaacccatgtttaagggtcagggaccaaaaaaatatataatttgtatttttctcgaaaacggacattgggacggtaaatttcttcaatataatttcagttccaaaaattttttaggtttaaaaagtgttaaacagttttttgatataaaacattattactgcgtttattgtgaacaaacatttcgtgaaaaaataaaacattctgttaactgcataataaaatgtcaacggtgcggcggatggggtaaagcaagtacagaaataaaaaaaaatataaaatgtttagggttaaattttccatgtaaaaatgaggaaaacgtactaaaagaatgcctaaaatgcaatagatttttctttaatgttttttgttatcagaaccattttaaattggcttgcaaactttataaacgctgcatacagtgtgatagcgaatataatacacgggaaaaacatatttgtggtaaaaaataaattaccaatagaaattttttcgataatttaggctcaaaattttgtaatgtgtgtaaaatcaagcactcaaaatcgaaaggttgctacataaagaaaatcatcattccgaaaaatctgccgcgttatcgtatcataagctacgacattgagtgttcagtatgtaaaataataaacaaaaaatattagcaattttagacggataatttaatagaaaatggaaaaaatgaggggatttttgaacataaagtagttttttatatttgcgggccaaaggggattaagcaccacacatggtgtacggttgacaactttgaccccgtcttcgagtttttaacatgggtgctatcgtttaaacatttcgaaaccatttgctatgctcatttcgccggtaaaatcaaaaaattaaattttttataataaacatttttagggcgttacgatgcgcactttattttgcgcgcattaacagaattgggatatatacctgaaataattatttcagatttaaaaatg

SEQ ID NO: 110543 - DNA, 559 bp, Heterodera glycines
tgttcaaaaatcatttgttaaaaccaattttatcatgtagagcatactcgattgtatttttttatactttaatttttttaaatttcaaaaaaaaattacaatttttttagctatttttcaaatttatggttgattttttatattaactcttttcttacttttattactggttttttatttacaaatgcaaaacaaatgaaaaatttgatggaattacgaccaattttcaagatttactaacaatacgttttttttaattttcaacaaatcgctgaaaaaacttttttattttttttcgtgtggaatcctcccccccccaaaaaaaattatttttttctcgaaaaattgtacatccagcagagaaagatgaaaattaatgtttttttatttttaggcaattttaaatttccgccagaattattgggatgccaatgcttgtcatgagaaactcgaaatcattggcgacaaaagtctcattgtccattataagagaaatgagaatggtattttatcataatttacttagttatattatatattctccttaaaagatggtatg

SEQ ID NO: 110544 - DNA, 1003 bp, Heterodera glycines
caaacctattgcgcgactttttcttgcaaacccaaacctattgcagggggggtgcgcgacttttttgactgcgcgactttatgcaaattattttaattaaatttatttaattttaaattattttaaacgtcttaaaggtcaaagacgttgaatttaaattcatttaaaattgtccaaaaattccccgcaccaagcggatccgaaccccaggggggcggccagactgacgcactaaccactcggccacattggcaattgatgataaacattaatttgctctcataaagggaaaaattgacgtcaccagcggcggaaggggggcaagagcaggcggcgagaatgggggagggggtcaaataaacaaatcaattattgaattcacaattttctcttttaaaagcaaaaagaaatgggggcccgtataataaaatataatttagaaattaaaataattaaaaggttaattaattaattattttccaaataaattttttattacttctaaaataatataaatattttcagtgaattaacaaatacatttaagtttaattattgatttgtctgttaattttttatctcctcaaaaataattacagcaccctttcaggtgttgggcgtttgtttatttgaccaataatttttaatttcacatctttacgttgcccctccctcacacctgctcatttgtgtaatttgacaccgtttcttttatcttttcgttaaaaattaaaaagattgtctggaatttgtcttgcgccaaaccgctgtgccattcatttatgtaatttgacaccagtctgataataatttcgccaaaatttatttattatttgtccatttattacgaattattttgcatctatcactccaaattttgttaaaaaaaaaaattttttttattgtcccaatttttaccattttgtgttttttcaacaaaataaatatttgttcaaatttaaagaattaatttttaaaattttagacacaaaaacaaatcatg

SEQ ID NO: 110545 - DNA, 548 bp, Heterodera glycines
ttttctctctctctctcactccttctcactctcactatctctcgctcgcaatatgtaaagcaattaaataatttctacttagcatggagaaaacagtgaagtcaacaatggtattggccttacgcaataattttaagatcaattttgcatgtaaaaatgaagtagaatctgtgccaataaaagagtactgcttggccagtgtaacagcacaaattcaggcaggcaaccatacatattttctgctttaataattttattactagggattggtttttaggctaaaaggctctaaaaacaggcagaatttttaaaatttagtttgtaaaattttttagttctaaattaaaagaagcttaaagaattaccgttttttgccaataatctaggcaaaatcataggcggcaaattttttcagtaaattatatatattatatataattaatatatatatatatatatatatatatataattaatatatatatatattgttttaagcaattttccaaaccctaaccacacactatcatcatcattaccgctaaaatg

SEQ ID NO: 110546 - DNA, 76 bp, Heterodera glycines
tctgatcaaaattggatgaaatcgcatcgtaccattcattttattatgtcatttgacagaccaaccgaaaaacatg

SEQ ID NO: 110547 - DNA, 77 bp, Heterodera glycines
ggtccaccgactgactgttcctctgatcagtgatcactgatcaaccttccccgctaaactctctcggtttcagcatg

SEQ ID NO: 110548 - DNA, 213 bp, Heterodera glycines
ggtgagagaaaggggagaaagcgagccgaggggggggatttaaaatattccggattttattttaaaaggattaattgaatttaaaatatatccctgggctgcttatatgcgatcaaagtggggaggggagccatggggagggaggtggggaagacgttcggtaatgataaaacggtggtcatgatcagtgatgggagggaggccataggcatg

SEQ ID NO: 110549 - DNA, 215 bp, Heterodera glycines
ccagcacctcttggaacttcccgggaaaaattcgggttggaggcatcggagtcggggataagccacaaaaaatggccaaaaatgtcggggacgaagtccctttccaagcttgaacatgtctcatattctccgcccacatatataaaaccgaaatttgtttgtccgaccatttaagccgctggcgctgctgctcctccccccaatgtgtctcaatg

SEQ ID NO: 110550 - DNA, 471 bp, Heterodera glycines
ccccccctgggaccgtccctggaggggggggggggaggcaaaaacaacagtcatacaaaaacaaactaataaatggaaagtgacgtgaagagaaatattttccttggtaaggactgctggggaagagattacacaatcatttgggacaatctttcaaaaggaggcgaacaccatcaaaatgaatgtgacagtgagcattattcttccctttgaattaaggcgactacgccgttcagcctcacacggacccgctgagactggcgaacccccacgcctaaggaagggagcgaagaaggaattcgatttaattaggtcgcttgtaaatgtcttatttaaattcgttttgattctgttttccatgcgaatcaaaagttgtaaattgaaaataattctctattcgtgtcaaaatgacaataaatatttgttgtgcttatttaccgacgtcacacaaattcactgtcaggaaaaatg

SEQ ID NO: 110551 - DNA, 1003 bp, Heterodera glycines
ttttaacttgtttggagcttatatacccacctttataattagggctgggatttttatgtgctaaaaatcctgaaatatgtaataaaatatgtgctaaaaaacccaaaatatgtgctaaaaaccaaaaaaaggcctaaatatgtgttaaaaaatgcaaaaatatgtgctaaaaattggaaaaaccaatggtatttttgcataaaaattccaaaaaactcattctttatcatttttgcccgcacaattgcaaataaaaaacatttggaggtgtttgggggtaaaattagtccttttttgataaattttttttaaagataatttttccatcagttgagtaagtccagcaagaaacttcgatatccagttgtcgccaaaagaaagcgacaaaaatcgatccgaagatcaattttgtgatgactaagccccgccccctctggtcgatataaaaggggctcatttttcccattcgttagcattctattaattttctctgtattaaatttagtttgttcactctcttcccttttttaataaagtctctttgaaagagctttgtgcaattaaaaaggtattttttaaggagaagaattctccgtaaaatcaaaaggtttatttgtgaagagaagaaattcttctctgtcacaaatagaagcaaaaccaggactcatcctttctaagggtgagccaaggaaaggagaagaagcatctcctcttacctttccatttgctaaaagactccccccttttgccgggtgagtcagcttccccttctgccgggaagtacagattttttgcggcctttcgccgacaaaaattggagccccgtaggggtcggcttccagtcgtaagcctaccctccaaccatcgccaatccaaagcgcagccgtagcgcttggatcaaacgcacaacccaaaggggtttattgcgttttcatcaagcgtaagagcaatgagtgagctcttgcgcatttccattgcaccaatggtggtgcgtctcaagatg

SEQ ID NO: 110552 - DNA, 300 bp, Heterodera glycines
tggcgacgcccgtgcagacttttgactgtgggcttattgatctgattgtggaggaagaggtttgacagcaaccgagttttgctgtgtcatcgctgaagactgcctgcatttgctattatctaggcgataataacaactttttgttggacctgctaacagtttaacactgttagtagtgagaaattttgcgccgctgatattgtgttttggcaacataatttcagttcgtccacgcgcacccactctgataatatcttggcgctattatcaatagagtggtgaacgacaaaaataaaaatg

SEQ ID NO: 110553 - DNA, 206 bp, Heterodera glycines
atgaccaattttgacaagcattgggcatttctatcgtagcaaatcttgggaaaaaatgaaattcaagaccaattgaacccaaaaatttaaaaatttcggggatagggttggaaatcctttaaatctggtcttataacgagttgacgttcattaacaggaaacttgccgaagaacaaaacagtgtgtcgccagtgcgtccgaacatg

SEQ ID NO: 110554 - DNA, 511 bp, Heterodera glycines
tattttatggtatttatgttttcataatttttaattttgtatatttactagcatttaaaaattaatgtgaaatttgtccggtaaattgcaaaagtacatcaacccaatttttgatgttttccggatggaaagatatcgatttgggtgaaaaaatactaaaaacaatgagaatggcggacggttatcgatttctgagtctaaatgcttacagtgtatgtaataattgtgcgaataatcgaacaatctacctaatccttcacacattctctgcgataaaaccaaatatttcattggcatatccaaattttggtgcatattttatgaaagtggtcctaccatcggcaattaccatttctttttttttcgcagaaaccaaaacactgcactattgctaaaataaatcccaaataggtgcctaattgtaattgtgtctcatttctttcctcttgaatttgtgtaaattggaatttgttttgaaatgattgacgaggaaaagccattttagaaaatg

SEQ ID NO: 110555 - DNA, 463 bp, Heterodera glycines
tagctttttttggaattttcttataactgaattttcttttttttttccttgagaaatttctatgtttgaattttttttttttgagatttctgcggcgagatttcggccggcgagatttcagccggcgagattttggcggcgagattttgtctcggcgagattccggcggcgagatttcggcggcgagattttgtctcggcgagattccggcggcgagatttcgtcccgtccccttctgtgatagttagagggacaatagggtcccgccctatcacacaccacacccccctcattaatgtggcgattaacttaccttaaaagctccttttcaatttcaattttccaaatattttattattagttgtttttcgtattttcatgtttaataaaattataaaatttccttccatacaatgttatcaatagggagtccaaaaatatggatataaaatcgcgaaatatg

SEQ ID NO: 110556 - DNA, 235 bp, Heterodera glycines
agaaattttctatgcaaaaacgctctcgaacatgaaacgaagtgcggtgcgccatggccattttatttttcaaataatttttatatttaatagatattccagaaaaatggctatctctttttttgagaaattttctatgcaacaaacgctctcgaacatgaaacgaagtgcggtgcgccatggccattttattttttaaataatttttatatttaatagatattccagaaaaatg

SEQ ID NO: 110557 - DNA, 546 bp, Heterodera glycines
ggaatactcgataaaaaggcagggcaataatgcgttttacatcgtcaaagtgatcgcgtgattttgagatgacagacaatcagttcagcagccatttctttaagaggagaatttcttatcagaagagactacgaacttttcacctaatccatcgattgctttgtgtctgattgtgagaaggattttttatattttgataaattatgactgttgtgcaaatcaaagaacaaaagccaattattgtctgttgagtttaattatacttcataatctattgatcctatccattggttatgagaatactcttttccagtaataatttcttttggtgccattgatcggtgaccttctttaacagacaataatcacaactaattggttgctaagggcgttttatgggacgccttataagactaaagcttaaaagagaaaatctgtccgatgcttttgtgaaattaaaaagagccttcctcctctgtcaattaattcatatttaatttgtaatttattaaccacctcttctcttattttaaagtcaccgttatg

SEQ ID NO: 110558 - DNA, 181 bp, Heterodera glycines
tgtaaaaataaaattttaattaaccttcatcctcccattctcacccaaaaaggtcatggaaaatcggctaaagaagcaaacaacgggcgttatcaatcagttgaacaggtgggtagtgctttttccatgtttttataaaaaaatttttgcgttttacagggccaaaattcggactgtcatg

SEQ ID NO: 110559 - DNA, 180 bp, Heterodera glycines
  unsure (1)..(180): unsure at all n locations
tgcatattttcactttttatgtgcatattttgccatttttggtgcatattttatgcgcatattttgcgattttatgtgcatatttttggatgccctacncatcaccatctaactcattcatttattttatttacaatcttataattttatttttgttccttagtttcttttgctcaaatg

SEQ ID NO: 110560 - DNA, 1003 bp, Heterodera glycines
acatttcttgtgaattatttctcttttcaaatcccttggcgttttcccgcttttttattttatttaatcatgtgttcattgttctaattttttacaattttatgctttgataaataaatattctaataattttccctttttaaaaatgtcattcgtattttttcgattttaccttttttatttcctttttcttttcttgtcctttttgttttttgatgatgcaacgcgttacttttggccattgtcagcggcgtttggctttgccctgttgccctttcgttggtccgccgtttatttcgtgccatttttgttctgacgacgcgtcggccaattcgtccggcgaagacaccaacaaaaaaccgtaaatattaattcatttatcacaatttataaacatttgcttccactccctcccattttaaaggcaccaagcggcccggagaatagcggaaaaggcggcggttgcggcacggaatgagcaattctatcgctacgttcaggtgatttttctggcaaaataattggaatcactgacaattaatcacaacaaatagacttttgccgttccgccattttccaatttttcccctctcttttcagcagggaattggcgcgcttcaggcgcaccaacgggcggagagtgacttcaaagggctgttggaccaattcacgcggatggcctccgatcagaccgcgcccaacacggacgggggacgttcgctgaaaacgccgccgccttttgcggccggcgaaaaatgggaacgattggaggagctggcggagcagtgcaaaatgtccatttcgatggctataaagtcggtcaattgccatttggggacatttatatgccatttaataaagtaggaaagatttcgtggattcttattccgccgaggctgaacaatttcaacggcacttcgtcgagcggaggacgcggcaacagcagacggatgctgaaaacaaaacgaagacgggcgggcgcagcgcgccgtaccgcgcgatg

SEQ ID NO: 110561 - DNA, 732 bp, Heterodera glycines
tttgaagagaatcgaacaaaattacaaaattagggtcattaaattagccttttccatgcattgtttgctttttgtttatgtttacatttctcttccgttcttctgtttcccaatgctttcgctttcttttggaaatgcatcacaaaataatcggatgaatttgatggggggggggcggagagaggaagtgatggaatgggagaaatgcaagagtttatcagagaagcggcggcggaggccgtcccctcccctttttctccccccccccctccccctcccttctcatgatttgcctgatgatgacaaatggaaggttttgcaaaaatgacccccgtatattttatagattatttttattctatggacgaaacattattggaacattcaacagaaaaatggcaaaaaattccaaaaacaaaaattgaaaaaagaaattacgaaaaattaattttgttaagagaaaaaatgctcgatattttaaatgaaattttaacactttgcgaattgagagaaaaaaatggacaaaaaagtgaagcaaacgcagagaaaaatgaaaaagaatatttattgggcaaaatccatcgaaaaaatttaacaaatgccatcaaaatgggcgaatttgaagaaaaatggaacggcacggcaaaggacgaaaaattaatgaatttattcaaaaataattatttaattacctcaaaattaggcaaatttagaagcgatgcgcaaaaaatg

SEQ ID NO: 110562 - DNA, 1003 bp, Heterodera glycines
ccggttacggtagcggcaccggtggcgcgttttccctccagcgccgcccgctggtgcctgcgctcccccccggcaccagcggactgatcaccaccaaccagatgggccaaccttattgcatggacggccaaatgccgggtcacacaattaatcaatggccttttttgggttgtagtgccagggccagaacagtacaaatgccaatggtggaggatgttcgaaagagccccccatccctaaatcgaaaaataaaaaaattgaaattttaaaaagaaataaattaaaaatttttttcatttttttggttttttatttcgtgaattaaacaaaaattcattttatttatttaagaaaactgacttaatccaattcttatacaaaagaaaaatattttttaagtttttgtgttactttgccacaaaaaaatgaaagagtaaaatcttaaagtaaatgtcggaagctaaaattggagagcgattaaattgcaatttatatacatatccttatgccccgccccaactaaccataatctggattaaaatttaaattcgcttttttgcagcctatttaggccaactggtacggtattgtgttatgcttgggcaagcctgtgagtttttgtttttttttcaaaaaaattttcatcgatttgctctccaatttagcggaatgccctccctcttacacgtgtgccatgtccaatcggcccggcttgtacgtgtgctgtcacccgttcccaatgaacaggtagagaagcacatgcttaatctcgtaaatctgttgcacttaatacactcatttcaaaaaataaataaaaacacgaaatttttccgaaaattcatgaaaattaatttgtaagaattttcgtgctaaatgaaaaataatgagagaaaaacagaaaattttattatctcccgaataattaaaatattaaacacgattattgggtacggtaaaaattttgttactgtatttaaggcgagcatccaaggcacagcaaatg

SEQ ID NO: 110563 - DNA, 149 bp, Heterodera glycines
  unsure (1)..(149): unsure at all n locations
aaaaagcagctgaaagcaaaatcacattatttttgctngtcagaattcaaanagaattcncagtctataaatgttaccaaaaaattacaaaaatatgcaccggcagttttcttttcttttttaaagatgtgaaaagtgacgaaacaatg

SEQ ID NO: 110564 - DNA, 797 bp, Heterodera glycines
cggttttgttcgccactttcggcacgttttgctgaccctgagattctcgctccgatttcgaaaaataattttttttcttggctctcgaatctcgacgcatttctgccgatatttgcttaatttaatggcactttcatttgacgattctctgccgaacattggcatttgtaaaaagtactcccatttggttttctttatttgatggcgatttattgataaaataaattgggatatataaatttttaacattttgatggacatttacttactgaatgcattttatgatgcaatttctcaacattggtcccaattaccgagttcaaaacacacttttcttttctttctttccctcccatttaattgccttttgcccccccccccgggcgttttttccccccaaagaatgcccaaatttgttgccatatgatgggctgtgtgtccttggtccgttctgctgatgtcccctccccccttctcatatgaccctctccctccctcactttttgtccattttcgccgcgggggttgaagttttcgtagaaattgaaaaattacatttaaaaaatattatttcatttatttattattttattttaaataaaaaactatgtttattttattcttaaaaataatatgtttttctgctgattcgttctcattttccaattgaaacgtttcgttaaaaaaggcggaagttttttgcctttcgcccccaaaaaattgtcagtttttgcgtcaaattttttaaattgtaaaccattaaattttagcaaatttcgcatttcattcccccaatg

SEQ ID NO: 110565 - DNA, 238 bp, Heterodera glycines
aaatttcataatctcaatttaggaaaatttatagcaacggaaaaagacaaaaaaattttgctgatgatttaattaaaaacgccaaaatagatccaaccaaaaagaattatggaattgacgacattaaccaaatccgaaaatatttcgacagagaatttccggggaaattcttaccagccgctttttcaaaggttgaaatgaaaagtgatttttacaaaaaaattaaaattcaggaatg

SEQ ID NO: 110566 - DNA, 395 bp, Heterodera glycines
aaaaagttttttgcagagcgctttatccaaaaaaatctttttgaaacagggggcgtggttccagcggtgccgataggcaccacccgggggaaaaattggtggaaatgttgaccattttttaacagattttcactgaaaattgtgaatttattagtcaaattttgaaaatttcagggcgaattttaggggccggtggaccgattgcctaaaaatagccattttgagcttttcttccaacaaatcaacatatcaccctaaatttgaaaatttggtactttttgttttataaaagttatgttgcacattttattttttatcactatgttatttttattgtacaattttgtagtgaaattttttgagtttatttaaatatttttgtagaatgaatgatg

SEQ ID NO: 110567 - DNA, 289 bp, Heterodera glycines
ttttttaatttccgtttttaattacgcatttatttattaaaaaatatgatttaaaaataaaattgagttacctaatttagataattttattgggaattataacaaattaaattcactttttgttagcacatacattacttttccaaaatgcttatctttaaattccattttttagaaggaatttcgcgttgggactgctaatctttagtctcaccatttttttttcttcctccaatcattaataattcaaacaactgatcagttcctgatcaatcattgcttcaaaatg

SEQ ID NO: 110568 - DNA, 146 bp, Heterodera glycines
tggcactcttttgatcgttctgtttttcattttcgaggtgtccctcccccttctgatttttccctttctccccctcccttcagttgttgtacgtcccctgcatggtgtccatttatcacaatttgtccaatccatgctacaaaatg

SEQ ID NO: 110569 - DNA, 300 bp, Heterodera glycines
gctaaaaggaaagaaaaaagagtaagcgaaagaaaacaatcgaattatccagcattgaaagaataaattttgatagaatggtaaaacatccaaagaaacatagtgttgatgatagataaaatggtcagactaactccttcgggtgaacggaacccaaaaatgcactgaaaacgggagtatttggttttctcccatcgccccaccccccttagaaacttttgaaaaacaaatttcttaatttaattttctaacttcctttccaataaaattaattttagatttttaatagaaaaaaatatg

SEQ ID NO: 110570 - DNA, 258 bp, Heterodera glycines
tcaaaattgggtaacatttttggtgattaaatgagtgtaaatatctttgacatggaaattatgagggcattctgtgcattggttgatgctcaaatagttcttctcgtgtcattttcaataagaaaatttgttttgtttggccaaatttggtggtcgccagtcagattacatttaaaaacaatttggggtcacattggttaatatttgttgccttaaaagtgtccaacattatttactcattgtcagatcaaagacatg

SEQ ID NO: 110571 - DNA, 52 bp, Heterodera glycines
tcattaacagcagaaaaactgtgaaaacagaaaaaccgatgctaacaaaatg

SEQ ID NO: 110572 - DNA, 307 bp, Heterodera glycines
ttttgaagctgaactggtttaagtgttctaaattagtaaactcatttttttggcaaaaattgattaaattatttcaaagtacaacagaaatgaaagtcgattttgaaggcttttttggtgaattaattttatttttaatgcttttttaaatgaaaaagtagaaaattctgaaaatattggattattttataataaataaaatattgaaaattttgattaatttattgttaatcatatcttttcaactgatttatttcagtcattcataaattaatgccttcttttaaattttttagaaaataaaatg

SEQ ID NO: 110573 - DNA, 60 bp, Heterodera glycines
caatcatataataagcggagcagaacgacgtcaaatggtacggatttacaaatacaaatg

SEQ ID NO: 110574 - DNA, 173 bp, Heterodera glycines
tggcaggagaatgaaattggaatgaggttgaaaaattttacttttatatgcgcaaaagtgtggccacgcctacaccatttgaaaagagtcacggttttagacacgcccactaaaagccaaaacattttgcctgccaaaaacccagaatcattttaccaatttttgtcaaaatg

SEQ ID NO: 110575 - DNA, 180 bp, Heterodera glycines
tcgtgttttttttaattttagggtcaatattttataaattagaggtttttataataataaatataattcccagccctattatgtaattattttcatcgctttttatgccaaataaacacaaataaatctaataagtatttaaaaaagattattaatagtaatgctcttttaaaggaaatg

SEQ ID NO: 110576 - DNA, 915 bp, Heterodera glycines
agtgcgcggaagtgaattaattatatttgagaaatggtcgacgatctcacaaattacaaatggatttgatgcttattttctctcaaaaatgcttttgttgcttcttcaacatttgcttgttttattagaatttttgttcaatatacttgagaaatggtcgatcatttttgagttggtcaattggaatttggataaatttttatcggaggccccaaaactcaaaattgctcaaaaccattttattggttttcttagtcggtgatttgataattggccggaatagagatgccagccagattcatgatcagaatggttacgcgttgtaagcattaaaatggtcaaaagatgccctaataactcgagaaatttaaaatatgcactaaaattagcattgcaaaacaaatctcatttcttgctcagattcgtaatccgtacacttttttacataccacaggaaaaatcaaaacaaaattttaaatttattttccgtagggaacacaattctgtggtattaacttacaaattagtgcctatttcgcgattttttatgcctaaaaaacgaacataatttgtatacaagtgtttattttttgaattggtgccaaaaatccaaagatttgtgttagtgtttttttgcaaatttaaaattgagacattttgccccaaattccttccatttccccttcatcaatttacaatccctttaacttacagaattgatttttttttgttttcatcgaattttaatgtttttccccagacttccaccaaattctattgtaaatcaacaaacaaaaaagaaattgtttattaaatagcatagaaacaatgttagagttcggcattttgtggaaaaaaaactggtcatgaacctgggttttgtggacaaattttagaaaaatccatggccccatg

SEQ ID NO: 110577 - DNA, 297 bp, Heterodera glycines
tagtgatttttaactattttagtgacgaagtcgccaaaatagtgatttctagtgaccgataatgacatcagaatcgaaaatttttaatgcagaaatgcgttttttgagctcctttcttcaaaacaattgagcaaaaaaaaaagttttttcactaaaagttgcgtccctagtgatcagcatatttgtttaccccaaattcattgaaaagaaaatttttacagaagattaaaaatttttgaaaaaagttaataagctaataagggcactaaagaatacaccaaactacacaacaaaatg

SEQ ID NO: 110578 - DNA, 55 bp, Heterodera glycines
tcagaggaacggaaatgcgcagaacgacgaccagctggatagaggtggactgatg

SEQ ID NO: 110579 - DNA, 285 bp, Heterodera glycines
tttttgccggtgattgtcctgtcgcttaatgcggtgtgatccgatatttcagcagaaattggtttttcgcgagttcgttttcccaatttttctccttcttgttgagaagcattcctttcttgaaggtttggacgaatcgctccgcttctccattgctttgcggatggtatggcgctgtgagcgtgtgcgtaatgccacgttcttcacagaacttcgcaaattcctttgaagtgaattgcgggccgttatcactcatataacttcgaattgtatcgcaaagacatg

SEQ ID NO: 110580 - DNA, 318 bp, Heterodera glycines
atggttttggacagaaaattttaatttcaaaaaatgttcgactttttttcttaattggattttaaaaatatttttgtcaaaattaaattgattattttttaattgaatcccttaaactaattttgcattttctcacaatatcccctctcttttctgctcccattgtccattttactaaacattatttctcccataagtgccacttttaattttggggtttgcccctgcggcggtgccacttcaatcaacaagttttacacttttgccgacgcagccagaaattgccattttcaaatttgattttcgatttgcaaaatg

SEQ ID NO: 110581 - DNA, 82 bp, Heterodera glycines
ccatttatagaaaaacacattaaaaataaattaattttataaaaaaataaaaattaattaattaaaaagtcgtcatgacatg

SEQ ID NO: 110582 - DNA, 1003 bp, Heterodera glycines
gccttaaaatcaagtaaatattattaaaaataaaattcagaataagtggtctcaaatttcaggaccatctttaatcatttaaaatttggcgaattattacaaaaatattatataattaaagttaattgttaagtgtgtgttttttaatttgtaggcatttatcgccaaaaaaataccgaatatatttttaaaacgtaaatattgcaaattataagcatttatatgcactaaaaaaatacacaaaccttataacctaataatgcattaaatttaaatagtttatatatgaataaattaaaaaattggagggaaaaggtgaaaaaaagttggaaaataatagcaaaacatttggtcataagtttgaaaagcattcaaagatggaagaaacaattaaaaagtgagaaaattcagtatacattcaaaaaatttatgataaataaaagaaaaattgttgaaaaatattttaaaataaaaaatgcatttatgcaaaatggaaaacattccgcgaagggatggaaagaatttaaagcaaaaattcaaatatttgccgtatgttatttgtaatttgaagaaccaaaaaagctggaaaaaattttgtttaataatggtaacgcaaaatttaattatttttaataaatcgtttttgacaaaaaaaattagatattataatcatatttattattaagaaaatttactcattttactgtcactttcatcaaaacattattattatttaatatgcgaaatttttttattggtattaatcaaattaataaaaataattaaaaaacaaaaatattcacatgaaattgtattcccggacatcctttgcaatgtcatcatcataacattgttcaaatgatagaagccggaaattatggcaaacattaagcctaccatttggcatataaaaaatgccaaaaaatcatggaaaaaacacaaattattatttaattatttattaaatattcatattttaaatttttaacaaattaaaaaaatg

SEQ ID NO: 110583 - DNA, 87 bp, Heterodera glycines
acataatttcagttcgtccacgcgcacccactctgctattatcgttggcgctattatcaatagagtggtgaacgacacttaaaaatg

SEQ ID NO: 110584 - DNA, 78 bp, Heterodera glycines
  unsure (1)..(78): unsure at all n locations
cgcatcgttcggggggactgccccgaaaacaaaaaatcgatttttcaagtgtccgttgggggtactcaacattnnatg

SEQ ID NO: 110585 - DNA, 449 bp, Heterodera glycines
ttaaatttaaaaagaaacttaattttttgatagttttataataactaacgacttcgccgcggaaaattaaaaaagaaaagaatataaaaagttattcagtggcaaagtgataaaataaaagaaaaaacaaagaaacgatgaaataacattgggcgagaaaaatgggggaaaaagtacaaaaacggtagttcatagctctgctgatggtaactcatatgatctgtaagatataatttacctgttcttatctttgtcggttgattagcaagtttttcacaaattgaccggtaacgggagaagtaattaacgcggttacaggttttattcactgaaatatacagaaaatcaaaccagtaatgagcttcaaactgatttgaaaattataatttgaatttttttggcgatttgtaatgaaaatatatttaaaaaagactataattttcagaatg

SEQ ID NO: 110586 - DNA, 586 bp, Heterodera glycines
cctgcagagtgcggtgtgcaaattcggtcgaatggtcagcaaaatctttgttgtgagtgctttctaagtgtgtgcaaagcgatgaaaatgtcagcagaggacaaagacaaaaaaaattgctatttgattgtgctgcggttaattagcggttaattaagcattgtggggttgacgacttagagatttttgtgggaaaagaaaaatggatggactaaaaaattcttagttttttccgatttttctgtacctaaaaaccgctaatagaattgttatggtaaaagcgaaataggacaaaagctaagcaacgatcaaaagacgaacgaacaccaacaccataacaacaacacatgacattctctcactcactcactttgccggtgctgctggtgatccttaaaatgttttaatcggataaattatttgtatcttttataaaatgcctaatcatttgaattccccacccttcctatttacaattgttgttgatgtcgttgctgcaattgttgtccgtctcgccgacgttggcaccgtaccaacggcgggcgcctgttgctgcttttgctgctgttggctcattgcactgatg

SEQ ID NO: 110587 - DNA, 535 bp, Heterodera glycines
ttctccggccgggaattttcgtagcgaattttaatatcacctgatcacccattgacaattcaaataatataaattaaaaatcgaacgatttgtggtgatcagtgatcgaaagccgacaaaaaattatgaaaaatttaaattatccatcttatctttcgcatattaacattaagctccaaccataattctttttatcaatgtttggattaaaagcattccctctcccattttttaggtcatcgttttgctcaacagcccaagcaaaaaaaaaaaaattacttttacatattaaaaaaaagaatatttttaatgatgggtcatcattttgccgtaattactttttgccgcccaatgtcagcccataaatagacgggagatttagcgcaaacagaaaatgttcattcattcatttatatgagctgatgaattttattttccaatttgtatattttctaattattaaatgaaattttaaaataataaatccaacaatttttaaattttagtccaatcaatagcttaaaacgaaaaaatg

SEQ ID NO: 110588 - DNA, 69 bp, Heterodera glycines
ataagaaacgaatggggagggagcaaatgggaaagaattcgtgccacaacggacgacggacacaaaatg

SEQ ID NO: 110589 - DNA, 183 bp, Heterodera glycines
  unsure (1)..(183): unsure at all n locations
gaaaatcttaagaataaagaacacttatggacagtgggattaagcaagccaaaattgnatcgcaatatttctttctcgtagagaatcaaattaatcgcaaatttttcaaccttttattcctaattaaaattttatatttaaatgtaaaattgtaaataaatcaattggccacctctgctgatg

SEQ ID NO: 110590 - DNA, 306 bp, Heterodera glycines
ccataccacttgcataaatttactgtcattttatgacagccaaaaataattctattgtgcatttgctgctaattatttcatgcaaagagcgataaaatattttcaagaatcttttgcattcgacaccgttgaacagttgtatgcgcattttaaagaagagattttgagctcccccggtgaatattacccaaaccctctttgtgtgcttgattgtgtacacattgtcaacgacgaacacgctgatttgccggtgttcattgaaggaacgcttgatttgatcgcaggactagtactgtattccacatg

SEQ ID NO: 110591 - DNA, 193 bp, Heterodera glycines
ttcacattcgggtccgggttttggaattggtcgaaacatgtcaaatccatgaccagcgagctagaaaagctctataatcatgcttttacaactttttaatttccaaaaattttcatataagggaaactgaccacaacaagcttaaatgtgaaatcagcataataccgtatcattttaattcagtcttttgatg

SEQ ID NO: 110592 - DNA, 302 bp, Heterodera glycines
agattttgcaaaatcactgattttatctttgatttttcatcaagtacttgattttttgggaaaactttatgaaaattaatctggcataaaaaacttatatacagaatttgtagagctcaaaaagagctttcgaatgagctattgaatgtttggagaagttatgtttttcgttttttacgattttttgaaatttaattactggcctttacgggtcatgtgagacgggcgaggtcttgggttcgagcctgcttggcagcagtttattcttttatgaaaattgatgaaaaatcatagacaaaatg

SEQ ID NO: 110593 - DNA, 125 bp, Heterodera glycines
agaagaggtacaaatttgataaaagaggtataaaagtgattagaagaggtacaactgtgattagaagaggtacaaaagtgattagaagaggtacaacagagattagaagaggtacaaatttgatg

SEQ ID NO: 110594 - DNA, 260 bp, Heterodera glycines
aggctaaggccattgagcgcccgtcccattccaacgttttggcagtcaatcgaaaaccatttcagaagagggaacaaaacaaaagcccaactcagcctaattgttggcgttgtggcagtggacataaaacgcaaagttgtccccattcaaaggcaacttgtagaaaatgttccaaagttggacatttacagaatatgtgtgcgcgtcatcacgaatggcttttaaagcattcgagaaaacagacgcaacgaaagcaaatg

SEQ ID NO: 110595 - DNA, 209 bp, Heterodera glycines
ggttcgttcaggtaactcagtacgggttccaaacgcatcgcccacgccctccgctcaaccgcgccatcccgccaattcccgagtcgcgcagcaacgagtcgattcagtcgggactggtggcacgccaccaaagtgtcggaagcgttgtgggaattcagcaacagacggcacagatcattgacgagaacaacccaattgatgtagaaatg

SEQ ID NO: 110596 - DNA, 187 bp, Heterodera glycines
  unsure (1)..(187): unsure at all n locations
aatgtactcgacgaagcgttgnccgacaaattgggcgtgcagagccgatttttcttggctttggccatttttggatggcttccaatatcaaagtaagttgaaagagtttgaactgcttgacaaaacccaaaaatggaattcaacgacaggaaatgattttagacaagcgacaaatgacgtggagatg

SEQ ID NO: 110597 - DNA, 217 bp, Heterodera glycines
gtcctgggaatggagagcgaggcgagactttgtgtatatgtaaattttcccttgtacattaacttttcccaaatacccacataatccgcacatttctgatcaccaatgatcaaaaggtggagccaaacggcgccataaaagcaaggcttttccacccacatttcatttccaaccagttctccctttcattactcaattctaacctctccaaagcatg

SEQ ID NO: 110598 - DNA, 897 bp, Heterodera glycines
ccccctttatgtatgttaataatactacaaattacccctcctggagattaaatcgaaatatgggtagcctttatataactatagaaaaaaaaattcattttataaaaaataatcttgcaagaaatcgtctcgaaaaataatctaaaaagccagttacggatcaaaatacggaaaaatcccaaaaatccgtaacccgtaatccgtaatccgtaactccaaaaaggccgtaaaaagttaagcctaaattttttggcatatttaaaaagcaattaaaaattttttaaattttattcacctcccttgttgatagaaaaagcatcagagtgccttatttaaaaggtaaataaaatttgatgcgtttcagagccctttctgaaaaaatatttatgaattaattttgcaaaaaaataaataaaaacgaaagactcagattttcgaaaaaaattttaaagccagctaactcggcgctcatttcagtgtaagttagtcctttaccggggagtatccctgcaaagtttggtacgcttctgctcaattagcaaaaaatatgagtgatcgaattttcactaaaaaagttaagcctaaattttttgccatatttaaaaagcaattaaaacattttgaaaattttattcacctcccttattgatagaaaaagcatcagagtgccttatttaaaaggtaaataaaatttggtgcgtttcagagccctttctgaaaaaatatttatgaatctgaacgacggtgagccaaaaacagctaccaccaaaaaattttgcaccgaattttggaatggtgccaaaaaatcgatgccaaattctgcacttcgcttattttctttttaatttgactgaaatttcaaaaaaaaaatttcagtgcctcttcttttttttgatg

SEQ ID NO: 110599 - DNA, 207 bp, Heterodera glycines
tcatttaatgctgtttaggcggtcaaggattgaaaaaatgtaagtctgaacctaattttggacataggcgcaaatgtccaaggcgcaaatgtgaggttaccctacagagcaacccttcttctctagcacatcgcgttatttttgccactcagaaacaattccgttcttttataggtggtacattctctatatattgtatttgcaatg

SEQ ID NO: 110600 - DNA, 630 bp, Heterodera glycines
  unsure (1)..(630): unsure at all n locations
attattaggatttctttttttagacaaatgcctaaaatttgcgcattgtaaagcaaagataagcacgaaaaacgcgtnnttccgcttggtttggggtgtctacgatgacttttataatgcctatttttgcctatttcggggtttttgtgcctaatgtgccaatttgcaggattctcgaaaatccttaacaaaaatacaataaaaacgaaaaacacacccctaagaaatgacccaaaaaaatttcagaaaatacgttccaaagaattgaaataattttcaaaaaaataattccaaaatttgtttattttttctcaataaaaatttttgttttaaaaatttgtccgtatttagaaaaaactttaaattatttaataatttcatttacaattgaaatatttaaatttttacgtgttttatacctaaattttttttgcctatttgatgcctatttcgctattttttgtgcctaaaaaaaatccctaattatttttatatatatatatataatatatatataataaacttaaaaataatttttcaaaattaagtggcaaaaaaatttcgtcccttaaatattttttgctgctttttctgatacttttgttcccgtttgcatattgcgttaatatg

SEQ ID NO: 110601 - DNA, 80 bp, Heterodera glycines
agcttttaaaaaaaaggattgagcatgttctttacttttttttaaaaatccattaaaaatgcattttattgttgaagatg

SEQ ID NO: 110602 - DNA, 590 bp, Heterodera glycines
ttcttgacctgttccattaataatttttacccatttttttttacaaaattttattgccataaaaactttttattgtcaaatcttaaaaggagaaattcaaaatattacgtttaaaaatattagcaaatacatttttaaaattattcaaatttataatttacaaacatcactctactggtgtcattattgtatatacaaaattagaaaattttaatatcattacgaatatcattctactggtgtcattattatatatacaatactgcataatttggatattatataatcatataaattcacaaatatttagaatttatttatttttagccaaaagtgatttaattaaagattagttttcgctttgtccgatattttaggaaatttttttttatttggctgcatagcataaggcataaaaaaaattttaaaaagggacacaaacatacctttttataaatcaattttttgaaaataatttgctttaaagccaagggaatttggtgggcgtggagccgcaaggcaacatttgaaaatttaagcaccattaaattgtcttcaaatctcgactgtacgaagtttttcaaatcatg

SEQ ID NO: 110603 - DNA, 603 bp, Heterodera glycines
ttatgaaattcagctaatattttggcattggcatctatttctgcactgtatccgccggaataatatttgtttctagccaaatattttgtttcagtaaaattcattgattatcttttatttattattaattttttgtgttattttcatgtgaaaaggcaaaattttttttctataatttgataaaatttttgcctttgcttgtttcaattcaattggcaattggatcaccaaatcaaaatagaggtattaagaattaatttaaatttttctaattttaatttatctttgctttatggacttatgctaaaaaccagttattcttcttaaaaagacgttatttcatttggatcgtaacaaaaaaaatttcagaataaaaaattctcaaaattaattcaattaaattcttttaaataaatatcaattatttttattaaccacaatttgtgccatttgagatgaaaaggatggcattgaacaaccgcaacaatattgtgtgtcaaacattgagaatgatctgcaaattttgttggaacaaagtttggatgccaaagattgggcattgtccaacggacttgtcaaactgacaaattcttgcaacgaatg

SEQ ID NO: 110604 - DNA, 117 bp, Heterodera glycines
tggcctttttgatgagtttgttctttttgggtgccaaaacggaggaatttctgcaaatggcatctccgacccctccttcatagtcttcttctcattctttgtgagcagcagcagatg

SEQ ID NO: 110605 - DNA, 663 bp, Heterodera glycines
  unsure (1)..(663): unsure at all n locations
ttaancagggctgtcaaaaatatgcacaaaaataggccaatatatagcgcgtaaatatgcaaataaagtcgtgaaatatgcaccaaatatgcacaaaaatcgcaaaatatgcaccaaatatgcacaaaaaagtcgaaaattaggggtgcaaattaattaaaaaattttattcatcataaattttatcggttgtttttgcaatttcaaatcaaaaatttctcaagcttttcggcagtgaagctcactgttgacccactcgcgcatccattaatatttggatttaattttaggcataatcaaaattttttccctaatttgtaagggatattcaaatcggaaatatttgacgaaaaatggcaaaataggcaaaaaaaaagctgaaaatatgtacaaaaaatggttaaatatgcatgaaatatgcagaaaaaacccaaaatatgcaaaaatatgcaaataaaagtcccgactttcatacgcaaataccatcctactaattagactacgtataatccaggaaaaaatatgcatttgcatatttttgacagccctgattattaatttaaaaagaaaaaagaaattttaattaaacttaagtataataaaaacacaattctattatgttttaacattatcttaaaatatattcagtgatttgaggaaatg

SEQ ID NO: 110606 - DNA, 460 bp, Heterodera glycines
aatttggagtcagccaaatttacaaaagaaatttttaaaagaattttattgaaatatttttttattattcgtcctgataaaaaacggaataaaaaatgttttttgaatgttggcgcttaaatttattaatcaaacaaaaataaattcacacaaataaaaaatgtaattcatgtttttttcatatgtttacatatgtaaatgtaattttataattatcggaaataaaaatcaatccatttaattcaaataaatgacttaaaaattgctgctttcttagaatataaatctgaattaaatcgtcaatttattatttattttgacaaaataattgtaattattaattatataaaaagtttaatgcatcgcaattttgtgtttcttttgctgtcattttgcgtaaaaacagccaaatttgactcaataaaaggcgcaaattgtgataaccaacaacaacagaatg

SEQ ID NO: 110607 - DNA, 192 bp, Heterodera glycines
ataaaaaaaaattttataattaaattatccttcaaaaatatattttttaaatttttattaatcaagtaatattcaaaaatatttttaacaattttattaattaaatttttcattaattaaattaatctcaaaacattttttaataattttattaactaatatcttgaaaatatttttttattataatttatg

SEQ ID NO: 110608 - DNA, 276 bp, Heterodera glycines
tagtgtcgaaattactcagtgtccaactcagtgtcgaaaatgaagtaaaacagtgaaagttttgaaaatagttcagtgtcgaaattactcagtgtcgaaattacccagtgtcgggattaccggacacgagggaattgaccccaacccctgataaagaattttttttattgatttctctgttttcttttgaaagttttaatttaattttaaggaacaagtatttctgttaaaacctcacaaatttgatattagttcttccaactttttatttgaatg

SEQ ID NO: 110609 - DNA, 195 bp, Heterodera glycines
  unsure (1)..(195): unsure at all n locations
tgttgacgaattgagcgaaaaagagcccgaaaagctcgcagaanattttggaggcaaaattggacaaagaggtggtcgtcaaagtgcaaatcaaggtcggttgagtgtgtgccgctaaatttgtttttaaactttgtgtttaatcaggagtccaaaggccatttcgaaggccaggatttcgattggataatcatg

SEQ ID NO: 110610 - DNA, 898 bp, Heterodera glycines
  unsure (1)..(898): unsure at all n locations
tttttcattagcctttttaatttcatacttatttggaaaataaaaagngacacattgaagatgtttaaaataattatttatattattgtacactgacaatggtaacaaattaggtcaaatgttaggcttggattttacaaaaatttgaattcgtcatgaatatntaattaagaggaatattggattatataaattaggccagatgttaggatttggtgtaccaaaatttaaattcattgtccaaccgattggtacatatttaattaggaggaatatttgatcatactaattagatcaaattcgcagcttgggttaaccaaaatttaaattcagcgtccgatttgtgcatatttaattatcaaatgcgcggcttgggttgatctaaatttgaattcgtcgtccgatcggtgcatagataattagggaatttttaattttgcagatacatcaaaattttgtcggtattaattaaagcaaaaatttcaaatttaccgacaacacaaaacaatgaaattgggtcaagaattgtgattaatttgattttttggatataaaaggcagtacgaaggtttaccgttcataaaccaaattcataattccctccaaatattgtttttatgcaaaaataaaatatattttaaatagattcattcgcctcccaccctgctcttttcgtttcttaaaatttttcacatttactgtttgcattttctatattgcattattccaaaaaatttaaaaataaaatttgtttagcatttaccataaactaaatttatttattccaaattttaaaaatgtctacatcggaatcaaaaaatggtaaaaaatatacaagtcctcccttaacattaacaatctttcacctacagtaccggacgacgtcgactgcgaaatg

SEQ ID NO: 110611 - DNA, 221 bp, Heterodera glycines
tgcgccaacacatcaccgcaaaatatcccaatggcctcatagacgacaactattcctgcccccacttcaaccccaacgaccgcgccttcgtgtcaacctgtacccatcttgaattaaacgcagcattggaggccggctacacagtccgcaaagtcttccacgtcctgcaatacgaccaatggagcgacaatgtcttcaagtcttacgtgagtgaaatgatg

SEQ ID NO: 110612 - DNA, 621 bp, Heterodera glycines
actaattattgattgattgcatttgattcgtgaccggaaaatcggtcagtggaaaatgcgtcagtgatacaaatattttaaaataaatttctatggcattagtattgtaatataggactaaacttctataagaaaatcgttctcaatttccaaccccggacccgaactcgaacaaaaaatcgaaaagtcaaaatttcgaaattagattttttcttaaaaatcggtttaatacacggaaacaaactataagccatcaatactgcataagagatcatttatgctgtttttgaaccaaaaatgctaaattagaaaatttgggcgctacttgcaaagagcactattttgaaaattttttcacttttttttggaaaaatttttttttgtttttttgacacataatgatgaataacatttttggtcaaattttttcaaaatttttttttaataagcacgtaaaaaaatgtgatgaatttatgtctgtttcaaaattgtttttgtgttctttttgctctctcatttttcccaactctctctttttaagttacataacaacagagttttgccttgccttttttgacacaccaatcaattggaaaaacggcaaattgagccacaaaaatg

SEQ ID NO: 110613 - DNA, 644 bp, Heterodera glycines
ttttctcggccgagaaaaagcattttgttggacggacggacggagatggactaaatctccaacaaacaatcgtcgtcacacaaaatcacaaaacagctttcacacaaattcatatccaattcatcgatttgtgtgctgctgcatgcttatcctccgccaattagcctcccaaattttaggatgaaattaagagcaataaattttcagtgccaaaatgatcggggagagtgattttttggatttttggtgaaaataaaaaatcaactgtctaatcacttacaattagtatgaattatattggcctactcaaaactagggttgtatatgtttgagagatgccgaaattttcccgaaactcgagagtttaattcgaaattgaaaatttatacatcatttcaatacaaattctaagctaaattatagcattgttcgtagtttgatcagtatcagttgcgattgaataatttatgatgatcagaaaatgataattgatgatcaaataccaaaaattatcctttattaagagttaaattttataaaattgatttaactaaaattaaattttagaaattttctgcaaataaaaacaaattcacaaaaaagaaaataatatttttttttgtaaataaattagcctaaaaatg

SEQ ID NO: 110614 - DNA, 553 bp, Heterodera glycines
  unsure (1)..(553): unsure at all n locations
tttaatattaattagataataaaaaattcatatattntcgaattcaattaatttatcggatatcataaaagaaaatttggccaaaatttgtttaaatttttttgtgaataattttcttggccattgagtatctcttttttggttagaaaatctaaattttaatttaattctttcgggtgtatggcatttttttaaattggtgctggaaagtgaactattcgttagtgtatatgatggatttaagcgggcttttaggcatttcttcgacagtgaaaaatgccaattttcaaacgctgtcggaaaacaaaacaaaaaatccctaacttttctttatctcctccccaattttcatacaacaaaattttaggaggagaaagggagcggaagattgttgtacaaatgtgccgttgtcgtcgtctcccgcagtgagcggagtgaaaaaaggcaccggaaaaattaggggggagaggcgaaaaatgagaagaacagcgaaaaggggggggggagagacgggacgggggaacacaacactttttgacgccctttcaaaatg

SEQ ID NO: 110615 - DNA, 90 bp, Heterodera glycines
agaaacaaaagatggaggaggaagagcgaaagatgagggaggaggaagagcggaagaagtgggaggaggaagagcggaagaagagggatg

SEQ ID NO: 110616 - DNA, 91 bp, Heterodera glycines; identical to SEQ ID NO: 100405

SEQ ID NO: 110617 - DNA, 155 bp, Heterodera glycines
acttttcattctttattttattttagattgttttaaaaaattatttatttattggttttatcagtttccgactcattgtcagctgaactttttcttttttaagtgtgtttttgtaaattgtcagtggtatttcgtaaattgccgttataaaaatg

SEQ ID NO: 110618 - DNA, 442 bp, Heterodera glycines
aattagccgacacaatgggaaagtgaagacattgggggtcaattaaaagttaatttgagtctaattagtcttggatatatttttgttagcattcgttcgtgtctaaataatctcaaaatgtttaaaaaaattttgcttacattggttgagctaacaaataaggaaagtatgaaaatacatttttgacttggtttgaagcttctatacccaagtttttcatgcataatttgccatttggtgttatttttatgcgtaattttgcataattaaatgaaatattcacccatcggtccgtccaattccttaatttgcgtaatttgccattcaaaatgcttttgattcgattggttaatcttttatcattttcgatttggcaaatgctttttattacctcaagagtcccgaacattacaaccaatgcaattggaaatacaacccaatg

SEQ ID NO: 110619 - DNA, 924 bp, Heterodera glycines
ttttgagcccaacaaattatgcacatatgtaatgaagttggcaaaatatcaaattgaaaaggcaaataaataaataaaatagagcccccggggctctaatcgaataaatacggtatattgtgatggacttaattggacagccttaaaaatcctcaaaaaaataatcctcattcggcagagataaataaaccctcatcagatggatatatgtaaatttgtattcggactccccccccccgttggatacagcatctgctataattgacataatttgattaaaaaatcattaattgtaagaagaaaaggtggaatttaaagaattaaagaatttaattaattaattatcataattagggtaaatttaaaaaacttaaaatttaattaatctaactatactaaatcgatggttttttgaatagagattatttatgacacgaaaacttgcaaaaaaaagaaaataaaaaatggcaagaagaaatttttaaaatttagaataacaaatactaatgtttataaaattgtttacaatttgtgtttttgctttttccttaaattttttttttaaatactttaaacaattaattactttataatatgctttagagagaatgagagagaagaagagaggagagagagaagggtagtgcttagagaggtttggtgaaaggatgacatagagacaaaagaaagagacaggactttcaatttgtaccaagaatgtaagttttgtccaagtaagaaaaaagttattatggcctatgaaattgagggtggtctctgattggacacgcaaactgcagtagagccccccatatcctgatgggtagtacaattttccaaaaaaaaatttttttttttatgcatttaaaatttggatttgacacagtttgatttctgtaacctttttttttgctgtgaatgatg

SEQ ID NO: 110620 - DNA, 788 bp, Heterodera glycines
tgtatttttggcgccctcttccccttcttcatcatcactcccccgcttaacggatacgaaccgaagcacagatttgtccctcaaagttcctcccattcatttttattacttggcccaatcaatcacaaacaaactttcagttaccatttttggccgaatttgttaattgttgtacatatttacataaactttctcccaaagaatatgttctttgtagtgttttgtctttgttttttctgcaattgctattcctctttttttacataaaaccgattaattaattattttgctccgtcagatgaatttcatcgcccttttatcaaaaccctgctttcgctttcatacgtttccttcttgcagtaaaaggtcggtttgcttccgatttgtcctcacatattttattttcaggttctcctacacactttcagtttttcattcattgccaagccgtttttctcgacttcgattgtttaggggcgaatcccataaaaattatgcaactgcagaaaacaaaagaccttcgagacatttaaaagatctcactctgcgagagcttcgcgaaattgcgacccttgcatacccacacagaaaacgcattttaggtatggtaacggaaaagaaagtggagatggggagaggagaccaatgaaacattgagaaataatctcgaatgtttcacccacattttttcatgcatctttgctcttctcactttagcgggcctttgctgtctttgtgtcagttcggtgattttcctctcagtccctcgaattctcggcaaactcatg

SEQ ID NO: 110621 - DNA, 1003 bp, Heterodera glycines
tgaaattttttattttcgattttttgttcgaatttcggctccgagttccgaattggtcgaaatggatgcctggttcgtgagcagcgaccctgaaaaccattggaagcatgttttcatgacttttgaaaacaaaaaaattttcttcaaaaaaggggggcaaccaaccatcggcagtattaccttcgcgaaaaatacgtttttttttttgttttacaaaatttttaaatttgggtgtttttcttttttttattatagcttggcgccaaaacgtcggcgccaaaacgatacggacccgtctggtgtctcgtattctcgtgttttggcacgatacatttcagcacaagaatattatgatttaacggaaggatggaaggacacaaaaaataaaattgaagaagtataaatgtaaaaattttacaaaaaaataattaatatttatgattttagagaaaaattgaaaaattcatatatatttacgaaagcaaaagcttattgaagtgctggatattgatggattaagaaatcatttcacaaatttattgaaggaatatgtaaaacgtgtgtttatagcaacaaatacattgaacacataatttttataatatttattttattatttctttttttttgctaaaaaaattgcgaaatattagaaatttaaaataaataaatattattaatacgtcttaaaattttaagaaaatttttgcttttttttgcgacaatgaaattaatgtatttggtaattgccatttatgttttaatccaatttgtttcattccatgtgaaaaaattatcggcgcaaaataatgtataattttatttaatattttaaaatatttaaatagaaaaaattaaaaaatggaaaaatattcaataaatataaatgatttaggaggcttccattttgtattcacaattttgtgaaaatttggacaacgcgtacagatacagaaacacaaaagattggcaaaaatatgaaaggattgagcatcaaaaaatg

SEQ ID NO: 110622 - DNA, 835 bp, Heterodera glycines
ggtcaccccttttggggctgttgtactggcgaggggggcggaagttttaccaccccactcattcaataatggtctattcgttcatagaaagggcagaaaatgtacataaatgaaagtgaaaatgttttatggcgtggaaaatttgttgtgggattttctcccaaaaaattatttaattcctagcaaaaacattgacttaattaatttcgagaaattcccgaccttttggggttttggtctcgattaccgggcccttctcgatttctgttttcagaccggaaaatttctcgggtttttaagaggctctcaatttcgactcatgggtattaggaaattaattcctggtcacggattcgaactcaatgctcgactcgattctcgaaattttacttcctagtcatttccttactaaaaaactttctcttgattttttaaatttcaatcctctcgttttccattctctgatcattccattaataataataattattattattttaaaattacttttttaaaattaattttcgcgacgctttaaaattttttcctaatgaattttttaaaacatttccatcctcattagacaaaaatttatgacaaatttgttcattattccccaaaattcattccgttttgtgtaatcgatcggtacattcatcgcgccaaaaaaatatttattcatttttaggacgcaataaaataaaataaattatttcaccgtcaaataattcatcttaactctgtcttcttcttttgcttcgacaataaaaaaaacaacaacacaacgccaacaaaggttctctcaaatttttttttgtcgtccaccgaacaaatg

SEQ ID NO: 110623 - DNA, 1003 bp, Heterodera glycines
atcgtctcctctgtcgccggttgaggcgaaagttaaattttaaaatatttgcacaaatctcaaccaatccgagaatttgttctacggatgcgcctttcagcaaatcgtttttccttttatccgattttgttgaggctaattttttgaagaaatcagaatttgcgcgaatgtatggacggactgaactcgtacattttgcgaaccaaaaaaatttcccttccttaaatagtttttaagcgcacttgtttcgttcattacgcttattctacaggtaaatatacctcacggctctccccagggaatattttgcttgtcaaccgctcattttccggagcatttgggtgcatgtttataaccaagtaactgaacggttgactagtcgcttcattgtacgcctccataaagtaattgagtcgttttgggaaaagttgtgacccaaccgttctgacctggagttgaccagacgggttccttgtcagcaccaaataatggctgttagctcgcgctgttctaatgttacgcccgtataggctttgggtgacaaaaataacgctgacattccagttatgtgaaccacgtgtgaacagtagatccagaaaatcgctcccacattcaacattaaatcatcaagcacgaggagcagtggtttcggctggctctggatcaacgcttgatccggcaaaccgttgtgcgtctcaattccccgcttcatcagatcaagaaccgactcattcatctctgaatagcaatacagaatttttgcaggcggcgggtctattagttccttgtaatttctcaacaatttcatcaaccattgcgttttgccactaccagtggcccccgacaaaattagagtgaatggtgcaataaacatttttatgcatatgttaatgcaacttcctgtttatttatatagagatgttgcacacatttgacccattttatccctccccgatttaatcatataattttctttttttttagcacggaaaaataatcaatg

SEQ ID NO: 110624 - DNA, 290 bp, Heterodera glycines
cggcgccgccgataggcgccgtcgggagaaaaattgagaattcctaacgaattttgctaaaaaaatagccaaaattttcagaaatttccctcttttccccttcggggctccctcctcccctcacaaacgacctccccaccccttacgacgcacgtggggggggggggggggggagggtgcgccggcgcactccttgatcatgtatggacccaacagatttggtaattaaaatatttaacggatttaaattgtcattccattcgttttgctttatttagccgactttaatg

SEQ ID NO: 110625 - DNA, 792 bp, Heterodera glycines
aattttgaaaatgcccgtgcgctctgggaaaaattatataaggagaaggatttaaaatttcgaaaaagaaaaaatttaaaatcggtgatatcgtcgtataccaagggaaaagggaaaatctcaaaggggtacctcccaaactttaccgaagaattgtttaaaatcgttgttgccaattcgacgacacccgattcatacaggatcgaagatttggaaggaaatttaataaaaggcatattttataaccaggaattagtgaaaacagatggatgatttttacattgtactaccttcgaacacaccagggcaggagaacactacgtcaaaattcacagttcgactccccgagactttggaattgggcacaaattggtcagtagctcagctctctcatcaattatttacccctactcattcaccgcactcggtataaacggtcaagagtttattaaagtatgggaaaacgacatcagtgtccctactcaagtttatttaccggacatgaattttaaaaccgccgggggcctgggaaataaaattaatgaggcattcacacatcattacaaaatcaaaaaacaacgtggaaagagagaagccaaggctgaagataccaaagattcaaaaattgatgtcgcaaagagggccgcagaacgcgccgggagagacgtagaaagacattttaatcagatcaacaatatatcgaattccatccaaacccaactaaacacactacgagaaacaaatcctcaaattttagaagagcctgatataaaaatttggtttgacaaaatg

SEQ ID NO: 110626 - DNA, 110 bp, Heterodera glycines; identical to SEQ ID NO: 98226

SEQ ID NO: 110627 - DNA, 173 bp, Heterodera glycines
tagttcttatgtttttgttttcatttaattaagagtaagcattctacagtaaactattatatcataattatatacttacagtacatttacggtggtacccttgtaatttacacaaactgaatagattgatttgaatatagtttttgctttattaaataaaagtagcaacaatg

SEQ ID NO: 110628 - DNA, 282 bp, Heterodera glycines
tttccttgattttcctgtttttgatcgtggcaaaaacccaaattttttatatctaaaattgattaaaatataaaggaattatttgacagggttttttaaaaataattcacaaattaaaaaatattttaaaaataaaagaaaaattgcttatggaaatgttttggcattttttattcatcttctcgacttttttcttcacgaatattgcaatggcacctcgcccattcccttctttgccagctgtccgaattgtaagcgctaccattgccgatttgcaaaatg

SEQ ID NO: 110629 - DNA, 445 bp, Heterodera glycines
ttcaaatttcaaaaatttctaaaatcggaaatttctgtgaaattttttgggggggggggtggaaatttagaaaatatgaatgaatttaatacctcttcagctttagaaaaaattttttcagttttttgcctttcgtaattatcgaaatttacaattccctcctgcgtttaaaaatctcagaaataaaatttttcaaaatttctaactgttcttcattcctctaaaatttttgagctttctttttttcccataattttcggaatttctaatccccccctggaatttaatttttctccaccctttctaaattttttcggaaatttcagtttttcactacctctctttgtcccctcttcaggatgcccattttcccgtccttttgctccgcctttgcaccctccggcgtcgttttgtttcctccgccgcagcgacggatgacaaaatg

SEQ ID NO: 110630 - DNA, 106 bp, Heterodera glycines
cccgcaatggggaagagatttcagagaatttgtttcatgattaaagtcaagtgatagaccagatttggttgtcagagtttttaatttaaaagttaaagctattatg

SEQ ID NO: 110631 - DNA, 1003 bp, Heterodera glycines
  unsure (1)..(1003): unsure at all n locations
atgaatgccaaacgtcagtgggagtgtttgtcatgcccaattgaccaacaggtgatggagcattacagaatgacctcacaataaataattatgctaatttgttcagttccaaatcagtgatttggtccacggctccatcgatattttccacccaattaatttgatcatcgacacgccggaattccaacgtcttagacgcgtcacacagcttggtgggttagcacgcgtttttttccaatttcgcttatagactttaacttttgctcaaaatatgcttttgtgataaggtgtttccaatttggtctatccatcgggcgaccacagccgtttttcgcattctttggggtaagtttaaatggctcacattttaccttttcaattgcaagtttgcttttagcaataagatgacaaatattttattgggatgaacgattaacaaaatgaaatagaaatcgctattttttgaattaaaaaagtcgacaacagaaacaatttgaatcaaatgagctaattgttgagagactcttttggaatggtgcacttaacggcctttttcttccaccaaatcttttgtccgttctctttttcttcattttccattctctttcttacatctttccttccctctccttcattcagtgtctatcatctcgctcgtcttatggttgcgcatctttccggcattcaaccggncccttggcattacgccgaatgatcaactttgtgtttccattgccgctctcatccacgaccttggtggctacggatacacacgttcttcccccccccccccaccacaaattttttagactgttaaaaaaccgcctaaacttggcgtttgccttttcatttttccattttaagtttgccactttttaggccatgggcccttctctcatatgtttgagtcgaagttcctccgggaaatgggcgtcaaagattttgaggtgtcgtcaaatatgaaaagggaaatgaaaaatggataatttagcatgaggaaatg

SEQ ID NO: 110632 - DNA, 158 bp, Heterodera glycines
tcacaaattattcaacaatttatcttaagaattttggcacaacttatcaaaataatgtcaaataaatgatttattgcgatatttgcggttgagatttaatagccaaaaaacaaaaattttctctaatcgaaaccgaggctcacgggtctcacgtcatg

SEQ ID NO: 110633 - DNA, 320 bp, Heterodera glycines
agaaacgagtgcattttaacagccgactcttcgcccacccatcaacagagcgtctccaccgctggtccacttttgcccagcatttccttccaaaccggcgaagaaacactttcagtgccctcgcagtctgctgtgctcacaccgggtccggcctttcattttggaattgaatttttaaatgacgcggactaattttggacccaaattctccccccccccaatgaatgccattgctcaacccttaggcacttcaattaacggacaatgtatttgcgcatgtgcgcaacccacaagaacggcaagtgttttggccagccatg

SEQ ID NO: 110634 - DNA, 803 bp, Heterodera glycines
ttattttctccgcttaataagaaaagcggtgctacttaacaaatgatcattttgaatgttttttaaaaccaaatgggactactctcttggtttacaaatttcttctgataattagggattcgatttatagttgctaaaaagcgccaaaataaacccccaaaatagttgctaaaaatggggaaatagttgctaaaacctttcaaatttagcgtgtaaaatgacaaaatttattcaaaaaagctacagaattatggcaaattaatattgagatacctaaataatttttaaaattaaaaattcttgtcaagaaagtaaataaataaattttggagatgaatttttgaaaaaaatttcatttctaaggggtatatttttgaaaaatttcgggtcgattcttaggggtgtatttttgaaaattctcaaaaagttgatctttaggggtgtatgaaaatctgttaaaaaattgcactcaaatttttaaattcccggcggcgcctattggcaccgcctgaccgaagcgggtcactccgtcccgccaactccgtcccaggccaactccgtcccgagccaactccgtcccgagccaactccgtcccgccaactccgtcccaatacaaaaagggtcaactctgtcccaagcaaaaattcaagaatttttaaaaaataaatttgggtatgaacaattcataagtcttgatttcaatgaccgatttagtttttgatttatgcaagttcctaatttgtgaaagaaaaacttttaaacaatgacaacttttattttacatatttttagcgtaaaaatg

SEQ ID NO: 110635 - DNA, 174 bp, Heterodera glycines
tttgggacggactaagcgaagggacaaaaaacggacgaaagcgacgcaatttttggaccgatttcgcctcgagggaagcgacgaatgttccccaaaggcatttaataattaaatatttttgacctgaatgataaaaatttaaaaaacgaaaatttgtcaatgaaataaaaaatg

SEQ ID NO: 110636 - DNA, 861 bp, Heterodera glycines
ttcttaagggtgtaaatattttcgtctttttcgtccaattttgctctgacgaaaacgaaacacgaaacgaaaaaaaaaattttgaaaaccgaaaacgaaacgaaaaaactttggtagacgaaaacgaaacacgaaaacgaaactcaaaaagtgccgaaaatgtaggacgaaacgaaaacgaaacgaaatttcgtccatccctgcccctgatggtgaatgaatgaatggacatttggaaatatggacgattaatacatgcatttatgccagaaagttgacatactctattaataaagactaatgagtattgaaatgatgtgcggcaaggcataaaattttttgcaaatacactacaacaaataaaacaaaaaaacaacctctcccctatgaataagcacacctcgccaaaaattttttccaatgcaaaagaaaattattttcctttttttggtggaaaaatcatttataaattttccctttttgtttgcaataattaatgcttgtgttccagtgggccaacttcttgttaacttttgctctaacctttttggtacggttctcttaaacggaggcattatttcttcaacattttcttactcataatttttcattttcaaaaatttttccgtcagagtataattgttttgagttttatttacaattttcaataattttaccagtaaaatataattatcgtattgtttcgggattgaagataaatataaattattaatttgtcttttagctggtgggcttaacagatattttcccactaaacctttaaaaaaggttattaatgacaaatttccggacaaaataaaagatttaaaacgtagaaagctgcaattgtataggaaaatg

SEQ ID NO: 110637 - DNA, 388 bp, Heterodera glycines
tgccttcaaattgctcatctgtgaagccgaaagtatcataagcctttcttctctgagggttcgacaaaatctgcttatgcaagatgtgaagcgtatttgcactaattgtaagacaaacacaaactttataagcttgattgacatccataaaccgctgattggactcgggattcttgtttttgtctggatgccttttaacatttttaaattaaatttttaaaattttttaatttattaccattgcaaggctaatttcttataagcatctttaatgtctttttgactggctgtccgacgaattcccaaagtattgtacggattgagctcataagcaattatattgacgagaagcagtagaaaaacgaagaaaatttttgagtttgagatg

SEQ ID NO: 110638 - DNA, 68 bp, Heterodera glycines
acctggctctttacgaaacggatgttgcacaacgcatcagtgacaatctttatgtggacaacatcatg

SEQ ID NO: 110639 - DNA, 97 bp, Heterodera glycines
ttaaaatttgcatcaaatcattgcttctaattttaatttaaatacataaaaatttatttttatttatcttaatttagctaatttttttttacaaatg

SEQ ID NO: 110640 - DNA, 778 bp, Heterodera glycines
  unsure (1)..(778): unsure at all n locations
tgtcatcattcatcacncctccnccttatgcttcatccctcattgtatatcgcacatctgctttgacttttgctttatcccgccgaacttgcccattcggctttatttcccttcagtggggcttcaagtttatttgcttcttggcggccaattctgtcattttattaatgccattatttttattggccagtaatagccatttacggccgtccatcacttttactatatgttctaaaaaaaagccgagagtcgagaatgtattttccaaattcaggattcaagggcataggaactgcttttaatccataaactttccctaatttttttttatcacactcgtccaaatcccgagaataatcaaaaaaaaatgcccaaatacttttactaattatcgtaattagggttgaggaactgaaaactccatggttttgcaagtaaatttaatattttcttttgtggaagtcccaaattcagagtccctatccaaccgtattcctaatttatcttacggtggctaagtattgatcaattctgagcactacaataagccaagagtctcgatcatgataagaaattgcccactaactgttacatatattttccgctaatcactccaaaaatgggtcgtcgttcgttggaacaccaaaaaaattatcaccacccctcctcaaccagcacatccaccccatttgctgctgctcccccctcccatccgtccctccaatgttcctccaccaactaccacatgttggcaccggcccaaggcgggcgcaaaatg

SEQ ID NO: 110641 - DNA, 632 bp, Heterodera glycines
ttttagtaaactttcctttttcaatgccacgaatcggacccaccagggaaaattcgtggttagacttagttttatcagcgaatgatcaaattgtaaagcaatgtactattgaaggtggtgttttttcctctgatcatttagcgcaatttttcacattgactattccaaaaacactacaaaaaacaaaattcttttacactcgacggttttttccgtcgaatgtgtctctttttaatattatggtttcttctagaattagcgctttatctaatgagcattttactataaacgaaaaatacagtgcctttaataatacactgctagaaaccttaaacgagtgtattccaatgaaaaggattaccaaaaaagatatgacccctaaatatccagcatttaattgcatccatcaaagagaaagccagactgtatagacaatgtaaaactgatccatcaaaaaaacactatatgatagcattagtttgcacataaaaatacaaacaaataaatttcattctcaaattgaaaaaaggctatttcaaagggaaaaaattcgatttttaaatacatacaaaaatacgatgttaatccctttgaaataccaaatttagtttttgaaaacaaatgctatcatg

SEQ ID NO: 110642 - DNA, 1003 bp, Heterodera glycines
ttaaaatgccaattttaaatgttttatttttggaaaatgaaaatattttcactttattgtttcaaaaatattttcactttattgtttcatattcttctttttttctccatcaaaattgggtccgtttttcagaattccggaccaaagagtctgctactaaaattggttggtatgaatttttcaaacatgatttattttggcattaattttttaactactctacctacaatttttttagttttcagcagccattttaattttttggctcttaaagtcgctaaagaacaaaacccgaataaaaaattaaattccaataatttttaattcgattttataagcattgcaaaaataattagattttaagaaatttaattatacactttttttttcttttaaatttattaatgacatttcattgaaaagatgtgatgatgaagctaatattaaaaaatggaaatcgattcctgggcttggctcataagaaaggtgctccttcttcgcttggctattaggttaatgatagcctccggcgtcggctgggagcaattaaagccaaatataaaggcccgttttgtgtttcccatatcatttcgccttttctgtcacgcgatttcctgtgaaaattcttaaataaaagaaagacataaacaaaatgccgaaaatggactaaaattttacaattttattattttaaatgtctatttaaagcacctcaaatttttaaaaatatttgaccaatatttttttgtttaattgttccttttatcacattataattaattaatttaaatcaattatccgttaattaaaatcctttttttatttgtcttaaaacgatttgcttggatactttctgaattttcttacagaattaagttaaacctgttaaaaaacttaacttacttttacatttaaatttgattaattcttgaaaatttaaatatttttattttattttattttaaaattttatttaaaatgtcccattgggtttggcacaatg

SEQ ID NO: 110643 - DNA, 291 bp, Heterodera glycines
  unsure (1)..(291): unsure at all n locations
taggggcttcatcaaaaatgaacacatcagtatttcgaatttcaattgcttcattagaaccattttcaattgatgaataagaattgctatttaaatctaatggtaatttaaaacggttatgcacagttcgtccatttttaatagtgttgctgcaattccactaaaagccatgttcgtaacttttttaccaaaaccacgggctaagtgaaataaagcaatttgaacaaaagattttcccgtcccacctggtccatcaatgtanaaacaatttcctttatttttttcaggatg

SEQ ID NO: 110644 - DNA, 285 bp, Heterodera glycines
aggatcttttttaaagaattagattcatactctactgatcatcaaaattgtaatgaaagtagggaataaaaaaataaatattttatgatcagtaggaataaaatgtttatttaatcgtagaatactttagtttttatttcattataatctttttaaaattaatttattgtatattctatttacttatgtatgtatttgccatgaataatattctgtcatataaaaaaaattcatttttaatgttttaaattaatttgtttttaggaatatttcatctttgaaatg

SEQ ID NO: 110645 - DNA, 240 bp, Heterodera glycines
ttttgccattggtccgttaacagcggtccactaatggcggtccgctaacatacatagaatacgcatactccattggcacagacagcacagtttttttatgcaaatggaaataaccgaaaaaatgaaaaaaccaattaaaaatcaaattggaaaatgaggaaacaaacagttggctaaatgaatgacaataatgtcatgagtagggagtgtaattatatggatataaaatcgcgaaatatg

SEQ ID NO: 110646 - DNA, 593 bp, Heterodera glycines
aaacccggcactgtctgccggtcggccattcagtgttttttgaaactgttctgcatgcaactaaatctacctgtcggtcaactgtcgtccattcagcttgctgtgactgagtttatgttatgtcaggttgccgggattagtttgtttggaattaggattttgctttctcatgcctaattatatatgcaaaactttagaacgtaaaacaccgaatgaaaaagacaaatgtttgttggactgactttccgcatgttgtatcgttgttgtaattttgagacctttattcttttaagaaatgaagtcactgactcacgaccttcatcagtgcttcaattcccttcaatgttttattacagtctaattgaattttcagatattaaaaagtaatcttaatgcatgttttgttgttcattcaaaaattgaattttcatcattgtttttgtttgtatttgcttcatttatgctttttcgttttttttaattttttagcagaactatttgtattttttaaatatttattctgcaactgccggtcggctatttattttttcgcatttctgctgacacaactgccggtaggcttatctcaaatg

SEQ ID NO: 110647 - DNA, 366 bp, Heterodera glycines
ataatgctaatgctaaacgattgtgatggccaaaaaacggttggctcggactttgcgaccgattgccccccgcccccccccccccccccgtgagagcatcggttggcttttaatcgacagatgaaccccagcgcagcttcattaatattcagcagtgccacccccgtcgttttctgatcattcaatttgctttttctttctttcgtctctcttctgtccaacattcgccctcccccctcattttaaccaatttttacctattcattttttctctggtcttatcaactaatctatttgtgaattttaatttatcttttaaaagattgattttgtcaattttttttaaaaaacaacaataacaacatg

SEQ ID NO: 110648 - DNA, 382 bp, Heterodera glycines
ttatcaacaactacagcagacaaattggctcactttattttgtgaaaatattcacaattaattgtctttatcctttaaataattttgagattttaacaaaattattttcgctgattttatttggtttaagtttcacatttttgactgttaagcgactttggagcacgtgggaacaatttgcaaaaataaattcccatcaaacataattaattctaactggttttttctttttgaatttatattttattttttgtttttacattttcatccttgttaatgacttgtttaataatatttttattttttcctccctttttccgttcttttattttgtgacaaatttttgtccattccttttgcattattttagctataaaatatg

SEQ ID NO: 110649 - DNA, 866 bp, Heterodera glycines
atgcaaataattttgcttgtgctgtccgcatttattctttttcactcggtcggcgcaaaagaattgccatcggcgctgattcagttgccttcccgcggtccttcttcattgaaaatgcgagaagcgccgatgaatcagatctttctgcacggcttcggcggagatgtgcaccagggatgggccaaattgaaaaataaaaagcgaaatgcgaaaagcgaaatttgcgaaactgaaaaatgcgaaatgaaaaaaaaagcgaaatgcgaaaagccaaaaaatgcgaaatgaaaaaaaagcgaaatgcgaaaagccaaaatatgcgaaaatgcgaaaagcgaaatgcgaaaagcgaaattttttctacaaatttttaatagttaaaatcataaagcaaaaatcattttttaaaattttattccaaatttaaaaatcaataaaacgctttattgaggcgcgctttttccaaaaaaactttttgggaagagggggcaggcggcgccgggaaaatttttgaaaatttgattaaaatttgttgacagattttcaccaaaaaatcatcaaattttgtgatttttgtatcatttttctaatgagaaataagagttttggcgcgccgctgagaacagtttttcagcaaattaccaaatttcgcgattttgggccattttctaagaaaaataggagttttgggggcgcggcggtgccgataggcgccgccggggaaaaaattggaaattttgatcatttataaacagtttttcactgaaaattagccaatttataggtaaaattttgaaaaattttatgggaatttaatccaattcttaggggtgtaaaagtcgcatttcgcgccaaaaagcgaaatg

SEQ ID NO: 110650 - DNA, 313 bp, Heterodera glycines
agtgggcggttcccattttttggggtccccgaccacgaatctttcaattattttgaccaattccgatttcctaatctaaatttgaacaaaaaatagtaattcgaaaaattcagaatttaaatttatttgagttcaggttattgattagaaattagtcaaaatacatatcagattcgcgatcagcgacttctaaaaccccggatcacttttcatatagcgccaaaaacagcgaatgtctgaacaatcttttggggcatgcccggcttaaaaagagaattccgtctaaaaagtctcaaattactttcagttaatg

SEQ ID NO: 110651 - DNA, 905 bp, Heterodera glycines
tctctctaaaattgaattcaaattaaatttaaataaaggacagataattcgctcatctttcctagcatgtcgattgtgaatggcaaaagtggttccaacaaaaaaactagtgtatcaatttgagtttttggaccaatcaaattttcattttcgaataaccttacattttttatcatttcaaaaagaaatatatatataaatattgcgttaattcaaaagtactgatcactgcctttttgtgttgttatgagcttttcaattatgtatcactttctaaactcaagagctttacgtttgctaaaaaatcctaattaaatgtgaaatgaatgtggtgtgttcaacgagtaaaagtggtcaaaattttgcaattttttgcgctttatttatttttattagtattactgtaaatttcgattaccgtcccctccccgcgccggcatttccatggcaacctttcctttttgggttctttatgtttttgggtcacacaccaaaattttaaaaaacaacaaaaatgacagaattctcacaaatcctattctcaagctgatccatttgacgagaatttagcaaccatgaccggaaaatgcgtcagtgatacaaatattttaaaataaagttctgcagtattaaatattattgtaggtactgtataaagggaaaattctataagaacatcgttctgaagtccgaaaaggaacttgttttttgacatttaaattttcactggcattttacgggagccttattgttaggaacaattattgtatttatgcacccaaacaatactgtacgcgactgtgaatttgcgcatttttaaattttagtttttgacatgtgaccccaaaacaggaaagtaccttttttgaatccaaagattcttcccccccccccacccgaaaatg

SEQ ID NO: 110652 - DNA, 1003 bp, Heterodera glycines
aaaattctcattaaaaaaaaaagaaatgttcgcaaaaaaatgacgaaaatatttattgaaaatgcaaaaatgacgacgaaaactcaaatttttcgtgttttgtggggtgtaatttttaaaaatttccaaaaagttgatctttaggggtgtatttttcgtttttttttcatttttcttgtgaaaatttccaaaaaatggccaaaatatggactaaaaacccaaaaatggcgaaatatggatttattcccgaaaacccccaaaatatggatttatatggactaaaaaccttcaccaaatcaaaaaattttaacgtagaaatgctatttttaagcccctttcttcatagcatatgcgcagaaaaaatatgttaatccatataatttacaaccctattaattagctttaacttttgggttttataaaataaaaataaaataaaataataattttatattattttcactttaaaaaaattaaaatttgaatttttaaaaaattttaaaaatttttttgaatttttaaatttcccggttggtcccggttcccggtcccgaagaaaaatcgaggtcctggtcccggcttctcaggcccggcaagtcccggtcccggttttgcccaaaattcccggtcccgtggcactctatttaagaggcttaacaaaataaaataaaaaacataggtggaagatattcgaagctgcgggcttgtcatagccaaaaatgcaacaattttatatcattccaaggagtattctctccgttccggaatattttttaatctgaatgattaaatcgcaaaattgccgattttctctatttttggagcattaaaacaataaaattgaaaaaattaaatatgcaattaatctatttttaaaagatttaattgctttttcggcttttagagataaattgagcgcttacagttgggaatgttaagtttagccttggaggccgacaaaaatattttaattaaaatttttacgcacttgcagaaccgcatg

SEQ ID NO: 110653 - DNA, 258 bp, Heterodera glycines
ttcaggaaaaccaggtataggaaagccaatttgcaaaaaaaaatggcctggacctggatccagtaaaaatctatgataaggcactgaacgtgaatgtgtgtggtatttaggggaacacgaaaaatcaaattagataactaattgaaggaccaagaattttttatccatttcgaccccgcaccctgcacaaaaaaatagaaattgtaatcgaacccgctgaaaacaaattttgccaaaaactcacatcctcttacaatg

SEQ ID NO: 110654 - DNA, 430 bp, Heterodera glycines
ttgttgttgtcgtttgctcacaatgatcagaattttttgcattttcgccgtcattgttgttcagaaatctgtgtttacaacatttatgaagaatttcaattttttcgacccattttgcttagaataatctattctgatatttttatatatgtataatataaaatatacatacaaatacttttgacgcagcgggattttgacgggcagcggcttccttcattgacaaaaaaatatatttggcattatggtttttttcgcgttagtttgaatagaacattaaaagttggcagcgccaaactgaccaccgacccaaagaaactggcgcgagcgctcgtctaagacacgaagcggtcaaaatagaaatttctctgttctccaaatttttaaatgttttgtgacatttgcaaaaaacaaaaccactggactcatg

SEQ ID NO: 110655 - DNA, 255 bp, Heterodera glycines
atcgaataaatccccacttttcatggcaacttttttgttggttgaccaatttttgttaatttggtatcataaatgcttttaatgtttatatttgtataaggtcaataactaagaaatgtgataatgttatccggtattcaaatatggggagactcagccggctgaatttggaattaatttgtgccattgctccctcacagtgctgccgctccctctgcccgccttcgtccccctcaccttcagtgcgtctccatg

SEQ ID NO: 110656 - DNA, 57 bp, Heterodera glycines
atttaattaaatatacaaaattattttttaatcaaaaagactgaccttccaccgatg

SEQ ID NO: 110657 - DNA, 190 bp, Heterodera glycines
gactcggatatttttgtaggtggtggagatttctcacatgacaaatcgttttcaaaagtttgaggggctgttggtataaacgatgacgatttttcttgtgggaaatcttcatcaggcggttcgatttttaaaataaaaaaaatttagttttcaagtttctgtcggaattaatgttcgggattcaaaaatg

SEQ ID NO: 110658 - DNA, 209 bp, Heterodera glycines
ctatttctgagcattttttaaatcgaccgcgaaagttttgttgtccaccaacatttttggttttaggaaccgatttgtcggtcttttttttcatttctaatttccgtcacaatttgtatataggagtgcattttttgttgtttttgggccattttgtaaaaaaaaaaaaaaaaaaattgtatcccaattttcaggagaatgtccgaatg

SEQ ID NO: 110659 - DNA, 67 bp, Heterodera glycines
ttgtatccaggcaggcatcagcgttaacgatggccttggaagaagagccactggatgcgtctgtatg

SEQ ID NO: 110660 - DNA, 492 bp, Heterodera glycines
atatatatatatatatatatatatatatatatatatatatatatatatatatatatatatattgtacattttttctgaaattagccttttattttttctttatattcaaaatttctttactcttttctaatacaattttttatacattaatgcactttctttgtgtttgtaagtaagtaaaaatatttgtcggaaataaacaattttgtcaaaacacaaaatgtggcaaattacggaaatttttttgttgttacgaaataaaacaaaagttttccatcagttcaaaatttcaaatttttttaaaaattagacttatttatctgatttttgaatttcaataaaacattaagattaaaaaatgtattatttcagccaattaacaaaagaaacagtcatttaaaatgaaaacaatgactaatattgtaaaacattataagaaattgaaaccaaaatatttttaatgaaaaacaaaatgccggaatatgctaaatg

SEQ ID NO: 110661 - DNA, 307 bp, Heterodera glycines
tttgctgacgctgcgagtccttttgaccaacgccaaaattattcattttctgaaacaaaacaaaaaaagacatattaaatgtaaatgtcggataaatagaaaaactgacaaaacaatttgtttttcttttccattaaaaaaaaaaataaattttatgtgttgaaaataaaattcaatgcataaaaatttagtgccattattttttcgctaaaaaataaaactgtaataaaaaaaattttccccctttttagttaatttggtaaaataaacatcttattaatatatttgttttgtataaaacattatg

SEQ ID NO: 110662 - DNA, 166 bp, Heterodera glycines
tttttgtcagaaattgaattcaattggagcaatgatttgatgagtagtgaatttgaatggtggtaagagattgaaatgactttgcttggtgtcggccagcaagtgctgcagtggtggtcaggcacagaaaaatgagtgggaaatcaataaacgacctttggtgatg

SEQ ID NO: 110663 - DNA, 231 bp, Heterodera glycines
  unsure (1)..(231): unsure at all n locations
cgagaagaanaccttttttcacagagcaaaacagtccaatgtattgccaagcttgatgcagatttatttaatcagccgctttatctcgtcaatttctgtgagttggatattgaaattttgccaaatagcagtaattttctgataatagtgggtaacgcagcagcagcggctacgcgctaccattttgaaattgtcggattgaaaatgtatgttaagaaagtgtcattaatg

SEQ ID NO: 110664 - DNA, 717 bp, Heterodera glycines
tcatcgcaaatttcattcaaatttgtgaaattttcccggcggcgcctatcggcaccgccggataggcttttacttaataatcctgtagaaattgagtcaaaaactgcgtcatttggtcaattttagacaaaatctgttaacaaatcgcattaaatttcataaaatttctcgcagatgtcgataggcaccaggtatggcacgaaaagacttccgatttccgacatttttggggtcggaattccgacttccgaaatttttgatgaaaagtcggaaatttttttaatttttttttttcaaaaaactagtaagttttgcacaatttctgttaataaattgaactgaaatttttaaaaatttcccggcggcgcctatcggcaccgctgtaccctcctctaagttcctaaaaagtttttgaaaaaatagcgctgtaaaaaacgtgtaaatagtcactcctttttcccaaaaatgttctaaaataataaaaatgacaaaaaaagattttgataaaataattgaataattttttcaagcgaatatactaaaaacatttgtgaaataccttttacttggttaagaattaaaaaatttagcctattaaaatatttagaaatttttttattatattgtatattttttgaaaaatttccgatttccgacgtttttggggtcggaaatccgatttccgacacttccgaaaatttttggagcctcggaatg

SEQ ID NO: 110665 - DNA, 1003 bp, Heterodera glycines
gaagtgcttcagccacaagtatgtgccatggatatgatgaataggcagaagaaggtccatttttgaagtcaaatcaaaaaaaaattgaatgagctataataaaaatgtaaataaattattataaagtatataagtaaatgaaaagcactttaaattgtaaatgcattaaattttgtaggatcacacgcagattttgagaattgagaaaaaaagatatttaaattcaaaatctccaaatattacagttatcattttttaatgtaaatgagtatcgttttgcgttacacttgtttttattaccaaataaaattttggaattaaaaatatatattttttaatttataaaggtctaaaaatttatgttgttattcctggatgatcctaagaattttaatttatattctacattccttaaatataaaatttcggtatttaaatcgttttattcaaaatttttggtgtagcaaaaattatttttatgcaaaatgttgatcatattttcgcaataattaagctttaaaactttaaactacattttgacaaatattaacatctttttaattttacatccgcattaatatttattataattattcaatgttttccaattttttacattctcttgcctttaaagtttctatctatagttttactttcatttcctatttttcacattatttactttaaggatttttagtgatcactggagttgtttatcttttgaatttgttattttttctgtgaactttttcttgatacgttagacaatttattagattttgagtatttccagataaaaacatctcctctttatttttttcatataaaaaagtaaacattttgtatatttactgtatctttctgaagaaatattttcttatatttatgtctttgaaataaaatcataattttaaaaatttgtttgttttattaataaatattattttttaatttatctattttatgattaattgctcattattttcatttaagaaaaattatg

SEQ ID NO: 110666 - DNA, 135 bp, Heterodera glycines
ggtgaaaaatgtttgacaaaattctaaaaattttatttaaattccaatttttccgcagggaatggacaaattggcgaatgtcaaagaaattcaggtcctaattacgtaattaaatcacaatttttaggggtcatg

SEQ ID NO: 110667 - DNA, 171 bp, Heterodera glycines
agtttcgatttgggccagaccaattaataggtcagaccaattgaaagatttattatgggataaataactatgtcaattttaaatttaaatttgtgtgtttggtagggagggcacctttttgaaaagttcggcttgtacagtgccacttcgacactccgccgttgggccatg

SEQ ID NO: 110668 - DNA, 388 bp, Heterodera glycines
tctcaaactcaaaaattttcttcgtttttctactgcttctcgtcaatataattgcttatgagctcaatccgtacaatactttgggaattcgtcggacagccagtcaaaaagacattaaagatgcttataagaaattagccttgcaatggtaataaattaaaaaattttaaaaatttaatttaaaaatgttaaaaggcatccagacaaaaacaagaatcccgagtccaatcagcggtttatggatgtcaatcaagcttataaagtttgtgtttgtcttacaattagtgcaaatacgcttcacatcttgcataagcagattttgtcgaaccctcagagaagaaaggcttatgatactttcggcttcacagatgagcaatttgaaggcatg

SEQ ID NO: 110669 - DNA, 789 bp, Heterodera glycines
attttttgaaaatgtcgtctaattgcgtggaaatgaatgaattaattaaatttgagaaatgatcgatctcacggattgaaatttgatttgattctctcatttattctctcagaaatgcttttgttgattttctttcattcgaataaaacacacatttgatattaattgaacagcttaagcctaagcattttttttaaatttgcatgtcaaaaatgccaattgagccatttaagaaaaaatttagttggtcattgaacggcgggggggaaacggcgggggggaaacgattcgggggggaaacgatgcgggggggaaacggcgggggggaaacgaggtgccctcgcagaattccgggaccgaggaaaaataaataaaaaatttttttttcttgtcttttcttttgtctatgactttttcatcaaatatttggtttctcaaaatttattaatgaattttgggtaaataaaagtgctctgatcacggatttgagttctatgtgtcttgcaaaatcaagaaaacttcaaggaaaatggggcaaattttctgaaaaattagaacattttcttaccatacatcattaaaattttacaaaaattttttccttttctgaaaatgtgaccccaaattggcaaaaatttgtgactttttgacgaaaattatgctacaactcggggcgctacgctaaaaatttttagtataaaaatgtgtttttttctcctcctccgcatcattccattctctcattaggtattcttcctgtatttcccggtcatttttttgctgcaaatg

SEQ ID NO: 110670 - DNA, 1003 bp, Heterodera glycines
tagtgaaaaaactttttttttgctcaattgttttgaagaaaggagctcaaaaaacgtatttctgcgttgcgttaaaattttttcatttggacgtcacttttcgtcactagaaatcactattttggcgttttgtcactattttttcactatttcgacattttttggaaatttgaataaatttaaatttcttattcaaaataagcaaaaaaagcgtaaattttttttgggcagatatttagctaataatgacttaatttttgctttatcttgttttttttcttctaaaatgctttttaacaccatatttagacatttttgaaagttttattttaatttaacgaatttgaagaaattttgagaaagtttttttttcatatttttgcacttttatgtccatatttcgcgattttttgtccatatttatggccatatttcatgattttatatccatataattacgaaccttattgattacatttaaacaaataaagtcaaaccttttttaaagaaaatttaggttacttactagcatttacaaattctttttcaaaagaaaattctttaattaaattgcgaaatagatatttgtaatgaatgaaataattcattaattgtccgatcactttcatttttcaccattcattctttgtttgcattacttaaccacataatatgagtagtggagtcgcttaatgatgaatgattatgatgagatggccaaacaaataatttgtataaattttcggctagaatcaattacaatacaaaacaaacaaaaattgcccaaaaatggaaaattgtcgattttatttgtgcgcgaaaattgctttgtggacaaaaagcgcgcgacaggaaaatccgacaaaaaaaaattatttatttgtccattaccgcaattatcagcagacagcaaagcactatataaattggtgaatgtgcggtaaaattaatcaaaaaataaattcaattaattaattaactaattaattttgtctcgaaaatg

SEQ ID NO: 110671 - DNA, 477 bp, Heterodera glycines
tttggtttgggctattgtaggttatcaaatttagaaagttttcaggaaagaaatcatagaaaaaatttttctaagaaaatttcaaaaaaaaaccttgaaaaatttttcagcgatatttttggaaaatttgaaaaaaaatggtaattcatccataaattttgaaaaaaaagtataaatatttttcaaataattttctttttgaagtttataaaatattttttaaacaatttttttttcttgaaatttcctttaaaaaaaaattttctacgatttttttcctgaaaaatttctgtttgaaaattttttcaattattttcgttgcgggggaacaatacgggggactctgtttataaaacagcaaactggtgggattttacagccaatcttacgatataaattagtggtcacaaatcccgaccaattcctttcaatcggcatcatttagccattcatttttaaaggaagtgtcaccgtatg

SEQ ID NO: 110672 - DNA, 380 bp, Heterodera glycines
  unsure (1)..(380): unsure at all n locations
aatagataaanttcgaaaaaaattattaagaaaattcaaggaaatgtaaaaaagtcgtttttttatttttctggaaattcagaaaattagtttttatacgagacggcgacgttttaggggtgtacccggtctgtggatggtattctgagttattttctgaaacccgaccccaaaaaagttataaatcgaaaatttctgaaaaattccgaattttatcaaaaatttcggaaattggaattcagtgccatccctggtgtggccataattcgacaaatgattgatttttgttttccaatcaaattgtttagcattttcttcgtgccaatgccatttcttccgtcagttacgaaattcatttttctgttcgtgcgccgtcaatg

SEQ ID NO: 110673 - DNA, 365 bp, Heterodera glycines
  unsure (1)..(365): unsure at all n locations
gggtataattgtatgtattnggatgtttgtcggaggttataattgtattgtattggatgtttgtccgcgttataattgtattattgtattgctcatctcgtattattgctctgaataaatgctaaataccaaaattgggagatcagaattgcaagcggctgattgcatttaaaattatgggtgttgcgagcttaaaaattcattttttcaacaaagtgtaaatgtttcaactctttttgtcgcctccggcaatttctcaatttaattgcaacatagaaattcaaaaaaataaacattacgttgtctgtgggtcctttgtctagatattttgaatgggacaaactgattgtctccgcgtggccatg

SEQ ID NO: 110674 - DNA, 119 bp, Heterodera glycines
tcgtcggattcgccgtcaaaaatcagacatcgctcggacggaacaattcaaaaccgcaccggtacttacgcattcgataggaatcggcactttttgggtggacaaaataaacaaaaatg

SEQ ID NO: 110675 - DNA, 1003 bp, Heterodera glycines
  unsure (1)..(1003): unsure at all n locations
ttaaagaagccctcttttgaattttatcaaaaacaaaaggggggacccttttgttttgcaaaatttttttgtgataaaacatgaaaatttgatatccggggttttagaggtcgctgatcacgaatctgacacctattcgaggttatggaccccaagaacaccagtgaataattttcatgactatatattaaaaaattttgcaaaccaaaagggtcccccctttttgtttttactttttgataaaatcaagagtactctttgcaagtagcgccgagcttattcacgtttgaatgcaataattattaacataaaccttcgagctttcggcgtttgaaaactcctttggggagcactccacggtacaaaaggtaatgtgccattgcgaggtaacacatgcgcgaaagaaaacggagttggccttcattggagagataatccttcgtaaatgtcgcctcccaagattttgtggacaagtgacgaatgctctctaccttctaaatgattaaatgtacagtcaaaattatctattaaatttaaatgagaacaacttcgggaaataatggaggcattgacgttgtgcaattatttatcaaacaattaacaaatttcgtgctaaaagttttaaaacaagtataggtatgtaaagcaagcaaagcataaatgagctgtgtacatcttttgggccttataaaatatataccgtatttctccaattagaagacccgagttttctatgtttcaacncctcacatttacaaatttgcaatttttggtaaatatgtattcgcgctttttcaaaaaactgatcaaaaaaatgccggttgcccttcttaaatatataaatgaaaactcactacacgcactcatttctatcagaaacaattttttgttcaaatttagtgtataaaagggaaggagttttttcaatgcgctcacttacaacatcgcctctcttcattcaacagcagcgccaacttaccccacagagcgacagcgacacatg

SEQ ID NO: 110676 - DNA, 67 bp, Heterodera glycines
ttttattttttttaatggaattttctttttatttatagttttacattttaatagatttaaaaaaatg

SEQ ID NO: 110677 - DNA, 1003 bp, Heterodera glycines
cactatttcttcctttcgttttgagaatttttgactttctaccaaatgttcgaatttgattccgggactcttaattgatcgagatggaggtcggattcacaaccagcgccctaaaccctggaaacattttttatacgagtttaaaaccatttttttttgtggcgtaccaactgcactactgtagtaccaaaattagtaaatcaacccgaactagagaatggcaaatcaacctttttattagtttttgcggggtatcaatttaaatgttgatatttaattaaatcaactaacattatgccatcaacgcaaatatcaacgtaatttttaaaatttgcgaaaattttttaaaatttatatgagcggtttataattttagtgcgagagataacgcaaaaatgagagagtgctggatctcagtcccagtcatacaaaacatttttgatgaaggaggtagagaaaacaatttcaatagagagcacaatgggaagggagttcatgtctcttcttcgctgattcttttggtaagagacgcagattcctcgctatgttctctattctctctctgtcttaaatctcttcccataacactctctttttaattaatttttctttattcttctttaccaaaaatgcttttgtatgactggggctgaatataacaccctctcacttttgcgttatctctctccccatcttattttccgccaaaagtcatttttgaaaaattgctttaaattttaaaaaattatcccaattttaaaaatagcgttgatattacgttgatggcataatgttatgttgatattaaataaatatcaacgtcaatgttgatatttattaaaacaattttcgctaagagaaaaatgttgatttgcctttctctaatcagcacttaatcatatgttgatgatcttttttccaattacattgatcaaccaatgtacatatgtcatcttatctctgatcagagaacaacaagcaaaaaaaaaaatgaaggacgatg

SEQ ID NO: 110678 - DNA, 627 bp, Heterodera glycines
aagaattagccaaattttgtattattaatttaagcaccattttttatccggaccaatcggttcattgttctgctgctttttctttatttattctgttgattggtcattacaaaaaaaaaacattttgccgtctttaacgatgcaattattgtataatttgtacaaaagaccaacacaataatttgtaatggatgcaacaggaaactaaggctaatccgaacggtttttgtgggattgggggggggggggggcggggagcaatccggtacggagggggggggggggcgttcgggaggaggggcactcccgccacttttgtgtcttccatctttccgaatggccaccgctcattccgcgtcactgttccttccccagccgatggtcccccctgttccgctgcttttcctttcggccttcgttgcttttcatcttggcttttctggtgcccttcccccgtctctttttgggtggggcggtcgcccttctgccgctggtcagttttggccgtcttttttatttcgttgaatttggttttaaggcaatggcccccctcggccttcgttcagtcctttcactccctttttgtccccccaatctcttccgccgcctctctttggaaggcgaatg

SEQ ID NO: 110679 - DNA, 558 bp, Heterodera glycines
ttcctttttgatcatagtgccaatttaaattcagtaaattatttttattttcaatttttatttcgaaacaaaattttcctttcccttccattaatttaattaattcacatatatttcttttttgttgtcccaatttggcacaacacacacaattttgccgaatttgtttttatttgaattcgtcgagttgggcaaaatgcgcgcaaaattcgcgcacaattagtaattaaaaaaataatcatttattcgcgcacaaaactgcaccagatcattaaccaatgccatcacaatgtgctacaagtgacaacaataatcagagtcagtcatcatcaatcagcacagagtccacctcagcgaatcaacacaaaatacataaattttgaatgtgattatttgttgttttttttgccggggggggggcggcgttttgatcaaaaacagacaacaaaggcggggggacgccaattataaatttggggcgcaattcgcgacaaattcattcattcaatccaataacaaacagtccatcccaaaaattaaacttttttctccataatg

SEQ ID NO: 110680 - DNA, 762 bp, Heterodera glycines
aattataaataactttattattaaatttagtttaaaatgaataacactaatacaacgaagccagacatacaaattttgaattcccctgaaaagaataatgaaacccttttgcatgtattacttttttctcattatatcattgcatttcctgtgtttttgcttttttggttcgttttaattaggtggcttaaaagccacggtcatctatcgcccagcgaagccgagacagtaatggaagagattaaaaaaatcccccgccagccaccaatatttttcgcagcaaaataatgcaaagaacatgactacggtagattaatgttttactgtagatgcgtgcgtacgcatcaacttactcacgatattcaacgctccagaaatgcgtacgtccatcaaaacatatttattcttgatgcgtacgttgtctacatgactatggtagattaatgttatacggtagatgtgcgtacacatccacatactcacgatatgcaatgctccagaaatgcgtacgtccatcaacacatacgtattcttgatgcctacgttgtctacatgactatggtagattaatgttatacggtagatgcgtgcctacacaatactccaggaatgcgatacttacggcagatgcatcttacgcagacggacccacctctcgccttacggaccctctctcacgccgggtggaccctctctcacgccgtgcggacccctcacacagagcggaaaacgcaggtgcggttttaatttttaaaaaaaatg

SEQ ID NO: 110681 - DNA, 1003 bp, Heterodera glycines
ttaaaaggaagaaggataaatgtatttggaaatgtttattcaaaaatttatttaaaaagaaattctatttaattctttaaaattatgaaccgcaaaaaaataaataaattttcaacacttaaaattaattatcctgtctatttgaaaaaccatgggcggcaactaaacccaaaaatgccaaattgggataattagtgcacggacgggaccgtgattatttctcgcaactggaaagacccgacccaattttagagggcgaggggggggggagttttcctttttccttcgagggacaataggaaacatcaacaaattttggttaaatcaacaaaatttggaccaaattgttgcttaatttttagtcatttctctaagaattgataatatgttgattgattctgaatttgtttgattttttcacatttttgtctcaaaatctcgacaaaattccattagcgtttgaagaaagcttttgcttcttcttcatcctttgcctcccttttgctggtcggcttccgctcggcctcggaattggccgtcccatcatttggccaaatgagatttgactccccagcagacggccaattcaaagcatatttttatatcattttaaagggtgaaaaatgtatatattgctgaaactgaaattaaaaaatttttttatttaaaatatattttatttattttacataaagatttattttatgtcattcattttgttaattatttggccttgcataattatgattaatttctctgcgggtaaaacaacaaaaacaaaatccaaaaaacaataaaaatttgcgaaattttagtgtttggtgccaatgacaaattttgttcgtcccaaaatggcgggtcaaaattgaacgagctgacaagccccggcttcccatcaaaatatccgccaaattccgattgtgttcggataatagatggtcattaccattactttcttaaaatgggtaaaatgccatttttatttttattttagcccccgatg

SEQ ID NO: 110682 - DNA, 414 bp, Heterodera glycines
aattataaataaataaaaatattattacataatgttaaaatgaataacaccaacacaacgaaaccggccatacaaattttgaattccccagaagagcctaatgaaactcttttgcatgtactgcttttttctcattatcttcttgcatttcctgtgtttttgcttttttggttcgttttaattaggtggcttaaaagtcacgggcacctctcgcccagcgaggccgagacagtaatggaagagatgaaaaatatacctcgacaaccaccaatatttttcgcaacaaaatgatgcaagattagagaaaacagacactgaactctctcttcagtatgacaaaatcgataatgactcatgctggcggtgcattctcaaaactactcattcttttcatcattcattttacaaaaaatg

SEQ ID NO: 110683 - DNA, 171 bp, Heterodera glycines
tcggattgtatcccgagtcgggatccagaccaagtgccgatcaatcccgatgattttggaaaaacgatcggaacggatcccgagtcagggtccagaccaaatcccgaccaaatcccgattattttggaaaaacgatcggaacggatcccgagtcaggatccagaccaaatg

SEQ ID NO: 110684 - DNA, 1003 bp, Heterodera glycines
gatcattgattgccacttggcatttgcaattctcactcattatttaaactcatccaaccaatccaataaaccttattaattgaaaaataaataaacatcaattcgttatgcatttataagaggggggacgggaatgaatgagtgaatttttttagaaaaatttagtgtccataagcacggggttgggcactagcaccgtatccaacccttcgccttaatgcgtaggtcggaggccgcaagccgtgaccaggcactagcacgccaaccccaagcacgggttgggcactagcaccgtatccaaccattcgccttaatgcgtaggccggaggccacaagccgtgaccaggcactagcacaccaaccccaagcacggggttgggcactagcaccgtgtccaacctttcaccgcaaaagcgtaaggccggaggccacaagccgcgaccaggcactagcacaccaaccccaagcacggggttgggcactagcaccgtgtccaacctttcaccgcaaaagcgtaaggccggaggccacaagccgcgaccaggcactagcacaccaaccccaagcacggggttgggcactagcaccgtgtccaacctttcaccgcaaaagcgtaaggccggaggccacaagccgcgaccaggcactagcgcaccagccccaagcacagggctgagcactagcaccgtgtccaacctttcgccgtcaagcgtcaggccggaggccacaagccgcgaccaggcactagcgcaccaagccaatatcaaaacaaaaaacataaaaatgaatgaatgaatgaatgatgaaaaatatttagacaaaattcaattcagtaaatattaatgcatgagaaaggtcagagaattgctggacgtgcaaaagaaagagggggaggagagaacggggggttaattatctcataattcagttctgtacgatttttatttaaatattttttttataaataattttaaaaaactttttagatttttaaaaaaaaatg

SEQ ID NO: 110685 - DNA, 115 bp, Heterodera glycines
cggcagagggcggcgggtcctcaatgtgattttcggtatctctgccggagcgacgtatggcctgcagaatgcggacaacctctgcctcttccgagcctttgaataaaagcggatg

SEQ ID NO: 110686 - DNA, 90 bp, Heterodera glycines
ggtgaacaaagtcggcactttggcaatttttggggagacaattagtttgggttaggaaaatacattgaattgtatttccagaagaatatg

SEQ ID NO: 110687 - DNA, 156 bp, Heterodera glycines
ggtactaggggttttgacgggttgggcaattctgatgacccccgggggggccatatgcaaattgggcggaacaatggcaaaagaatgaagaatgagaaagagacacaagacaagaaaaaaagaattggaggctgagaaagatgccaaattcaaatg

SEQ ID NO: 110688 - DNA, 538 bp, Heterodera glycines
tcagccccttttaatgcatcccgacagcccctaaaaatttattttcagcattttttgatttttggaaattttttaaatttaattgaaattttttcgaatcttccaaaatcccgcaatcccgcacgggatcccgcaaattttaaatgcgggatttgcgggattaatcccgcgggatcccgtcccgcaaaaaattttgagttccagtcccgcagcgggatccgcaaatttgaaatttccgggctcgagtcgagagtgcttcgttctctaatttttttgtcccttcctctgctcttgaggttgcgcaattccaatccataaaatataatgtacctatatgcttacacaacaccgaccattcccttccgcctgtccttgacttttaaggattccaataaaaatgtaaaagcattttttaacaaataccagattgccaatttatgcactaattttttgatttgtaaaatttccaattttctctgtgtccccttcggctttgttcgtttgttttggcactcggcagaaaggaggacgcaaaatg

SEQ ID NO: 110689 - DNA, 981 bp, Heterodera glycines
  unsure (1)..(981): unsure at all n locations
tgcaggaaaattattaaatttaaaaaattttttaattgctttttaaatatgccaaaaaatgtaggcttaacttttttagtganaattcgatcactcatattttttgctaattgagcagaagcgtaacaaactttgcagggatactccccggtaaaggactaacttacactgaaatgagcgccgagctagctggctcaaaaaaattttcgaaaatctgagtctttcgtttttatttattttttgcaaaattaattcttaaatattttttcagaaagggttctgaaacgcaccaaattttatttacatgttagtttaggcactctgatgctttttctatcaaaaagggagatgaataaaatttttaaaaatttttaattcctttttaaacaggccaaaaagtttaggcttaacagtagataatattcccaatcaaattatcgattgattttcgatcgataatttgagtgtgtctactttttttctctgacatccccttccacaaacccaaacctattggatggggtcgagagagagaaaatacagtatttgctctaattatcccccagtctccaattatccccagtctatgaggaggttaaaaaataatcccccccccccccaaaaaaaaaaaaggcaaaacctattgtaaggactgtacacaaataatcaataaacccaagcctattgcatatatcatatccgaagctttaagtaaattagcaaaaaactccaattcattaaattgtaaaaaatgacgtcatcatgcaaagtaaaaagactccgccccttttcttgttggtcacaccccattgatttttgttttgctttactaagaagttgactccgccttttttgcttttagtttcttttgtcccgccccattttttttctatttaatcacagtttttctacataaaaaaatcattcgtccatttaaaaaaaattccatccacattcgttttttctgttcttcctgcaatg

SEQ ID NO: 110690 - DNA, 108 bp, Heterodera glycines
ccttgtaaattttggttgtttatggaaagcttacaaataggctccctaattatataacatttccaaatgggcattttctatgggtgaaaagcatcacatttatgaatg

SEQ ID NO: 110691 - DNA, 912 bp, Heterodera glycines
tcaggccgttttcgtacgaacacatgttttttgactataacttttttctttgtcaaccaaatccaacactgttggtatcttcgaaagcctttcagatgctctattagcctgcaaaattccaaaaaatttcgtcaagtttaaaaaaagttcgagccaaaaaagttggaaaatttggttttttgaactcttctgaccataacttttttgaaccttaacgaaatttttccaaattttacaggctaatagagaacacttagggctatcaaatgataccaacaatattggatttggttgacaaagaaaaatgttatagccaaaaacttgggctcgtacgaaaacggcccgtacgaaaacgaccctgaccgagtttgtcccggattttgttatttttgttaaagttatgaattttctacaaaattttatgaatgggaaacaaaaaatgataaatttttggttctattagttcttaagtttttctaattgaatctaacgcttgtacaagaactcgtacgaaaatttcccccgtacgaaaacggcagtacgaaaacgacccccctcggtacgaaaacgaccctgaccggcgggggagggagccagagaaaagaaaaaaaagaatttaaaaataaaatattaaaaaaagtcaaaaatgatctgtcggtaagggacaccctcgtttcggcgccgctcgtttcggcgccagcccagtttttggactataacttttttctttgtcaaccatagcattattggtatcattcgaaagctctaagtgttctctattagtctgctaagtttcaaaaaatttcgttaatgctcaaaaaaaatatgactagaagaattcaaaaaaccaggccacatgtgtacttttggccataactttgttcaaaattgatcaaattttttagaattatg

SEQ ID NO: 110692 - DNA, 145 bp, Heterodera glycines
aagtaagtgattcagacccgattcattaagtcgggcgataatgcgttcaaaataggatttgatgctatagagcatagtttgcctctcttctgaaagaaattaggcacaacaaattcagaagatggaggaatcgtcgtcaaatatg

SEQ ID NO: 110693 - DNA, 1003 bp, Heterodera glycines
cacaaattggataataaaatcaaaaacaaacgttgagcacaaatctttgaaaaattttgcagaatttttttttagtttttttttaaattattcgctattaaatgttaattggcatatgactctgtcgtccaatacattatcaaattggctctgctgaatgattaattgctttaatacccgcttatttatgaatgttttctatgagagcagctctaatcgctctgttcggggcactgccgccgaagtttgaatgaaatgacataatgccaatcgatttctgttccatttcatgttccttccctcgcccataaatatgctctctttccccttaagattgtcttcccttctttcattttgcatttatatatttgttccccaaattgttgtgactttattttccttctccaataaattataaatatttaattggacttcaacaaaacccctcggaccgaacacgctctaaccgattgggctgtaaaatatgtacatttaaaattatttcttgtgaagagcattaattaatttatattttttaatgatttttcgcagattcttgtcttttgaaaaccgttttttattactgtttcaccgccttagaaatttccacgataattaaaatggcactctgattttgagcaaactaatttcttactttttctccacaattttacaaatttttctgtaattacctagacgtagccggacatttttagcaaatttttgtatgaacagttattaaaattaaaagtgaatttaaaaaaacaaaaattttaccccgatttagccattttagagatcttcctacatatcaccttgaataattgtaaagtagtatgagcaactaatatgattaccacattttactcaattcgatctccttttttcattcgtttcccacttatcgtccctttcattatctaattaattaaatatgcaatttacggaagcattctaaaaattggtattgttttttttggtctcttcaaaaaacacaacaatg

SEQ ID NO: 110694 - DNA, 391 bp, Heterodera glycines
tttctatttatattaaaaatgcacttttgtcattttgataaataattagccatacaaaaataattaagcctaatacaccttataaaagccctcccccctcctccttgcgtctcgggccaacatttgttcccattaagtgacgagaataggccacgccccgtgccctcctcctcttcccctccttctgttgggcggcaaatccctttaaaagccgtcgcttttcacagtcttacaaatacattccattctaagtgcacacattcatccaccccatttaaaagcaatttcaaacctaagctttcttttaaagcattgttaaaattccttaaatacctcaactgcacgcagtacagcagcgacatcaaacagaacaagcagtacaagcaccatg

SEQ ID NO: 110695 - DNA, 70 bp, Heterodera glycines
cgtaatccttttatggggattttaaatatattttttaaaataaatttgtttaaggttaccaggcgctatg

SEQ ID NO: 110696 - DNA, 221 bp, Heterodera glycines
attggcgcctaattgcctttgtttggggacgccacgcacgtaagaggccaaaagaaagaaaagcgatgaaaattaataatcaaaacccattaaaaacacttcttagaaatatttggaacttcttcttctctatctcagaatgaattggcaaattacttaaatttcttttagacaattcgcaataattccgtgtttaatcgttctttgaaagtcacaaaatg

SEQ ID NO: 110697 - DNA, 1003 bp, Heterodera glycines
catgcgagccctgctgctgctgctaatggtcggtcatctgttgctggcctaccaattattttgtatttaccgtatttcttgaaatagagcctccgggggttctatttttcaacccccctcaaaaggggggggaaggctttatttcagcgggggtaaattcagggcggagctgtattatatgaaatacggtatgtacatattgtccttgttgtttttatttttcacacttttttgtatgtgtataaaggcattttttgcgtttttaaaattttgtttttggcatgggtaattaaaacataagtgcataaatctataaatgttagacaatttatcaaatgcttaaaaatatgaattggatgcttcatttttgtgtgactcttaggaatccgggtccaactttatgttattttaacccaatttttttaatgttctattgtactttatgaatccaatcgacttttataaatccaatgggattttataagtccaatttaagcaatgtcgaaaactgtacgattgattattagagaccgggtttttagggttttacccattttttgggtagtacttgatgagagaagcacgaaaatcacattttcaaataatttttgatttagagcgactttttagaacttaaaaacacctaaaacgggggttagcaccagggatgtgcctaggtcagggttcggatctgtcctgatttatcagatttgtcctgatttgaagggtccaaatctgataaaattaaaatgtcctgatttgtcagatttgtcctgattttgaggtagcgaccaaattttgtcctgatttgttgattctccgaaaaatctgtcaaatttctttataaatttggattggcgtaatgtttaagcaaatattttttaattttggtattatatttcttttttttgttgttaattttggctaattattttgttatttattgctttattgtttttctcttttgtttttaatttagcacctgcactagtactaacaaatg

SEQ ID NO: 110698 - DNA, 506 bp, Heterodera glycines
gctttgtttgaattttcttgtttatctctcaaatcagattatggtcttatgtgctggtctcggtggcacttccctatttgccttgggctatttgatgatcgctttttggatgctttggcagggcaataagctttacaccatgcataattactcgaggacgttggcgcgttggaatttcttggccatttattccgttgttgtgatgattgtcaaaatttctcttcaggcgagtcgtttgtgtccgtttgcccgattgtcacttttccccttttcagcttctcggctgtgttttcgtctctctccttttcggaatttgccctattcaacaacttttcgctgctttttgtgccaatccaattgcaagagacaatttggcatatttcagcagtgagaatctgaagacgtcgaacagttccatcaaatggaacattggcaatttcacgcagtgcggataccctggagggtcagccgaaaaggcggaaaactcgcagcacaatgaggcgatg

SEQ ID NO: 110699 - DNA, 345 bp, Heterodera glycines
ggtgcgttttttttaataattcaattttaactatatttattatcaaatgtaaaatttttttttaataatacaagacattttttcgaatgaattcattagttttaaaaaatgaaaaattcttaaattgattaattaaaaacaataaattatttttccaataaaattttatggaaaaagaaagatgtcaatttaaataaataaaaattgagcatataacagagataaaatgcacatttttatttgatgaattgaatagaaatatgttcatttcttttaattttatttatttaaaattaaaaaattcgaattttttttaaaagaaaacttttttaggtgcttcaaatg

SEQ ID NO: 110700 - DNA, 333 bp, Heterodera glycines
aaaagtaaaattttttgatcaatttttcacaaatttaggagagagatttcgtggttcagcgcgccggtgatttttgaaaatcttagcgcaaatttttacaacggctgccacattttatgatcttttatttcttcatagcggaaaatttaaacaaaataagctgaggagttttgacgaaaaaaagaaaagatagaaaaatctttgtgaaaaaatgtaatgaaaaagctgaaattatttttttcacaacttcaattaataaattttataagcaaaacaaaattaaaaaaaataataataaaataaaaattataaataaaaatacaacaaacaatg

SEQ ID NO: 110701 - DNA, 470 bp, Heterodera glycines
aaaaatgaattcaaattttgaaatgcttttattttaaattacaaatttggttaatcgttcaggtctcgtggtacggtcaattcgaacgctcggattagcggccctttacccggtttacaatctttggacctcaaccgggacgaaacgtcatatgagtttttttattaaggcaggcatatttaattcgttttttaattacattgtttcttattttgatgtgataattatgagtcatttttcaggttaacagtctattgcagaaggctttggtgggaatggcaaatataaaaactggcaagtgtctgggttgggcgagaaataatttttaatttcaaattaagctgggaccatcgcgcaaatcgtggcccttcagaacaagctctacgacgaccataccaacaaaatgcgtgacagccaagccaaattcgacgccctaatggaagagccgcgcctagttcacggcactaatg

SEQ ID NO: 110702 - DNA, 1003 bp, Heterodera glycines
tttaatttaggaaaaatttacaaaaaattatttttaagaaaaaaaattattaataaaaaaattttttactttatttaatttgtaagtcagtgctaatgagtaaataaatgcaccccttttttcttttcaaagaatttggtcaaattacaaaaaaaactcgtatgaaaataagttatgccctaacttgtattatttattatattattttccaaagttgtgggttttacgaaacggcctgggcaaccccatttttctatgcgaatgaattgtcagaaaattgaaaaatgtaaaaaacttttattacatgcactttttgttttaaattttatcaaaattcaaatctttctaagattaaattttagattattttcattcttcaaaacaacgaaacatttacctaaaacggaacaaatttaatataaaaaaattttccataaattatttttccaacaattaaaaatatttaaatgattttaataatttaaatgattaatagatgggttttttgcgaatgtttccattttttaaaatttcatttcacctatgagtcagaaatttatttgaatatgtaaaattatttttgacaattttatttacatatttttgaatttattataatacaaattttccatcaaataattaaaaactttaaataaaataaaaattgattaccttttttaatatctgtgatttaatcactcgcatttaatttgatggggttccgtgtgtttcatcgagcagaaaataataatgacaaatgttgcgtttgggattttggcgcgtgacgggccaatgccacacaaacaaaagcataaataaaagatgtaaaatgtgattgatatatacccaaattggtcaaaagaaataaagtgggcattttagccatttgaccgatggattttcatacaaaatcaaacatccagcatttattcttggcacaatttttttcgcttggattggtcacttattgttgctgccgtacgaagatttatgtggcaaaatg

SEQ ID NO: 110703 - DNA, 674 bp, Heterodera glycines
ttgaaaaacgcacggcatttttttttgtccaaccgaaggaagaggaaagtgttgcaaaagtgttcttcgccacgagcagatgtgagcccaccggtccaaattgcgttggcaaccaagcgcttcgttgcagcacgttcggatcactgaaaatgggcaacaaaatgggggaaatggtgaaaaaatgtctaatttcccaaacccaaaggcacacgccccgggggggtgtacggtatcgcatgacaaatgctttccgtattactgtaatctttatgaggtcagcactccgacaatttttgagggtcttggtataccctggcataaattcgtggttttaagaaggtgaaaaagccgcggtctttggtcaaaggtcgagactccgattcgagactgaaaaattcgatttcagcgcctaaaattacccgaaaaatattttgaggggatctcacaaaagggataagtaccgtttttcttttcccatttggctgtttttcttctcacattttgtttgttttttccgttcgccgtcgtcgtccctttcccttcgccggtgccttttcacttcgtccaccaaattttgttaaaaaagttgtcttccttttttgttctaccaatctccctctaccattgaattgcagcactgaaatgtttttattaattatgaaattctgcagatg

SEQ ID NO: 110704 - DNA, 642 bp, Heterodera glycines
  unsure (1)..(642): unsure at all n locations
attttatgactaaaatgaatgaaatttgaatatatcgggcataaattagtatagacnggnaatttgaaatgnccgggacttgaaaaatggacccgggcgagatctcgggactgcccggcaaaatcccggcgggccccggtcccgtccggtctctaataattagtattaaataaaaattgaaaataaaaaaatacattaatatcaattattattaatttcaaatttcacaaattaacaatccaatcaaacaattatttcagctcaaaataaaattaaatttttaaattttaaattaattttatattggattaaaatatttaaatttgatagtcgcaaaaactttccaattgattacaattaatttattttttgaactcaaaattaggagaaaaataacataaatttttttaaatttttattttattatttttaattgcattttcattttaattgtaaatatttaatcaaaataaataaatataaatttatttaccaaccaaataagttctgtttagggttcggcttagtcagtgaacattgtccagctcatacagtaggctgccgaattcgaattcaagtaaaaaatgggaaattttggagaaattaaaaaaatatattttttttttgccctgcagcgaaatg

SEQ ID NO: 110705 - DNA, 256 bp, Heterodera glycines
ttcttgtcaacaattggctgaggacaaggccattgagcgttcgtcatattccaatgttttggcagtcaatcggaaaccatttcagaagaaaagggaaggctcctcaagcagttcttcagtcaagagtgcttcttcgtatggaaatttggcacaacgcggatgctggcgttgcggagtaagccattttccgaagaaatgcaaccatctgaagacgacatgccgaaaatgcaacaagattggccacttggaacgcatg

SEQ ID NO: 110706 - DNA, 213 bp, Heterodera glycines
aagaaagatgcggaagaaaaggctaacagagaagcagaggagaagagagacgctgaagaaagggcgaagagagaggaagaggaaaaggaagcggcagtagaaacaaaaagagacgcagaagcaacggaaaaaatacacagtgaaaaagaaaaaaagggaaaaagagaagggaatgtctcaatcgatgtggagggcgcaaagaagaaaattatg

SEQ ID NO: 110707 - DNA, 1003 bp, Heterodera glycines
ggggtccgcggcagtggaaagagggggtccgcgccgacggacgacggaatggtggggaggggtccgtgccttttgcgagagaggctcggcggcaacggggggggggggagacgtgattgagaagatttataacacaccaatgtacattaaggtggtagtaaaggaaattactgagattgaaattgaaattaggactagggagggaaggcttattccattccaatggggtacaacattacttgtattagcatttaaaaaatctattgtattttagtatttaaatattcattttcacatatagtatatattaataattgaataaatatggtgcatcaaatatttgatccaaactcagttagttttgatgattttgttgtagtagagcagattggctcgggagaagcctttaattattttcgcgggatacctccataccaacgaggatatggaagacagcgaggtggaggagtaggagatgtgttgaggtttttatggagagcacttttaccaaaattaaaatcggctggtacattattaggtagagaggcattagacactggaacacgtgtattggatacaatagagaaagctgaaacaccaaacaaacaagcaataattaatgaagtaaagaagggaatggataatgtactcgaaaaaggtggggttgggcgtcaattcggaacgggaagaaaaaagagtattaaaaggaaaagaattattggaaaaactataccaaagacagtaataaagaagagaaaaagatcagacgtatttggaaaattattttaaaatggtcttcaagaaaattgacaaggaatcggtaaattctataacttcagctttgtcaatatttacccttccaccaactaatgtgtcagtgagtagttcttcagtgcgggaatatttaccgctcaatcctttaacggacattccttttcattttaaaattcaccctaccgctagtttctttgatttgaacaaatgttacatcttaaccgaaatg

SEQ ID NO: 110708 - DNA, 286 bp, Heterodera glycines
agtgttgttaacccacatgcagccgctcttcaagaaggcaagcgattttcaattaatttgcggcgcgctttaacaaaaacggggaattggggactgctgaacaggctggtggcttagctgccgccatgggaagggaaaatcggaatcttttggccatattttgaataaactactaatttttggttagataattggtcttgaatgaagcgatgaaattaggccctatggggaaagatttggaaatttaccgaaatcgttaagataattagtacattttcaggaaatg

SEQ ID NO: 110709 - DNA, 686 bp, Heterodera glycines
ttaaacagcgctaatatccccccccccgttcaattagcagtggttgacctcgtccaatgtatcccaagcaatcattcaattccggactgctcgacagcttcgtcttccgttccgttttcactctccacaaatagggctgctcaatgagtgaaaatgtaaataaatatttgctctccgtttttcggtcgtctcgcgcatcccccgggggtgggcggcccattaaagcaatttggggattttttgagcggggcggggagcgccttccgggcacattttgcttggaagagaccgccccaaatggtcactcatcagtcagttgttatttaattgctcctcctcaaaatgcttccactttctcactgtttctcccaattaatttttgtgaaattttttaattttaaagatttagcaaagaatttatgtttctgaaatggtttttcattttctattttgggtgaaatgtttttcgagtcaatggcaactcatacaatgaaaaagcctaaaacttaggcatagcctagcctaaagcttcggcctaagcacaagcatatagcttaggtctggcttaagccttgcacgagttttctgacaccgtttttcttccattttcaaataaaatattatctttgattatttaagaattttcggtcatttgccgtacaatgtgccaaaaattcgtcgcaatg

SEQ ID NO: 110710 - DNA, 198 bp, Heterodera glycines
ggtacacatttcgtacaaattctctaaaattaatttcaaagggccgctgtgatgcacgacattttggatatgatgcccgagggcataaaacagaataaagcgcgagtcatcttgcaacatctcagcgaggcgtggcggtgttggaaggcgaacattccttggaaagtgcccggtctcccaactccggtcgaaaacatg

SEQ ID NO: 110711 - DNA, 709 bp, Heterodera glycines
cgccaaaagaacaaatacaaatagtaaaaggtacacactatattttacccttgattttattaaatttttttagcttataactttgtcaataatagaccaaataaaaccattttatgctcattttgaagggaaaattctgaagaatatttctaatttagtcaaaagtttaaaaaattgtttattggcaaataaatgattcatgtgttattttatatgttagagacatggaaatagtacgcccaaatgagagaaaaagaaaaaactttgtcctgggaaaaaaatgtttcctgtgggtacttttcttgaaattttgcataggccaatattttgaccccctccatcgaatccctgtttattttttcgaagttatgtttttaactcgagatcggctcttctaattttacaagggaaaatcccaaaaaaattttaagttttgcaaagttttggcgttctgattattaaataaaaatccagcataattgtacttggagcccaaaattgggccgctgtgtttagtgacaaaaccccaaaatagtgatttatagtgacgaaaagtgacgtccaaatgaaaaaattttaatgcagaaatgcgttttttgagctcctttcttcaaaacaattgagcaaaaaaaaaagttttttcactaaaagttgcggccctagtacctaattattgttcgagaatgtattttatctaatttaggtaatg

SEQ ID NO: 110712 - DNA, 735 bp, Heterodera glycines
ttatatatttatctaataaataaatgctgtttaatgtggatatagttattacatttttagagttgtcattaattgataaattatttatatatattcttttttgtgaaaaaattcaaaaaaatttcgcaaaaatttcaataagttttcaaaagttcaaaaacaggtaataaaaaatatatgaaaaagttgtgaaatttgcattttattttgggcatttcatgcctaatttatggtttcaatgaagatgctttatattaatcctttgtattttattggcttatctgcagaatttataaattttgttttcttgttgaggctcctttgattccattttccgtgttgagtttccatttatttagaactcacattcatttaatttattgcacttagtaagaaatttatcaacattcataatattaaattcttgtttatttaaataaaatttttatgttttttcaaaatttaaatgaatttacatgagtaataatattggtaattaattttttatgttcctttctcggtgcttcccttgtctgagtaccaaaaattattttctccgttgcatgttattaataattatattattcatgttttctaataattaaacttattttacatattttcgagttgcagtaatttatgacattttttattttatgaacaaaaataaataaatatttatgaattgcttgtgaaaagatattttatttctagatattgtattaagattgaatg

SEQ ID NO: 110713 - DNA, 231 bp, Heterodera glycines
acaaaattagcccaaaatctcaaaatttgggcattttttagtcaaaatctgctagcaaatggcactaaaaatacaaaattttccccggcggcgcctagcggcaccgccggctcccgcgttcgcgaaatttttttgagaagaccgcgccgcaaaaaaaagagattttaaaaagcaaaaaaaaaaaaaggtcgtcaaaaattttggaccccgtcataaggaaaatcgcatatg

SEQ ID NO: 110714 - DNA, 530 bp, Heterodera glycines
aaaatagatggatgacttttacattgtgctaccctagaacacgccggaaccagggaacagtacatcaaaattcacagtacgactccccgagattttggaattgggcacaaatttggtcagtagctctctcatcaattatttacccctactcattcaccttactcggtataaacggtcaagagtttattaaagtatgggaaaacgacagcagtgtcccgactcaagtttatttaccggacatgaattttaaaaccgccgggggcctgggaaataaaattaacgaggcattcagccatcattacaaaatcaaaaaacaacgtggaaggagagaagccaaggctgaagataccaaagactcaaaaattgatgtcgcaaagagggccgcagaacgcgccgggagagacgtagaaagacattttaatcagatcaacaatatctcgaattccatccaaacccaactaaacacactacgagaaacaaatcctcaaattttagaagagcctgatataaaaatttggtttgacaaaatg

SEQ ID NO: 110715 - DNA, 74 bp, Heterodera glycines
agtaaatcattaattcattctaatggaacattgtgccaatgttggcaatttgaagcgaaaccaatcgcagcatg

SEQ ID NO: 110716 - DNA, 67 bp, Heterodera glycines
tcattttttttgtcttttgaaataaattgtgaaaaatatacgaaaattattttagcttttaattatg

SEQ ID NO: 110717 - DNA, 1003 bp, Heterodera glycines
tttgcttttttaaaacattttcactgatttatgcgttaataataatccgatgcgaagcttctaaccaaaataatttttaggttttttatctgaaacgcaaaataaaacattggtaaaaaaccaaaaatactaatatatttatagaaataaattgaaaatgatgacaattaatttattgtaaattaaaaattaaaaagaaaaggtacttttcggttttgggcttacacctcaaaagccgattttaaccattattattcccatagcataaattaacggagcggtaaaggtcctccactcccaattttgcgcataaatttatgcccccaaaatagggcgcatattaaaatgccttcagcgcgccctttgttgacaatttttaaaattttgagctgtaggcccaaaaccgaaaagtaccaaagaaaatacctcttgtaaacaaaaaatttcggattttctaatattttaatttgtgaaattccttttcaaaagggcgttctgaatttttctgaaaaatcgcaaaattccatatttatggaaatacaatcctcccgattttctttattttaagctttatcccactaacattgtccaaccctgaagtgagtttttaatttccaaaaatttgcataaatttcccgggcttaaaaagaaaaatttaaaaaaatttcaaatttctgaaacgcacaggtgttttcaaacaattctccaacatagtaaaacatatacataattttgatcaaaaatgcttaaactatttacaatccaagttaatctccttaaacatcattagccctatgctcattttattcagcatcttttcggctacttttcaagttaaaattttcaaatatgcattatttgaattcatagctgtttccagcagaagtaatgaccgaccaattcattcaattaaataaaatatattttaatcaaaatatttatattatattgattttttttattatttagcattatatatttaattatttgatatggcaaaatg

SEQ ID NO: 110718 - DNA, 159 bp, Heterodera glycines
atcacgaaaatgcacgccatcatcaccaaatcgccgctctctccaattttcaccaccgacaaaggccgatcagttttggaaattttccgattcggggaaaatttcaacaaacacactgtttccaaagaggggaaaatgtgtaataatggctgcaaaatg

SEQ ID NO: 110719 - DNA, 681 bp, Heterodera glycines
ccccccatttgattattacccccaaattgttttatataatttttttcgaataagaaaaattttaaacctaaattttttatcaaaaaaatgaaattttggcaatcaatttttggcagaatttttaaattcttagggatgtattttctgaaaatttttagctcatttctaaggggtgtattttcccgattttattgcatttttaatggaatttttcgggaaaacgcaaaaaaaatgcaccaaaacggcaaaatgccaaaaaaggcatttaaggcacgaaaatcccgaaaaaggcaaaaaaagcatatgtaataaaagtcaacgtagaagcctaaaaccaagtgtaaactgcgttttaaaatcaataaaatcccgcagaatcccgcacaaaaagtcaaattagcggatcccgctgcgggactgggactcaaaattttttgcggtagcggatccggcgggattaatcccgcaaatcccgcattttccaaaaaatgcgggattgcggactgggatcccgcaaaatcccgcgcgggatccggtcccgcgccggtctctattaggaactagtgcacagaaaaaaagcctatgcctcaaaatgcggtctctaatcataactaaattgtgaaaatgtgcatgtaattcatgatcattttttattcaatgcttaattgattttgcttaatg

SEQ ID NO: 110720 - DNA, 193 bp, Heterodera glycines
aattgaaggaccaataatttatgctttgaattgtttggttagaatttcacagttttattttataaaaacagtgggacaagaagataaacataagttaaaaaaaatcttcaataatttgggaaaatttgaaccaaaattgttgaatgaggagagattaaattatgaatttaatttgaaagatgaataaaaaatg

SEQ ID NO: 110721 - DNA, 330 bp, Heterodera glycines
gtttacctaaaaatgttattcaaaacttggattttttaaagaaattgacaaaaacaaaatcttttaaaaagagacaacaaatatttaaagaggctactagtgagcaaattggattattaattgaaattagttataatatattaaaggggtacttcccgctcacgaagagacaaaaatatagacttttaccatacgcaaattttgtaagaaaattagcaagagttagaactgagatgggtgcaaagaaagtttttcaacaaaacggtggtggttttttcgttaatttgactcctttattattaccagtacttattgccgcgctaaaatatg

SEQ ID NO: 110722 - DNA, 711 bp, Heterodera glycines
gtttggaaagaacaaagattaaatcattccttttagcacccataaaatatagtttaatttttcatttctttacatttttattaaaaaaaaaatttataattataatttataaattggttatttgtaaatttacaattactttcatacagcttaatttagagtaattaaacttaaaaatttgacatttaaataatgtaaatcattttgaatctcttgtaaagtggcgtgaattaaaaagcaaatatggaaaagtgatttattattattatttaattattatttagtcaaagctcaatttcatctatttattatttatttttgaatttttaattaaatcaaaagaataaaaatttaagaacttttaaaactgttaataaattttcaaaaagcttttattagaaatttttggttttaattaaaaaaatttatttactcttcaaaaacagcgttatttaatgaggcaattgttttgtgtccttcacttttaatacttaattaatgatttcattttcatggttttagaatttatttttgataaaaattaatttatattatttgttaatttttactttatcaactttttcaataaaaatatcgtagcttatttttgaagtggataattgacagtatctttttggatgtttatttgtaattcaagtggaaaaatttgaagttttttcattttttaaacaggttttcaccaaaaaaatg

SEQ ID NO: 110723 - DNA, 128 bp, Heterodera glycines
ttttcggtttatttttctgcaaatgattttaattttagcaaagaaaaattttatttcatatatttatttttgtctgtttctgttgatgtacataaattaattcatttaatttgtatgtgaggcgaatg

SEQ ID NO: 110724 - DNA, 648 bp, Heterodera glycines
tccgacgacgcactaatttgcccaaatgaagacgaaacgaaaattggtgttttgtttttgccaaatttttggcattaattttttattttcttgcattcgcactccatgggaaatcaaatttcatccttggatctactttatttaattccgtcttgttgtctgtagtttttcttgcataaattgtagagtcatcgttttgtttggtcgtcttattagaatttgtttaattaaaattattcaaaggccctagctacatacttcgggaacctatttcgtatgtatatattatggccaaaataaatcgtttaggtttacaaagttactatgctaagcgaataaacaaaactcaaacattaaaaaaaagttgaaaggaacaatattcactttaggtatttacaattcaatgaatccttttgacaggtgaaagcgatagcttccaaaataaagaatattggccaaaaattaattatactctgaaattgtatgctggggaaggaaaagcccattgaagcagaatggccacgaacttttacctacccaaatagcatttaatgtttaattattttacttatttcttttttttttgcgcagcactttgtcattatttattgtgtgccactttttcgtcggctttagttttaaaaaatg

SEQ ID NO: 110725 - DNA, 232 bp, Heterodera glycines
atcattggacataaaaaacatttttaaatataagaatcattaaatgtgttattaagtgttgttagaaattttttatggtcatgagaagggctattgaccgttgtgatttatgggaatgaaaagtttgattgcgtaaaataattttatctaaaatctttgtgtcattttaatagtttttcgacggggtcatttttgttatgttagcataatatttttttcatttttgagaatg

SEQ ID NO: 110726 - DNA, 220 bp, Heterodera glycines
  unsure (1)..(220): unsure at all n locations
ttgtattatcacagtgaatcccgttaaaataatttatatgtgtgatttttgtttttgtgaaaaaggatttaattttgtataggatgagtgattggatttgggaaagtaattaatggaatatgattgaanattggtgggggattgaatggaantattttatattttagaggggaaattataataaaatggttgttaattattttatttttattttagcatg

SEQ ID NO: 110727 - DNA, 141 bp, Heterodera glycines
cgtttgttaatagcgttccattaatcaaaactatagggaataacaacaaatttcgcatcatttcatcaaataaattaaaatgtctctactttatggatggattttgattaaaaaacgttcaaaaggtccaaggaaaagatg

SEQ ID NO: 110728 - DNA, 1003 bp, Heterodera glycines
gatttgccgtttgactttcgcgcgccgcgccggattggatttggatcctgaacgattgctgcacacaaactccggagaaccaaaaaccgccgagaaggatcaggtccaagtgttgtgggcggtatttggggcgcccacaatttcggtataacaaaccgtgtgcgaaccacgggaaattggcttgttcagcccaagcacattgtcactgcgaattgttcaattgaacaatcgcccaagttggaattcaattgagcaattgttcaattgatcaattggccttcaaatctcacacccgggcttttatcattcgcacacggcaattttgttagtggcgacccgccgccgtagggccggagacacagcaatccgtaattattaaattgaaaagctgatcaacttggtaataatcccaaaacctattgtaccggtgtaccaataaacaacgcaaatttacaaatcatatttgtgtttacatttattattgttttgttttctgtcttccccacaaatcagttttgatttcaaaatcagggtacagtaattgggaaacaaacactaacccaaacaatcaatctgttcctttctattattctttcaaatcagttttgatctaaaattaatttattaagatttcatttttttttaaattgtacttaatttatttatttgaatttgaacttatttatttatttgacctttttggggggagtgttgattattcagttctgactaatcaattaaatatttcattcattctacagtaactccaccatacatataagacttcgccaaagccaattgagtaaaatttaaatttttaaattttatttgagcattcaattaatacacatacaatttgttatttaaccatataattttttaattcacactataaaccaaggggctcccgaattaccaatttgataaattttacgaataaaatcgtgactattcagtcaaattaaataaaatctgaataaaattttaaaggggactctcaatg

SEQ ID NO: 110729 - DNA, 270 bp, Heterodera glycines
agtgaacgatcaaaaattattgcaatctgtgttacatttttaataggtacaacgaattaattactttttctgtttgtataattattttataaagttccagtttttagcaaatatttttttaaaatacatattattattattttatttaatttaaaattattgtgatttactttgatcgcttgcactttttcttacttcgtctcagcacgaattaaatgacatgaaaaatttatatttaaagcataatatgggaagagacacaaaataatg

SEQ ID NO: 110730 - DNA, 118 bp, Heterodera glycines
taatatttctcttagcgattattaaattttacaataaagttttgttatttatatttttccatttcgttgctgtgtgatttgtgggtatttatgtgtctaatgaatgcttttaatgatg

SEQ ID NO: 110731 - DNA, 1003 bp, Heterodera glycines
acactccatctattaggaccgaacggtgtggcacaaattttctgcttcatctttccttacatggcccttaaatggcaaagcgcacataatccgggggcgaaaggactcaaccgagtgccattgatatagttgggatcggggttcgggactggcatcaggccgcgataagatagcgggattaaaatcctgggtttgtcgggatttgaatcccaagaccgaaattcattcaaatccccgttttgtcgggatctcgatcccccccccccccccgccctttttcaaaaaagcctgaatcgtggtcccgggaaatcctagcggggtcccgatccctcccaggctctagtctcgaatttcggggggtcaatctcggtctgagtctcgatgtctagtctcaaattatctatgcccaattttctgggcctcaaaggggctggccaacagcagcagccctcttcaaattgtggttccaaatcttagcattcggagataaaagaaaatatttaaaaatgggataatgcatttttaagagcgatggatagattttggggttagatattaatcctttaattaagaaatttttataattaagttataataaaaaaagttatttagcattaaaaatagcaaagcgtacaagtctaaaataaaagttaaggtttttaacaaatacaaaaaagttataaaaaacttgttaatatttctaactagaaaatttttttttaaaaagattcgatcgcttgctggcggcggcggtggtcgctccatttcgacagagtcacgaaatgaggaagatgaagctgcttccgagccggacattgtgcaggacagactgatcgacttcatgcggcacaaaaaggacagcacaacaacaccaacaggaggacggcggcggtagcaggggaagggtactgtagcttgggatgggtttttgtaacaataatatactgtagctagttggcatacagtaagcggtgggccttttggaaaaagttgctactggatg

SEQ ID NO: 110732 - DNA, 185 bp, Heterodera glycines
ataataattcaaagtaaataaaattctaattcttaagaaaataatagataattacatgttctattttaaaatcaaaaataatagaatgtaatttattaattaatatgtaaaaaatgagaatcgacaagctcaaagaaattcaattgaagaaaatttgaattttttagttgtattttaacttaatg

SEQ ID NO: 110733 - DNA, 394 bp, Heterodera glycines
aacttaagtccgcgatttgcgagaaagcaaatagcaattatcagggatgccaaaaatatgcaaatgcattttttcccctggattctacgtagtctaattagtaggaaaaacatcttcttttatatatttgcgtataaaagtcgggacttttatttgcatattttggctttttctgcaaatttcatgcatattttgtttttttgtgcatgtttggtgcatattttgcgatttttgtgcatatttgttgcatatttcacgattttatttgcatatttatacgcgtatattggctatttttcgtgcatatccctggcaattatgtaaaaattataaaacaaaaaattttcaatattaaactaatattttttaaaaattatttctcagtgacgaaatg

SEQ ID NO: 110734 - DNA, 388 bp, Heterodera glycines
cgtgagttcgtttcgccgtccgtcctccgcgactgtgccaaccttcgccaaattgagtcggacggactgttccctgaaggcatgcaaaaggggaggggggagggcattggatttaaaaatcttatccaaatttaaagtaaattcatcccctttcccccaattgttttcctcattttttaaaaactcgttcgaattttagtttttaaaactattcgattttaaaatttaaaggggaaaagatctaaaattgcagaaaatggaagaaaaacaaataaaaaagctaaattttgaaaaaaaaaaccatttaaaatattttaaatcgtttaatgaagaaccaaaagtaaaactttttaaactccgttgcccaaagtgaaattgaaatactatg

SEQ ID NO: 110735 - DNA, 55 bp, Heterodera glycines
attagtgaccattgacccgtctccgtacggcggtgggggcggtggcggcggcatg

SEQ ID NO: 110736 - DNA, 614 bp, Heterodera glycines
  unsure (1)..(614): unsure at all n locations
tgttctatcatcatctcagtggctaataaaaagtgctgctcatatatggttactcatttcgaaaaaagggtgcaacatttnnaacatattgacaaaattatgatgttcaaatcaatgaaagaatcaatgatttttcaaatctgatatcatattcgtgatcgaaaccccgaaacccccgggttggtctttccaaacagaaaaaaacaatttttttgggtggagcccagattctccagtattataatattgtacattatattacatatgtacataataatactaaattttttaaagtatttaaaatggaaaattggtattctaaagaatttatttcatcctcacaaaccgcagcgagactcgtctttaacattaataattggtgagtgagtttgtggtttttcattacatgatcgagagggaagcttgtcaaaattttttgattttacataatataatttttaaaataaattaaattggcttaatgtatgttgcgccacatcaaatttcaaacaaaaatatttatttgcttaagtgttgacctcagcaaagtgctccaattacgaccaaatcgcccgcctgatgccaaagggagagagtcttttgtgtatataatg

SEQ ID NO: 110737 - DNA, 586 bp, Heterodera glycines
acaggagagattgtgcccccaaaaaatgaccatggaaaagtattagctcctacagaaagttacagtaacaaattatcaggtttctaactgacaatcataattattttttacattaattcagcattatgtaaataaggctgagaattttagtcacgaaaaatcaaataaaagttgactaaaattcaaaaaaaaaaatagcaaagtaataaaatccatattttaaactattttgaatagatttataaaaatattaattttgatttgcaaaatctgataaaattgggcgattgttcaatttcgggatcttctcaacaattgtgaaaagtttctgccggatttcaattctcctttttcttttaagtcgctttaaggccatttcgagtcagcaaaaaaaccaattgacttcaattctcatccaaagtaataaaaaagaataaatgtattttttaacgtttaattaataaattatctctcgcaacatttttaaaaatttaaacaaaaagcatttcaagaactttgcaacaattcgtttctttggcaagaatataaaaatttcattttaaatgattttgatgaagaaaatatg

SEQ ID NO: 110738 - DNA, 355 bp, Heterodera glycines
ttctgtaaaggttgagagtttgaactcgaataaaaaactaaaccgaaaagatttggtgactgtgatgaatgcgtatgtattaaacaagtaaaatttaggcagtaattgtccgacttttagagagcaaaaattggagagaagtactgaaatagttttcgttttatacccctaaaacattcaacgcgagtgacactaccacacatttacaaatgcgtagataggtatataaataaggcacatacgcctcgataacatttattttttcgacatttataactaaactgttccctaacccaatgtgtataacacttttaacttttatacaatttcagactttgatttgcacaaaacaatg

SEQ ID NO: 110739 - DNA, 1003 bp, Heterodera glycines
attatttcaattccccgatttttccagcatttcctccaattcccattatttccttttttcagttcagctatttttgctcctgaaaatcttacggtttcatcgaattgaaaaaaacctgacaaaaatcgttttcatgaataaatttttcgggtttgatggaatgcttcctgtttgtaactattaaaacttggttttaacgaattttggaaaataaaattattgtaggttggtgcaacgaatatattgtatacaaataaactacatacacctcaattatgtttaaccgaacgacttttgttcacccagcatataagtagcaccagaaggatgacattcaaactcttttttggactcattgttttatggattaacgtgaaaatttaggtccaatcggtgaaattttagagatttttgaattttttcatttcagggatgctttctaagttacctaagtttcatactttttagctgtttaaatattcttgatcaaaaagtgtgaaaaaataaagaaaactcagattttctaaatcaaaaatttttattttaaattattcaaaaaacttaaaatggcataaaaagcattccttaataggaaatagtttaaattttgtgaaaatttcgccgattttacctagattttcacgtcttaaccaaacaaaggagtccgaataaaaaaaaacgaggtagaaaaataaaaaggagttgaatcaaatattcgataaaacgaattgagcaaaaacgaattgaccagaaaatgaaattatcgaatctccttaattcaccaatgtttgacactctccggattacagatgttcaacgttgtcgggcaattgaccagagaaaatattgcgaaaatgtcacttaatcacttaccggattcagaaaaatttaaataattctcaagaaaactacagtaagcataaatggaatcggagcaatatccatatgtaatatagctttaaccctattgcgctaaagatttgctcctgagatagtctaaatg

SEQ ID NO: 110740 - DNA, 488 bp, Heterodera glycines
cccccctcttaaaaaaaattcaaaatagaagctttttccacataaaatgggtataattggatcgaaagtgagcccaaatgccccccccccgtctcattatgcacttgtccatgccccgcgggtcggccattttggcggggacggacggacgccccgcagtcggtcgtctcaaaattgctcactttcgccgccccccccccccaactatgcttcatcttcggctgctttttctgccctttccgtccaattcgtccagctgtgatgggatgggaaagggagggacacggcgacaattaccggaaaaatacttgcgcaaaaggaaaagtgaaaaaacgaaaagcgtaaccgaacgaagggcaaagtcagccgaacagaagaagaagcagtacggaagcccacctgattgcttcttaaataggctgtcctgctgcaaaagctgctcatttttcacattttcaaaaacccttaaaaaatttttcgctaaaatg

SEQ ID NO: 110741 - DNA, 475 bp, Heterodera glycines
tttctacggtgaccgccccactaataacgcaacaaaacctgaatggtttttcacccaactttcctactgggcagagatcaacatcgaatacttcgagcagtacattcagcccattgctgatgaggtcaagtcgttatcttcttttcatttggcttaaaattgccaattcgtttttaaaaaaatggcactttctcttcttttttatatccctcggatttcagctgttttctcacggaatatctgaacgaacagcaagagatattttcctgcaacttttgatgtctttggcctctcaaaaagtgtcagaaattattggctccgatcggattttggagaatcgacatcaattgtcacatttgatagacgagacggtcatgtttgagaaggaattccagcagaactttggctattccgaggaggcgccagtgcatgtcgtttcacaactgtgccaatcggaggaagtgctggagaaatg

SEQ ID NO: 110742 - DNA, 1003 bp, Heterodera glycines
  unsure (1)..(1003): unsure at all n locations
aatattatttatacaattcgccaaaagaaatgtttattttcaccatnacctttgtcggtggctggacatttcgacaatgaccgtttcgccaatgaccgtttcgacaatgaccatttacgactatatcatatcgccaaaatttaaaatatcaaattaaatataataaaatgaatataaaaaataataaattaattaaaaaaaatattgatgaaatttaaagagaaaaatttaattaggtagttatattttttaaatttaatgaatgcattatctatcgcctattgtgtatgattattaatagttaggagtcggatttttaggttttacctatttctagattttttcaatttttaacacctattttcgcacctattttggccttttttggggtttttagcacctaaaaatccgagccctattaatagtgaagaaagaagacaaaatgagacggacctataatataaatccaaaatgaaaccatttatttaacttaatgtagtgtcctctttttacccaggcggcaatcctgaagaatggttgtccctaattttcatttttttttaattttgtgctcaaaaccagtttttaggcgtttttgagggtgctgataacggatcttaactcgggtttgcccaattccgaactccagacccgaattcgaacaaaaaaaaattgtttttttaatcaagaatagttttttcagggtaaaagcttctaattcattatcaactatttaggtgtaaaacaatgtttcaatttttaattaaaaaaaaataagcaatttgcgccgaaaattgacaaactaaagccattctcataatgctattttgaaaaaaaacgaaaaaaaaacttttttatattgatcccaaatccgcaccgtccatataattttgcagaaatttgaattttatttaaaaaaatatatttaattttattgtcgaaacggcattgtcgaaaaggtattgtcgaaacggtcattggcgaaacggtcattgtcgaaatg

SEQ ID NO: 110743 - DNA, 1003 bp, Heterodera glycines
aaattgttggtttcgactctcagtctcgaccaacaaaggaaggattagcacaataataggggtactctgctacctgcccaacccagcacagtggtggcaaaataatttaaattgattttgtcattagtgttctaaatcggagtggctctggataacttttccggtccgtaatcacggattttggatgtattttctgctttgctggttttcaaaaatcccagagtccaatttttcttgaaaaaataaaatttcatattgaaaatacaaattttactatcactggtaacaaaaatttaaatgtcattggtagctctaagtgtttttgttggtctacataattaaaaaaattaaatcgataataaagttgtaaccaaattagtttttaatagtttcaattttgggtcgtcttttttattttttatttccattcaaagctttcgaatgatattaataaataaattgaattttttcttgggaaatgcttatttttctcctttatttgttaattgtattacgtcaatgatcgttcagccgagtttcttagatttgcatgggaatagaaaaacaaaaatacatttttatttaaaataaaaaatttagcaaatatttgaatttaataaatttgtgtttgaagctttagttttttaattgatacaaatttttgaaatttttaaggaaaaattttttcatgaaatgtttacagtgactaaattatcattcaccaaatcattcatgatctaacgagaaatcttctatattagctgtaatatttaatttttttttgcaaagttaaaaaaaattataacaagaaattatttttttatttcagttattttattattaaattagaaaacttacgcttttgagcaaatacaaaaaattgaaattgttttatttttgccgaaaatgtaattttattttttcattttcttccacttggcgcatttaagaatttttaagttaaattaaaaaaatttaaattttataattaatcagcgctatg

SEQ ID NO: 110744 - DNA, 1003 bp, Heterodera glycines
ttttatatcaatctttgacgccttataatttatctttttagttattttattttattctttataatttacattttgcatttaattcatcgttttaatgagagctaaaaaacactgaatagttagttaccttacattatgaaacactaagttataacattacgagctcagctattttttttgtaaagcttattcgcaaaaatctgacgaaatctcttcagtgttttaagttgattttaaattgagcaattatccaaattaatgttcccctctttagtttcaatcattgcacaattttaatgtaattcattttcagtgtattcccatccatttattcatttttattttatttgtatatcattttatcatcgtttacttaattgttttatttgttgattgtttgtttgtcttgtttgtttggttgtttgtctgtttgtttgttgcttgtttgttttgtacacaacacttggtcggagtctttactccccagtgtttttaatttcgtattcttatattgcttaaaaattgtatttgtttgtttagttgttttgtaaacaacacttggtcggagtccttactccccagtgttttgtgtttcaataaattttttaaaaaaattatttctcatatttttatcactacaaatataacttgtcgataggtagataggtcttgcacaaaagggccacctcatcgcggtgtgcaagtctagtatccaacaacacaacgaaaaggtttttgttgtgtgttgcttttgttggagaagctaacggcccatagttatgagaaaagataaatatgatttgattgatacatttttttaaatttttatttactttaacaaaatccttaaccttatttttttatatacacaattgtatttttatattttaaggagcatccatcatacgctgctatacatttattgttttttgaaagaatacataatgtgtgtacttacattctatcaataatcctaatagattaaataaaagataaagtaatg

SEQ ID NO: 110745 - DNA, 63 bp, Heterodera glycines
ttaatcggcaataataacatgtccagatctggagacccggatacctgtcttttgcaagacatg

SEQ ID NO: 110746 - DNA, 339 bp, Heterodera glycines
gtccgtgggatttccgaatgaaactttgtgggtgcatagagcacccatgggttcttaagaaaaatggtttcaatttctgccaaataagtacgagtgccgagttatgacgtgccaaactttttttatcccaataaattgaataatctattgcactgttttgtgctgtttagtggtgcagaggttgtgctctcgcctttactttttccccccacaagttcgaatccctcttaagtaaattaattttttttaattttgcccttgaatacccttttagaaatgtaattattttcatttataatatgcatttatatttttttaatttatttttgaacgaaaatg

SEQ ID NO: 110747 - DNA, 146 bp, Heterodera glycines
ttgaatttgtttgcagaaagcaaaattgttattatcttatctcaaatcatcacgagtaaaaaaaccattaaacggcttgtaaaattacgaataatatatattaacaataattaggccttaaaattattaatgtccaattaaaaatg

SEQ ID NO: 110748 - DNA, 1003 bp, Heterodera glycines
gaataattgtttgtctattgccattatctcataattttgcaacagaaaaacttctgtagacttcaagctctcgaatgataccaagaatgtttgtattgaccaagtaataaaaaaaggtatgacctataaaagtgaggatagtcactgattggacgtgtaaattggaatagagccaaaaaatcaacaatttataaaattataaacagaaaaacttagtggactttgatttgggcaaacactttatttttcctaccatcagttttccatattatttcaaaaaaaaaacaattttttttaatgggaaaggtctgccgaagaagttttgcgctatataaattaaaaatttttttattatttaatataattttttaatttaattataaccaaaaggcattatcataccagcagattatcagtttgtaaatttacataattaattatttaaataaaatttctaactataattgtctacattcttttttcccaaaggcgttttacttttttaatttaaataaaattttgttattagcaactatttctagttttttattttagcaactaaaaaactataaaatttttgaaaaaaactattttcaactatttttacttgtgaataaaaatttgttatgaaaaatgcaataaaaagcgaaaaatacacccccctaagaatcgacccgaaatttttcaaaaatgcaccctaacaaatgaaaaatcaatctccaatatttatttatttattaattatttcttgacaagaatttatgattttaaaaatatttagctcaatactgatttggcctaattttttttactttttgaataaattttgtcattttacatccctaaatttgaatgtttttagcaactatttacccatttttagcaactacttttttgggtcttttagaaactaaaaactaactattttgcagttttttgcaactagaaatataagccctagtaataacatgcactggcgaaataagtattcttaaaaattatg

SEQ ID NO: 110749 - DNA, 515 bp, Heterodera glycines
atcattgttaataaaaattaactatccttacgaaaaaataatacaagctaaataacaattttttataaattccctgtatagatattaattagaaataataacttcattgaaaaaataaatttatttaaattatatagctcaataaaaaagcaaattttaatatattattttaattctacacaaaaagatttctgaattatattgaacttttttaatttgaaaaaagagaaaaaaagcaaatatttataaattaaaataaaaaacacaataataatattgttattttgcgccaacaaatggctaattattaaataaaatctgcattcaaatttaaatttgcttattaaaccattcatttttatataaattaaaaattatatgctgttttttaccgatttgtcgttgttgacaaaatagggaaatgttggggggggggatcaggcggtgccgatatacaccgccgggaaaaatattgaaaaattgtgtgtcctttgttaacagttattcaaaaaatg

SEQ ID NO: 110750 - DNA, 333 bp, Heterodera glycines
  unsure (1)..(333): unsure at all n locations
tgcaggtcgcacacnntcctatggtccntttgagaaccaaaagaaaactgatcactcactgatcagaccatttttaatgcttgcagtattgttatacatttgaataatttactctacagcacaatagctgtattgctgctgtattcaattacagttttaagttgatcaaataaagatcaaaattataaaggatttatttatgtactgtacataaatcttttttagtgattaaataaaaacaaaaatcaaatttaaattaatttttaattaaaaaactttttggattaacttaatagctaaattaagaattaaatgaacaaaatttaaaaaatg

SEQ ID NO: 110751 - DNA, 221 bp, Heterodera glycines
gttcaccatctttcgggtctcagcgcatacgctctgtctccgccccatcgcatgcgatcgagacgggactatgttgcgccccaacaccgcagtgccagggatcacacatcagctccgtaagaagccttcactttcattgcgcctttgggttttgaacacccaatgacttgcgcatacgctaaactccttgggtccgtgtttcaagacgggtcgaacagatg

SEQ ID NO: 110752 - DNA, 442 bp, Heterodera glycines
ctcgtttttcctcttaagcttttttctttgacttccaaatccaacaatcttggtatcattcgaaagctcttaacatgctctattagccttatcaaaaacgaaaagtttttcaagcctgtaaaaattttattaagaaaaaacttcaaaaattttgacttttcgcaattttcatgcataactgttttgataattgtctaatcgcaaagcaatagcttagaaaaagcttctaaatagattaagctttcgaacgacaccaacaatgttgaatttggtttacaaagaaaaaagttatagccaaaaagatgctggcgccgaaacgggagcgccgaaacgcagtggacccttaattacatcaacataacattatgccatcaacgtaatatcaacgctatttttaaaattggtatcattttttgaaaattaaaacaatttttaaaaaatg

SEQ ID NO: 110753 - DNA, 144 bp, Heterodera glycines
gaaaattcctataagaaagttgtgcccacagaagcaatgagccaacttatttagtaggctagagtctcgctcgttatcggaataaaccagacaaatcgctccacgaactaagaacggccatgcaccaccatccaccgaatcatg

SEQ ID NO: 110754 - DNA, 654 bp, Heterodera glycines
gaaatgcataaatgatggttgttcttgccagaacattgtcgacccggtcccgcacattctcgaccatgccattctgatcgagtccgactttacgatggacaccagccaatgggcgggatcagagccatgcgaatactgatcagatcaaccacacgcacgcactagtagcaccaccggcattcctttgatcgtttagtgatacgaaagtgacgggtaggagacatccgattggttttttggggagaaggggggcttaattcgatgaaagcggataattttacccgaaattaccaaaacagcgaaatcaaagcgcagtgagcgcgtaacccggtcttatcatccttatcagtctgtcttatcatttttatcatctctttttttgcccatttgtcttgccttagcttttttgtgcaacccttctcttctcttcccttcctctctttctctgttcctccaattttgtttattatttgtttgttttttcatttttttgtttatattaataattaatcgcattttacgggccaggacgtttgcgtaccgccgttttcgtacgagtggatatgcaaaaaaaaattgcattcaaataatttgttaattttttttaattacttttaatgttttgacagttaagcttttattaactacaaaatg

SEQ ID NO: 110755 - DNA, 67 bp, Heterodera glycines
ttaaattttttagaattttatctatgcaattaaaaaaacatttttaaatgcttttttgagccgaatg

SEQ ID NO: 110756 - DNA, 371 bp, Heterodera glycines
attaatgatgctcgggaaagaaaattaaatcggaaaagattcttggtccccgagaaactcgagacaggggattgtgctaaaactcgagaccagcaagggttggaccccccgagacttcggtttgatttctaagacccgagagtgagaccgacagtgagattcgagactacgattgaccccgtgaatccgagactaatatttgaccctgaggctcaagactaatgtttgtcctgagacccaagactaagacttgtcgagactaaggttggccctgagatttgagacctaaacctcacagccaacaaatctcatcacatgctttttcaaaaatgccttttcataaacattttatgtttggcagagactccatg

SEQ ID NO: 110757 - DNA, 246 bp, Heterodera glycines
ttcattttcggttattttcgccagtgcgatctctttccctttttgttgtttattttgcgatggatttaattgatttcattccccgtgttgttgaaatagggttttttaaatttaaatctgctaacagtgattttcctttttggtttctaaaagcattcttattttgcttgatttcattttttgccttaaatttcaaattcctttaagaaataaaccttttgggccttacattgttattttatcatg

SEQ ID NO: 110758 - DNA, 235 bp, Heterodera glycines
ggtgtggatttttgaaaatttttgtataatcgacggtgggttttggtgcaatttttaagtataatttgaaaaaaaatttatagtaacgtattcatatcaaaattaatttttgaaaatttgtataattgacgggggattttggtgcagtttaaagtattttaatttaaaaaatggtcagtaccgtattaacaccaaaaatttacaatatttcaggaattttgtttattgattaatg

SEQ ID NO: 110759 - DNA, 1003 bp, Heterodera glycines
cgtttaaactgttgcgacccttcgatccgccccctcccccaccgatggacgattttcttttccccgttttcattctattaatttttgcttcgctcatctcaactgacaataaatttgctccgtcaaattgtcaaacaaggggaaaaagtcggctttttctaatcctgaataaacatcagattcggggttccctttctaaattaaatcccggaagggaatcgtcttttagaaaagggcctaaaaactgtaagcaggaaattcccaaccctgggaccaagaacggtaccgtaagacacttggtacggtaaaagcgatttggatcgcttgtggtttccattcgccgattgctgtttagcacattatcccctcacatcaagcactagtgcttgaaatcctggttaatcatttgatcggtcctttgcccgatcagtctcgctccatcgtttggcatttttgtccactgtgttatttatttccaaaataattgttttctcccccttttgttgctctccattcttcactccgctgatcgccgcttggacctttctctgctgaccaattgatcacacttggaccgttcttcgttgaccaactgatcaccacttggacctctcttcgcctctgtccgagcatcaccaggtccggtgttcaccaatcgccgtctgtcaacaactgatcgctgcacacacaagtcgaggaccgattgacgccgttggatcaggtcaagcacagccaactggccaattagccggttatttaaccggctatccctcgcgtgtcaattagtcgattgtttaatcggctaacaatctggtctcaaactcctatctcccaacggcccattcattcacagttgcgcaggcaaccgccgcttaagtcccattccaagcggtttgcgttaccagggaagaattgaaaaattttttcatgaatatctcaaaaagtaaaatttaatttttgatgtgaaattaaatcaaatttttaatatcaactagcgcagatg

SEQ ID NO: 110760 - DNA, 1003 bp, Heterodera glycines
cccggtaaaacgggctttttttttgaccgggcggcccgggcccggctaattgtcgaagcccgggcccggtcccggcattttcaaaattccggtctctaatcgtgagtataaaataaaaacatgctgttttgcttgttggtattttttttagaccggattcgtatttaatacaaacaataaagagtagagcccggaattttgaaatggccgggaacgggaccgggacttggaaaaaatcccggcggcgccccggtcccgtccgggctctaataaagagtactaaaagccgttcattatgtacaaaagcaaaagtatactcgcactattcatttattagtgatcacaaaatattgtttaagactttaagatggactcgtcttcatttaaaagctgctcattctgcccaaatgaaaaactcgatctttataaatgcccacaatgttcatctttttattgttctcttcggtgttttcgatgtaaaaagcacataaaatgctcagaggatttttaccgcaaggaatgtgaaaagcataacgaagtaaagttaatttttaaaataatttgaccagcattctattttagttactttcaaatgacccttttgaattaaacccaacagatgacaaacaaaagaaaacgaaagtaatgacttttgaacagtatatggcgcagcaaaatcagaattctggtggcaaaaaagataagagtacggccaatcctcaaatagcagtcaggttggtattctcaacatatttttgtattaattatatgccaaaacattttttaatggtcatttatcatcgtacaacaaatggcacttcaaaatcttcctccctttattttaataaaattcggaaccctttgcaaagtagcgccgcttttcctagtttccttggagactcaaaaaaggatgcgcataaatgaaaatgcatagtcaaaattaagggcggatgaggaaatattattcgattccgacgacgaaccggaatatctctccaaaatg

SEQ ID NO: 110761 - DNA, 206 bp, Heterodera glycines
ttttgtgaaattgatgacgttgtggcacgttttaatgacctggcagaaaggttcattcaccggtttgcgacactcaacggcaccaggattttcttgaataccttgaaaacgcttggattggtcgtcagcgtcgcactccgtcatttcgctcgatttttggaattgcaaagacattactgaactccatctgccaaggacaacaaatg

SEQ ID NO: 110762 - DNA, 445 bp, Heterodera glycines
aaaaatattaatttttcgaaattaagtcaggcgttacttgaaaatcgaattgatttatcaataaactcagtgttcaccgttgaacagaaatataaagaatttttaaataaagttctgaaattatatgatatttttatacccaataggcctctaaaatcgataataaaacaatcgtatcctcaaaaaataagagacttattttcagagaaattacgtttgcataagcttgtaaaaaaattccctgaaaaaagtgatctcattttaaattacaaaattatttctagggaaatgaaaaaacaattgtacaaattaagaaatgaacaagagtcaaaaattatttcccaggagcaaaattcagttaacaaatttattcgaaataagttatcaaaagttaatgaaattcctacgttaattgataatgctggaaatatattttccagcaatg

SEQ ID NO: 110763 - DNA, 405 bp, Heterodera glycines
taatatatagggatgtgaaaaatatgtacaaaatgtggtcaaaatatgtacataaatatgtaaaaaaaaatcccaaaatatgtacaaaaaacccaaaatatgtaccaaatatgtaaataaaaaatttttaatggttattttttagaaaaaaaaattactctaaaggatgaaataggcacaaaatgccataaaaatcatgcaaatagccttaaatcatcttttaatattggaaaaattaatttttggttaatttttattttttcaacagaatttttaaatttcaaaaattctcaaaatatgtaaaaaaaatatgaaaatatttacgaaaaattgccgaaattttggactttttttcaggattttcaaaaatgtccgtaaaaaatcctcaaaatatgtaaaaaaatg

SEQ ID NO: 110764 - DNA, 196 bp, Heterodera glycines
aagcagggccatgtttatcgtcaaaagcttccatgagcagaacttggcaaatctttttgtcaagaagcattgggaagatttccggtgcgtttaattaattttagttggtacaaatgttagaaacaacttttagttacatgagaagccgggcatcgacactgtgaacacattgctgaagctgttcgaaggaatgatg

SEQ ID NO: 110765 - DNA, 93 bp, Heterodera glycines
ggtccatcacataaaaagagctaaattttaaataaaattaatttataaattttaaggcttcgaaaaccctcgcaaacgcaaaaagcgcaaatg

SEQ ID NO: 110766 - DNA, 891 bp, Heterodera glycines
ttttatgttttatacactttttcaaaagatatatataaaacatgaaaatgcattactttttctctctttttggcgtactattttcatgtctctaacacatggaaaaacataaattcgaaaattctaataattttggttataagggtacaaaatcgcttaggacatttagaattaatagagaaattaatagttttagcatttttggtgaaaacagcagtttaggacttgagttataacgtgataaaaatttgaaagtatcacaacttttttctgagatgtcaaattgcttagcattcacttagaaaaagattctccttttcaaaatctttttttagatatcaaatttgttcacttttgttgggaatgaagcgtgttatggctgatcaaaataaaaaatacaaaaaaggcatttaccagtgtaagtgcatatactttgtttttgcgtgtgttggcgttttgttttacgccaattattttttggcaatttttttcgttttttaccgtccatgtcttgtgcgtcattttgttttttaacattgcttcgaaaaaaatttcttttcaaaaattttaatagccaatatacaattgatcaaaacttacaagggaacattttgtaaattttcggcttttttttttgcaaaaatttcgaaaatcggcattccgacggctgaaaaaatattggaaattggcttccgaaatagcgtttagggattgacattttggtgtctacatatttaggcacctattgcgatttccataaaacgcattttgctttaatgatacttgtcgagttccacaaatttggtgcatttttcttaagaattccattttttcaaaaactaagtctctaaatttgtttgctcctctagttacatataaccatatcaaatg

SEQ ID NO: 110767 - DNA, 495 bp, Heterodera glycines
tttgaataaatgaataacccgcattctccgttgcgctatttgacaaatgctggggagccgaatcgtttgtccgacaatgaacaatggacttgttacaaggttaacaaattgtccaaaaaaaaagactcacacaatcacaaaaaaggacataaccataaacaatttggcaacttgaatgcaccatggctttctcagaagagtctaaattaaacattcttgatttcattcgatagctctaattgtaagaaattcttttatggtcctgtaaactgacaattattgcatacttccttaggctatggtagcgccagcaaatttccaccgagaaattttgagaattttagcggaatttgttttaccatggaaaattcctgctacgaatttgatcaaaaatgaacaaattgagaaaacaccaaattcctttttggtggaatttttattgtccttttagtgctttatcaacaatttcaatggccgtgccaactgcttcaaatg

SEQ ID NO: 110768 - DNA, 151 bp, Heterodera glycines
tgtgagtttgttttttgctgctatttataacgaaatttatgcgaccgaaaaattagaaaataataagccgaaaattgagtatataaggcggtcttttcaacgttaaggacacatttcataacggacggacggctgctagcaacgcgcgatg

SEQ ID NO: 110769 - DNA, 355 bp, Heterodera glycines
ttgttttgtgcaaatcaaagtctgaaattgtataaaagttaaaagtgttatacacattgggttagggaacagtttagttataaatgtcgaaaaaataaatgttatcgaggcgtatgtgccttatttatatacctatctacgcatttgtaaatgtgtggtagtgtcactcgcgttgaatgttttaggggtataaaacgaaaactatttcagtacttctctccaatttttgctctctaaaagtcggacaattactgcctaaattttacttgtttaatacatacgcattcatcacagtcaccaaatcttttcggtttagttttttattcgagttcaaactctcaacctttacagaatg

SEQ ID NO: 110770 - DNA, 128 bp, Heterodera glycines
ttgcgtcaagtccattatcaccttcctttaatattacacacataatttaataccccaaaattgctctacttgttcaaggtgggttctttttgaatagttgtaattccattgcatattcgatgaggatg

SEQ ID NO: 110771 - DNA, 108 bp, Heterodera glycines
cctgaaaaagggatttaaaatttatttattatgaattaaatgtatattcctaatttttaaattaaaatattatttttttcatttattttagcctattatttgcatatg

SEQ ID NO: 110772 - DNA, 382 bp, Heterodera glycines
taaatttaaaataaatatattcattttttattatgttacttaaagaataaattatatattaaaaaatgtttttttgttatgtttcattctcattttcaagaaatttggccttgttgttgctacaacatttaaaaaaatttcagattaaatctgttaaaaaagaaaaagaccttcaaagaaggataaaagatataaaagatgaagaataatataaaaaaaatgttgttataacgttgagtggtgtcaggaaaaaccgtctatacaaaaagggacgattatttattagcaaaaaaatataattaacaaataaacaaagatttctttctcaaattaaaaacttagtaaatggttttgtagaaaaaaaattaggtacgtttggatg

SEQ ID NO: 110773 - DNA, 313 bp, Heterodera glycines
ttgggaagacactttttggggcaaaatggaacaaatttgatgataatttttgttggttgatggcgttgtgtatgatcaccgctaattgataagcgggtggagagagcggcggccggcggagtatttaagcgcaacggcgagagcctggcgaggacgaaaaaggttaaagaacacttggagcatcgaatgattatcaagaagtaaaaaaatgattgcttttttagcattttctgttccaatgaaaaattcattaaaatttttcccttaacatttttcataaattatccaaaattttaaaagttaaaatacaatg

SEQ ID NO: 110774 - DNA, 155 bp, Heterodera glycines
cattctgctgatgattaataattgaaattgtttttataagaatttaatgcgttttccctcttttaaaagaccgctgatgacgaaagtccgttgttcgacgcggacgattctcttccacttcccgaatttccgcttccgttcatcggcgatggatg

SEQ ID NO: 110775 - DNA, 131 bp, Heterodera glycines
tttggtcaatgcttggccagcctttgcatttggcccttttgcatcaccaagggcaacaaatcattggaattgattgaattgatatcgtaaagaattgtcggcgcagtgtagcgaaacaaattttaaagatg

SEQ ID NO: 110776 - DNA, 531 bp, Heterodera glycines
gtgaatgttcactggtcacatacgtctctgccctatgagagagccgtaaatcattcactcgttttggtcaatttggtatcgatttgttttgtacatgctattccattccgatgctaagaaaatttcgaccatttctgttcccggaccctccaaaaaattgagacttcaaatttcattggtgactttcaattttttccatgtatttacataagccgtttgaaccaaaaatgtgttatttgaaaaattaaagtttctattttttttgttcaaattcggacctgggattgaattggcggatgaaattggtactgtattcgtgatcagcgatccctaaaacccttaaaaaaaatttccacatcttttataatttctaaaaatttaagggtggtttaccatcggcgtcattcttgcctttgtttttctaaaaatataatttaacaaggcttaatccaattttacatattgcacatttttttttctcttctgttgtattacatattaacaattcttctacacataacccttgaaatg

SEQ ID NO: 110777 - DNA, 134 bp, Heterodera glycines
tcataataataaaaaattttttatatatattttggtacatattggagctttttgtacatatttattacattttcggggtaaaatggaaacataaaagattttaatttcattagctaaaacagcaacagcgaatg

SEQ ID NO: 110778 - DNA, 206 bp, Heterodera glycines
ttcccggtctggattacgaagaaatttcaatggtattgtttttttggctgtcataatttttctaaattctttgatatttgttaattttttttccaaagtggttttaatatataagcttttgaaatttcattcagaaaataagccattttagaattttctgaaaattaatttttactaaacacataaatcttttcaggcacaccatg

SEQ ID NO: 110779 - DNA, 143 bp, Heterodera glycines
  unsure (1)..(143): unsure at all n locations
cgggggggggggacaatgacaaaaaaacnnccaagcttttataatcaaattccgatattttggtaattttaattttgttaaccgccattaaaattattagtctttttgccttttaattgacatttttgcccctcaaaaaaatg

SEQ ID NO: 110780 - DNA, 630 bp, Heterodera glycines
ttttgatgactattatttctaattctacgcatttctacggtagtgtttcgaaataaaaacattaaattttctcggaaaattcatgtaggcaaacaagttttacgctttatgatttgaaaattaatatgtgaaatattacgcgggcaatgtttggtgtcttaattaattattatgaaacataaatggctaattttgtagcagacattcctaattattaccacagccagacagcagatctttccaagagtccctcctttaaattttcataccaaaaaattctctttcgtcatgaaaatatttttcaaaatttgttaaaagattgttttggcgatgacgcagttgccattaacacaaacaatagtcaattatattttatagtgtcagtcacttattaacagacaatatttaactcaagagttttctctcaaattgcctttattcatttgaacacaaaaattttcattcgacaaaaaatgtaaattttgaggaattttaaaataaatctaaaaaaatatattaaattttcgcacattctcctaagtttaattaaaatgatatattaaaaaactttttaataaattttatcaatgattcagaaaactacaatattccaagggaaaatttaaaatg

SEQ ID NO: 110781 - DNA, 131 bp, Heterodera glycines
aaatgttttctctaatttgcatttttgaaattaaacagagaaactcatagtttatggagtctctctcaactctctgcggttaaacaaacattttcttttggaaaaaccaacaaaattaatgagcaaaaatg

SEQ ID NO: 110782 - DNA, 666 bp, Heterodera glycines
ttctcgatatgtaagccattttagaccaaaaataaaaaaactcgaaaatttagtttcgactttttgcttgaattcgggttcggggtccgacataggtcaaaattaatgtcagattcggtttctccgacccttaaaacccctaatatgatcttctcgaaaaatttttcttaaaattttgtttttcgaaaaaaggggggggggggaggtaccatccgtagcaatctgtacaaagtgatgagcaacagcaaaagcacagcgacggcaacaacaaccaaaaagattcaacatttgctcattttttattgaaaatatattttgtcggcatcaaacatcacacgccaaaagttcagccccaaaagagtgatgcgattgacaatggcacaatttcgccgttcggcaatggctcggcaccgcgacgaaagcctaaaaaatggccaaatttgcaaaattgtaatatgtaaagcatattttgtagagcgcgaatggacggacggattccggcggggatttttcggtaatagtagggtttgccccccccccttttttatttgtccctatttcgaatcccggacccgaattcgaacaaaagtcgaaaattcaaaattttgaaaattcacttttatgttcgtacctgtataaaataaccatttttttgcggttacaatg

SEQ ID NO: 110783 - DNA, 384 bp, Heterodera glycines
tgatctgtttctataatgttgcgtctaaacgttcactgataaaattataatgttcaatattcttgtgcagagaaactagtccttcacaccagcaatgaaaaatgctatcaaatttagaatgccagcctatgaacattatcactaactataggacggagacagtgttgtggactcggacgatactgtaggaaaattttatgatttttaaaatttgtattcaattttttaaaattctccccagcgcctaaccacagtacctccatttcaaaaaatgaaagattttaatgccaatttaaaaaatgtatagaaaatagaaacagtgacccaggatttcgtttgctgatcaatttttgggaaattttgagacataattcttttcttatg

SEQ ID NO: 110784 - DNA, 208 bp, Heterodera glycines
  unsure (1)..(208): unsure at all n locations
attttttaaatttattttccgtcaggagcaagagcataattctgtattcatgcagtattaccnaatttcanaaatagaggctttttgccttgnatctaataaatttacattaaaattttcaatcgataactcgttctgttttacatttttttgaatagtttttttttacatttttctctaactaagaaattctcaaacacaaattatg

SEQ ID NO: 110785 - DNA, 734 bp, Heterodera glycines
tcgcagcagcagctgattgcaatacttgaggaaaataaattactccaattttggatgagcgattggatggatgtgcggcggggaaagaaagggtctcaagttcgtaaaaaaattcggttgtctattaattcactccaagtttagttaattatattatattaatttattttttgtcatttcttcacagctaaatatatctgtacagcattgaaggctttaacccaaattactaattatctcattatgtataattattattttagttaaaacatccaatgactgttctattaatccggcacaaaagttaaacgagtccattaaaaatgtcggcttcgtcaaggtgcagcacaaatgcgagtgctggcgagccgtttttctatttttgtcggcctttccaacattgagtttcggcgacgagttacttaattcgtggaggagaagggagttggaaaggagaaaaaacgcagacgaattgggtttggtcttcaaattccattttgttatcttgtttattagccatcctttaattaggtgtccccgagtgcaaatcgaacttcgactgtgtgaccagcggcgtttgtgtgaaggatagaaatggaaaggggcgctgtttctgttcgagttcatgtccattgagtaccgtttttccagttttgtggctaaacggtcgctttgtattttcagttgtgcctgtgcagtgttccgagaataaccattacagttgcgtgtcaatg

SEQ ID NO: 110786 - DNA, 1003 bp, Heterodera glycines
gaaggacgaacccattctggtgcaaaatctgttaagaaattggaaatcggtcaacatttacaataaatctaagaatttgatacttacaaactacaaaacttaagtttttaaacaaaaatttataaaattgtttcaaaaagctcatcccgcaaaaagggttatgaaaagcaaaaaagaatgtctgctcgcccgctgccccccccccccctctcgcaatcggttggacccgaattcaagagcttttgtactgaattccggaatttatgtattacgcattgtcgagctctaaattactccgttttttgatagttgaacaaaatctctcaacaaatgtggctcaaattttcaaatttttttttggaaccaaccgttaaaactggcaataaattgcatcaagacgaaaaatttggacgatttttttcctcttaaaatgtttaattaatttttccagaaaaataatttatttttcattttacaaataaatcaaaatattacgtaggatttaatgaccgctataaaccgaaaatttattatttctttaattctaaaaatattttttacaaaatattttcaaaattaatttttgtaggatcgattaaaggacatttcagtaaaaaataactaattttttaaatattggctcagaatctttaaaaataaatcactttggtgcaaaacctaacaaatggagacaaaatgaaaaaatcttatttaaatgttaatttcccaaattggcaatcatttaacgattttccatttatgcccaaatttatacgaaatgaataaaaaacaaaagataatgatgatgttcatcagcaacattgaactctttgaagccattcactttgagaaccgccaaaatgcttaccacggagcaaatcaaaaaatccgctgattcccgacgattgcaacggtctgtttgaactgcgcgggtgggcagggttcagttgggtcaaaaatgatgggtctgatttaaaaatacataaattattgggaaaaaatg

SEQ ID NO: 110787 - DNA, 155 bp, Heterodera glycines
attttctggcatttttcaggtacatcgatcaaaatgtgctcatttttctcagccattttcaccattttttcgcctccacttatacagtggatttggacattttcaccgaagacagtcgcattttggaatttctgttgctcaacatttggccaatg

SEQ ID NO: 110788 - DNA, 1003 bp, Heterodera glycines
cggtcggcgccgaaacgtttgggtcccaagatataaacgtatccaaaattacaagtaattattttgttgtattcaattaggggccggaagtgccaaatgtctctttttgctaatttttgaattgttgatttttgaaaatattatcttgcaaaagaataaaaaaatttaatttatacaaaaggcaaattttttattctttaggatgaataaaataaataaaaagaattttatcattaaggtcattttttttatattttccaatttacggaatttttgcatgtaaaacattcagaaattattatattacatacaaatttcaattcattttcaaattcatagaaatggcggaccattaaaattaataaattaagaaaaaaaatatttaaaatggacaaaatgtgacaattattttgttacttaaaatttccacaaaaggatcatttttgaataaaattattttaacaaatcagaaggaaaaagatcattatgtcattagatagacaaataagttttctatattaactcttacaatttcaaaaaaaaaaaattttttttggtttttgctttgtaaaatcacccaaatgttctaaccattttttacagctaattgggtcattccgttcgcaattttgaattttgcgcaacccaaatataacatccgatggctttaacaaagcacaaattaatccgacccatttattttattttgtgtgtcaatgtcaagtcgttttggtcataattactcatccaataagaagaaattgaagtatatttaagcgaatggataagtaagcaaaaccaaaattacaataaaactttatcattattttaaaaatgaaattttattgacaatgaaaacttttttaaataataaattatttttcgatatttatattttaatctataaaataataaatataaatttttcataagtttttttttggcaattttaaaatatttccattcttctattatttttcaaatttagcacagtaaaacaatg

SEQ ID NO: 110789 - DNA, 151 bp, Heterodera glycines
tcaaaaaatttggacgttggttgaagaaatcaaaagctatggttaaattattggaattgcttattttattttctaacttaaggtaaaggcatgtgcggattacaaaagcgacatctctcggcttattcggcgtgttccattggcttggatg

SEQ ID NO: 110790 - DNA, 307 bp, Heterodera glycines
ttttaaaaaatattaaattttgcaaaaatttaagtcgaagcgatacttgaaaattagatttgatgttttctataaatttcggtgtataccgttggaacaaaaaacatagcgaaatttttaaataaagttctgaaattatatgatactttttatacccaacagacctctaaaatcgataataaaacaatcgtaccctcaaaaaataagagacttattttcagagaaattacggttacataagcttgtaaaaaaattcccggaaaaaagtgatctcatcttaaattacaaaattatttcaagggaaatg

SEQ ID NO: 110791 - DNA, 385 bp, Heterodera glycines
gccaaaatggtttatgatagatttattaaataatttaaatactttttagcacattttccaccgcaattgcatcaacaaatggtcaattgaatgtgaaagatattccgtaaaaatgaataattatgcatttttaggttttcattgcttgacagactccgatgccctttgtgtaatcagcaacccaatcgtgttttggttggtaaatttgttgtaattggcaaattttatccaatttaaaatgataaatgatggatgagttaatttatgtttaaaacaaataaaccaatttaattttacaaatttcggattaattatccctgatttagtcaattatttccttttcattattttgcacttcctccgatttgtcctcaaatttgttatg

SEQ ID NO: 110792 - DNA, 151 bp, Heterodera glycines
ttgtagcagaacaaatgagacatagctgacaaattgccgggggcttttatactccccggaaaattaggccacgcccactttttaaaactatttaagccaagattttctcgcacaatcaaatcagtcttgcaaaatttcatcaacaacaatg

SEQ ID NO: 110793 - DNA, 501 bp, Heterodera glycines
ttttgtgaacgtaattgttaaccatgctcatcgattaaaacatttgaaaaagtatttgcgaaaaaaggtcaaaaaccatttgaaaatttcgtagaaaaaaggtcataacatgtgtcaaacagatgaataaaacgaaaaaaatgaaaaaatatacgagaaaaggtggtaggtctaaaaacaatgaaacaaatgaaaaattgtaatatatcgcatttgacagcgaatcaaaaaaattcttagagatgaaaactaaataaatgaaatacgcgaaaaatataaagatagaaagacagaaaaaacaacttaaatatgaccgaatttcccgccctccctccagcatccaatccctccctcctcccctaccgcgcttttcgttgaaaacatgtgaaaaacaaatgaaaaacaggtgaaaaatatgtcaatgtcaaattaggataacagctgaaaaagagtaagaggctataaatgttgaacaatgacgcattataaccttaaaacatg

SEQ ID NO: 110794 - DNA, 280 bp, Heterodera glycines
cctgcaaaatctaataagtggaaaatacatgagtatagaatttattttcaaaaagtgtcaacagacttttggaaaaatatatttgcaatttatcaacaattttgagaagtgagttagaaatgataaacttcacgattcaaaccagttttcggtgctctaattaaccgcgataaaaacattcgaatcaattaaatagcttctgagataataaggtttatcataaaatttcatttaaaaataaaccctcaattattggtatgaacgatactttccaaacatg

SEQ ID NO: 110795 - DNA, 1003 bp, Heterodera glycines
tttaaaaaatctagcaaaagtttacaagttgtaaccaaaaaattttgaaaattttcgactcaatattaatgaattaccgtatatgctctaattatagcccggtctctattaatcccgcagtctccaattatcccccagtctacgaggtgttttgaaagataatccctctatcataatcccccagtctctaattatccccccttttctgaggaggttgaaaataatcccccatgggctataattagagcatatacggtaaatgggccatatttttatcataaaaaatgtaaggttatttaaatgcatgaaacttttaaaaagtttcttttgggaaccctgctattcagggcaaagcacaatatgcttaatattcattcattttctcaatttttgcctttctcttctattgattttcttcgcattatttttaaaggagacatttgaaaatcgattaaataatttattttaataaggcaaaagcaaaacgtaaatattttatttatataaatttgtattttatttagaatttatttattaaatatttttacatatttcgatgaatttacaaaaatattttcttgttattttgtttggtttattttctgtaaatgtgacatcgagaaaaaagtttgtgaaaaatcatcaaaaaatgaaaataattaaattaaacattttaattaattataaattttaccatataatattttaagtttcattaaaaaaaatattcagagatttgaaaccatacaaaaaaggaccagctaaactcataggaaaagaaattaaaatttatagaaggtaaaataaattttattaacaaagcaaagttactgagaagaaataaattaataataaataaaaaaattttatggaatttaaattcgattattttatatttttattttatgtatttattttgtttttttcaaaaagaaaaaaagctgaagggactcaattagaagatgccaaaaatgttaattttgctggtgaagactataaaatg

SEQ ID NO: 110796 - DNA, 58 bp, Heterodera glycines
agtgagtgtttttttttttgaaccaaaccaataaaaatttcaaacaatttaaggaatg

SEQ ID NO: 110797 - DNA, 274 bp, Heterodera glycines
ctccgcacataaatttgtcgataaacaatttgtcgacaatatttccgtaccagttaatcaatgacccgttatttgtctcctcataccacagaagagtgaaaacagtcaaactgaccaacaacaacaaaaacaaaaaaaattttcgatgcctcaaaatgtgcggaacataacaacccataaaaatggatttactaaatgcaaaaaaataaataaataaatttaaaaatacttaatggcccatttgatggataatgaataatgtctcaagcaaatg

SEQ ID NO: 110798 - DNA, 515 bp, Heterodera glycines
cactatttcccttttactctgtgtctgtttttctttgtttgttttcatgggcagagattacgaaatttttgccccccacacatgaccatttacagcccgaaaagcacatttcttctgccgattggtcatgttttcccctttcattgtcctaaatacaaaaatctgttcaatcgcttttgctctctccgttggttcactttattaaatatttaccgacaatttcgcataaaatgacaaaaaattttataaaattggcacaaaaaagacaactcaaatttccgacatgaattggcactggcatttgattctcatacattttcacattgctgaattatgagctattaatgtcatttgaaacatttgcgaccaattttccacaatgatttaaagaaaatttgtaaaatttcaaacattgcttaagttttgcttaaacgttggcccatcgctggccaattcctttgaattcataacgaaattttcgaaaaagttcaaatttttaatatccggtatgaatg

SEQ ID NO: 110799 - DNA, 359 bp, Heterodera glycines
tttgtcgcaccaaaaatggttgctggacctaacccttcgggggattgtggttcgcaccaaaagtcgtcgctggacctatccctaagggggattgtggttcgcaccaaaaattgtggctggtcctgcccttttgggttatggaccggacatttttgcatctgcattcttaatgggatgtgtgagccctgactgatgtatttcagcattggacgactacactccacagcgaagaatgatgtctttgacctttatttgtgcattttttgttaataaatttttaacatatgtgtgcatttattggttaattacctcatatttttgccgcatttgtaatactttctgatttgttgttttagatg

SEQ ID NO: 110800 - DNA, 671 bp, Heterodera glycines
aaaaatttatcaaaaaattcatctccaaaataatttatttattttcttaacaagaatttttgttttaaaaattatttagctcaatactgattttggcctatttttttacttttttgaataaattttgtcattttgcaccactaaataaatttgagtttttagcaactattttcccatttttagcaattatttttggggttttttataacctaaaaactaattattttggcagttttagcaacatagaatttttgtttttgaggaaaatgttggtaaaaaatggagcctattgatttcttttgacaaaatgtgtgtcctaaaatgtttgtgaaatgtatttgcggtcggtcgatggtcaacaataatccattttatacaattctttaacacaaatttaaaaaagtaacaaattttgaattaaaattttgaattgccaaaataatatcagattaccgattttgataaccctttgaaaatgttttggttttaaaaaaaattatcgaaaaaatcaatggcgtcactctcaggcggtgctaaagggatgtgaagatggtgctggacattaaaccagtgaaaaaataaattaattaattattcaattaaaagtaattttttatatatttcgattttcatttaacatttattttattgtctcaaagcgcattaaaatg

SEQ ID NO: 110801 - DNA, 663 bp, Heterodera glycines
tttctcatccaaattaatcattcttggtattattcgaaagcattggaaaaatgctagtatcgtgcaaattttcaaaaattttttatttatgcacaaaaaaatcagagcaaaaaaaagttcgaattgctgggtttttgagttccttctggccataacttttttgaaacttaaccaaaatttttgagattttgcaaattaataataaacacatagagttatcgaacaacaccaacaattcttaatttgattgacagtgaacaaagttatggttcaaaaagtcttccgacgacgtttcggccgacgacgttttggggtgcaccggaaaaaagcggaggcatacccaaagggtgacatgggagaagaaataactaaatgataaaaaggtgcaaggtcgatgcgaaaaaaactcactgattgataaaataattaaatttaattgtgccgtttcgttaaattcatataattatattaataatcaatgtataggtatattttggtataatgtctaatacatttttttattctcagcaaccaatgtttttttaggtagtccacaaatttggccaaaagtttgccaccattttgtcaaaaattggctatatccaattagtggaccaattaaacaaagtgtttgctcgcaataaaaaaaatgatgtaaaaatg

SEQ ID NO: 110802 - DNA, 438 bp, Heterodera glycines
aattagtgttagagctagttggcactgaggaggagaaaccaaggtgtggtgtcgagaactggattagtattggaaatctcgtaccccaatttaaactgaaaatatcagatattatgcaatacctttcgaagtgcagtcggagccagcagtgatcaaactgatgcaaagcgggaaaaaattgcacatttatgagtggcatatttttgtggcagtaaaaccaagagggtacagtttactgggtcgatgctcatttgggcacatgaaaatgccgtcaaatttatgattggcgtgccagaatcgtttttggaacaataaattaaatgtagtattaacattttatgtcctactcagttcttctatctaattgtaagcattagtccaaatgtcaagcgcccagtcttatttgaagagtgcataatgccaaaataatacatcatg

SEQ ID NO: 110803 - DNA, 165 bp, Heterodera glycines
tgatttaaacctattaaaaataaaataaaacaatagccattttccctttctaacaaaaagctatcctctccatttccatttccatatttgcttacaattagactgatttaagcttttttcgataagatttctcattttaaatttcggagtttggttttaaaaatg

SEQ ID NO: 110804 - DNA, 599 bp, Heterodera glycines
tattcaaacactaagagtcgacctagagatataagacctgacttcgggacaatatgaatctcaaaaaaccccaaattttttcattatttaagactcgagagcctaagcactcgatcagcattcgatatttttcagcaattttctcaaatttaaaataaattcaatttgttattttataaatcagcttcattcctttttctaatttctaatttttaaatgagaacgaggcactgccgagaaaatgaaacattaaaaacacacataattttcagatttcgcttggactagccgagtggcctacagattaagcattgtttcatgaacagattatgaaaaatatttaattcgaaaggatgatatgaatgttttcttgttgttgttgaattgttaaactgttggggattcaaaaaatttgcaattattgaggtaaatataaataaagtaataaatttttgaatttttaattaataatggaactgatggacccagaaaaaggcttttacgaggggggagctgatttattaacattcagagctgaaatcaatttagcttttggcggctcaatcggaatttttcaaaattttctttttttggatatg

SEQ ID NO: 110805 - DNA, 237 bp, Heterodera glycines
atttaggacatcgacaaattaagaaaaaatttggttttgagtcaaagagtgttggtttatgaggaggaggaggaatagaagggtgagcacgaagtggacgaaggagaggaggacgaggaggaactgttcaaggaagacgcagatgatgacggagagggggaagaggacgacggaagggaggaagagggggaggaatcagtcgccactaacgaagacgacgaagaagaatggttgatg

SEQ ID NO: 110806 - DNA, 358 bp, Heterodera glycines
ttttttcttaagaaattcatataaaaaacagagaaaaatgacaatgacagtcattttttcttcaaatattattattggctaacaatttcaggcaaatgccatgcaaatgcttttcattctttgcttttgagcacctccatattattgcttctctaaaattccaattgttctttcatttattttttcacacacaaaatcaaaaaccaaaactaatccatttaaattgaccagttgtacagtttttttctcttgaatttttataaagaaatgattgatttctttcaatgattttaatcagttttactaagctaatttaaatccaccgagaaccatcttaataatttgccgcgacaaaatg

SEQ ID NO: 110807 - DNA, 141 bp, Heterodera glycines
ttgtattttcaaaagaatcaagtccattttgaatttgtattttagggatgtgccagctggaaatggtactacccttaccactacgcgccgtttgcctccgattttgaactgatcgccgatttccaacccgacttcaacatg

SEQ ID NO: 110808 - DNA, 661 bp, Heterodera glycines
tttttgagggggaataatgaaaaaaaaattttaatttaaaaactgataattttcaaaatttagcgctgttctaaaacttgaatcaaaaagtcgaaattctattttgttgtttgagttaaggattcgaattggtcaaaaatggatgtcagatttttcaaaatccgagttcagtgattagcgtatttttaagcctagaaaaagtgttacaaatttaaaaaaaaaatttttttcgggaccgcaattccgaaagattgccagttttattgttttaagttagggttggttcggtgcgtttttaccttttacttcgagttcgaataaaaataaaatttcaaaatttttttggcaatttttatggcattttgttttcaaatttcaaaagaactttttttgatctttgattctttgatacttctctttcattggattttggcgattgaattggcttttttcgttttaaaattgatgtataggcccaaagattagttaaaatttttctataactccgttttttttattaatttgtatgaaaaaataaaggtacaatcagaaattcttgaaaatttttgatttaaatgattttaagaaatttggattttgtcatacgacttatttactaattttagcattttacaaattcgtgccaacaatttgagggatg

SEQ ID NO: 110809 - DNA, 394 bp, Heterodera glycines
  unsure (1)..(394): unsure at all n locations
agatgaataataaaatgtttcctaagaaagtctaggtttcggtggttcgttcgtctgcgtttttctctgtccatttctgatcttattgttatttgtctcgcacaaaacaaaaaactcanttaaaaccatntattcgaaaatttgttttcgcatattatacgatgtggacaaattcattttgatataaacatctcttccntaataatctcgtgaaaatcttctttgattttctttttaaattgcaacaattctcgagaaaacgaaataaaacataaactcattttaatttatgtcaaacaaaaatgggtggtttaccagttagattataataaccatttaaattacattaaacaaaatacatctaacgttgaagacttaaaaagccattgaaatg

SEQ ID NO: 110810 - DNA, 62 bp, Heterodera glycines
cctttaaaatatagaatttttctccctatgaaagttaaaatataataatttaaatttgcatg

SEQ ID NO: 110811 - DNA, 174 bp, Heterodera glycines
taaaaaattattataataaaatattttgcgacaaaaaaaggcaatttcgagaaattacaattcaaaaaatagattatattaaatagaaatagtggtttttattaaaaaaatgatcaaaaaatttcttattacttttttgttttttaaaacaattaaataaataaattaaaaatg

SEQ ID NO: 110812 - DNA, 538 bp, Heterodera glycines
tcgcggagccattagaacacccaaagactgtctaaactcgaaaaaaggagtcaaattaataatcggaactttgaaccaccccggctacaaataatttctgttttatgtgcccataactcaccgtcaccgctccatttttgggtgaagaaaagcattggataagcagatgatgatgaagttgtcattaaaaaagtaaatagcacagagaaaagtttctaaaatgaataataattgagacaaattgtaaaggttaaacatcaaaattagggaacgtgggagggttgtatatcaaaaaaactcgtaaacaggataattaatcagttcattcctgctcaaaattagctgcacattataaaaattatttttaaagcattttttgtttattcaaaatatcaatagcttacacattaaataaaaagcctctcaaattttgttggttaaaacaatttttcaagaaaactgttcaaatgggtcttggtgggaaagagtaataaaaaagcgtaattatcataattatacagccaaatgagcacaaatg

SEQ ID NO: 110813 - DNA, 1003 bp, Heterodera glycines
gtttttgagattactaggctcaatttgtatggattttctttaaaaaatgatacaatttgtgtcaattaaaaaaatatgagggaaaaattaaaattgtccaaataaaaaaagaattttttaaaaaatcattcaaaaaaatattttgtcgataggaaaccaatgaatatacaaaaagaaaattcaaaatattttaatttctgtagagggattgaacaatgggaaagaagtagaaaatcaaggactagcctctagatcattttcataatttgccccccgaggggtcggggagcaaccctactttaggatctcttaatattttataaaatttaatcagaattgcagcaaaagcgagatttaattgatcgagttcccatctcggactattttccagtctcgacactgatctcgtttttttgatcaaatttcatgctttactattattggacaaatttggacgaatcatttggttaatctttttctccaatttgcttattcatcatcatttccaatcactgggaaattttgctcttctggctaatagctaaaaccaacatgttaatgtgcataaatttatttgattttgtccatttttagtttaaattgatataggaatgggctaggaaatatataattcatttttatagaattcgttccaattttaatttaaatgcacagaaaaaatttcattgcttatctgctgaaattaaattagcaagattcattaatttatgaaattatttcttgtccattttaatgttttcagcggattttataataattaatttgatttttattcaacgtttgtttgcaaaaagattgaaaaaaggtggggcttttttgattaattaaattaatttatttcttacacaatttagtcaaaatgcatgattttgattttgcattgttttttctgtttgtctccgtgcatttgttgtgttcgtcaggtaaaaattatttttaaataaatatatattaaaaattatttaattaaaattaagctatg

SEQ ID NO: 110814 - DNA, 107 bp, Heterodera glycines
ccccccccccattgtgcacccatttttatttgatattaattttttaaaattttagctaaaactgcgcaaaatgttcaacggagagcagcaacaacaacaaagcgatg

SEQ ID NO: 110815 - DNA, 286 bp, Heterodera glycines
tgatcactctttaagcattaaatcgctcataaaactgctttgaatttgtttgtcaaatcatttaattctttggcaggttgccaaatgtatgttcctcttgcgaagcatagtgaaaatgatcagatcacttcctgataatttgctgcttaactcacttccggagaaacaatttcaagcttcaaaattcgtgaatggttttaatagcacaaaaaaataaattaattacataaaatttcgaataattatttaataatttcctaattatccccccccccccccattaatg

SEQ ID NO: 110816 - DNA, 342 bp, Heterodera glycines
ccttaaaatgaaaaaaaaaacattatttgaattttgcttacgcctgttcaaaagataaaaaatgtaaaaacacttaaaatagttgaattttgcgaaaaatagaattagaattttatttcatcatatctgtattatttgcatttattattattattttaatattattaaagagaaattatccaatatttatgatttgatgaatataataaacatgtaaaaaatttgctaaaatggagaatttataagcgataaaatcatttgtaaaaaatattaaattattatttatacatttatgttaaattaaattaaattataatttttattaaaaaattgtcagcaatg

SEQ ID NO: 110817 - DNA, 144 bp, Heterodera glycines
accaaacgaatgtagaaattgttgccaaaattgtgagtccgcttgaaaccatgggggcgctaattggggatttcccaacaggatgatgaatcggtcgagaaagggcctcaagattcttctgaaaaggcgaatgctggagagatg

SEQ ID NO: 110818 - DNA, 299 bp, Heterodera glycines
aaacatcaaaaacccgagactttgttcggtccgagactgagactcgaaatcgcattaggacatatggaaatcttcagactttgtttaaaggcataaaataccatcgcttcgttttaagatgattctctgcctcatgcaaaaaaggaaataaataaataaaattaaatttaaaaaataaaattccttttcgaaatatttttctttttataataacaaaaaattaaataatttaaaaaacggaaagcaaaaaatattcaaaacaaaattaaggaacttatccaaccgatgaacaaagaatg

SEQ ID NO: 110819 - DNA, 355 bp, Heterodera glycines
cgacctagtccccagttacagacccggtactgaaatgtccaactacccccgggactaaatcgtctaatggcttttttaggaagcataaaaaaggcgcaatttatttattaatttgtcaaaaagaaaaataatcgatgaaagggaagcaaagctccaagactttttgaattactatttcttcggatgtccaatatcccattccgcccggttcttcaagtgtatccgaatatataaagcggaccaaatccccttccagtcatatccttcatcacttttattccatttgtttgataaattttgttttttcagttaatttctttttaattttctgtgcttaccaattcaaaaagaaatg

SEQ ID NO: 110820 - DNA, 193 bp, Heterodera glycines
tctcttacaagtgggtgtgaggcgcaataaaaagtttttggcgttcgaaattttttcgcacattttggaaccaatgatgtacacactattaccgcgatttgctcaccacgaattttgttttaatggtattttaatttaagcactcattctgatttaataaattataattaattatgttttgttaccaataatg

SEQ ID NO: 110821 - DNA, 99 bp, Heterodera glycines; identical to SEQ ID NO: 98824

SEQ ID NO: 110822 - DNA, 324 bp, Heterodera glycines
  unsure (1)..(324): unsure at all n locations
gatggcaactttgtcaaaaaatgaggtcactttccgtcgggcgtcgcattttgcgattttaaattttattgtaaaataggctcaagtgactttcgatgnggatgagttggattngtcgccatatattcacgaaaagtctctgcttcccaacacggcatttactctttatgccatgacggtgaccaaatggctaaaactgtcctaattacgctaattgctttaatgcctttaagaagcatatcggcagtttgcaccttggtcattacacatcgactgtggttaatctgacaagcactgagcagcaatggctaagctttaacgatg

SEQ ID NO: 110823 - DNA, 485 bp, Heterodera glycines
ttttttttgggggggggggtggggtgtcgactatagtgcacaatttattgcaatttttgttttggattaaaaggaagtaaaacagtggtaaaaaggtagcaatgccaaaatagtaaaggcaaatttttttttttgtaatgacgtttaacttatgaattttcacgcaaaaaaggtgctctcgtgcatatttcgttgaaacaaagctgcaaaaaattaaatcactaagttttcagccctagtaatataaaattaattgtcattttttcattagtaggatggcattcactgcaaacaattaataaattattggtcgaactgccacatattcgtgcgtcaccaaaagacgccatttgatttgtatttacataagcaaattataataaatgagtgtctatttcttattaaatacggcaattttcattttttaaataataaaaaaaaaatctttaattaaatcaaattaataatttttttagaaaaaaatg

SEQ ID NO: 110824 - DNA, 1003 bp, Heterodera glycines
aactttatttgtccaaaatggtccaaaaaattatggaaaggggaaaatattttattcctacccgatccttgggcagataaaagtagggaatcggggaggaaaatccacgacaaaatttattgggggttaaagaaatttatagtgtcggggagcaacacccactcacgttggggagtaaatttccataaaaagtcgaaaaattatcaatttcccgaggaggaagccctagttatagctataaattttgaaatttatttttattgtgcacagtaaattcgtaaggttataaatatcatcggtcgtaataaaaagaaaatgcccctttttggcccaaaatggaaaagcattgattgacaaattttgcgaacaaaaaaaaataataaatttatttttcgctttttatgccataaaattgattcgtttgttggcataaaatggatttgctaataatgaatgaatgctgccgcataagtaaagcagcataagatttaaatttatcttttagaaaaattccaaatattcaaacttttcataattttaacttacaataaataatggtttccattcgtcctttgtttcctgtgaaattcgtcttttttcaaagatatcatttgaaattggaatttggcccattaaaaatatatattttatgggaaatttaaaattatgcattctattaatgcattctattaatgcatttttttgcatttatttctcttattttttaaattattggcatcattttggtgaaatctcataaaaatagcaacaaaaaattcaaaattttcctgtcggtgccttttgcctccgaaaataagaaaatattcgaaaaatttgttggcagaaatataaatctaacctttattattctagtaattaataaatgtttggatgtgccttttgaattcaaaatttaaaatcaatctcggacaatggcatcaatggcctaagaatataaaaaatccagtgaatgaatggtattttttttaaatttaaggaaatg

SEQ ID NO: 110825 - DNA, 63 bp, Heterodera glycines
ggtcggaaaaataatcattaattattatacaaattaatttttaaggcattgttagaatttatg

SEQ ID NO: 110826 - DNA, 1003 bp, Heterodera glycines
ggaattcaattggccattgtttgtgcacgatacgacgaatttcaggcaaaggaaaaaacaaaaaagagagaaatggacaaatggacacaaataaatggacaaatgggcaaaaacaaaataatataaataataattttgaatttcctttttcatttcacagaatgcgaacagtgagcaaaagcgtcaaatgtatcgtttaattcgccaattcgcgcatataaacggcgctgcgataattgtgggaatttgaattttaattgcataattaaattaagtttatctcagactttgagcattcgcatggacactttgctgaccaaagcgcgcaactttctgtccgatctgatcagtggagttcctctccaccagtttcaaaagtcattgtcaactgatccgcaacagccccttttcgttgtcccccatgggatcgattcgtttgaggtgaatcattttttgaactccctccatctctatcgtgatgctccttccgttcactctgtctcccctcgtttctctcatttctttgttgtctctctagctttttatatttctcagcctccttctctgttcatcattctctcttccttcctgttcattctttcaacgtatctctctcccctctctctcccccctctttctctctctctctctgctaatcattcctcttccttcctctacccctctttatctgctctttcctctctccctcctgtctctctctgctggtcattctctctccctcccactctttctctctctctctgtctctctctgctggtcattctctctccctcccactctttctctctctctgtttctctctgctggtcattctctctccctcccactctttctctctctctgtttctctctgctggtcattctctctccctcccactctttctctctctctgtttctctctgctggtcattctctctctccccctcccccaaggtcattaatccgtcgttgcgctctttgggctctttcagcgaggcgatg

SEQ ID NO: 110827 - DNA, 623 bp, Heterodera glycines
aaaaaagcgttttattgattttaaatttggaataaaattttaaaaaatgatttttgctttatgattttaactataaaaaagtgttagaaaaaatttcgcttttcgcatttcgcttttcgcattttcgcatattttggcttttcgcatttcgctttttttttcatttcgcatttttcagtttcgcaaatttcgcttttcgcatttcgctttttatttttcaatttggcccatccctgatttgcactgcttctgaatttgcacgcacgtgagtagttacaagggggccagggtcccacttttggcgctaaatttgctttggcgccaaatttaaattcaaaattcctgaaagtgttgaaaattgaataatttatgttttaaaatattgtactattatttttgtaaataacaaaattttttattctcctagaaacaggaaattttttaattgttttcggcttttgtatcggaatgggaaattttttttctacgggaattgctgaacgtaattttacaaaatttttaatttttctaatatttttctatctaaagctgacgttgaacagccgtttggaccagaccagcgaccgagtgcgccggtcgtgtgtgtgtgtcgtcgtgtgatg

SEQ ID NO: 110828 - DNA, 485 bp, Heterodera glycines
tttttgttgctgcaattagcacacttttccctttcccggttgattggtgtgtctcaaaagagcaaaaatctgttgttaaacttaaaaaaggagacaaattggaaaaatgagagagcaaaaggaacacaaaaacaccataagatacttttcatttacaccccccaaatttaaaaaatgagaggaaaatgcctgttttaacttgcaacaattatttaggaagataaaaaaggcgcaatttatttattaatttgtcaaaaagaaaaataatcgatgaaagggaagcaaagcgccaagaatttttaattactatttcttctgatgtccattattccatcccccgttcctcaagtgtatccgagtatataaagccgaccaaatccctttccagtcatatccttcttccctttcattccatttgtttgataaattttgttttttcagttcatttcttttaaattttctgtgcttaccaattcaaaaaaatg

SEQ ID NO: 110829 - DNA, 80 bp, Heterodera glycines
gcaatttactctccgtcaaaattgaagtgcccatacctcagacggtataagtcatagagtcatgcggttttttgaaaatg

SEQ ID NO: 110830 - DNA, 310 bp, Heterodera glycines
ttattgtaatgcacagcctggtgcgtgagtgtttggattggggaccgaagggtgaagccgttccctgggtgtgttttttcacttttaagggaactatatgaattctgatatgccttcaaatctatcaaaagagtctttcatttctaccatttctctttattttctattttacacttgttttttcatttgaatatttattcagaaataaaattgaaaaaatgtgtcattactaatataaattaaccaaacaaaaaggtatttaaggagagaaatagtcagggttttgtaactcaatttagaaattagaatg

SEQ ID NO: 110831 - DNA, 380 bp, Heterodera glycines
atttgaagataattttatcaatccaaaacattcaaattgcattctctaagtgttagccaattaagctaaaaatcaaaaatgtcctatgtttacataaaaaaatgttctgaaaaacaggcaaaatttaaagtcatcaaatttatagattaatgattttctcaacattaaacaaaattggaaatcaacgatttactaattttcatcatcaaattttcttaataattttataacattaagtaagtctgtaaaattgagcataataattataaaatttgtaatactttttgctattgttataatataatccaaaatataaatcattttttaattgcattgaaaatattattttagatcctttcagactgtcattacagaaaatg

SEQ ID NO: 110832 - DNA, 1003 bp, Heterodera glycines
  unsure (1)..(1003): unsure at all n locations
taaaaagtcgcaaacatgtttatgtgggttttcagggtcggagaacccgaatacaacattcattttgaccaatttcgaatccctgacccgaattcgaacaaaaagtcgaacaaaattttcaattcaaagttctcactctggtttctaattgatcaaaataagctaaatttaatcaaaaagcattgcaacatcataaaatggtcaatatgtatagatacgaacataacaatgaattttgaattttctactttttgttcaaatgggattcgaaattggtcaaagaatgctggattcgagttccccgacccaggaaacccaaatatacatttcacgactttttagaacaaaaattttttgcaaaaaatggggtccaccatctatagtattaccgagttctataataaattgaattcgggtccgggattagaaggtcgaaatggttattatattcgtgatcagcgaccccgaaaatcacatttcgtcaaattgtcgagcaatttttaatgaaaacaaatggccgaataactatcaattcttctaatttttttaaaacaagattgacgggaagcgtttgatttagtcggaacagaacgaaaacgaatcaatcattcattccgttcgcatttttcgccctttcccatttcatcagtttgtaatttcttttattcgtcaaaagtaattttaatcattttgttgtccaaaaactctatatttaaattcacaattattatttttaaatttaaataaaaattaataatttattcattgtccttcgtttatttgcttttgtttcagttgggttgattaaatttaaatatcattagcactcaattaatctccaatggcttgctgtggtggcaaatggttgttctgttgttgctgtcacgtgacaaaggcaaaaatcccttttcaatttctttatgacgaagacaatntaaaattaattatttataaatttaattattttctccaaatatgtattaattaggctgcgcatattatg

SEQ ID NO: 110833 - DNA, 275 bp, Heterodera glycines
cgctttttgtcgattttttttctcgatttccttatcacttttgctatgttttgcaagccaggccagaaaaaaagaaatctctaaggattttaagcttttagggtctttggcgtcggtccaacacttttcttgagaagccaaatgtccaattcaatgaacacactttgttcacctttgaatcactctcacaaaatgaggtcgtccaataacggtcacttattaattattttagattaattaatttacagaaaaaaatatttttttggagtccaatg

SEQ ID NO: 110834 - DNA, 1003 bp, Heterodera glycines
gtatttctaacaatttttttgtgatagaaaggcttaaaataatgtgttaataagccctacgtgcattgcgacaataaaaatatatgttggaccaaaccactactatgcatttttggcagaaccccggattctgggggtgaaaatttttttggattttttaacaaatttttcctgatagaaatgcttaaaataaggtgttatcacgccctacgtgcgttccggcattataagttcatccctgaccaaactactgtgttccgaaaaaaaatgacatcaaaagctgaacaaattttacaactttttaaacaactttacaactcctgcacaacttttgcatcaaatccctaacaactttggtacaaatttaaaaaactattcagagcaatgataatttaattgagtaattttctatattctttttcgatagaaagtcttaaaataatgagttatgacgccctacgttcgtcgcaacaatataaatatatgttgtaccaaactactacgttgcacctttggccgagtcgcggaattgtggtgacggataaatttttgttttttaagaaaaaacttgcaacatattacgattaaataattaaattattttgattgatggaattttttacatgctagctaagcatttcattttaacgtctggatagcttttgaattctctctgtctttagaggtccctgcgtgcctgcacttatgccccagcatcttgcatgttagaggtccctgcgtgcctgtacacttccattggcgtctcttttcagcgtgttccctcctaagcagatagcacactattcagtataaaagcacactgctttgttcattgtgtcagtacgctgggtccaaatataaaaatattacctctcactttggttcacattacagtgtacagctaattattttttttatttatttttacttttacttaagtctattaatcaatttttatttcaagctagcgctatatttattttgctattattttaataaaatg

SEQ ID NO: 110835 - DNA, 1003 bp, Heterodera glycines
gaacacgcacactttagaaactgcttttttaaatattcacccttaaatttttctgttattcaaataaagaaaataattgcatcgaaattccttaaattctcataaacgaaatttttgaaaatattagggacgtaaaaaaatatcgagttggaacttcaaaaagtgcgaccaaaaactcgagagtcatgaccaagacgcaaaaaccggaaacttttctcgagtcgagactgagactctggagcatcaatcactacagtggacaatttgtcagcaaatttattttttgagcaaaaatcaaaaatcttgcgaaagtaattgtccacgcatggccttacaatttaattcaaaggaacacgccggagggcaacggcatttcaaaaagcacttttttgccaatggagcgccaaacgacctttttccagggtttctcagacgagcttttcgtaaaaaaactttatttcaaaggattggatacaaatataattttttaaatatgaatgttaaaatgagacttttagagattttcaaattttttcaacgagagctttttgaattagtgaaaaatgccctgttttgcaatacctctataccagtgaacccttccgggcattatttaaatttggcctccatgttcgttagttgaatcggtcaaggttaaaaaaatgattaaattagtaattgtaataaaaaaattttttagtttcgcgctagctttgcaaaaaagtcaatatcaccaccgtgatcactccatcaggtcggagtgatcagaattttagcaccccaagggactttaatctgttcaaccaatgtcgaacattgtaaaactgcattataattatcaaaccaatcaataattgtatagtcaattaatataataaattacatttttgctttattcactgtaactttgcttacgtcagtcattggcattcaatatgatgccacattttttctttgttaatgccttcatcccctatttgcgcgtatttcatttatgggcatg

SEQ ID NO: 110836 - DNA, 584 bp, Heterodera glycines
tttttcgtaattttgtaggctaatagatactgtcaatctctttaaaaagatcaaactttttgtgatcaaattgcgagtaaaaatgttttattctaattgctttttttaaatttattttgtttattcataaaaaataaaaaagtcatcagaagggcgagaaccacttactctgacgactatcagataaatgtcgtagagtaagtgacaaaatatatggatgatcacaggaattaaaaaaagacaaaatatgtgaaaataaataataaataaattgaggtcaaagtcaatgaggtcgaaataccaaatcacttagaaatttgttacattctaactttcccggtcttacagattaccctagtgaacttttaagttttattttaaattgatttaaagaatttgtttttattagttctttatcgagttgattccacaattttgttaccctcccagcaaagggaatgaattttttgcccagtttgtattttgtgttaaatctataaaaggggatgttaaagcgtgctgatggattaaaaatagaaaatagtttcagatctgttcggccataagcaattttatgcgccatg

SEQ ID NO: 110837 - DNA, 93 bp, Heterodera glycines
tgtaatttcttttttttattcgataaataaacgatgaagggataaagcatttaagtttgcaaatatttactgttttaggtttatgatcgaatg

SEQ ID NO: 110838 - DNA, 206 bp, Heterodera glycines
cagtttccaatttcattttttttctaaaccaaaaaaactcgttgttttaatgtattaatttttgtttgtacgcctttctcaaaagcttaaaaatatataatcatcttgccaaaaattaagttctaaccaatctgtacagttttttgtacagtatgccaataaaacattaaaaattatttttttcaacagatttactattaaaaatg

SEQ ID NO: 110839 - DNA, 454 bp, Heterodera glycines
aatgaattttcaaatcagttgtaaatttttatatattccttgacaaaaattgaaaatttatatcccccccccccccggtctctccgccgtaacaccgcccaaaataaaatctcagttccgcgaatttgttgccaaagagtcgaagactaatccttcctgattaatgcaatgaattaattattaatttcagcccctaattaattaattaaactcttagcaataatttgtttagtttcgaactgcaaaacgacgagctgtgaaacaattcgaactctgagcatccattcggtcgcacccaaagttgttgtcggactgatcaacgtcgtttgttgcttcggttttctgcttatgctccgctcttttgggatgccagttaatttggtagttttttaataataattatataaacaggaaattaaaaatttttttctagaaaaatcgtgttgtcaaaatg

SEQ ID NO: 110840 - DNA, 679 bp, Heterodera glycines
aacatgtccgttttcctacagcttgacaaaaccattagaattttacttgttataaataaactcaatgaaatgtcatacaggattctgggatacatcctaaaacatcgctggccgaagtttccgggacataacgtcaccgcaaaataataaaaattgtaacaaattttttaaaagcttttttgtaaacctaggtgttactgattttgaatacaaaaaatttgctgcatttccagaaaaaaaaacaaaaaaaaattacaatttttgattccttggactttcttaggtggcgttttgtcctgctcccattatttccgttcgattagtccaaccaaactccaattagatgcacctcaacagcagcgacagtctttggcagcttcggttctctcaaagaacagttttgaacaaagtgcgacctttgaagcgatggtcggccgtttctgtaaggcaaaatttaaatttttgactttttgtcagatccgtgagaggtgggcacttcaatacagggaatatttgagcaaagtcaccgaaaggatggaaaatgcaaatttaaatgcacagcaaacggaccaaagccaagaaggggtggccgaaaacaatctcatcggagtcggttctcctgctcactatcaccaatttgcgtattgcttttccttaagagtgccgtgacaaaagaatg

SEQ ID NO: 110841 - DNA, 958 bp, Heterodera glycines
tgtaatggatttccggtactcggataatgcactgtgagagaaaaaaaactttggccgattaagcaatttaaagtgtaaagattaaagtttgtcagcataaaataaaacaacaaaataaatttaattaaaaatcaacaaaatgatactcagcaattaggtaattaaagcatatcgaagatttttatttgatctgacggattatcatggattgatttacaaattttaattttggcctcttacttgacggtactcccaaaggagttcaataaatattaaacttttttttgctgacaaaaaaaaggaatacagaaaattcttatttcttagcaattattcgaagagagcgagcagaataaataaatttcttataaaatggtcacggcgaatggggcagagcaaatagaaacgaattttggcgcaaataaaaaaaaggctcctgcttttgggcgcaacattagacttgccgtttggcgcaaaatatgtaaattggcctattatttttttagcgcaaaatgaatttggcgattttttaaatttattttttttttaataaaacaaaaagccttcccattataggggcaaaaaaaaaaacctgaaataatagacttactgtttggggcgaaatattaaatggtcatttctcttttagcgcaaaatgaaatttgcgatcttttttaaaaataaaatgaagacttcccattttggggcaaaaaaatagaattgccattttgtcgcttgacttgcctttctggcgtaattacttttagcgcaaaaataaaattgtttttttagtaattataaattgacttcccattttcggggcaataaaagtatccaaaatataagttttcccattctggggcaacaataatagacttcccatttttggggcaaaaaattttaaaatattttcaaattagttcgaacttggccatttaatttttttgatccgaacatg

SEQ ID NO: 110842 - DNA, 269 bp, Heterodera glycines
tttgtctgatgcccaattttccgggacccagtcgaactctatatcaactcatcataaaatttcttatttttggagattaccgatttttcaaacaaaaaattgtaaatttatgattcatcaatgtcaaaatttcgaaagttttcattttgttttttccagcttcaaacaattcgaacgcggaaaagttcaaccgacgcatctttcggtcgttgtttatcatcattttgatcaatgtttcgggatattacatatgttccgcttactatatg

SEQ ID NO: 110843 - DNA, 174 bp, Heterodera glycines
tctgaggcaataaaacaaataagcaatttacgtataaactgttctttttttccaaaaaattaaaaagaaattaagcatttaaatttaattgcaaaaatttaaaacaaaacgtcaattttaaaaattaaaaatttctttttgaaaattttacaaacggtttcttttctgcgaatg

SEQ ID NO: 110844 - DNA, 182 bp, Heterodera glycines
  unsure (1)..(182): unsure at all n locations
gactgtcagatggcgaacatctttcctttcgaggatntgaggcgagagaaggaacgctgggagggacgagtggccgaactcaccaaagccactcgacgacgcaaaatggaggttagacaatcattgacaaggcgaatttgaaagaagccacacaaagggtcggagaattggaagcggaaatg

SEQ ID NO: 110845 - DNA, 254 bp, Heterodera glycines
  unsure (1)..(254): unsure at all n locations
aaaaaatggtgtaagtaaaatcgtattancgctcaaaaagcttctcaaacaatttagcgctttccaattccttctacatcgccctttatacatcccattatgagcgctaaaattatcagagtgccgaaaatcgcatgtgatctaagcctagaaaaaaatggtgtaagtaaaatcgtaattacgctcaaaaagcttctcaaacaattttaacgcttccaattccttctacaatcgcctttatacatcccattatg

SEQ ID NO: 110846 - DNA, 484 bp, Heterodera glycines
tggtataaatttcaaataaatctcataaaattctcccgattttttgctatttttaaagctttaattcacttaaattgaccagtccttcattgagttatgaattttcaaaatttaacccaaatttccaaagaccaaaaaaattaaaaatattttcgaatttctaaaaaattccaaaaattatgaaacttaaaatagacatcatattcgtactcagcacctcaaaataccccagaaaaatatttttcacacactttttcgaccccaaaaaaatttttgaaaatttctagggggcctagctcgaaaatttttgaaaattttacatcatgtagtacaccattcgatagcatttaaaatgctctacaaaaatgttctaagacaatttttcgctaaaatcaacccctgacgagttatgggcccaggactcaaatgtcccgctacaatggtgattagaagaggtacaacggtgatttgaagaggtacaatg

SEQ ID NO: 110847 - DNA, 229 bp, Heterodera glycines
gtttcattacaaaacttgaagtaattcatttgcatcggtcggaaagaacgatcacttaagccataaaatgaacatagatcaaatgaagatctataacaaatctgatcttaaatttcgtgatcactctcgatctcgaataaaacaatagatatgttccactacaagtttttcataatttcgaaatggcttttgatcacaaatgtttttgcagtctgtgacggtgctcatg

SEQ ID NO: 110848 - DNA, 64 bp, Heterodera glycines
tgtatgttttcaaaaaaaaaattttttttgtgaatactgatttttttttactttcaattagatg

SEQ ID NO: 110849 - DNA, 88 bp, Heterodera glycines
gcgaacaccgtaagcacaaaagggggcgttgtgccaaggatgcaaattgcgtacagttgcattcgttcgcgcgaataattgtccaatg

SEQ ID NO: 110850 - DNA, 803 bp, Heterodera glycines
tcgagatcactttttatgaacaggtgggggggggggggggggtgcggtccatctccgctcccctcccggggtgacctgcttgaaggtgagctcgaacagctccaaaaggtacagtaagtcgtctccggcggaaaatgcctcgcctcccaacccggcaattggcagtgccgttgaccttctgatgatgagattttgtcaatcaaacaaataccgtatgactaatcaaaaaatgacttacaacattttactgtgccaactttgatgactcattttaaattgtgttgagtggtaaatggagatgatcgccaatcagaaaaagaagtattgcaccaaaaaacaaaaaataaatcttacatattcgcatttgttgaaaccatggaaaccattttgatgctttgtaccgactttaaattaatgctataaatattttgccaaataaatttaaattagcgtattaaatattttgccaaaaaatttaattaatccatttaaaataaaaaattaattaaataaaaagaaacgtaagcttaaataaagaaacgtaaacaaatcaatagagatgtcaattttatgtaaatacatattttttcctggcttctccatgctctaaatacaggtacaggccaattgggaaatacaggtacagatacaggtacaggcttttttcaaaatgtcgatctctatttatgtacatatttttgacatccctacaaatcaagattgactttctcatttatcagagataattcgcttcagtataattttatttaaaaagtttaaaaatttttagttaagtgggaatg

SEQ ID NO: 110851 - DNA, 83 bp, Heterodera glycines
gctgtaaaaatagcccaattttttgtgcccggcaatgtgatgccaaatgttgtgagctcgaaaacagcaacatacaaaaaatg

SEQ ID NO: 110852 - DNA, 452 bp, Heterodera glycines
aactttgactgcaccgacctgatcatgaaacaccaaaaaaaggatgatggaccacagaagaacggaggacggagcacctttttcaagacggaaaagtgatctttgaccattcattcattgatttttcgttaaaatgagtaactctttctttgtaattttgcccagcaatacgccgggatttgtcggcaataaaacgaataaattcaaagcacacttgccaaagaaattagtgtttgatgggccgggatggatggtgggcatgtctggcataatatatcccaacaggtgagtgggtttgcacagttctcattgcccttgtacagtttagctgggcgactgtaggaaccctggagaggcaatacgtagtggtgcacctgcgcgatggtcgcaagttccggttcagagtgccaaggggcagcttcctttcgcctcagcagcttgaacggggaatg

SEQ ID NO: 110853 - DNA, 101 bp, Heterodera glycines
  unsure (1)..(101): unsure at all n locations
cagatttgcgatcactgctgtgcaaaggacacanacgggtaaaattagccctaataattaccgacaaataaattaatcacttcacatcttttcaggcgatg

SEQ ID NO: 110854 - DNA, 139 bp, Heterodera glycines
tttttaatgtatgaatggaagtctccaattgatcatattagttgattttttatttgattatttttttcgttttattctgtttgacattttgtccagggcgccgccgtcctatcagagagcatctcatcaaaagggcatg

SEQ ID NO: 110855 - DNA, 401 bp, Heterodera glycines
agtccaaggatgacgggacaacgacacaatattcgccagtgatcagacttttaagagagggaggtgttgtgtgggcaatcatggacctattatttatatttgtatgcattcctttttcctcttccaaacattgtactctgtacccaatcaataatgccctccacagaccaagtgcataaatacccttcgcttctcctctccctcgtctcttctcccattcattattcaaactcattcctcttccgacttctctcatcacttcttattcccttttcatttattatttgttgtgtgtgaaaataaagtttttacaaagacacaacaaaacacatcccctcccgacagtaaattctttaaactaaatttaacgattttaaatatgtacaattaattattagatg

SEQ ID NO: 110856 - DNA, 518 bp, Heterodera glycines
  unsure (1)..(518): unsure at all n locations
gctcgtctatgatgttgccaattgaatggcacttttgttgttggtcacncatggtgccatcattgtccatgtccatgtcggcatggtcgtccccgtggtgttgctgctggaaaatggcatgctgcaactcggcgaacagcacacggccaaactgctgggccaaccggaagccgccggcgctgatggcattttcattcgcgtctttggcaccaccgcaaccgatgctgccgacggagccgtttaatgacgaagcaaatgccggtgacaaggacagctttgcaccagcaaaagtgccatttccatgaatgacgcccgctgctgctgctgctgcttcatcttggctcattgacatgagtgccgctgcagccgccatttcttccggccgctggtgctcagcggcaacaacgggcaacagtcgccgctttcggtcgccgctcgctgccgccggtggcgagcagtacagcaactgttgttgttgctgctgctgttgttggtgatggacgagtgcagcagaaatg

SEQ ID NO: 110857 - DNA, 143 bp, Heterodera glycines
cgttcatcccgggtgcatatgctgtacattcggatgaagattaccacccaccttgtgatcgctttgtgactcggtaaaagaaaaagcaaatttctgtccggaatgaaaagttcgaactcggcggcgctgctgtcgacaccatg

SEQ ID NO: 110858 - DNA, 190 bp, Heterodera glycines
tgactggaaaattgagtacatataattttacaaagtttatgaacaacgcaaacacaccgcgggtatacagaattaggcgttaaaagatgtatccgaccttaaaaattaacatacagtacccataaaaaaactagggcaactaaaatccaccatttcttggtacctttcagatctatgagtacaacatatg

SEQ ID NO: 110859 - DNA, 143 bp, Heterodera glycines
tccaggtcccggcttttcgactcccggcaattccccacccgattctgttcagaattccgggtctcgtgcaattaattctagttcaaataatgaatttgtaaagaaaaagagtaacaattcataattgacattgcaggcatatg

SEQ ID NO: 110860 - DNA, 78 bp, Heterodera glycines
  unsure (1)..(78): unsure at all n locations
acaacccttaccaaacggtggggcgaacattggcaaaatctcccacaattntggcttaatcaggtgataaaaatcatg

SEQ ID NO: 110861 - DNA, 58 bp, Heterodera glycines
ccgttccttacttattaagctataattaatctttaaaccctttaagtcagtcataatg

SEQ ID NO: 110862 - DNA, 708 bp, Heterodera glycines
tcgacgaaaaaagccttcggattattgcagacgaaattttgaggtatttaaaaaaagaaaattgaattgcttctaaaaagaaaatgagtaccaaatgttcagttttttgcacaggtaattaattttaaatgttggtaaattcggcacttttacgcttggggccaccaaaaaatcttttaaaccagggctcccaacctaaaattttcaaaatcagcattttgccgacaaaaaattagcattaacagactttaaaaatgaaaagtttttgcgattttgtgtcaattttttatgaaaaaataaaatattgtagccaagcagtagcgacaggctccgccaggaaatttttatttgaaattttcaacgaattttgttaaatttttggtaaaatacataaaaatgagcattattgaggatttttttttcaaaaatcagcaaatttctcaaaaaattagtatccaaaaaaaatcatcacgttgatctcttgaaattagcaaatcccttgaaattagcaaatgatgataaatcagcactataggtcaagcccaatgtttgaacaatgctcgaaacgccaaatagctaaattggcgttattttagcgcgctaattcaaaaattacactgataaaggcctttttgcacaactagcggggtcagcgccttcggcgcatcccccgctaggtagtacgattgtattataggattatgaatg

SEQ ID NO: 110863 - DNA, 185 bp, Heterodera glycines
gcattttttgttttgattttttaaaagccgtgaaacgtttccgtaggtcttctccaaactcaatttgctcattgtctataagtgaaaaattcgacattttcattcaaattcaaaattaccaactcaaaatttaagaattttaaagttagatttggttgttattttctaaaatacatacataaatg

SEQ ID NO: 110864 - DNA, 486 bp, Heterodera glycines
ggtaaaaacccaactcgtactgccccaactcgtactgtttttcgacacaaaaatcgtcataacttttgttaaagtcggccaaattaaacattcttggtatcattcaatagcccttaaaattctctatctatccaccatgtttccaaaaatttgatcaagtttgaaaaaagttatggacaaaaacaaaattttttacgattgttggtcataacttttttgaaaagcaataaaattttcttacattttgcagatagatagagaacgttaagagctatcgaatgataccaagaatgtttaatttggtcgactttaaaaaaagttatgacgatttttttgtcgaaaaacagtacgagttggggcagtacgagttggcctagtacgagttgggtgtcgtccatatgtagtaggtcgtaataaatgaattgcattaaattctttctctaattaggtacgttttttctcatccagacaattaggtaggttatg

SEQ ID NO: 110865 - DNA, 549 bp, Heterodera glycines
taatggcatcagcacttttggcttgaggcgcccgtggggtctcctcggtggcagcagcaacagtctcaacggcaccagcgccagcaatacttacaactgcgccagtaacaattacaatgccaccaccatcagcaacagtaccattggttccggcactggcaacagtcacaatggcaccggcactaacattggttccggcactggcaacagtcacaatggcaccggcactttagccttgaggcgcccgtgggggtgtccgccgctggtccgaaacgtggacagacgccggccgcgtaggtcaaggaaacgcacccgtggcccctacagcgacaattccgacggatcggcattcactctttttcatggaatgcatggtagttttgatacttggggcactgcgggcattgacgaatgggaccaatcggcacagagtgtacacaattacggcatggttggttcttctctcatttatccacccaaattgggtaacgaaacacagaaaaataggagaaattatttgccaaggaattgatgactttgccggaaatg

SEQ ID NO: 110866 - DNA, 131 bp, Heterodera glycines
tttggcaacagattgttcatgcctcgggcgacgacactccgtcctctttgggcagccaacagacaatcgtctcccgtcccccgcccgcttcggcctttgcgtgccaacagacgcttccccctcccaaaatg

SEQ ID NO: 110867 - DNA, 343 bp, Heterodera glycines
gtatcataaaattttattatttattgcagcgcggcaaaaaatatcgcttccctcatttcaaacaaatattttggtgtttcattgcacaaattgtgcgcaaatgcacacatcgtctgtaccagaaaaagctgtcagaagaagcccacaatgttgaaggcctaaatttggtgcaggtcattgatgaaaggatggtcagtagcctttatttgtggttactggacatttgcgccctgaacatttacatcccggacataagcgctccagacattgcgccccgaacctttgagcataattatcattttaagcttaaattttaaactttgttcaaaaggatgacgaaatg

SEQ ID NO: 110868 - DNA, 370 bp, Heterodera glycines
ttttatgggaggaggaagaaggacaaaatattatttatgtgtggtgcagtgattgcgacgaatgaacaacaaagcgcaaaaatgcccatttaaatatccttccgatgtgtgaaccgtgtgcctttccaaaattccgtttcatttgtcattcgtttttttctatataaattgctccgctccgtatcaaatttacatttctttgtttttattttcttcatctactaaattttttgtaatcgtcatttttttaattttttgctccaaaataatctaaaattgaaaaactaaaaaccctaagtatttttgttaatttttttcgttttgtgcaatttcttgtaattaattttcagtccccgatttcagccaaatg

SEQ ID NO: 110869 - DNA, 172 bp, Heterodera glycines
catttttttaatgaacaactttaataatttaaattacaaagggaatttttaatattttttttgctaattattatgaaattttatgtgaaaatttctcttgaatacaaatgccaaaccaattagtgtgctaattattaaattttatgtgaaaaatctctctttaatacaaatg

SEQ ID NO: 110870 - DNA, 192 bp, Heterodera glycines
ggttacaggtcagattcatcgatagatttgggttttcttttttcatatgttaatttattcattttgcatttaattgttttaggtataaataaacattttaatttgatagtttaaaaaaaggtttcattgtccaaaaatatttaaattcttaattttaatttgcaaatttagttttattatagattaaaaatg

SEQ ID NO: 110871 - DNA, 67 bp, Heterodera glycines
ggttcgcaagtaaccatgatcaaaagtgctgtagtgcgagccttaagcttatataaattgaaagatg

SEQ ID NO: 110872 - DNA, 533 bp, Heterodera glycines
ttgtgtgaaaactgtgagtatgagtggaaattgtattacgagggccaaacattcagctttgcttaacaaacaatatgcttttcatttgattaaccaaataaactgcgttatgcttttaattaattgttaaacactaatgcacttttatggcccctaaaattttggaaaataattagtatttaattgatctgatgtgtaaatgccggttaaattatacactcttggtacaattgaaggcgtttaggaacattgttttgttttggatttcaacaaatcattttggagaattacaggtgaagaacgacatcagtggtgatcaaacgcttcggcggattcaaagtgaacggacaaagctgactgatcgaacggacatttgacttctgtgggcggacaaagtgaatttcttttcttctattaatcaaattagacaaaaataaacaccaaacaaaagcaagtaaaataaaaagggggaattgaaataaaaaggggatcagaatcaaaaatttggtttgcttcggcagttcaaaagcatg

SEQ ID NO: 110873 - DNA, 369 bp, Heterodera glycines
ataaataaattaatttatttaacggcctatgattatatatacgtaaatataatagaaaataaaatagaaacttttttcgaatcttctaatatccgtctaataaaattggcggacgaattaaaattttttttttgtctcattttaatttttagcgccccattgtatctatttaaactgcctcgagggggggggggtggcttaattataaggttgtggcactaaattatggaaatattgtgtttattttactattttagaaatctgcgcggcacttgtgccactcttttggccatcggctcagccgttgactttctctttttgctctcattttcggtcccttttgccctttcgttggttggccagaacatg

SEQ ID NO: 110874 - DNA, 77 bp, Heterodera glycines
ccccccgttttttgccgtttgacgattgcggacgctgcctcgcttgcaaggcaaccgaggccgaggtggacataatg

SEQ ID NO: 110875 - DNA, 1003 bp, Heterodera glycines
aaaattgggacaatgaatggggctgttggctgggacgattttcgcagcatcaaaagtgtaaccagcagaagcccccccccccgccccgataataataataataataataattctaatggaggtgattaaatgctgataatgagtgtcgcgagaaagttttcgcgcaaaacgcgggaggcgacgacatttgcaggaaaacaaagcataaaacattaaggaaaggtgttgatggaaaaaaaaaagaattttataaactaaaaagatgaaaatttaaatttttaaaataatcgtttttatcagtaaataaatcaacggaacaataaatccattttaaaaaacaacgcaaccaaaagcccgttaattttttctcttcccattaattatattagtaaatatgcgcgtcattaagagtaattaatgaatatataaaggattaattagcacagatattttttgccacttgaatgattatttccagttctgatgataataccactgtgcaaattatcacgtgtttgatcagtcccattaatctttatcaaaagagagtgtaaaatcctaacagaaaaaccacttaggtttatttatattcgagtgcaattagcggaactaaaattacacacaatcaatcattaaaaaaagcaataaaatttgatttcatggttaattttgttttctgaatgaatgcgaatcatactttagctcaatttgcgcaaattatgcctctggcaaggcttttgttatgcgcaaaattttaattcggcaaaatttgattattataaaaataaatttttaattaaaattcattaattatagtttttgaaaaaaattatctttaggtttgtgaaacaggagtgatttcgcaaaaattaaaaattgcaggatattaaattttacatttttaaaacaaaaattttaaataaattatttaggtattttgagtggaggctaatagaagcagacggggaaatctttatgatttcgattatttcttatagtaatg

SEQ ID NO: 110876 - DNA, 818 bp, Heterodera glycines
agtaccttctgaccaacatttaccctggaaataatatacacaaagggaccacgcgaattgtgagttgcacgaccaatatttatgaatttcaactggtttcaaaatgcaattatttatttattttaattaatgaatccacaacctttgtttcccctttttgtcagatggtccaggaagtattgaagcgtttcgcgcggattcgttttgaacaatggagaaatgttagacaaatcaaaacgaagttggggtcgatgaaacggaactgttcctttcctcctgttgacgaccactcgtggaaacgaaaaaaagtcggaaacgaaggcggaaaggtggcggaggaggacggttcgatgtcattttatgtgatttttagactgttacctttttaagttatcgacagaattttgttttctccttcacaaattcctcaaaaccttagcgagcgttttcaccgtctgaaaaaggtgatttgcaactctcccctcctcatttttttaaattttgcttacccagatggaccgcatttcgcggcatcaaatgatcgtgccaatttgcgggatgtcgtcgttcgtcggtttgtccaatgtgcgcattgccaaaatggccaagagttccagcacccacaaatgatgctttttattcggatattttacacattaaatcttttgcctttctcttacaattaatttgattaaattaacacaaaaaatactgaatttaaagtccactcgaagtgcgttagttttgctttttattgtttatttgcttgttttggtgggtttgtttctgtgtcttgttgtgaattgtttttgccaatg

SEQ ID NO: 110877 - DNA, 110 bp, Heterodera glycines
cgctttccaggtcgtccatctgtgccacggcctttcctatccgatcagttcccagggcaagtcgtactttgaccccgactactccaaggatcacgcgctaatcccacatg

SEQ ID NO: 110878 - DNA, 1003 bp, Heterodera glycines
ctttttctgctgctactggtgagctttatggcttgctgtttgtgtgttaatcattctcatccattgcaattggaaatttgtgcctgtgattggccgccgtcagacaaaaaaattcatttgcattttttttgttttgttttgtacaaatgaacgaatgttttgtcagaatcagtgcccctttttgttctcatcggtgggtcggatcggtcactttattttcttttgttttatttccatttaacttttgtctttttaaaatattttctttacttttttatcgaccgaagctttttaaaaggcctaggaaaagcggcttcttaaaagggttttctttgtttgtttttaattcactctttctgctgcactgttccgttctcaaattgtttggaagttttccggggttttaatcactccggtttgagctcccaatcagcctccgacccaatcccaaaatcacttcaaattattcaatatttatttaaaattaagtcggaggaaaatagctatgttcaagaatctcatctcgactcgacaaaagtctcggattttcaatttttgggaaaattacataagaaatgattagggatgggatttatatttattaaaaatcccgaaatatttaaataaacatttacaaaaaatgccgaaaaatgattgggtgaagattaagagacggaaataattggaaagttttatttagtgagatcaaagtacacaaaataaaagatttacattttcaaaagaaagtgttcatcggcgaacactgaactttttcaacattattgcacctgctatttttatgttttaatttaatttaattaaatattcgatgaaaaaatgcgaaaataaggaaaaaaattcttaaaacccgaagattatttaatttataattattttttgcattacaccatatttccccagcagcaggtgtttcccgcttcctccctaattaattatctattaatttcaacaaatcgctttaaattttacagttggcaaaatg

SEQ ID NO: 110879 - DNA, 1003 bp, Heterodera glycines
gccatttcgtttcagcaatcgttgattaaacaataaaattttcaacataatcactttacattcaattgtccacatgaaaattcattttaatttatcaaagcgatgattgacacagaaattaatgaatgttattattttgacaattggttaacaaattaatattaatgataaaatcactttgactgtgttaaaaattcgtttctttttaattccatttgattattcataaattaatattttttaaaaaataacgctaattaatatatgtatataatttcaaaaaaaaatcatttaaataatgataaaaatgcaataaaataataataatagtaatgaatagataattaacttaaactagggttagtcacggtcgtttaaccgaactgaaaataccgaaaaccagcggtaccaattttttggtatttggttttttgattttaaaaacacaccccttaaatatgtcagttcgctgagaattatgagcaatttttaaactgaaaaatattcatttaacaataaaaaataattcccccgaaggcgtataccggcaccgcaggatttattcgttttcccgaaagttttttaaggtcaaaatcttcgatttgaagttcatttttatcttatttcaaaaaagctagggaaggctgttttaaagacaaataatatccaaattaacaatttgcgcctagcgttatgtgacggaaattttaaattattttcatttttggacatttttatattcatttaaaattaaaattgttttgcatattgcttataagttgggttgacataagtaattgtttttttaattcatttgtgcttttgaaagcacttatcagtccatttaaattaagctgaccattggcaatccctaattcaaataaactaaattaattttaatattttaataaagacaatataaaaatataattaaattttatttgattctttaaaattaatttaatatttggtaattataattttaaaattatcagccattatg

SEQ ID NO: 110880 - DNA, 377 bp, Heterodera glycines
tttttggacaaaaaacgaattgtttttttaagttatttgagtctttttttttaataattttcaaatttttggggaaggagcgaggggagagggtcgggcggtgccgatcagggacgggcgaaacttcgagcttcgtgctttcgtgcttcgagcttcgtgaaaatgctcgaagtttcgggaaaaatgcacccctaaagattgagttttcgaagtaaaaatactcccctaattattgatcttaatgtgagtaatggtgataatgtttatgaattttataaattaaatatttcttcaatattacctattttatattctacatattgtatatctctttttaaatgatttttaacacattttacatttttagcttgaaaatg

SEQ ID NO: 110881 - DNA, 781 bp, Heterodera glycines
taactttttcagaacccaaaaaatctttttgctttttgtaaggctaatagagcatgtgaagagctttcgaatgataccaacaatattggatttggatgacaagtttcgaagcgcaaatgtcggtacaccgttaaaaatcaattttaatctgtccattaaaattattccgaatcataaaatttgcaagattgttgttcaacttactttggccatgccgttaaatgttaaatagccaccaaaaaactaccacagccacagcactccatgcaataaaagttactgtaaattcaaaaattttggcataatgttctttgaataaaaaaaatgcaatgaaggggcgtacccatagtgctgcgggatcccgcacaaaaaccatattttgggaatcctgccgcgggtttaggattcaacattttaaaaaattttaagtcggttgcttttgaaaataaagctaacagtgtaaatttgtatttattgcttagactattgacaatgctttaatccttgacaaaaatttaaccacttaaaattatgcaacaacaaaagtcgcccatttgggccatcgatttatttgaaagacggcaatttcgaaacggaaacgaagaggctcaatgcatggaatgtggaaaaaggttgaactatttttcgaattaaagtagaatcacgggtatttctctggcagttaggaaagtacagacgagcaaaattcaattagcaaatatcggatgattttatgcttactgttttttaaagctttaattcatgcgaattgactgcgatg

SEQ ID NO: 110882 - DNA, 1003 bp, Heterodera glycines
ttccgagcaaataataataatacaatgggaacaaatatttttggccaaattcgtaactttatgttcctctcatggccattttttgtgaatcattcgcccatttttaaattattacaatttcaaatggtcattcatttgctgattaattaattaattaattaattatgtaatggttcattttcccattcaattacatagctgaaatgcttaaattccaagtgacttcctccgcttcttcttgctccaaccgtttttctccctcgccccaaagactcagtcaaatctcttcttcctcctcctcttcctcttcttcttcctctttctcctcttcacatccctcggcaattggggaacacaacgtggaccgatccatcgacgaattggaggaatttatcgtacaacaaatggccaccccagcaccgtacccaactgatggcaaatccttttacgatacggtaacactcctccggcggggaggctaaaccaaaaacaagcgccatttacagaacgaatgcgccgctgctgcaagtgccgtccctttgccccgtcgcttcgcttctctgtccgatttgtccccctctttttcctcctcctcctccccgtcgtcctcttctagcagttcgtcctcctctctcaactgcggcactttgggccggagaaagtcgcccgccccgcagccgccaaagccaaaaagaatggcccccggcgaatgggtgagaattagccgggggcatttttgaagtgctgttctgtaatttacttttaaggactatttgcgcgtgtacacggcacaaatcaaaacggacacggactacaaaacgttgcaagtgcccgcgggggtcagcacagaatgcgtcattcgccagttggtgttggacaaactgcgtctgtcgttgcgcgacctgaacctattccatttgttcatggaggttcgcttttcgaatttttgttttttggccctttgaaatgccaaattttccgttaggtgcgaactcggcgcatg

SEQ ID NO: 110883 - DNA, 86 bp, Heterodera glycines
ggtacatctgcttgatatgccaagatattaaatgtttcacgtaatccttgtttttaggaaaacagctcgaggacgcacgcaccatg

SEQ ID NO: 110884 - DNA, 130 bp, Heterodera glycines
aggcatatatttttcacaaaacttgttgttttcacgaatctttcggttatatttaataaaaaatttagttcccgtgtgggaggaagaaatctgtcgggcgccgcatttcccaattgcaatttggaacatg

SEQ ID NO: 110885 - DNA, 480 bp, Heterodera glycines
tattctctatcaagacaaatcctttttattaaaaacagatatttttgttatagaatatttattaattaaacccttgtcatttacatagatgaggacgtaatcttgaagaaaaaaaaccccaaggtctgtagcagaatcagaattccgagttgaacccgacaggttcccggacaaattcctgttttaaaagaactcggggtttttttatgacccgaaatgtacaagacaactatttcaaaaatttttttttatatttttcaaaattttcaattttactccacaacctatacaatagaaagttttcaaaaaattttatatttttcaaaattttcaatttacttctaataaaaaaagattgcaaaacgccaatttattaattttaaatatttactagcaacaaaactgaatcgaaggtcgaacgtctaacatcaaacccttacccctcattaaaacaaattttaatttttagaaacttttatg

SEQ ID NO: 110886 - DNA, 696 bp, Heterodera glycines
  unsure (1)..(696): unsure at all n locations
agaccgagactcttcgaacagcagggganaaactggggggagagaggctgtgttaggaaaattattaataaactaagcattaaccagcgagaaaattttttattgaatgtaaaatgattgaaaaaggcagccaaaaaagtgtgttgtttttttttattaataaaatattttaattaatatttttaatataatttttaataaaaaattaaggttttatggtgaatgcgaaacatttattaaaaaatatctaattttgtaatgtttttaaattaagaaaagacatttccaaaataatttagcgattgaaatgatagtcattttggaaattttaattttttatttttacatacatttatttatatggacatgaaattaaatttgttgatttaaatgagacacatactgtatgattaagttaacttggttctttttcattttcttcatttttcatcattccgttttcttccgcttttatgccaatgccatcgaacggacaatcgcagctaatcaaaaatattaaataaataatataaatcaaatttgaattaaaaaacaaaaaatttaattataaaattgcttaaaatgcattattgacataatacataaaaactcttaagtaaattcatttttaaaagagattgattttctcaatggcaaatttaattttaattaattattattttttaatttaaaatg

SEQ ID NO: 110887 - DNA, 230 bp, Heterodera glycines
tagaatttttcttttaaacatttttcggcggggggaaacaagctctcccattttcccaaccacgaaaaatttttctaacggagtttggcgccaactcctaattactcccataggcgtcattagtttcttttcctaattcggattgctgttttcatttttcagcggatgatgttgacgatttggcaccggtgccgccgaatgcgcgcagcacactgtacgagccgaagatg

SEQ ID NO: 110888 - DNA, 344 bp, Heterodera glycines
tttgtttttaaagtttttcctgtcaagaataatgaaaagtgcgagaagcattagcggttcttgagctcctacaaaataaatatttgttgggatttttccattagcagaataatgcacatattaatttgattataaaacccattttaaagtactaatggaattccaccaaaaaattaatttactttatatattacaaatattcaacaaattctattgaaataaatcattattttttagtatttttaaaaataaattatacatttttgaattttaatttcatattttcgagagttaaaattttcattttttcctttttagtaaaattttctatatattttgtaatg

SEQ ID NO: 110889 - DNA, 72 bp, Heterodera glycines
atattttgcattttcccatttagttcatcaaaaattttctgcaaaacttggcttgtcggtgtcaaaaagatg

SEQ ID NO: 110890 - DNA, 149 bp, Heterodera glycines
tttcgcacaaaaagtgaacgatcacaactctccgtaccaatccgtttgtcgatcagacgtggttttgttgaagatgaattcttcgtccattcgctgaggttccgatttgatcaatttgcgtcaatcggtcaattcaaagccaaaaaatg

SEQ ID NO: 110891 - DNA, 1003 bp, Heterodera glycines
aactcgccgtaccgaattggccgtggtgagttagccgtggcgaagtgacccaacccaaaggaaatgctcctttttagctgttcctttggtgctgcgacttattctttggtctttctttcttatttttctctctctctttctctctttgtcttattttttcctttctctgtctttctcctcacccttcctcacactatttcgcggtcactcttttcgttctgtctccaatctcttcgccttcactcagctcagctaatgtccgtccgtttgtctgtccgtccgttgctccattctttctcttcgtctctctgtctctaatcgtgtccctctcccactctctctcccctccgtccccgcgctctctcttccccccccccgctctctccctttctctctcccatttccttttctaattctattgatttcctcttacatatttttggtctttccttcctctcttattattcctagcattattttcgccatcaaaaccctttaatttctcaattttcttctttccccttcattcatttgttagcttttccattcttcggatagctaaaaattaatctttcttgaatttacctaatttctgagtcgcaaattaaaattgaaattttaatgtttttcctatgcctcttaatgtcttattagggggggggggggggtgagggaggcaaagagctccctgaaatacttcaaaaatcaataaaaaaattttcaaaatgaaaaaaaagaagggaattaaggggcggtggtgctaataggcgccccttaaaaataaagatgagctcattttaaatttaggctgatttgacctctcaaaaaagcataaaatgagtctcaattctcgcagttggctgtgatctgatcttttcatacttttttttaatttttttgtcttttccatggaaaatatttatttattggatcatttaacaaatttgaaaatttttaagtgataattataaaattaaattaaaatattttgggcttcgaaatg

SEQ ID NO: 110892 - DNA, 371 bp, Heterodera glycines
aaggtcgctaatcacgaatctgacatgtgttttgactaatttctaatcccgaactcgaataaaaatcgaaattttgaatttttcaaattatgattttttgttcaaatttagattaggaaatcggaattgatcaaaataattgaaagattcgtgatcggggaccccaaaaacctaagatgaataaatttttatgactatcacaaaaaaattttgcaaaacaaaagggtccccccttttgaaaaaattttcaaaactggtcactttccatatagcgccactttgcctaactattccctattattgtcctatggaaataatcaaatccattgtgcgtccaagcggcaacaacaacagcaccagcaaagccgatg

SEQ ID NO: 110893 - DNA, 964 bp, Heterodera glycines
tttttgaatttggtcagcaaagaattttgaagaatgaacgtggaaatgaatagagccgcattaccccgcttaagtttgctcctccctttgccgtgccattgcgattggctcctccctcagcacggctgtgattggctccaccctcagcccgccacggacagcaaacaataatgtgaatgattgatgggggaaatttgaatatgattttgtctttctgtgccatccctcccccatcatcgccactgttgggagtgggcaaaagaaatttttttctcaatttcgttggatgattgatagggaaatttgaatatgcctttgcatttcggtgcgcttctcccctgccaggcaccactccgttattgcccactgcgatgggagggcaaaaatggactgaaagaaaatgaaatttcttcgcaagtttagttttgattgacagttcagtgtcataaaaaagaaaatttgaaggaccaaacggaattgtcataaaaaattcaaatgcgaaggacgaaagaattgcgattgcaaaaaaaccaaaaatagtaacgatggacaaaaaatttttgtgtgtttgtgcacaatttacgttgggcaaaaacgaatgagaacaaaaaaacttgttcgtttgtgcacaatctatgttgggcaaaaaatgacgtttgtatatgattgtgttgtgtaaaacataaatgataggaaaaaattttgcgtttatgcacaattgtgaggcaaaaaataacggagcaaaaaacttgtggttgtgcattttgtgggagaaaagtgacgaaaaaaaggaataatttgcaggagatgtcaatcaaaaaccgaaatgagaaggttattagtcaaatgagcagtagatttgtgtaaaaacttgtccttggtagtattttttggttttgacgtgtcgtttgtgcggttatttaaagcggttgaaagttgttgtgatcatcattcgagcaaaatg

SEQ ID NO: 110894 - DNA, 397 bp, Heterodera glycines
tatatcatttattttaactttaatatttcattttacatccattctccaacgaaaaaaccattcgaaaacaaatcaaataaattatttttgtttatctcttgccattcgtttctgtcttaaaatgttcaattatatttttgtcttcgctaattgcatatatttattaattgactaatcaatcgtcctctctcttcttctgctgcgatgagtgttttataagtaatcgcctcgcaatctctgctgagattcccccggcaaaaagtgcgattaatggcaatgataatgcaaaaagaaaacacaaattaacggaccaccgaccgaccaaagacaaagcaaaacaatcgccgcattctttgctttccatttaattccaatttatttcaacaaaatttgaatg

SEQ ID NO: 110895 - DNA, 201 bp, Heterodera glycines
ggattaaattcgaacgaattaatcaagttaagctgtttcttctcaatgaccaacgaaccgaacattaacatatcgtcagtgaattttgtccgaattttaatttaatttatttaattaattattgtaaattcctattttgtcccattttcttttcccaattcccccccccccccccccggaaaggtttcccttttccgaatg

SEQ ID NO: 110896 - DNA, 407 bp, Heterodera glycines
actaaaacaaccctggtatcattcgaaagccaagagtttgtagatgtgcacaaacatattaaagttttgatttgaccctttttaaggtatgcaaaaagcgttcaaaaatgggacacccaaaaaaattgcaaattttgactcgttttccgaacgcagttcgaacaattcttaaccgattgggatgccgatagtttttccttatagccagtccaaaaccctatcgaatgataccactcccgacccgtaacattcggtagaaagtcttaaattagtttttaagcttgaaactggggtatattattcttatatagggaataaatagtaacattcttttatattcatggataaaacgccgtttcccaagtacaccttggaaataagcgcattcatttctccaagacgcgatg

SEQ ID NO: 110897 - DNA, 502 bp, Heterodera glycines
tattcggattctactggtctaaattgtatagaaaaactaggattttgtttaccagctttggtttttgaccataaaaaattcgagaaaaattagtgggccaattttcaattttggcatggtcgggaaaaaaggcagaaaaatctatcaatcaaataaaaagtgaaacgatagtaagatataaaagaggataccatgaagaacaaaataaaaaagaatcatttaaataggcgcagaaataacggagttatgaattttttaaaattggaaaaaatttgggtatcaaaaattatgttccaccctaagtaaaatggcatatttttgacaaaaatttttaattcaattttgccaaaaaaaattgtaaaaataaaaagcaaaaatttcttaaaattcaaaccctgccaagtccaaatcaaagaaagcccaaaagaatgaagggcagagaccatcgaacaattttgttgtcggagcgaaagtgatcacaattggaggatcacaaccgatg

SEQ ID NO: 110898 - DNA, 106 bp, Heterodera glycines
  unsure (1)..(106): unsure at all n locations
gtacatcgatcactccgtcatcgcttttcttcgttccattcaaagattttcgacaaaagaggnaccgatttacatttccctattccatcatcacactctacgaatg

SEQ ID NO: 110899 - DNA, 803 bp, Heterodera glycines
tttattcggaagcggtgagtcgtctgggggacccacacgcctccctcactgtatttagtttgttttttttaattttataaattttttaaacagaatttcttttaataaatccatgtagcttgtgacccttttttccgcacgtcgattcgaactgcaaacgtttgttcattttagcgtaacaaaataacttaaaacatttttttaattttaaataattttttcttattttaatgttcattttaaaatagttttatttattaaagaattttgaaaggataacttatttttaaattatcttcattgcttctgtttatttatttttataatttgttattaaaaatatattcagcgtaaatatatttaatttcaaaactaataaggtcataaagtgcaaaattcgatttcttggactggaagttgtttgtgagctcgaccaggtgtgagtgttttgatgaattgcagatcattgtcgattgtcttttttaaaatttatatttaaaaaaaagttcatttttttctttgaatatttaaaagttttaaaaaatatatttaattaacacctaaattgcttaaatactttaataattttcttatatttatattttagaaaattttatgtataaattaacatttgattattgttaataaaattattggacttttatcttgccgcaagaagcagcaacacagctcggtcaagcactaaaattggctatttccgcgctcgtaaaaattatttaaatatttattgtattattaaaaagaattaagagggtcctgacggtatcgacgtggcaaaaatg

SEQ ID NO: 110900 - DNA, 258 bp, Heterodera glycines
ttatattttctagggaacatgtttcgcgcatttggcgcatagccagaaattatcaaaaaatgatgtaccgaaatgcaaaagactgtgttttttacatctgttacacatctcgtaatgacaggggcagtaatgacaacacttaattttatgtggacagttcattttttcaatttaattttatttttggttgctatttatagaaggggtatataaagggagtgaaaggaccatttgattggtacattgtatcaaaaaatg

SEQ ID NO: 110901 - DNA, 362 bp, Heterodera glycines
  unsure (1)..(362): unsure at all n locations
ataattaatttaatntatntaattattattntaagttnttctcatagagataataaatggtgattacaaatggtttaaaaataagtgattatcatgtggtataaatcataaatttgaagcaaatagatctttttataacgtactattagtattatttattttacatcatcttgtatgcttcaattaatttgttgatttaattattgacatcatttaatacattatttatctgttattatatttataattaatttaaattgacaatttttcactattttcaaatttattaatttttttttttgcgattttacttcttcatcaattttttgttttaccaaatatcattaaactttttaagaatg

SEQ ID NO: 110902 - DNA, 1003 bp, Heterodera glycines
tggggggggggtgttttttttaaaaaaagaaaaaaaatattttttttttttttttaaacacccctttttttttttttttttttaaaaattatatataccccctgtaaaaattttttttttttaatttttcctttttttccccccccctttttttttttggggcccctttttggggggaaaaaaaaaaaaaaataaacaaaaatttttttgtgttatcccctttttgaaaaaaatattttgttaaaaaaaaaatatttaaaattttttttaaaaaatttttaaatttttcaatttaattttaaaaaaaaaattttgggttttgggaaaaaaaaggggtttccggtaaccagggttttgaaggttcccctgcccaaaaataagttctgcttcaaacttgggatgtccatttttagggtcttttttatggtttggactgtctagcgactgttttcctaaaatcgtgaaaaatatgtttactatctaacaaccaatttttattgttttttgaaaattcaaggcattttgtgattagttcactttttacgaagaattttatccaaaaaaatgaccatttaaaaatttttatttacatattttagtacaatttgggggtttttgtacatatttcatacatattttagcattttttatacatattttatttacataattcgcaaattttttaaataaaattagcagccctaatgataataatttagaagggcgattttctcggactactatctaataataaaaattattattgtttcagatattcaatttttcaaaaaattgcatcctcccaccgacactaagaattaagattcgcaaaaatttttgtatataatttgcttttaaatttacattaattatagtaaataataatttatcgtcatcaccctttgacggcgaatttttcccagtcgcatttactaaaataatataaataaatttatgacaaattaaaatcttttttaaatttttaataccattctccaagatg

SEQ ID NO: 110903 - DNA, 229 bp, Heterodera glycines
ttttttggcacaaatatcaatatttagcatgggaaaaaataatattattcctactccaataaaggaggcagttttgcaagcatgtttaaatggaaatggcgtctgtaaagtggcaaaagacttcaaaattagtaggcggacagtgtctcgcatactaaaggtaaaaaaaaaatgcaaaaatcattttgttttttttttgtttaagcttcatcatgaaaaccaggacatg

SEQ ID NO: 110904 - DNA, 1003 bp, Heterodera glycines
ggttacgctttgaccattcgtttccgattatttttagttttacgtaattaaaaatcatcaatttaaaagtgagaaaaaaaaagagagttaatcccatgtcttttattgagaaagaataaaaaagtgaaatatttttaataacatttttataatttaaaaaaatattatttaaaaacaaataactttggtctaaaattttgattaaaagaaaaaattaatttaattttagaacttttcaacaaacctatttttctcttggggccaatttactattacaaacagaaaattccaattattattttttcttatttttttttatttgtccgatttatttgacgtaaaaattccaattttattcataatttttatatcatatatatatttttgtaaaatatgtatattataatagataataataataattttaaaaatatatttaataattaaattgaataatttaaataaattaaatatcacactaaatgaaattacaattaaaaaatcatttaaagaattgatttccattttttactaattctaataataatttgctcattttgatgggttaggtggtgatgccaggtgaaaattttgagcatttgaactttaaatacgattgaatgaaattgtcaaacagattagtcttttatggcactgtcacaattaattatttaaataccgtaattgttacattatgttttatgacattttcgtacattagaccaaaaatttttcacaaaaatctcgaaaaatttcttcggtttgggaatggatacagagattcacaataactgagtacctaagtcggtgatgaatttcagtgcccaaaaattaagtatgaattgtcggggaattgaaaaggacaaagggtcataaagccatggtttgggaaaaacagtaaatttcacaactcggatggattcgattcgtaggaatttttgtaaatatttaaaaacttttaaaaattcagggaaaactatttttttacaattttttcaacatg

SEQ ID NO: 110905 - DNA, 61 bp, Heterodera glycines
  unsure (1)..(61): unsure at all n locations
gctagttttctgtnattaacaacgacaaaaaacaaatattattttctaattattcgacatg

SEQ ID NO: 110906 - DNA, 794 bp, Heterodera glycines
taaacaaatgggggtaattatttaatctgcctttataagataaaggggaatttaagcgaaggattcaggcaaaaataataatctatagaaattctctaaaaagtagttcctcgcagattcgtggaccgtttctataaagctagagacatatgcgctaaccataaaaaagatgaatcatgtttagaaaaattgatatagttcgactaaatttccaaatcgctttatggtgtacaggatgttagtagaatcataacttgtcagcccttttagatagtcctgccattgctattcctgcaaatattgagtctagtcagctcattggaattgaagaaatattgggtggggatcgtctgccgctaacaccataagatattttttgggcatagaattttaaaaaatgaaaaaaaaccagatgcaaactcatagtcatgaaataaaatcatagacttaatgatgtcatatgataaatctgatgtcatatccgtgatcagcgccctcgattgccatttgttatcattttaatatttcgtgcatttgaattggttttgttgcgtaaatgttgaactttgttgaaaattgaattttcgattttttgtcggaatccgggttcggggttcgaatagggtcgaaatggatgtcagaatcggattcaccgacccagaaaaccccagaaacgcctttttcgcgccaaaaaaaaatgaatttttttttcaaaaaggtgcgataccatctaaactattacccctaattctgtttataaaggccgcttttcccttttagcctcctcggcgatg

SEQ ID NO: 110907 - DNA, 284 bp, Heterodera glycines; identical to SEQ ID NO: 98949

SEQ ID NO: 110908 - DNA, 580 bp, Heterodera glycines
tcggagaacattacagtgcgggcactggcgaaattttggtggagaaccataaaacgctgacaatccgcaacattacattggaggcaaacagagcgccaggcaaataaaaaaatgcgtaaaatttaaattcaaaatgtttggcataatgtctctgttagatgcttgggtgttcgcggggcgaggcgaagtgcgtcagtcgagcgggaagaaggcatttgttgtgggccgagacacgccgagccggtaggcccaaaggcatactgctggtggcgcttttctttaagctgacatccctccaaaaaatcgatggaattttaaaataatttgaaaagaaaattttgagtaatttaaacaattgaaaaaaatttatggaattttaatgaattttgaaaaaacaaattggatttgagaaattcacctttttgaaaattcttttttcctaaatttttactcctattttaaaaatgaatttttctgaaaaaaaaatttaaaactccaatttttgtcaattttctctaaaatttcttaaaacatttatgtttaaaatttttcatggattttcggaagtgaggggggaatg

SEQ ID NO: 110909 - DNA, 254 bp, Heterodera glycines
  unsure (1)..(254): unsure at all n locations
ttggacgaatntacgatggacctgtgttcggctttcacttcggcaaacattccatttttcaaattggaaaatcagaaatttcgaggtctgtttttgggatggcccatcaaaaaaatttatttaggctttctggaaaagtattgcaagcgtatggttctcatagggatgtgttgcagcaacgttatttgtcagcatgttttaagcaggtttatccactctacatattcaaaaacttggtcataattcagaaaatg

SEQ ID NO: 110910 - DNA, 54 bp, Heterodera glycines
aacgagtcaagacttatattcacccaacatctctcggggctgcaagaggtgatg

SEQ ID NO: 110911 - DNA, 186 bp, Heterodera glycines
ggtggggatgactttcagtttatcatcttccattactcgcagaaattcatttagcggggcagtttccagctgtttgtccgtggcttcaaagatgccaaatattggctcgaccaatgggaacaatctccggaaaagacattgccaaagccaagccgaagagaattgcaactccaatttgagaaaatg

SEQ ID NO: 110912 - DNA, 103 bp, Heterodera glycines
  unsure (1)..(103): unsure at all n locations
gatttttaggatgagattttcccccggtaaataccgggttgtgccattgaaaaagtctgcggatccgcggaaatcgatccgtgtnntatggaagggccctatg

SEQ ID NO: 110913 - DNA, 497 bp, Heterodera glycines
ctcgtcacaagtcgacagcagcgaacagcgagtgaaaaacggcttaggaaacaaatggcatgttacgctctgttctttatagataagcgggaaactttggtaatcttttttggatggggtgtaaaacaggcgagggaagaaagacagttatatgcactatttcttgcacattcgtttctttttcagccacatgataaaaaacgacgtaccatgtcgccttttttcttttcactaattgtaattttacctaattaatccaattcattgaaatgcgtgtttttgtatgctcaaagaggtttcaatttgaataaaataaacatataaaatattgatacattttttattttcgaagatattatcatcaattaaaagttaaaatactttgtagacaaaaattaataaatacaaataaaatttataatgaaaaagcaatttgacacgtagttgtccaattaagatcgcaaaaaacaaatattcctttctaattattcgacatg

SEQ ID NO: 110914 - DNA, 79 bp, Heterodera glycines
ccgtcaaaatgctctattgtcaaagttcaggaagcgcaccaagacggatttttcatcttcaccaacttcgagcagtatg

SEQ ID NO: 110915 - DNA, 86 bp, Heterodera glycines
agtaagcatttgcctttttgctctacgagaggtttccgtcctctctgagcttgccttaggacacctgcgttacgctttgacagatg

SEQ ID NO: 110916 - DNA, 175 bp, Heterodera glycines
aaaaaaaaatggaaaaataaaaaatttttaaaggggaaattattttttttccctttttagggagttcattttttcttccaactttttgtaatgctcaaacagcgactggagcaatttaacctcagaggaacgggctgttgtcgcgggtcaagaaagttggatttggttgacaatg

SEQ ID NO: 110917 - DNA, 1003 bp, Heterodera glycines
tcaaattttggccatataacggaaaagtaccggacattcttttggctttaatgttcttattgtttgggctggcattggcacgcgtttttttgaatgggttaaagagctaaaaaaatagttgaaaattgctcttttttcatcaaaatcaccaaatggtaataggtgggaaatttaaaattaattagatgaaatgttaccattattttttgtaaataggtcattcagtggtgcgcgaaatagtcgtttttgaaaacccaacatctgaaacatcaaataattattaataaaaaaattagagattattaaattttattttaagcttaccaaattgggtttttaaaatatgaaaaaagtgagaattcgcttaaaaggtgcggagtcgttcttttaaaccatcaaatgaaaattttaaccaaaaataatttttaactttgctcaaaagcaacgaaatttataactattgatatcattcgatagctttaaatcttctctatcagtctacaaaattacaaaaaatttcattaagtttcaacaaagttatggctagaagaactcaaaaaatcaagtttttcgaactttttggccatattgctttagagcaaagcataagcaaaattttttattttatggtttttaacgacatagcaacgcttaaaatgccataaaaacccaaagttacactcagaatatttataaattttataatttttcaaatttttaaattcccaaaatcaatattggaaaagtatttgatttttaaagtgtttttttaaaatattctctgggttttcattatttttaaaattatatttaccccaaaatagagacaaatgcatatagctgctacctctatacatggccaaattgattagatatccgccaatgttaataaaaaaaataatgaccaatgaccgtaaaactcgtgtgttcgttcgtctgttgggttactgtaaaaagtattttgaattgttttggcgcaaaataaatgccaaagaaatgaatg

SEQ ID NO: 110918 - DNA, 72 bp, Heterodera glycines
attgaggtcaacggctgccactggcacgcgcacgaccacccgcgtcaccgctttcagccccaaacagtgatg

SEQ ID NO: 110919 - DNA, 369 bp, Heterodera glycines
aaaagaatttgatatatagtgccaaaagtcgtcattctgccgtcaattaccaaataataattaataaagccgggatttttatcatagaaaaaattacaaaaacattttatttataatttttggacaaaaaattctttagaaaatatgtaaaaataaattaatatttacaaaaaatgcgaaattttatgaagatatgtacgcatatgtatgtagaaaagccaaaaatatgcaaataaaagtcccaagttttgttcccaaacacaatatttacataaaaatcccagctttgatgattaaactttcaataattaagttgtaatgatttcctctgtattgtttgataattattattaagaagcgctcgaaatg

SEQ ID NO: 110920 - DNA, 86 bp, Heterodera glycines
aatttttgttaggaattttgaaataaaaatccgaaaaaggcaccggaaaaaccgtcactttggtggaatgcgttcgacaattgatg

SEQ ID NO: 110921 - DNA, 178 bp, Heterodera glycines
aattttgaaaaaagcctggacttggatttttttcacatttgatctggacctggatttcctggataaatccaggaaccttaggccatttgaattataactgagtcagtgttttaccacaatcatccgttttttcaagatataaatacaataatagctgtattttgttttttgaaaaatg

SEQ ID NO: 110922 - DNA, 1003 bp, Heterodera glycines
agctaaatgcattgaatttcttgaagcatggataaatatgtaatttcattaaacacgaatatttcatcagaattaaattgtctaaacaaatttatgtttgtttagccgttacagctattcgaaaaaattcataaaactttcaggcgacgcacttttcgtttatttttaaaaataaagttgatgactaaattaactaaaaagcaatattcatattaatcaatggggggttaagttggcagccaatttcagcaattgtccatttctgtcaaaagtttttttttcggaatcggcgttgagagcattcaaaaaatgaatgaaaatggaagattttttattttagaattaattaataccatctttatttggccaagaatggcgtactctttctcgaaaccacgaggaaaatcagtgcaaatttgggacttttcaacagaaaatagcatttgaatcgatgaggtgtgcatgtaataaacagcagaaagcgaatggaaatggaggaaaaacggggccaacccaaccaaccaatttgaaaattgaaatgtctttttttgccaatcttcgtaactaatttgttaattgcctatttgggattttcgtaactaaaaatccacacctagtcacattttggcgaaaaacgtacttcgaaacgccgaacaaagattagaagagctcaacagaaaggatggttttgcattcaaataaatgccaaaaaagtatgtaagaccaaattaaaatggagcaatcgggtgagaaaagcgtcctttaaatagacattggcgcaaagaactaaaaattttaaaggcaaaacttcgactgaaaaaatgtgtataaaaggagcgaaaatgtcggttggtcactcattcccttcacagcgacaacaacaacaacaacaaacaatcagcaacgacgacaattgcgcaacgcttcaacacagcacatccatcgcccgtgcacacgtcgaatccgatcacttctgctgctgctgctctccaacaacacaatg

SEQ ID NO: 110923 - DNA, 232 bp, Heterodera glycines
tttttcggctacctaggtttttcctggacgttgatttttatggatttttatccaggtccaggttaatcttgaactccaggtctaagcataaaatttctggataaattcaggtccaggtcggtttattttaaatttttaggaatttgtttgctttataaaataaatttccaaaatatccagctccagcagccaggcctggacacttaatgtctgtctcatttttacagatatg

SEQ ID NO: 110924 - DNA, 167 bp, Heterodera glycines
atttcaatcacacaaaaagttgtttaaatcgttgatttttgttaaggtgtcgaagtgcccttcgttttttaaggctttccgaagtgcgtttgagtaccgtaccatttaaattggttacgataaattaaaataaatcgattcaatatttcagacaatttccacggatg

SEQ ID NO: 110925 - DNA, 473 bp, Heterodera glycines
aaattgtataaatagatttttaacaaaaaaatataatttctttttagaatttcaacaaaataattttaaaattaaaatttcaaatatttaaatttgaggcttattcagtcataatattctacctatcattaagaactcaattaactgcatcattccaggcaatatcgccaagattttctcggcctgtcatcactaatgtaaatttttttatgtaaatttttcttagcgaccgccctaaaaattccaaaaaaaaataatattttttaagcgatgaaaataaatttaaattgctcattttatgtgtaaagaaatgtgaattcatttgaatgttttccgtgtccaatcatctcacatttgttcaatttacacaacaaaagccagcagactgaaaaaagatgtctcaacctttgaataaaaaggccaaagattattgggcaatttacaaaaatatttttagccgatgagataaaatg

SEQ ID NO: 110926 - DNA, 487 bp, Heterodera glycines
aagacttactgtttaaatgaactttaaaatgactcacagagctactgaaagtgtgaatttagtcaaagaaaaattcttccgccaaagttctttttaagagaaaaagaatggtcaccttttccaactcttccgattttcagaaactgaatatttaagtttactcaatgctcaattggttcattggttacttaaaatgaggctttgaaaatgcttgttcgactttgactatctttcccccacccaaaaaggaccgttttattccgccacttccgttgggtgcggccgaacggcgcctgacattgcgccaactgaataagttgattgaattccatttggcacaacaagcggcgcaactgtcaccacgaattcgacacattactgtacaaaacggaatggtaatttgcattaattacaatttctgaatttcctaaaaagtgttgccttcttcaataaggcttctctggtggtccccggagaatttgaaatg

SEQ ID NO: 110927 - DNA, 96 bp, Heterodera glycines
  unsure (1)..(96): unsure at all n locations
ttttgnacatcgtncgaccaaaatgaaagtgccgctgtccgcggagtgcgcgaattcaacccggaatacacggcacccgaatattatgacgagatg

SEQ ID NO: 110928 - DNA, 446 bp, Heterodera glycines
attgatccctacttgctccctctctattactcttctactcttatgacacttcctcacttccctcattcacattcaattaaaatcaaaaacatttgttttttaatcctcatctaatccaattgattgacataattaaaatgttgtttttttggtacaatgtcatccacttactcgttgcacccgtcaaagaatatgccattcaattttcgttggtttaaatattttccaaaagttcatcattcgaaaaagatttaatttaaaacatatttaatttttttttaatttttagggagtcgtaataaatcctaaaaaccctaattatttatttataacaaaaatgcaaaaacataaacaaactaaacatccattagcatgttccgatggaaaaagttattttaaaaaatcattaaaaataaaataaataaatgctttcagttaaccgtatg

SEQ ID NO: 110929 - DNA, 515 bp, Heterodera glycines
tccgaccattttcgcttcatttgcaacaccaccaatcatcgctttttgccattgggggttgggcgtctcaactcaattttgcattcgactgtttgcggagttggcccctctaatttttcagccggttttgcaaatcatttggtaaagccaaagggccgagtaaaatttgcgcctcatttttgatgattccttttttgataggttcaacatcgctttttttcttcaaagtctgatggtttgaacgtcttcgaaccgaagtggaagaagggtaggcatgggagggaccgacctagtgtaatttccatttgatcattttcagcaattctagttgtactccttgtctctgctgttatcgttttgataatactggtttgttcgcatttgtttccttaaaatttgacccctaatatctttaggaggccagatcgaatttggcgaccgacgaagagggggaaggtttggaggagcaccggcggaaggaagaggagaagcggaggggccgccaggagcggatg

SEQ ID NO: 110930 - DNA, 147 bp, Heterodera glycines
attgataatagcagcagacaactgttgggacgacgcctttacagacaacccattcggtaatgaccactgtcttttgctcttccacctttgtaatttcagagtgagcaagtcgagaaggcgcgccaggacaaagatgatttccatatg

SEQ ID NO: 110931 - DNA, 656 bp, Heterodera glycines
ttcggcttgttcaagagttgttactctcttttatcggttgccatcggttcgtttccgtagtccttcataatttgactgacaaataagcgtgggggggggaggcatttcgcatggaatttgtgttaattttattgaatttttgggaaccgctggtaatttgagaagacttcaccctgtctgatggattttttatttggggaataaaaaatgaaattttcagaaattttttagaacgttggtctttctttgttttttgagtgtttaaattgccaccctttttcttcagattccattactccgatttgctcattccttacgagaaattctcaagtgcctcccaaaatgcgttgccaaattacttaagtgttaaagccgaccaaatcattgacaattccaaactttgtagcattttaatgccatttcctacttaatgtgattaaaacagttttattaccacaaatttctaataattatttaatcggataaatttgttattttttaaatataattttttctttttggtaatttatgccatcactttactttgtatttttctccctttttctgttcctttttgattaataaaatgactgaagcttctaccgcttccaatggcatcattagccctgaggatggttccgcggaggaagaagatg

SEQ ID NO: 110932 - DNA, 1003 bp, Heterodera glycines
attaatgaaaaaaaaattggctgtcttttcctaattaaaaatgccatggtattggcgtgatgaattgccaaatagcatcagcagaaggcagtggagggcacaacaggtgaaaaaagcacaaattaatttttttaaaaatttctcgatcgaattaataattttgaaattatttttcgtttcttttcatagttttgtttttattcttgaataatcatttttggactcatttcagcgtctacatcgtcctatccagcgtgcgcaaggtgttttaaattattatccccccccccccataaagagaattaatgaaaaaattataagtctaactaagaaaagttaatgaggcccgggatttttttaaaatttatttaatttcaagtcccatggccatttgtacaccagcagtatttggggacagtacaatttcctccacctccgcctcatcttgttgatcctcgccatggacattttctcccaagacggtggttttattcatttatttttttttaatttaaaaattttaaattgtttaaaaatttttaaatttaaattctaaaagacaattaatatttttctgacatatcttataaaaaaatatgattgaataagaaaaaaaatataataataaataaattttttatttttttggcggcggggaaggcaaacacagcgaaatcaagtcaatgcaaacgcaccagtacagcggcctccagtaaaactgtttaaaatactgtactgccctttgaaccccccccccccatttttttaaattcaacagtactaatgctttggttttcaaaattttagtaaaaaaactaattacaatcgtaatattgtttaacccttttttcgcaccaaaaatacaggtttggggcagtacaaaaaaatcggattataacttttgggatattaaaaaaaaaaaaagcagcagcagcagcaggtgcctttgttcattcgctctattggtgctcagctgcaaccagtttcggttcagcaggctatg

SEQ ID NO: 110933 - DNA, 323 bp, Heterodera glycines
cttttcccatcacttcgggtgctaatcgcaaacatcaaagaaaaatttggttgcagacaaaaaataattgcgtacgatttgggaaatgtgacaacaaacaacgaatgggttaagcaattaataattataattaattcgatttaattaattatttctcattaaaaaattaaagtattgaatttgaaattactatgctttaaatattattggcaaaaatagtaaattaataatttacgtttaatttcattccgcgtttcattaaaaccgtatttatttgcacattttaaatttataatttgcaggtaactgagttgaattcgatg

SEQ ID NO: 110934 - DNA, 137 bp, Heterodera glycines
aaaataattaacgatgcgtcaaatgaattacagtcaagaacagccacaattggaatgataatgccatattatttcggaattaaaaaaaaattcatggagggaaatccaaacaccggtttttgttctatccgcaaatg

SEQ ID NO: 110935 - DNA, 458 bp, Heterodera glycines
tatgaaaataagtactatttactgtcatacctatgttaaatttgataaattagtttgaacttttgcaagctaatagagaaaaattctggctattttatgctactaagaatgtaaaatatgattgcctttaagcaaagttatgccatatgctttgtcgaaaaaattgctaaaaattttgaattaacgggatttctggcgtaatgatgatcaagttcctgatgttggaatacgaaacggccaagcaccggtctacgtcagttgggcccccacgtttgggccccagcatgttatttttggctataacttttttctttgttaaccaaatccaacattattagaattgaaaagaaaagaacaaaatggcgaaacaaaattaaatctatcaaacattttagttctttgattttatcgaataatctcaaatttagattatacacattttctaccgatcaaaaatg

SEQ ID NO: 110936 - DNA, 174 bp, Heterodera glycines
tctcgccgcgagaaactcgccgccgggccaactcgccgcgcgctttttcgccgcggggccaattcgccgcggccaactcgccgcgccttgttttttggctatctcgccgccagatttttcgttgaaaaaatgcattaaaagcaaaaattctttaacagttaattgtattcaatg

SEQ ID NO: 110937 - DNA, 560 bp, Heterodera glycines
atcatttttgcatattctttgtatttttcattttattgcttgcattattaacgaatggaaaataaaatatgaaaataattaagcaatggaagatgtaacttttaggtagaaaaaatgcataattaacgatttgaaaataaagttttgaaaaaattaaggattagaagatacaagtttttaagccaaaacataattaagcgttgggagtatttgtttttaggcgaaaaaatgcatagttaagaaaaggaagatataattaacaaaaaatatgaattttgtggtaaatttgggtgtagtgctgtgtgtatgtgttcaccagtacgtgtgtgctgatgatgatgatggttggctgcactcaccacgcccagtgttggtaatttcgtcaatgctttcataccatttgcagcctttaccgttaaattgtaaataggaagagttggaagaatgtgaagcttcacttttggtgtcctcctcctcctgctcctcaattcaaccgtccggacaactatggccgcgaaatttttccgacccccgacgactacctcgcccatggaatgatg

SEQ ID NO: 110938 - DNA, 1003 bp, Heterodera glycines
aaaggtcgttaaaagtaacagtattatgatagaaaagatataattaaacatgcaaaaaataatagttttgctaaatagtatcaggttaaataaaaatttataaatttctgccaactttaattatagttgtatgtgtgttcattgagtttccgatagaacatttgaatttacgccatgaaaaattaccaaactaaaatatcgaagtttaaatggtttaaaatttgacttctctgtctttggttattgcaataaattaataaagcaaaatactttctaaactaaatatataaattgactaacaaaaaaatatttgtcatatatgaaatcgaaagaacttggaagaaattcaagtaattcatcaaatttaaaaaatatataaaataaatgccattattaaataataagtgaaaaaatgccaaatccaaacatagaaagcttttcaaagaacatgacagccgaccaagttgcggacatctagagtaaactaaaaatatgccaaattaatcgcaaaagcaataattcaaattgctaaatttaatattaaaacaaagtttttaaactataatttaaaaaaatttaatactccattttaggataatccataaaaaattctttattacaaataatcttaatattaatatattttattcgaaaaattatacaaaataaaagataaactttcataatgtttcaaattaataaattaaagtcgtagtatggtcttgaggtattcaaatccttcctcaaaaaggcggatgatgagaggttcacacaacaaatctggcaaatatgcgaaaacaaacggcaagagaaacagaaacacattaatagttagtcagatgtaaaacaaataatattatttcaataatattttttaaccattttactttcaatatttatttaaaaactttaattaaatgtgtctttattattaaatatttaagatcgagttatgaagaagaaaaattataactaaaatcattaaaaataatttagtataatg

SEQ ID NO: 110939 - DNA, 69 bp, Heterodera glycines
tttttagctaaacaaattcaattttatgtattagaaatataaatcgcttttcagggaatataaccaatg

SEQ ID NO: 110940 - DNA, 103 bp, Heterodera glycines
aggtcgtgtcgcgccatcaaatcaagactattcgatgacaatttgttttaagatttgcaacccggacgggcattgcctgttctacgcgtagcaggcaacgatg

SEQ ID NO: 110941 - DNA, 258 bp, Heterodera glycines
ttgaagttgttgcgccgggcacgtccgcttcgtgtgtgatgaagtgttgtagacgatggacgatgataataataataatataatataatatgagggcgatgaagtgaattgtgaggaaaagtgaggaaatgtcgcccttttatacaactttttttcccttaatttcgaaatttttttgcttgtctatataaaggcgagcattgcaaaattttctctcattcatcgcgtccgttcacatttttaaattcttctattatg

SEQ ID NO: 110942 - DNA, 348 bp, Heterodera glycines
accagggctggacgcaactggattaacaattacggaaatccgcaattgcggcgattttctcagttgcggaaatccgcagttacgggggtccaaaaaccccgcaatttccgtaatcctcaattgcgtccagccctgatggcgacccatcattacgagccataaccccgaaactcgaataaaaaaccataaatccgatttttttttaattcacatcatttgtttccacacaattgccgaattcgtgatcagactaccctcaaaccttcttttggaaattatagggcctaaacgatattaaaaaacgcaaattttatttggcattttcccaatttttgctgaacacacatg

SEQ ID NO: 110943 - DNA, 342 bp, Heterodera glycines
  unsure (1)..(342): unsure at all n locations
attaattcactcagaaattttcattttgcatttaaaccctttaagaatnnaaaataanaannnngnnnntaccnnnacctatgaaacncatnnnganngnnnnggnannnnnnannnaannnnanncnncngnngccgaccccgaaaancaaccnggcnnnaaaggcacaaaggnnncaaanncgcaaaanaatggctgttctgcggagggaaatgttttgcgcttttttgtcatcggtgacatcggtggggaggagtatacggtagagggcaaacagcagcagtgtacggtggaaggacacggtaagttgaagagggagaacaaaataacattttaaaatg

SEQ ID NO: 110944 - DNA, 310 bp, Heterodera glycines
agtaaaaggtgactcaaaaattttttgatctatttaaaagcatatttgctttaaaaaattattcaatgattttcatcaaaaattttacctttttttgcggcacgttttttcaaaattttttaaaacatggcgggggaggtccggcggtgccgataggcgccgccgggaaatttttgaaaatttcagtcaatttattaacaaaatttgtaaaaaatttttaattttttgaaaaaaaaattcaaaaaaatttccgaaaatttccgactttttatcaaaaatttcggaagtcggaattccgactccaaaaatg

SEQ ID NO: 110945 - DNA, 885 bp, Heterodera glycines
atgggtcaagcccaggggaccagtagcgttttgggcccccgtttttatacccccgcgtttgggcccccagtgtcagacaaaattactcataacgccaaatagcgcatttggcgtaaatttttgcgcgctaattcaaaatttacactggtaaatgccttttttatattttttattttgatcagccataactcgcttcattcccgactaaactgaacaaatttggtatctaaaaaaagattttgtaatggagaatctttttttaagcgaatgttaagcaatttgacatctcagaaaaaagttgtgatagtttcaaatttttattacgttagaactcaagtcctaaactgctgttttcaccaaaaatcctaaaatttattctttttttatttattctatatgtccaaagtgatcttgtagcctataaaccaaaattgttagaatttgagagtttcaatgttttgtgactcgttttttacgtgttactcccatcggcacttttaccggcatttctttttttattctctgtcctttaggacatcaatttgctatgagtaactttgtcaagggtctgttgccatggcttgcccttatggcgaccgccccaattttcgtccaatattttcttcgcgttaaatttgatcatagaaaaactcgtcgtggcgatctgcagtttcttggttctgattctgacgcaagtacacgcaattacattctttttaatcacaaataatgtgtatgtacagacatcgggcacttttttacttgggacccccgaaaacatattaaaaattttaaaaaaatatgaattttcttgttcaatttgggtccggaattctgaattaattgaaatagatgacggatttgtggtcagcaacttcgaaaatg

SEQ ID NO: 110946 - DNA, 156 bp, Heterodera glycines
tgttttctttttccagtttcataaactaaacatttttaaattatatataattttttgaacgacgcaattccctgtgttttgttcgttcctcgcccccatctcccgttttttcagttggtcaaccagctgcaggacgtgggctacacagtggccatg

SEQ ID NO: 110947 - DNA, 72 bp, Heterodera glycines
ggtcaattattgcatcaatcaatcaactttaatcatttaattgacatatcatttcagatcaagtactacatg

SEQ ID NO: 110948 - DNA, 1003 bp, Heterodera glycines
gtataatgtctgtgatggaaacggcatttctcttttctcatctcggcaccgattttttgacttagatactcgcagattccgtagaataaccgcaaagaagcagatttttccaactcggtaccgatgtttcacgtgatccccttactgcagttatttacctaataaatttttttgaattctgttttcggtatatcaacgattagatagtgactagaagaggaacagggagggggggatgatactcgggagaaacggcggagaacgatattcgggagaataacggtacccggggaaacggcggggaacggtaccgggggaaaaagcgattatatcaaatcaaatccattctattattatatataatatataaaatataatatttcttttacataaaaatgtataaaaaaaaatcaattttcatcaattgcatcattcgcgcacatttgcctgtaaaatggatttttttgattaatccacatttatttgcccaaattgctggccaatttcattggcagagagggcaatatatttttttaaagctctgtgccgtaaggcccaaatatttggccccttcccattgacatggaaaattggtgccaattcattggcagggctaaattttggtggccgttacaatcaatcaattagcaattcttcacaaatatccatgcatatccacatgaaaatgatcttgccaaaagcatagaatggcattgccaaaaaattggccaatttctcctcctgtttctcaatgtacctaatgccaaaaaaaaattggcaaacccaattttcattgtcctgctaaaaacggccaatttctgcctccttgggagcagtaccaagccaaaatcgggcactttcttatgcgtgcgtcccattgtgttggcttctgctgttgccacggtggattttctgctttaaaagtccccgcaaaatccccacattttcactattatttgaaaaatcattttgcgcaaaaaaatttttatttttgtccgaaatg

SEQ ID NO: 110949 - DNA, 409 bp, Heterodera glycines
  unsure (1)..(409): unsure at all n locations
tcattatganaatgtcacaagcnnnaccggtgatcatcacatcacgtgcnaagtttccatcattaaacagatcaaaacagataaagcagccatagaacacagaaacaattgtaaccattaacaaatacaaacgaattttgcatttgttatgcctataaattataattgaataaactaattaaggataatacagtacatttcaccaaaaattaatacgatcagtcggtcaataccggtgaaaagcatcgcagtgtaaatagcacctaacaaattatttaataattataaaaattcatacatatataaataaattaccaaaaccaaatgcagggataaatacaatctttgtgggtaaacgaaaatcaattaaattttgtccagaaaatgcgatgtaaacaaacaaaaaatg

SEQ ID NO: 110950 - DNA, 110 bp, Heterodera glycines
aattgtttttgtttttcaatatttgtccaacaaaatgtttaaacgaaatcaccttattatttaccttttcttaaattattaattatataaaaagtgcacttttgacgatg

SEQ ID NO: 110951 - DNA, 225 bp, Heterodera glycines
atcagtccatcagatcaataagttggaggcggtgttcgtcggcacccaatacccggatgtgtgcctcagggaacagttggcaacgcaaaccgggctgagcgaggcgcggattcaggtgccaagggggggggcaatttggccactctttgtttaccatcccaccttcgcggcttaggtgtggttccaaaacaggagggccaaggcgcgcaagtcgatgaagcgatg

SEQ ID NO: 110952 - DNA, 540 bp, Heterodera glycines
atttaatgtattattttataaagtgcaaattttttttttcattcattcgtttgtttcattttttagtcataatcattatatgatttaatgattcttatatttattaaatatcaaacaaatttctgctttttttttattctcggtttgaacctccataattgccggtgtattcgagaataaccttttctctgttgctcttatttcttacaattagcactagcttacaatttaggcataagtacataactcagacggatagccagagggatttgaccccacccctcccccacgcccaccgggaacagacgcgctcatagaatagcaccgcttccatttttaaattttggcgcgttttccattcgtttattacctttctcatttggttttgggtaccaagaccgtatcgtgactgacttgcgctacttcaacttgtcttgttcatttatcgccaattgacgagtaggatcatcgctatccaatgaatcgctaaatcacttgcatacaggttagtattaatgaaaaaacagcgcagagaccatg

SEQ ID NO: 110953 - DNA, 1003 bp, Heterodera glycines
tttagtgaatataatttagaatattaataatgatataaataaaattttcatttattttttttgaaattatgtatatcctcaaatgtcggatcctcaaaagtcgggtcctcaaatgtcacaccacggtcgagacacctttgtgcatgtatcatcagtagggcttcgatttttaggtttttacatatttttttcctgagctccccgtggcctgaaacgcacgaaaaacatgtttttttgggctgttgttaagctacttttcgagttattagcacctattttctaggtttttatttttagcacctaaaaaacctaaaaaaatttaaaaaaacttattttcacctattttggcgttttgcccaaaatttgttaaaaatatgcaaaaaaaagaaaaatacacccctaagaaccgacccaaaaattttttcaaaaaatacatccctaagaatcgaccagaaaattttcaaaaatgcgcccctaagaaatgaaaaatttctcaaaaatttatctccaaaatttatttattttattttcttgacgataatttttgattttgaaaattatgtatatccttaatgacttggcaaaatatttttgctttttgatgaaaattttcgattttacacccctaaattcggaactttttggcacctattttcccatttttagcacctattttgggggttttttagaacctaaaacctacttattttggcagtttttagcacctaaaaatcgaagccctaatcatcagtttcttaggccataacttttttcttacttggtcaatccatacattcttggtatcgatcgaatgcttaaagtttagggaatttacaatacaattgcattaaaaaatagcaatgaaaaaaaaactcaacattcatcatttttcatgtatattcaagaataattactgatcggacgcttaaagggaaatagagccaatttttctatgctaaaaactaaaataattttactttttttaggattttgccaaaaaatg

SEQ ID NO: 110954 - DNA, 308 bp, Heterodera glycines
agagaaacaaaaaacggaaaacccaagtttaagcgggtcaaacaacattctgaatttaaacacatttttccaataaaaagttatccaaatagaaaaaagctctgctttaaggtgtcgtggtggtttctcacacaatgtttggagatttgttcacgacgtcggtgttgtatccggccaccacttcgatcaaggtttttttaaacaattgaatagtgtctgcacctttttgggacgtcttcccggatttacacaagggataaaattaagaaaatttggtgtgattcgttaacacattttattcaaaaatg

SEQ ID NO: 110955 - DNA, 696 bp, Heterodera glycines
aaaaatttatcgtgctttcaatcccggcgggatccccgcggggattggtaaaatggtagggagggatctcggttccgggatcccgatgaaatcccgatccgatcaatcccgatgaattaaaaaagcgctcgggacggatcccgaggtcgggatcccgaatttaatcccgcgggatcccgaagaaatcccgcgggatcccgatcccgtccggtctctagtaggaaagctgttctgtttggcctatcaccgccaaatgatcttttcacatcgaaagatattatcgtgcaataatgtgtaaaataagggcaaaacgtcaaaatgggggcaaacatttttagaggcgaaaattcaaaaatatggaatttttatggtcaaacataagggatttctagcggcatacaggagcgtcgtgcttttctcaatgaattaaagccgcaggaaaaataataaaaagcctaaaaatccgtccccttttgatcacgaatttaacattcaaattggagttttaaaattatcttttttcagcttctgccagctcacaaactcattttgaagcacgcttccaacgtttttgggccgatgttttgttttgacccaaaggaaccaaaaaaagaaaatggtccgaaaatgatggaataaaaatttaaataatattttaatatattttttaatttagcctcttctaattgccccatg

SEQ ID NO: 110956 - DNA, 820 bp, Heterodera glycines
attgactgtgatattagagaaagtgttttaaaacacaaaaagtatgtaacaggacaaaacccagccgggaataaaattcaaaaaattttcaaaataggaaattttacaacaaaaaaaatcttaaaaatattcttggaaaattctaagaaaaaaaaattaaaaaaatttccagcgattttttcaaaatttaatggtgaattactaagttttttttcagaaaaattttaaaaaatcgctgggaattttttgaaaatttttttcctttctaagattttttcttgaaaaatttctgtttgaattcccggctgtgttatgtcgggggctgtgctttggggtgcactgcaaaaaaggaccaataaaaaacggtaaattccctcctgagtcgtgtgaccagcaacatggacttccctttacgaagggaactttgccaattatgagtacccaaatcagtttttaatcatgccaattctgtagagcaccatcaattcattattatttaattttggcttttttggccctttaaaaataataataaaaaaaacaaaattaaataaaaagaaattaaaaatgttaagaacattttttcgaatattaatgtaacaaatgataattaattattatggggctgaaataagaagaaagagctcaaaatagcttttcagcatatgcaattttaaattttttgcgcattaaatttttttctgtccaaattttttttaatgttgatttttttttcttcaaattttcccttgaagattcagtaaaaatctagaattttttttaaactgtatttcttttagaaattcattaaatttttatg

SEQ ID NO: 110957 - DNA, 291 bp, Heterodera glycines
aatatttgtcgtaacatttttaatatttaaaaaaaaatagttgtgtgaccgattatccgattggacatccaactctccacgtgctctgcgaggaagttgattggcgccgacccgaggacaacccatacccgctcgccattctaaaagtgttcgtcattccaccgcgacaaatcgacatccccgttttgccggtcaaagttgacgatcggctttgttttccactttgcatcaaatgttgcaaaaaatttccgaatggtgccgtcaaatcatcatacagttgtactcacgatg

SEQ ID NO: 110958 - DNA, 330 bp, Heterodera glycines
tgtaagccgggagaagggatgcaactgatcagatggaagggcggcatatatcaaaaggattgctcataaaatgtaagaggggcgagcgatcaaattgatcagatgaaggggctctgcatataccaaactagttaagggtaattatgatgagacaaacaaattccatgctgataaaatgatcagaatacttttctgatcccgaagaaatgggataaaattagataatatcgtcatgatccgttgggtaaaaggttgatcacaagaaattaaaatcgaaaataatgcccccattttaaatccaagtattgcaggggcatcgaaggcgcaatg

SEQ ID NO: 110959 - DNA, 59 bp, Heterodera glycines
tttttgtttaagtttaaacttatttcgatttgttccagagcaaacaacaggcgacaatg

SEQ ID NO: 110960 - DNA, 60 bp, Heterodera glycines
cattttcacattcatcttttgtgatcttgcataatttgtcgttaatgtttaggtgaaatg

SEQ ID NO: 110961 - DNA, 252 bp, Heterodera glycines
agtccaactttcggcccaacgaagtgcaccggtgctgccggggttgaattctgttcaccgaccaatgcgcggccggaaagtgttccaacacgaccgttcagttgtgctgcattcagcggttcctccaggcacagttttagcaaaaatacacacagaaaaatcagtcaaattggccaccaaaacaaacggaaaacttccgatttttgccatccgccgaattggccaaactttgccacccctcaggcaaaaatg

SEQ ID NO: 110962 - DNA, 113 bp, Heterodera glycines
tgggggcacaactgaaacgggcgaggggccgactgatgcctaaatgggccaactgatgtcagaaagaattccttacattcatccctaaattgccaaaaattatttcagaaatg

SEQ ID NO: 110963 - DNA, 643 bp, Heterodera glycines
tatgtaaaacatctcgatcaaaactttgttaataattttcccgcattttaatgattaattggttcttaattaaattacccaaaaattgatttaacaactgtaactaataattaaaattctttgattttttcatacttcagtagtaaaccatacgccacctctgcagcatgacactaattaaaagtgacagctgaccagtggaggggggctaattagctaattgattgacagctggtcaaagggaaaagtgacagatggggggaattaaaatcaaaacctatgggagggttttcgggtgactaattgggggggggtggtcaattaattaattaattatttgggtggggaaaaagccaaaacctatggggatattgctgacaaattggtaacacgaattaattgtttactgcatttcaacaatttgtttggctgaatttttgagcagggtcggggggacgcgggggtgaccaatcctaatcccatggatgggagggtgggtgattgacagttctgctaaagggtgtggaatttccggcaacgaaggattatgcaaatttgtgcgcggcactagtgctgttgtttggagctgccaaatatccattccgcaaaatattcttaattcagggggcgggctcaaaatatg

SEQ ID NO: 110964 - DNA, 176 bp, Heterodera glycines
aaattagttttcgagttattagcagtttttagcaactataaatcgtagccctagtaataaagtcacagttattttaattttttgctaaatcatccgcagatgatagtccggggtatgcgctcagtgcgtggtattgcggtgggcacaacgatgaaacattttgtgccgaaacgatg

SEQ ID NO: 110965 - DNA, 170 bp, Heterodera glycines
ggttactgatcagatatatcgcaaaaatcgccgagcccactgatcagtgatcactgatcccgtatatcacacaaagcaattaagcagaaaaaaggaaattttgtcaagaatttgtgtgcttgtgattgattgtgcctacaacaataatcatcatttcctaaaaattgatg

SEQ ID NO: 110966 - DNA, 340 bp, Heterodera glycines
taatttgaaaaattcaaaattccgatttttattcgagttcgggttagggattagaaattagtcaaaatacatgtcagattcgtgattagcgacctttaaaaccccggataaaaaattatcatggttttttatcttaaaaaattttgcaaaacaaaagggtccccccttttgtttcaaaatgcacctctttgtaaatagcgccaatttatctacatccccatttcattttttttaatccatcaaagttttggcacttttttggcgtcctccatttaaataaacaaccacaatttgccctaatttttcaaaaatataacaaacatttttttgtcaaaaaatg

SEQ ID NO: 110967 - DNA, 422 bp, Heterodera glycines
acggtcagtctccaggccccaaccccccccccacccccccaccattaaatttttaaattttttgtggaatttttttttcgtcaaaaaagtaatgacgaatggttggcctatagagaatttcaaaaatatacatttaaaaaacatttaaaaaaatatacatttaaaaaaacaatgacaacgaacgattttttgggcgattttatttgaagggacaaattaaaaaaaagagaaatttgactgaaaacaaattcgatttgagaggattacttttaaaaatgttttgaccaatttttccaaccaaacagaaattgagtgttgcgagtccatcaaatggtactggctgaaccgtcccgtgttggacccggagatggacgactgtactgctccgcgtcgctgaacggggcacatcggcgggcacgatg

SEQ ID NO: 110968 - DNA, 203 bp, Heterodera glycines
caaaaactaaaatgaatttttgtacttttttttgtttgttgaaaattttccccacccgctaataacgcgcagaagaatcttaattaatgagttttaattaatgaatttaaaacttcttagtggaccaatttcgtctcctgtggctttaccatttgtttttggcttatctccggcccatgttgtgtttctcctattttgccatg

SEQ ID NO: 110969 - DNA, 98 bp, Heterodera glycines
ggtttttattaatttaaagcaccaaatataacccttaccttttctctaaaaaggcatctcgacagttaattacgccacaggccaacaagccagtgatg

SEQ ID NO: 110970 - DNA, 523 bp, Heterodera glycines
tcttaatgtctctgtctacgcaggcagcggcgggtggtaggggcagacaaaggaaaagtaaaagaaatacgataaaagaaatgaaaaggagagacaataaaatttgtctcgcattccttccttatttatatcccatcttttattatttaaaatatttaataaaagaaagaggaaaggaatgcccattgaatccgctttggccataacaaaagagaaatctctaaattttaaatttaatatatggatgagttgggtgtatagatgagttgggtatggatgagttgggtgtatggatcagttgggtttggatgagttgggtgtatggatgagttgggtatggatgagttgggtttgactcccgagcggttcccgtgcgggggatcgattaagcgggtggtgcaaatatacccaaaaagaccagggaaatatccagaaaagcccataaattataacacgattgtctccattgagaaaaagagtactttaactagctaataaatgaaacactttagggtaagggatg

SEQ ID NO: 110971 - DNA, 211 bp, Heterodera glycines
tttcagaaaaacgcatagctgcgattctgaataaataacgcattgttgcgctttttcttcgagttgaatttgtgtcccacaaataacgcattgttgcgataagtgtggacatcgacaaatcaccgacaaatcgggccgtttttcgaggatcgccgtttaactttgtttttgttttgttgagtagtacctctgcggtagctcaaacaaaatg

SEQ ID NO: 110972 - DNA, 370 bp, Heterodera glycines
tgtttttcgtgcgtttcaggcctcccacagtccaggaaaaaaatatggatttccatgtaattctattccctaataattagacgacattttcgttgcttttgcccgcttcttctttttctttcgctggtggcgacaatggcctaaaattaagatattttaaatatgatcaaagtgttattctataaattaattcacctaatttttcaggactttttttcgtgactttttggcgatttttagtgccttaaattcccagccttatgcatcattgattgatttgtactttgctttctcattttaactgtctctttttaagttacataacaacagattttaaagggaaaagtgtgctaattgagcctccaaaatg

SEQ ID NO: 110973 - DNA, 279 bp, Heterodera glycines
tctccgagtagcagtacagaatttttgcaggcggcgggtctattagttccctgtaatttctcaacaatttcatcaaccattgcgttttgccactaccagtggcccccgacaaaattagagtgaatggcgcaataaacatttttatgcatacgttaatgcatcttcctctttatttatatagagatgttgacacccaatttgaccccattttatccccacttcgacttaatcatataattaaattgttcttctacttttagcaaggaacaataatcaatg

SEQ ID NO: 110974 - DNA, 201 bp, Heterodera glycines
ttacataacaaataatcactcgccactcattcataataaatgaaaagcaacgggctgaaaaaagccaatgttagcatattattcaggcattatcgatttgtttattacgtcaataaaatgagaaaaaattgagcaatattaatataaaaaaacaatattatagaatatttcaaacaaatatttccattttatgtaaaaatg

SEQ ID NO: 110975 - DNA, 54 bp, Heterodera glycines
tgtgaaacatcgttttttaatttccgtaaattttcatttttcagcttttccatg

SEQ ID NO: 110976 - DNA, 132 bp, Heterodera glycines
agtgaatattttaagctttttttaatgaaaatataatttaattttccttttttcagtttcatttcggctgctgaaaattacggcgaaggttcgcgcgacagaccggacttttcgggcgaaattctgaaaatg

SEQ ID NO: 110977 - DNA, 99 bp, Heterodera glycines
tttcaaccacgagtttgtgtatcaggtgccaaccctaaatgaatggtaagaaattaggcgactcatttaaaggccggtattcttgcccttgaacaaatg

SEQ ID NO: 110978 - DNA, 752 bp, Heterodera glycines
tttgcgcaaattattttatttaaaatgaatatttaattatttaactaaaattaaaatatcagtaagaagaaatgccaaatttccaggcagaaaatcccgccgaagtttggcaaaaatgatcgacttaattgtcttttggatttgacgttgattttgtaagattaggacgttgcagataaggacaaatcggctctactgcaggttatgcgcccaatcgacttttacgcgtccagtcgatgaacatataggcaataactttttccaccttagacacagggacaaaaaattggagaccggaattttgaaaaagtacaggaacagggcaagatttggaaatcacgctggatagtaaatcagcggatttgttgggttcctgtttttgcaaacttctcctcaaaatataggcaggttcaggaccagggttcctgtaaaaagttctttgttcctgtcgggtctctacaaaacaattttattttcttgtatttaaacaaacattttgccaaaaaaaaaattcaaaaaatacgaacaaaaactttcgctttcatttttccctcgcggtgtaacattcgttgtattaggtattattttgcgttgttttgtggataaaagaggatacataggatgatttcaatatttcgaaatctttttctttttctcttaagaattttacccaatttcgccttaatttttttaaattttctaggcttgcttactcttcaacaatttgaaatttttgcatatttttgattatg

SEQ ID NO: 110979 - DNA, 1003 bp, Heterodera glycines
gcgccttcttttcactttaccttacaaattagcaaaacaatgtcaatgatgtgattggttggcttttcttcttttctctgtccccctttcgtctctcatatccccatactatttctccccctcttcgaccttttctttcccattctctcctctgtctgtcctccatttctccgcactatttccccaccccctttatctctctcatcctcactttttgccatttactctcgtcactgaccactcattaattaaatttggactcatcttcttcaaagttggcattgtcactcacttcctttttttgtttcttatgtcactaaaatgccgtgccaatgaatgaatgaataatgcccttctccgtcatccaaaataacaaaacctttttcttcctccgcctggtgcgtctgctccttttcttttttcattttccgtcgcaatttctttcctttccctgccaatttcccccgccttcccgcgctgccctcgggggacatgttaatcttaattcgattcaccccccccatttacccattcattgaattggtccccaaataatgagtcggtcggtcgtccctttttttgtttgtccctttcaaaacgaaagaaaatattgccaatttccatcaaaatgtttgtaaaaatgcaataatattgttgtaaaatgtgttgttgcaattgccccgacactttgccattccttcgcccatttttcgcacattttaaattaaaaccgaaataaaacaaacgaaaaaaagggagtgaatgagcaaatgccaaagggaagtgtgcaacaaaacattaatatgtattgaacacaaacgaagaattattgtgaaatttttgcttttacagtaacattaccgtactcacttcgctgcagtttcattactgtaatcccaaccgaacggccattcgccgcttttcatttcctcctcaaattaatgtgcaaaaccttcaacactgcttctgctgctgctaatgagacatatctgctgaaaagatg

SEQ ID NO: 110980 - DNA, 775 bp, Heterodera glycines
ataaaaataataaaaaaaatttctgaatattttatgtagtcatcatattgctaaattatatgatattcaccaaataaattgtaggatagattaacaaaaactgaatggtacgcatgtggcaggattcgaacctgtgcaggaaatatccctttgcgacctaaacgcaacgccttaaccactcggccacacatgcggtaaaagtaatcgaaccattgtgttaaaaacaatgcaatcagataaaaatcgcatttttgcacattctaagagtccgttagttgcttttggctttgccattttttggtcaacaaagattgaacatttatgaaaagtttggactcaaaattctgttgatatcacgtcgttatagaatattgaaacagagttaattttattagtgatcaaatttaaatatgtcttaattattttttacggatcgaaaataaatttatatatttatgaattgaaaattctaatgcgtaaatatgtaaatttaaaaaataaataaaattatttcaaaaaaacatattgatgaagaaatagcaaaaatgttgaaatcacaggaaggaaatgaacataaataaggaatatacaaatcaatggaaaaatggttggcattggcatcatttccgggcaaaaaattttggaaaaacatttccaatttcaatgaaaataaacgatttttggaggaatataaaagccaaaagaaagccatgagaaaatcataattattttttaatttttattaattattgccttttccaaatcctttaaaatg

SEQ ID NO: 110981 - DNA, 391 bp, Heterodera glycines
tcgctcgggaacgaagtgaccgaaggggagccaaagccccgagaatcgaagcgggggacaatcccccgcagagcagcagcaaacaaggacgggagccagttcccggcggttgacgcagttcgcggccggaagtccaactcttctcccgaacctcaaccgggagcgccggcagctcttcaaaaagtcggtggtgccgttacagcaacaacagccaaccccatcttgtttgtcctccccaccccctccccagttcactcccttgggcacggacccgacggcagcagcaaattcggcaatttgagtgaattgggcccgagggacgggagagaaactcccgcgcacagaccccctagccgtcagcgccggccgagtgagtgcccttgaggcaatg

SEQ ID NO: 110982 - DNA, 188 bp, Heterodera glycines
tgggggaggaagaggaggaaacgcccagggcaaagggaggggggcaatggggggaacaacgccggaggggcggagggacccaacggcggcgcaaagggcgacgacgacacccgccggcggagaagggtgggaacggcacgaaaggtgcgcgagagtgacgcgaccaaggcacactcaccgactctatg

SEQ ID NO: 110983 - DNA, 320 bp, Heterodera glycines
tctgttttcctccaccacaactgcgggaacaactggcaaaaaatgacaaatcaaacacattttaattttgatttttatttgtttttaattataattttattgcatttttttactgtgtccattccgtccattctgtccacagattgttgttcttttcgcgatcggttgattcgccttaaatttgtacaaaaaatttgatttttaatcgatgaatttcctaaaaaatgccctgttataaattgccaaaattttcaacaacaaaaaaaatggcatccaatttgaatactgtaatttaatcaacgcgggttaccgtaccaatg

SEQ ID NO: 110984 - DNA, 59 bp, Heterodera glycines
ttttgctttgttttgttttcttaaacattatttgcttgtccatcctcaggtggtcaatg

SEQ ID NO: 110985 - DNA, 154 bp, Heterodera glycines
  unsure (1)..(154): unsure at all n locations
gatccgattcataagcctaganaattccaattttttactttttatttctatcaatataaatcaaaatgcatggaattcaaaatttgcaganagtgtggcattctatcgcgacccgttcaataagcctgagcatgagcacacactccgcggcatg

SEQ ID NO: 110986 - DNA, 504 bp, Heterodera glycines
aaacaattttaaatttttggcatttattcaaattcacttcggatgccatcctgtggtttttgctgacaagttttggcaatttttgtggatcaacgtggcggattccgttgaccatttatggaattcatgaagatttaggccagggattcgattttcggtttctctttgcctcgaaaattttgtttttgtttttttgaaacccgtccattaaggtttttcttggcaaattgaagccgtatttttttttaccgatttcagcgcggttttaagccaaacgcataattttgtgtaaatgcaagagaatttttgggttgcctcaattaaaattggggacctcgtaaattgttgaacttggtttttctaattttatcaaaaatttactgtgcccatatttcggtttattgcttttccactcataaaaatgccataatttgcgcagtgacaaagccgagtcggttcagcctgcgcaaagtgttgcggcacggcattcgcattgcccaaatg

SEQ ID NO: 110987 - DNA, 114 bp, Heterodera glycines
  unsure (1)..(114): unsure at all n locations
cggtactttcatattcctgtctctactgaataccactctacctggattgtttataccaatagnttttcaataataccactttaaaactgattcaccataaattttaagcaaatg

SEQ ID NO: 110988 - DNA, 1003 bp, Heterodera glycines
agtgccactgtggtcgtttcgtaaaagtgccaagtcgtttcgtaaaagtgccaacttgggaatgtttcgtaaaggtgccactgtggtcgtttcgtaaaagtgccaactattttattcgattttgataacatataaaatgaatatataaaatatataatttatcaatggcaatttttattttttatctgtgcaaatacgtgtcatccgagacttatacatagatgttagcgagaattttttattttttacaaaaacgctatgattgtgataaaaaatttgcaattgcttatatgaaaacgttgattgtttgctaacaaaagtttgttttgtttatttttaatgagattcttatgtttagaatttgttatgctggtcagtccatattttggagaacgttttaaagaacattgaaaaataacggattttatttgattacagttttcaatattcatagtttactaattatataatatgtataacacaaacataaatttttgaattcataactctatactcaaccatatttttataatggttcttttacgaaacgaccacagtggcacttcacttttacgaaaatcccaaggtggcatttttacgaaacgacttggcaccgatcaaaatcacaacacctgctgttgtgttgttattttgttttgttgctgacaaaagacgtcgttgagaagcaatgcgacgatgagaaaaatgaacaacagaaaattattattgtttgaagccatggcaaaaaaaaaggagaggaaaactctgacaaatttgaaaaaattgtgaataataaatgcgaaaatttgagatacctattttctatataaaattttttagtgctaagtaaagaccttaaaaggtttctttgctacagaatacttacctattacatagaatggcattcgcgtcaaacgacccgttcctttttatacccgacaaacgccgattccgacttttttcccaccccgaattgctacgctaatattttagtataaaaatg

SEQ ID NO: 110989 - DNA, 55 bp, Heterodera glycines
tcttttggcccaccagttcccccgaaaatggtttatcgtcggaatcggcacaatg

SEQ ID NO: 110990 - DNA, 620 bp, Heterodera glycines
tttggggtttggtttcagaaaattttttattgctacatatttaaaaaaaaattggcaaatatttattttctcaaaaattgcaaattctcaaaataaaaataaaataatattagcaaattctcaactttcgcatggctatcatcgtttggccaggtggaatgacaactcagacaaaaagcaaagctataataggcaactcgtagacaaaaacaaaaaaaactttagagtttcaaataaaatctcgaattctcaaaaagcaaaaaattaaaatgaatttttttgttagaaaaacgaaaaattctttaatttttgttttttaaataaacttcagaaatatcaaaaatatatttcaataatgagaaaaaaattcattttctagcgaaaaaaattctgattggaaatttgcaaagttttcggtgcacgaattggccaatttactcgcttaacccaaggaaagggaaatgcgcaaatggatactgtatttttaattggtacagtagggccgtaaaattgtttatcggcccaactttgcacttttcgtaaacattcacgcggaaaaacatgaactaatgaagcatttaatgattagggttataagttgtgaaatgaagcatataatg

SEQ ID NO: 110991 - DNA, 90 bp, Heterodera glycines
agaagttacatcagaaatttttgcaggtacaggattcataagacgaaggtaactgattgaaaggtatatttttgtcatttcagaacaatg

SEQ ID NO: 110992 - DNA, 706 bp, Heterodera glycines
ttgaaaagtgagttcaaaacttcagagcattcttcgtatcacttaatagtcctaaagattctctatccaaaagttacaaaaaatctgattcaagtttgtcatcgtagttttgcaaggtgctaggtcgttccacaaaaaagctcagtgtgggcgttgcacgaaaaactcacagtaatcgataaaattaaacaaataaatttaattattcaattcacaaaacacggtgccgtccggttaaacttgtttcatcaaaacacaaaagactaaaggaactctgatattctttgccacacatcgacccatttttgggctaattagaattgttcaagggggggggggtggcacccaagaaaagcaaaatcctctaaacataatgaccacttagttccttgcctaactcttttcttaattgccaaaacataatttttggtaccaaacgagtgttaaagtctcgaaaatttgtaaatgtaagaaaagagatacggtgagaaaaggcaaaattccgttttgtcccgagtatatttagaaataatggtactttggctttatttgccacaaatttcaaattaattaatttattttttataacttttttgtttacaagcaaaaatagttgaatacagttttgtttaaatttcacaagccaaagtagtgttaaaaatttcattccggtttctttttgaaaaaattccatattttagacatg

SEQ ID NO: 110993 - DNA, 128 bp, Heterodera glycines
taattcactaattacccccccccccccttatgacgacccttcctgttcgcgtgttgtccatcaaacgggccgagtacagtccgctcaatgcccacttggactctcaacgcatcggcagcttcgaaatg

SEQ ID NO: 110994 - DNA, 265 bp, Heterodera glycines
aaaggtgtatcatgttttgattacctacgaaaataaaaaaagtgggtaataaaactattcagaaatgatgatatagccggggcgttaagtactctccaccgacacggatagtcttgttttctcacatctacgcgatgctttttagctgaataagatcgacactataagcagttaattgatggaaatcgaagaattctgcactgctggtgcaaaatagtatgcgttggctttaagacgtataaatgttctacatgatgcggaaatg

SEQ ID NO: 110995 - DNA, 336 bp, Heterodera glycines
tgcgtttttttcgcaatttttttttaaatttaatgcctcagcggatgggacacagactccgattcaggaattcttcaaattctttttcgaccggaattccaaaatttatgtggtcggaatttccggtttccagagaaaaaattttctgcccctgggttgagcggattttttttatggcttttttggaggggataataaaaaaatttgtttgaattttaaaccaaaattttttttcccaaaaaattattttctaacattaaaaatcagttacaattagcctatcgtattattatttctgctcgcttcaattgtgccaggatttggctgtcaactatg

SEQ ID NO: 110996 - DNA, 65 bp, Heterodera glycines
tgcggcttgcttacgcagacgaggcagaggcggtacacggcgctggcgacgaggcgggcgcaatg

SEQ ID NO: 110997 - DNA, 439 bp, Heterodera glycines
gatttggttgacaagagaaatatattatagtaaaaacattaaatgggatagaactgtgcggggccgaactgaggtatagcagccccacccgtttgccggacggaaatggcattagctcaggcagtggcaccgacggcgccggatgcgtagcgggtgagaatacctcataaaaattagacatttagtcaaacgaccgtgtattatcctatttttaggacaaacttctatgtccattaaaattcattctcattttttaaaagaaatctttaaaaaaatacctttttcaattaaaaatatcaaaataaacatagaaaataataatatgttaaattttatgaaatcatttgcttattttatgaaaattggtaatgcaatgaaaaataataacaaagcgttaaaaattaatccaatttatttacactccactaattttaggatg

SEQ ID NO: 110998 - DNA, 412 bp, Heterodera glycines
actgaaaagggagggagggaaaggacggcgtacacttgggaggggaaaagcagcgaaaattcggcgacaactcacgttgatgaacatctgcttacttggaggcaaacttaattgaagaggaaaaacgaataatctaagcgaaaattaaagccaaataattaaaaaataattagtgctgagatttcgatgcttacgattcaatgatgacggggtcaaaatgcaaatgaattctcaacggacggaagtcacggcttacggccaagtcgcggcgaaagaggcgccgttgtcgcgcacgccgagggcgacggaaaggcgcagggcgcggaggggaaaaagggaatggacggagcagaggcacaccgaaagtgagctgatcagggccagggacctgaagcgggatacagccaaaatg

SEQ ID NO: 110999 - DNA, 346 bp, Heterodera glycines
tttttttattgaagcattcatgacttttatgttttgtttccttgtatttaagtcgggtttgaaccaaaaatgtgaaactcggaaaatttgaaatttcgacttttggttcgaattcgggtccaggctgcggagttggtcgaaattgacgccatttcgcatcacttgccctccctctctttccttcatttgctgttggtgctgttacctctccattctctttcagcgcctttttgctgcaactcacctctctgtgctgctgttctgccgccaatccgctccgatcgccgctgctgcggtgtgtgactttttgtgttgtgttcgactcgactccgtccgtccgcaaatg

SEQ ID NO: 111000 - DNA, 305 bp, Heterodera glycines
caggttcgaatcctgcggcttgcagtttattttttactttttttttaactatgcatatttttggttggaaaaagcatagaaaaaaataaaataaaattattttaaatttttttaaaatattaatcaaatcttcgatgacttaatcacccaaaataataaaaataaatttaaattttttttaaaatattaatccaatcttcgatgacattaatcacccacccaaaacaattattatttttttggttttcactattattcgccttagaaataaattttaaaaaattatcaaaaaagaaaattttatg

SEQ ID NO: 111001 - DNA, 521 bp, Heterodera glycines
  unsure (1)..(521): unsure at all n locations
tagtaaaaaatattaatatattaaatatagagtatnaactagaaatggccgaagaaataattagctcgaatatttccaaaaaatgagtcaagagactgaaaatggaaacctccgcctaaaaaacgaaattttcaatctaaatatattcttaggtgggtcttttcttaatttattgtaatcacttaaaataattaatttttaaatttccatagagcattaattcattgttcgagagtctaagttgtcgggaatcgaggcaagattgaagtgtctcttttttatttttatgagttttattttcaatttttaaattttcctttcggtttcgtcaccatcgaaatttggttgaaatactgaaaaatttacaccgctaaaagcgatccattttagtataaaaattatttgataccaaaaatgatttgtagtttgagaccgaaactctcgagcagccctaatattaaaagcgactggacatttggaccaatggacatctggacggtggccattactatagtataatg

SEQ ID NO: 111002 - DNA, 1003 bp, Heterodera glycines
  unsure (1)..(1003): unsure at all n locations
cacatatagaaatttttaagaaaaactattattttttaaagttcatcaaaaattcaaacttttttcattaatcaaattgaaatcctttatttttctctgcttttacatctanaatttatttactagctctttcaattaaatcatttatgactcaaaagcccaataaaaatgctacaaaaaatgccaaaacattagttcgttttagaatcatccaagctaatcatcagctcattgataaattcatatcgaaatatttaaaaaggaaagtaattttaacatgaatataaatgttgagtataaatattaactcaaaaaatctcgccataaaaagttataattttcaaattaaaatcacaaaaataattttaaaaaatattccacgaatatataaaataatttaaaaactaaatatccaaagtaattttaatttattcactatttaaataagagaaactataaatatattattgtctaatgtcagcagaaaattactaataaaggcaacaaataaaaacttcaatttataaatgaaaaataagaaagtaactaaatggtaaatatttatcgaaattaattgagataaaattaatatttaggtaccataagaattgtctaattatgtatttgtaagagtttggtccaattttatatttatttactcaaattaaatatacaaaattaaataatttaaaaacatatatgaaaggttttaataaaaaagatttcaaaaaattataacaatgaattgattgaagaacttatgaataatttaatgaaggaaaattgcgctcaaaaactttactttaatagaaatttaatttaaaaaagaattaaagaatatatagatagtttcgctggttcgacaaatattttcaaataataaataataaatacaaaatcaagaattatctatataatcatatttaatgcattatataaggctaaatattcaggacaagataacgaatataaaatataactctaattttcgagaattgatatg

SEQ ID NO: 111003 - DNA, 686 bp, Heterodera glycines
aaattatatagctatttttctcctcaaaaatcgccgaaatcgaccattaaaattgtctcttttctctatttttttaattgtttttgttcgttgtgcgctatttttatataaaagtttattttgccattttccctatgagatttaacaaatttataagcgctttgctggtggcgtagaagcattttcggcaactgtgaactttgcggtgctaaaccaaggccacctgccacctaacactaacaaatatgtgaaccccccaacaaacagccaaggggcggccgagacagggttcagtggtcgttactgtggacatgccaccattagaaatgaattacatataagtaaaataggttaaatggcaaaaataaaccaaaaaaaagaaataaaagcaattagacagacaacgaataaaataattataaaaatgaagaaaaacacagattttttttttttggtcgttttcgagagtgagaaatagggcgtcggaaatttttttgttttcgtttttgtgtttgttttcgtatttggttttttttctctcttcactatcggcagtaattatatggctgtaagtttttcgtaagtttggcattcgacaaaaaaaaaacgaagggtcaaaacgattcatttctaattgattcccattcccatctcagtgccgttgaccaacaaaaatagaggaaatg

SEQ ID NO: 111004 - DNA, 105 bp, Heterodera glycines
tatccattaattaagcctaagggcgacgatggatacaaatttggcattccatatgccaaacccgcacaaaaaaagaggagaagtgatcaatgtgtcgagcaaatg

SEQ ID NO: 111005 - DNA, 198 bp, Heterodera glycines
attaccccgtgaatgcgtgataaaattattgcttgtagcaaatcacattaattcacgcttattattagaacaataaaaaattttattttttggaaaaagtaggtccaaaataaggccggattcgtgctcagcatccgaaaataaccccagaaaaattttccgattaagtttattttagagttactaaactccaaaatg

SEQ ID NO: 111006 - DNA, 189 bp, Heterodera glycines
aactaattgtggtaaaaaccaagaaattattaattttttgatcaaaaaaagattttagcgttgaccatactcttttagacagttttggcacactttgggaaaattttataaaaattttgtgaaatttgggtgtggcctagtctcagagagggtatgaataagtaaaacctgtaatgttgatagaaaatg

SEQ ID NO: 111007 - DNA, 392 bp, Heterodera glycines
actcgaaatttttaaaattaattgggaggtaaatgaaattcgctctaggtgacaaaacgtgcaaaaaaatgagaaaattaaaaataaataaagaccgaaaaatatgaaacccacgagaaaaaatgacagattttgcagcacaaaaagacatttaaataagggtggattccattcccggccccgccatttccccacgaaatttaaatttctaagttttataaaaaaaaatttatgaaaatttcaaaataatttttttgaaaaaaacgtgttgttagaattcattaaattttggaaagatcgccagaaaattttgcaattactatattttttctttaaattttcttataaaaaaattcgaagattttttataattttagaacggaagagatatg

SEQ ID NO: 111008 - DNA, 386 bp, Heterodera glycines
tatggaaaatattgatatagaaatccttcctagaagctttaaaccaagctaaaaacatgtttttcgtgcgtttcaggcctccaatagtccaggaaaaaaatatggatttccatataattaccagccctactcattttactaaaatttgaccagaaaatggcaaaaaatttggtatttttttggcaaaaacgaatacaaatccctgcttttcctccgtgcgctgaaaattttagaacggaaccttggattaatcaacttttgtgggttcaactcacctccttttctttcccaaccaaaaagtgaacgtccgccccatcgcccgtgctcaacatcagcttaaaccgacccagcaaattgctcgacattgaaatttttaagaaaaaatg

SEQ ID NO: 111009 - DNA, 119 bp, Heterodera glycines
attcgcaagcatttctctaaaatactgggttcagtagtccgataaatactggcagaaaccggccctgttccgctctttctaattgcctgccgaaacagaaaatttgcaaacaaaagatg

SEQ ID NO: 111010 - DNA, 217 bp, Heterodera glycines
taacggaagcggcaacacttcttaaatataatttatttaattattatattttgtttattaattgttcaaattgcctctattttaaaaaaatgtctttggatagacagagcataattttattagttttattaaacaaattcaaacatccttttaatggccaattattgaagataacagaataatctaattatttttagttaatttatccattgaaatg

SEQ ID NO: 111011 - DNA, 1003 bp, Heterodera glycines
gtgagctgcttgcgcggattggatacaggtggaaaaactaattttttaggcccgataccccaactcggtattttcccaaattgtgttaagaaaagaaaaacaatcacaatttaaaattagaataaaaaaaagtcgaaattaataagaaattgaaaatttaaaaaatactcccgaagttttctaggataaaatagcaaaaaaaaaaacaaaaaaaaaattgaacacatttttgggaaccaaatgacactaataaatttccaatacccatttggggggtggtcctatatgaaattttctgcatttttgtattaaatgataaacccaaattagttttattggttgacaaagttttctggatatttttattaggcaattaattttcttactacacagctcaatttgttcaatacaattgaatgaagtgaaaaatgcttaaaatatttgttgcctgttcggatgaatccattcataatgagagatataatttggcgaaagggcataaattaaccaaaaaataagtaaaaagctatttccttttgaaaatactgatcattaacgtaactgctctcactgacaaaatttcccagagagccataaaatgcttcatcggcataattacccattgccattgccaactctatcccttttatcatttcgttttgttccatatgctaatacatatttccttgatttaaaaaaaatatttagcaatttgctttaaatttgaaatatttcagaaataatactttaataattactatttaaccgagttcgaactccatctttactcaccggctcatcactcaagttagtgttcggtaaagtgcttcaatgacaattataattaaaattagcacaaagttattattaattaaagcaaaaacaaatatttaattttggagccaaagctcgtttattccctatgaactacacataattttttaaataagaaaatgataaaagtaattaaatttaaacactttcagaattctctgttgaaatg

SEQ ID NO: 111012 - DNA, 273 bp, Heterodera glycines
aacgaattggcaaagcaaccgaaaacggacaatgatttaaaaatgacaaccgaaaaacagaattgttgggtaagtaattgcaactttatttagctcaaaagagcaagcatcctgttcaaatatgtttaccgtgcatttcatttatttttaaataaaattataacgtttttttaatttaaatacttttacattgttgatggcttgccatttgatattttaaaccttttttctttttaacttgcaacgtttaaaaatgtcctgacttcaaaaatg

SEQ ID NO: 111013 - DNA, 1003 bp, Heterodera glycines
aaaaaccatcaaatggaaaatttttgaaaaaaaattattgttaaattgattaaatgaaccaaattttaaaatattaatatcacccaagtgttttctatagggttcggaaccccgcccccgtcacccccgcccccgccgggggcgggacaggttttttgggcctcacccccgtcctcgccttcttgtaggagttcgacaccggttgagttttcatttgaatttatttatctgattaatgcaggatttctttatgttcttatttctaagaaatgttctgattttagggcgtattatcatccaaaagaatgaaatttctgaaaaatttggctaatttctaacaaaattcataaaaaaaaaatttcccccggcggcgcctatcggcaccaccggcccccaaaaaacctattttttcttaaaaaatagcataaatcaataaatttggtcattctttagacaaaatctgtgtaatttatgccaaaaggaattgaatcgaggcgatacatcgactaaaggaatgtggagccaacacatcactcataaaattaagcgttaacttccaaaaaagttatgactagggcataaaattatatgcacataaaatcgtaaaatatgcatcaaaaattgcaaaatatgcacataaaaagtgacaaatatgcagataaaattttccaaattgagtgcaaaattttccaaatctcttcaaatttgttaaattaagtataaaaatctcgaaaaatctaaatgtagtatgaataaacaatttaaaactaaaaatacaaaataaatgtaaaatttatttattttgaagaaattgtgaaaaaataatgaattttctattttctgactattttggcataaatttccaattttttaaaaagttacttttttattagaaaataccaaaaaatgatatttttgaaaaattttcggtcattagaggccaaaatggccgttttaatagaggattttgttgaaaaatgctcaaatatgcacataaaatatg

SEQ ID NO: 111014 - DNA, 194 bp, Heterodera glycines
gcatcagcgtgccacagcgtggggaaagaaattcgaaatgactgaagtttcgcgcaatgtttcccaattgtttgctgattcacatcaaaagagggtagatatgtgttcgagctaatgtgtaagtagatttttcccaaatcaatttcccggcggcatacataaaattattaacatcggcgattcatgaagccatg

SEQ ID NO: 111015 - DNA, 54 bp, Heterodera glycines
attcatgacccgaaaaaactgtgctttatgcaaaaattgaaaattaaaaaaatg

SEQ ID NO: 111016 - DNA, 326 bp, Heterodera glycines
tgtttttggctataacttttttctttgccaaccaaatccaatgttgttggtatcattcaagagcccttcagatgctctattagcctgcaaaattctaaaaaaaaattgttaagtttaaaaaaagttcgagccaaaaaagttgaaaatttggttttaagaaggcgtcgaatacgaacgacaaaaacgtcgctgtgccaatgtttatgatttgttgtgccattcttttgaagtattgggaccgcctcaaaaaaccaccaaaacaacgaagccatcgcaaaattgaaaaagtgccggaaattgtcttaacaatttgccccgacgaaatg

SEQ ID NO: 111017 - DNA, 419 bp, Heterodera glycines
  unsure (1)..(419): unsure at all n locations
ctgcannggtcattttgggcgggaagaaaaaagcgtaaagccgagaaaaatctttctggggagaaaaagcccatgaatatttaatgaggcaaaaaatgggtggttaagcagaaaaagaaaaaacgaaagtcctttcttctctctttagaaattattttattgaaattaatttaagaaaaaagaaattcgagaaaaaactctgaaaaataattagtaaattatttattcacaaattatttataaatgcattaatcattaattgatttccaattttgaaagttttctttttcaatattatttttttactttgttttttattgataattcatctttttcgatatgaaaatgcaaataaatggagaaataaatggcggaacaaagcaaaagttattggtatttatttgccctcacaaagaatg

SEQ ID NO: 111018 - DNA, 472 bp, Heterodera glycines
ggtaaaaggaacgggaaattactgtagaatggctactgtaataaatatatacaaaattattcattcattgagattacggtaccataaaacttcgcgtatttttgaatcgtgaaaatttcaatatattttaaaatcatatggttaattaggtatgtagctcaaaaattttctaggaatcactgtaccattgcaattacggtacccataagtcatctgttttttaacaataattagccaatcaattaactaattaatcgtgtttttcagctatttttaatttaaaaaaacgccctaaaattttttgacgatattttacaatattttaacattttttctgttgtattcaagtgcatacatataattgttatttttctcagaccctcctataataattgcgacttttttaaaatttttattaattttaatactattttattatttaaattacattattttaattttaatttttatg

SEQ ID NO: 111019 - DNA, 945 bp, Heterodera glycines
ttttggtcctaattaaaaaaatattttataagtaaaaattctgatcaaatttaaaaggtgaaataaaagaagtaaaaggtgccaaaatgtaacttatcacttgtaattgtttcattggattgcataagtcttctctaattatcactttttcgtccctttttcctccgtttccgtcgtaacttttgccatcctccgcttttcctccccctcccccccccttaggcttcgtcctttacttttcttcgtttttgcttataatcccttcgctctgaaaaataaacaatggacaaaaggcacaaaaagtgccgccaaagcccaccaaaacccaaatgttgttaacgcgcgtgtcattcgcctcccatttttggcgtgaccatttgtttctctcctttttattattcatttctccgccggtccctggcaaaattaaaatgcgaggaaaggcgtgcaaatggtccaaatgttcccataaaatccgtcctccccttttgttcgcatcccttcgcccgtccattcgtccgctgctgcactcttacgattagtgccaaacattccctctacacaatgctttatctcaaatccttatccccccttgagaccaaatgcgcagcatttgctggttgatctgccctaccaaattgacttttttttgtacttcactaatcagacaaacgaacaatatttatttaacagctgagaaaaatataattaaattcggcagattatccttttttccatttttagaataccgaaaagactatcccttagggttaaaggaactgaaaatccgaaagttttcttgactaagagataggttcttgagaagccttcccttttatggcacagtacccgagtatcaccaacgtttgtgtcaaggaactgtttgtcttggccattcgtccgttcgaatttcgcttcttcccattcccttggcctttgccaatg

SEQ ID NO: 111020 - DNA, 1003 bp, Heterodera glycines
aggcctaataatgagatacgtacataatttttaatcaaaaattctcgtcaagaaaataaataaatttttgagaaattttgcatttcttagtggtttatttttgaaaatgttagggtcgattctttggggtgtattttttagagctgagcgggaccgggaattttgacaaaaaccgggaccgggacttaccgggaccagaaaagtcgggaccgagacctcgattttcgcccgggaccgggaccgcgagaaaagccgggaccgggaccaaccgggacttttcccaagagaaaaattttttgaaaaaaatttgcaaaattctaaaaattttttgagaatttttttattgttttaatagattgaaatcttttaaattttttgtttttaaattactctttttgtggcgctgttttttcaaaaaacttttgtggaataaggggccggctgtgccgattggcgccgccgccgggaaagttttataatttttaatgcgaattgttaacagatttgaccacaaaaatgaccaaatatttggttaatttttgggtttttaggctgtttaaaaattaaagaaaaattaaagttggaatatttctttattaattaaatttaaattgaaatcatgtaaagataatatgaaattatatcccagtggggaattgaacccaagcgaaaaataatgaaagtcagaaggtttagccattacgccacataacgacataaacaaaactgggattcgtttttttcaaaaaccgggaccgggacctgaaaaaaccgggaattcccgccccggtcccgcgctcacaatcagctctagaatttttcgttcttattgcattttgttaataattttgggcaaaaacaatgtttaatttgagtgcttgaagaaagtcatgaagcgttgaagttggcagtttattttaaaatttttaatatttattatgtaaagttaaaaagagtaaatttaaaaattaaaaaaaatgaattttaggatggattgctaatg

SEQ ID NO: 111021 - DNA, 431 bp, Heterodera glycines
aaaaatttaggcttaaaccttcgggtttcgaatttaagaggggaggtgttagagaaggaagtaattattgattaggtgtatgaccccacgccacttcgccatcttccccctccgattcccctcattcaattattattgtgcccaccaatttgacctcccaatttattctctgcatttatttattattttattttcttcggcaaataaacttatttaatttgttatcttcggacataacaaattttggcgcagtcagcaatcaactgcacatcaccggcaacaacaattccgagctttatctcgtgttgatattgctcgagagggaaaattagaaagctcgtgttgatttctaattttcgcagatcatcaaaaacttttctctccgtgtgagattaaagtctgccgtgtgcagttctcttcaattggccatg

SEQ ID NO: 111022 - DNA, 526 bp, Heterodera glycines
ctttacgcctcgatttgaagcattttaactgtccgccgccggctcaatccttacaatattaaaaagtaatgaaagagcaaacgaaaacagacaaatttgaaaggccaaatttgggaatttggcaattggcccgaggggaaaggcactgaagaagcgaccctcggggcatttggacgggcaattgtgaattggatgaaatgggaggaaaggcaatgaatgcggcggaggaggaagcccttccttgcccaccaattaaaatgacaaaaccaaacggaaggaagggaaaaggggaaaagggagggggggaagggtaggggaaaggggagcatttgttggaacacgcaattggacaacgaaaaaaaccaacaaaagtttatttttctaacatttggtcaattgatacaaagtaaaaggagattcaatgtgctgacaacatttccttttccatttttttaaattcgtcattttctttttgttatttatttttttattttcatttccctcagatcattcgtttcccaaaatg

SEQ ID NO: 111023 - DNA, 250 bp, Heterodera glycines
atttgttattaaaatattcttgcttataaatttacaatttttttcaaaaatttttacctcaaaaaagtaccggttagtaccggttaccggtatcggtatcggttgaaaacctaagtaccggtaccggtctcgggttttccagtaccggctagtatcggtaccggttttcgtcaaaagtatcggtaccgtgctaccctaattttaactatttttttatgtacgcaaacccacccttccatattctcgcatg

SEQ ID NO: 111024 - DNA, 84 bp, Heterodera glycines
  unsure (1)..(84): unsure at all n locations
gcagttcatcaatcatttcttannatgttagtcctaaaaaaatctgatttggtttactcgaaattgtaaataagatntagcatg

SEQ ID NO: 111025 - DNA, 139 bp, Heterodera glycines
ggtcacactaatcctttttggcggaatttgagtgattttcttcctgtttttaatgaaaaaaacaggaaaatgataatatttattaaattttattgcatggatttactagagtacaaactcatagattttcattagaatg

SEQ ID NO: 111026 - DNA, 117 bp, Heterodera glycines
gaaatataattatatttaaaaacaaaataaataaataaataatagaatacaaatacaaaatgaagaataaaataataataattattatacaaaattgtttcttttttagaagatatg

SEQ ID NO: 111027 - DNA, 805 bp, Heterodera glycines
tatcaatttcacacgctcggagaagcgcttgttggggcggggggttaattgaggagagcgaacagctcaacaaacaatgaaattataatacaaaccgaaaaaaacggggacaaaatgcccgaattatccggaaaagccaaaggtatccgcaaatgtgaactttcgaattttataccaaagattaaatgtctaatgcttaattggatttaaatatatatggatatgaaataattagggaaagattttgtttttgctttgtcaatttgtagtttttctcgttttgacaataattatccaacagaacaagaaaatataaaactaattattattatttttatggcttaaccacaacaaaatgtttggttttttggtgggttggcacttccgccgccaacaccaaagcagcagcagttgtgaacgaattgcgagcggagagaagggagcgagcggatgcgatgtgttaatatttaatttgtgttaatcggcttagttccggaaaggccggcagctgtgagaaaatcgacaaattttcaaattccgtcgccggcggagtccaaaaaaaagcaacagcagccgttgccggggggccattaacttctcagggagagagagaggggggagggaggcaggggaaggcaagcgaaattacacggcccccccggggggtgttttgttttgccaggggaactaacagcgaaagtggggggggggggaatttgtaacatgcgaaatgatgaggaggagaagcattcattaacattagccaacattgggcaggcgaaaagccatcggacgaatgaaaatg

SEQ ID NO: 111028 - DNA, 619 bp, Heterodera glycines
ttttcatagttgttgatgcatcatttccaaaacaacaacaacaacaacagtccagcgatgatggagaaaatgttagcaatgaaaagcagcacgatgaaggtgaaaaagtagcaaaaggtaaagccgcaaaattttaatatatatctatatacatattattaatttttttttgttttaattttctttgattacgtatctccttaaatagagcgcccgagggctttatttttcaaccctctgctgaaagggggatttttatttcaggggggggggggggctctaatttaggagtggcctgtatttttattttattttaagggggagtactaaatttttatttttttgcttcatttcgagaaagtttctctagttttttttttttggtctcagtattgttttctgctggagttttgaaaattgctactacgaaagcccaaccgatgaatttttaataatttttaaattagaccgtgacatcatgcaaaaggatggccagcctttgtatttgccgccattcaatcgaccaatgctaatgccaggcaaaattcacgaaattttttaaattttataatgccaaaaatatttggggaattcagatgggagagaaagtgacacaatg

SEQ ID NO: 111029 - DNA, 62 bp, Heterodera glycines
atttaaactgcttaatttaaataattattagccaagcaattttcaactttttcgacaaaatg

SEQ ID NO: 111030 - DNA, 466 bp, Heterodera glycines
tgaaacgtgggattagaattacaacgatgaaaataaaagaattgttgttgataaaaatgttgtcactttgggtgggcaccgcaaaagtcggcgccgcaagtgtcactttggctgggcgccgcaagtgtcggcgccgcaaaaaaaatagccgcaaatgtcgggccgcaagtgtcggcgccgcatgtcggcgccgcaagtgtcactttgggtgggcgccgcaaatgtctgcgccgcaagtgtcggcgccgcaaaagtcgcatcaccctccgaaatagctgtttcacttagtcaaacccacgggcaacctacctcaataagggccttttctaaaaaggtggtagttgtagaaaagccgtggtcctctaaacagtggagggagaggcttgcaaaatttgtacggcttaaggaagccgtacatgctccctgagacttcgtgagttggaagccgcccgaggcgagcaaaatg

SEQ ID NO: 111031 - DNA, 117 bp, Heterodera glycines
atataaaaattaaaaaatgtaattaattaattactttcttaattaggatggcgctctgtttttgcgaaatttccaattacgaacttttgtcgtcccggaattttctacttcgaaatg

SEQ ID NO: 111032 - DNA, 693 bp, Heterodera glycines
ttcgggactaatgatctagacctatgccgattggaactcattttggacggttttttagcgggcaaacttctataatttttcacatttttgaccattacttttttgatcttgtcttttttatggtcatgtgaaatgcaatagagccaaaatttttcatcacaaaggaggcccccttaaatcattaatgggtcaaaataaataaatgtctttgatcacgactcagaaaaaatacaaattcaaaattattgaattggtcccccctttgggtttcatcgtcccatcgaaagtgccggtcattttgatttttaagtcaatttggcattttttgaggatttaaaacaatttatgattattttttagtctatgtttgctcataattgggttattagtccggacttcgggcttttttcgtctatattttttgtcatttaggagttttttagtccttaaaacttatagccctaataattaccataattgatgaaaaaggataattaaaatatattttttatggaaatttgtttttcaacatacgaacggaagcgtaggcattcttcagcttcagcagggcggatgaattatttggcaatcaattagaattgattgttttattatatttttccatagataaatttaaaacatttattttatttgatgttttaattttttttcatttctttgctcataaaaatg

SEQ ID NO: 111033 - DNA, 870 bp, Heterodera glycines
catacgggtcggtagtctcggaattggataaaaatcgcccaaatttggcaacggccactccgttctggtcaaagggcttggaaaaattaaggaatccccgtatctcagtaggtgagcccttccacgcttttaagggccgtgggttcttcggtctacctcagttgggcccaggcaggtttgggccccagcatgtttttggactataacttttttcattgtcaaccaaatctaacaatcttggtatcattcgagagctcttcagatactctaatagcctgcaaaattccaaaaaattcgtcaattttgaacaaatttgtggccaaaaaagttggaaccttttcagttttttttttaatataaatttgcgtgttgcgcccagcagatgagcgtccgttcgcctgcgacacgtgcggacgccgcttccgtctgcgcacgacgctggcggaccaccggcgtacgcaccaggaggtggacgcgtcccaatttcagtgcagcgcgtgcaacaaatgctttttgtcccgctctgcgttaaagctgcacatgcgtgcgcatactggcgaggcgccgtttccgtgcgcggacgcgtcttgttcactgacgttcaggtgtcaaaagcgggtgattggcataagtgatcagatttatcggatcacttccgatcagcagttaaattgaaatttgctcttctgacaactcttgatcgggaatattaagtggaagaaaaaaactggcgatgatcaaccgaccatgtgatatggttctgatatttatgaacgtgatcgcgactgaattatcgagtcccaaacgaatttctcgacttgaaacgctaaattaccgatcagcatttattttagaaccaagaaattaatg

SEQ ID NO: 111034 - DNA, 133 bp, Heterodera glycines
gagaaacgttgaggtatcccggacccgagacgtacactttcttagacatgaagaagttcatgaagaaaccgcgagcagcaccacgcttagcgagctgttcactgtctccagacgctccgattccggcttcatg

SEQ ID NO: 111035 - DNA, 161 bp, Heterodera glycines
tttgatttcatgtgggtgttggtgaagttggcaccggcgatttgtcgataagcgttcttcgagaatttccaaccatcacaaaatatgtcggcacgcaaagcacatctccaccaatttcgcaatggaaatatttgggctatgacagaatagttggcgcaatg

SEQ ID NO: 111036 - DNA, 61 bp, Heterodera glycines
ctatccattaccatctaattaagaattaattcaataattttccaccattaaccctccgatg

SEQ ID NO: 111037 - DNA, 59 bp, Heterodera glycines
tcgtttccgctagttcgccattcctttgttgatttcaccccatttcccaacccaaaatg

SEQ ID NO: 111038 - DNA, 407 bp, Heterodera glycines
cggaggaacggaaagagaaagaacacgccctttgggaacggttgaggcggagggtggaggaagtgcagaagaaaaacctctttctggccaatacactcgcaatttgggctgaacgaatgccctttttggtgaagcgactgtctgaccaaaaagtcggcacagaaaattgtgataaattggtgaaagcgattgaaagtttatgcgaatgtttaatcgatctgaaatttccatcgtggaaatcattttgtgaggagtttagcaaattgaaagacaaagagcaaaaacagtgggacgaacgaatcgcccggagcaatcggacggaggaaaaaatgcacgaaatttttccgtcgccgaggggggatgggatttggagtggagcgattacgtcacccctaaatgaaaaaatg

SEQ ID NO: 111039 - DNA, 155 bp, Heterodera glycines
tggccagccttcttcagcccgtcattccgatgttcaccgaaaattgccgagaggcgttccgcacgccgcgctggggccgtcgcctgacgcggcccatctacgaacacacgcggctgcccgtctgtcccatctacggcggattccccgtcaaaatg

SEQ ID NO: 111040 - DNA, 654 bp, Heterodera glycines
aattttaaactcagaaaattgccaataaaggtccaactgattggccatttcccagcacttatctggcgcgaagaataattaattctttttcaaatggccatttgggtcagcggaaaatgttgctgaaatctgagtattaaatgaccatttgggaaaatgggttttagtttatcccaaaagcacttaaatttccattaatagaatttaaaatggaaaaattttttagtttcgaaaattataaaatttaggttaaattctttaacggatttgagcaaaattatttaagatttaaaactcgaacaaattttcccacctctttcaaattcattaaattagaaaaattaattgcacttttgggttttcaattaatttgttttaagtttattttaaaataataataatattttccatttttgctggactcatttgccagtactgttttttaaattcgtcataaatgccaatatggatttattggtggttttctgccactgaatggagaagggcatttgttcaaatttttctggcatcaaatatttttttctaaatattggcatgaccatgaatttattttttcaattttaaataataaaaagatattttattttgaaaatttagttagatctacatttttaattataaatcatttaaatg

SEQ ID NO: 111041 - DNA, 320 bp, Heterodera glycines
  unsure (1)..(320): unsure at all n locations
gacgaacattatgtctctgggttatgccccgaattgaataggtccatgatttcanagccgtggttgtgccgtggattgattacccgacacatccggcttttttttgtcaatccgactcgacttttctcgccccggtgtaatagcccttgattttaatcccctcaaaatcggattaaaatgagaaaactttttcagttaaatcaaacttttgccccttttggcaaatcattttctttccaaatctgtaggtctcccatcgccacactttcaaatttttttggcggatttatttaaattcagtgaatttttttggctaaatg

SEQ ID NO: 111042 - DNA, 445 bp, Heterodera glycines
agctcaaagtctataaaagggagtggaaaatcgcttcccggatcatttttgaaaaacctagcgtaggaatcctacgctgactatgacctagcgtaggattcctacactagcctttcctacactaggctaatgtagttatcatactcgagctcaaagtctataaaagggagtggaaaatcgcttcctcggatcatttttgaaaaacctagcgtaggattcctacgctgactaatgacctagcgtaggattcctacactagctttcctacactaggctaatgtagttatcctactcgagctcaaagtctgtaaaagagagtggaaaatcgcttcctcggatcatttttgaaaaacctagcgtaggattcctacgctgactaatgacctagcgtaggattcctacactagccattgggattgtggtgaaccaagacctgccccttatg

SEQ ID NO: 111043 - DNA, 144 bp, Heterodera glycines
aggagtgccgttccaagtctctggtccgagattgacaccaacgaacctgtcgaggagtaagcttcttttcttcttttttttttgcttgcccccattcatccgtttcttcccgttaggttggtctctctcgaaagaaaagcaatg

SEQ ID NO: 111044 - DNA, 564 bp, Heterodera glycines
aattcaattttcctcggaattttaataaaatttcatttcccctggaacaaagcaaacactgaaaagccccaatccataggatgtggtcaacctcaaccagcctttgcatatctttaaaaatccaacatcaatacttacctgatgtttctgttattctttatgattttggtttcataatagacaatggccaaatgcgggaagagcacgaatttggcatacaaattttgattggctgaatttaaatttatttaaaaaagttaattttaatctttattgttgctaccattctttcttgcgcgatacacagctttcaaatgattgggttttattaggaagaaatcactgtttacgctccatcggttttttggctaaattacaatttatttcctttaaatttcactcttaaccggattgggcttcttttgtgttaaatttgacccgagcacgggctgctggtgttcctcgtgttgaccaaagtttagatgaaaatccttgaattattatatcattttaatttaaattataaaatccttgtcattttttagctaatagttttcccaaatg

SEQ ID NO: 111045 - DNA, 115 bp, Heterodera glycines
ggtaggcagcagcagcgaggcacggtttatgtgttcggcaggcacttttttgccaaatttaaatttttttagcaaaaaaaatgataaatttttcaggaattattgcccaatgatg

SEQ ID NO: 111046 - DNA, 771 bp, Heterodera glycines
actaaaaaaaattattttggaagttggccactaaaatcatttttttccactattttggcgtttcgtcactatttttgctactatttttgcattttttggaaaatttcccaaaaaatgcaataaaaacgaaaaatacaccccaagaatcgacctaaaaattttcaaaaatacacccctaagaatcgacctaaaaattttcaaaaatacatccctaagaattggaaaaatttcacaaaaattcttcccccaaatttttttttcttgttcaatattttctaagaaaatattttgtaactgcaatcagtgaataaaatctttttccttaattttaaattattttcaaattaaaaaacagctatttaaaaaattacacccctaaatttggaactttttcgccactatttttgccactattttggaatttttttctcactatttagttaattattttgggattttttatcactaaaaatccgatccctagtaatcagctaatgagttctaattgttgccatcaaaataccgttcgaaattggcgctgtattcccagccattcccgacaaatacacaatgccatcattttgaaaatgccgcgttcaatttattacctaccgatcacaattgtgtccgcgtccaactccaactgttgttgttgcagctgttgctgcttctgctgatgatgctggtgatgttggaggtggtgattgtgccggtgccttttctgtcccctgctgccggtgttgtcattgttgccaattgtgcggcaacatg

SEQ ID NO: 111047 - DNA, 78 bp, Heterodera glycines
ggtgacgaaacagcatgtgttgttgtgtgaatgtcgcgccaatttcgattcggatttatataaaatatgtagtaaatg

SEQ ID NO: 111048 - DNA, 59 bp, Heterodera glycines
tcgttttccaggtcaaattgctgttcaccttggccaaagatggcggcgtcgcgcggatg

SEQ ID NO: 111049 - DNA, 194 bp, Heterodera glycines
tatttctttctaacatttgtatgtatgtacgattttcttattttgcgatttatgtccgtattttgcagaattaaacgttaaagactaaaagaacttcatttgcacagctttgcttttccaacctgtccttttctccaaatgttgtttttatcgttgaaacattcataaaataacaaaacaaaacatataaaatg

SEQ ID NO: 111050 - DNA, 1003 bp, Heterodera glycines
aaaattagcatttaaataaacggcatccgattttcactgaattttttagtttttgtttgaaaaaaaaattcccattcgtttactcatcgatgtttgcatatttttcgtttcattcactcgcttctcgcattacaaatgatgtgaaaattgtacatagataatcgattaaaatggaatggctttgtgctgtttgaaaatacataaagcaaaaagcgaggattggatttaaccaatttttggaaaaccaaaattttttttatttccgtattactaaaccaatgcgatttattttttgctttgttaagatcggagaatttagatttgagttgaacggacggacaaagacccccattaaatttgcttgtaccataaattttttcttttttgatgacatcaccgcaattaacgacgacatggccaaatttggacaaagatgagaaatggcggagacgacggcggaagggccaacaaatttccgtgtgcaacaatgggaagaggaagtgggaaaaataatgaaaattttacatttgttttgtaaggggtaaacaacaattttttgtcgatcggtccaacattgtgaatttgtttagtctggatagtttcgatcagaggccaaacgcaatttttttttatcggggattgcttgaatgagtccaagccgacttttatgagtccaaacgctttttatgactccaatcaattaaccatacctgttttttagcttctttagactttgtgctctcgaatgataccaaaaagattgggtttgttcaagcatgaacaaagttttgtatagaaaccaggtatggttaattggttggactcataaagtgcaatagaacgaaaaagtcgctttttgatcgggtcaaccgaaaaagttcgggtcgtcaggaaaaaggccgaaattttcggatatcgagtttcaggcatggcaaccttgttttgatgaaaaattcatcccgcctcccacccaaattgatttgcacaattcttccacaggatg

SEQ ID NO: 111051 - DNA, 380 bp, Heterodera glycines
tttaactaatgagaaaaattgtatttggtgttgccaagtggacattttttgccttcgagggaaacctttggggtttttagagaaatttgaatttaattaatctataaatatttaattaacgtcatttttagcgtatatctgatgaaattcataattcgagaaaggatttataaaatgccaaaacatttaaataaatattttcgaaaaatggtttaaatatttacaaaaataatgactaaaaatgaaaatttcgagaaaataatgaacaatgcattgaatattatgaaaataaaaacgaaaaaaatcggttttcactttgcattttccaaattttaaataatttaattttaaatttatgccgccatttgttaaggaacatg

SEQ ID NO: 111052 - DNA, 139 bp, Heterodera glycines
tcgccgccgacccaagtctcacccaacaaggggagacacaaacggccaccagcagccgaatcttcgagtcttcaccaacaagggttaaaggactccggccatcagcagccgaacctcccaaagcaggagaatcaacatg

SEQ ID NO: 111053 - DNA, 118 bp, Heterodera glycines
gctgtacaggttgggggaaagggattcaatccctccgcaggaatcaaatatattttgattttttattggttttttatacatttaccatttttttaatgtaaaaatttcagccaaaatg

SEQ ID NO: 111054 - DNA, 1003 bp, Heterodera glycines
ggacgcacgaattccctgccatttgcgaaagggcgcggctgtggcggaaggaacacaattaagcggggcaaggggctgtctgtccattggaaaacaatggaagaaaaagtgggaaagaaataggaaaaagagaaaatagttgtgcaatttgatgttgcagagaaagaaagtaaatggagaaaccatggagagcgcacgaattccagggaaaaagaggcaatgaggaagggagagggaatttcatccattggaagaaaaaggggaaagaaatggaaaagaagaaaatagtatggctaaccaaagaaatagggaaagagtgaataaaataaaatagagaaattgaaggaagcgcacgaattccaggggaatgccggaaaatgaagggatgagggacattctctcattggacaaaagcgtaaaacaaatgatgaaagaatggagagcacaaagaaatagcagagagttaaaggaggaatatttgaaaacgcacgaatttttggggaaataaaaatgaacgctttgtgtgagatgaagaaaattgcctggttacataaaatttgttagagacaaaaatagcggggagggggggggggaatgagtgacggacgaaacagcgaaagagttggcagaaataaaaaaatattaaaaattaaaaaaacttttggaagaattaatctgactccccaaactcgaaaccgctcagacggttgggaccgaattagaacggctcaaaaccagggctcccagatcaaaattttcaaaagcctcatttggcaggcaaaagcctcattttgggtcaaaaagcctcatttttacaaaatttattcaaaacacatttaaaatgttcaaatattatttttttttatttccatgatcaatttgagcaattttttatttggaaataagcattttgtggtactaattgggtttgggtccccttttttggccagaaattttcaaattttttttcttttttattatcagaaatgcttttagattaatg

SEQ ID NO: 111055 - DNA, 265 bp, Heterodera glycines
taattaatcaaattcaaaagctaaaatattgtaaaaattaatgaagaaaagatgtaaatttagggagaaaaagagcagaattaacgaagtgaagaataaaactgaaaaatataagtgtgcatcaactatttataacaatcttggttttgtttttctgggttaaacaaacatcaatctgtataaaaacggtgaacaagatcactttattcaatcctttattctaatatatttaatttattaaaataaataatcctagctaataatg

SEQ ID NO: 111056 - DNA, 1003 bp, Heterodera glycines
ttcgtatattttggcattttcaaaaaagctttaacaaaatgcaataaaatttaaaaaagcacccttattgttttgttatatactgtataggataaaaaaaaatttttccatttttttttgtaaatttgagaaatgaggtcaaagaatattgagactgaactggcccaagacggaactggctagataaaactggctcacaatcagacggcgcccccacaaaatgtccaagccacgaaatgtccaaaagagtaaaaacccacgaaatgtccaaaattttcaaaatttataaaaacaaaatgagtctaatttggggtttttaggggtttcggggtcgctgaatacgaatatagcctttatattaccccttgcctaaccttaggcccatccgaataataaaaaactcaatttcgagacttggacatttcgtggcctggacattttgtgggtcagcgaatcagacagaactgacttctaccggccgataggcgccgagtagaaaattttaggcggaaaaataatcagttcattaatttttgtcctatttatttttctccactcttcacatttaattctttctaactcattaaaattgccgataatgtgtaattaataatactaatctttattcgtttattatgtcgttttcttatcaatttcttagctgcaaaataatttttctttttcttcccattacaaccgattaatcaattaatcattgagcttacgttgaaatttgttaattttttacttgtctaatttatttactttacctagaaaattgattttatgaaatttggaatttttatctttgattgatatgtttatggtacatacccaatatttttgttttgtttttttatttaacttcgaaaattgccaaaaactagctttttgaggttgaacctgtttggttgctaaaaaagaaggtgaagttatgtatgtatataactgcttgtgcctggtaatgataataatgtaaatgttgaattaagatttcggcatg

SEQ ID NO: 111057 - DNA, 124 bp, Heterodera glycines
ggacacagtggaactcgaccaaaccccagtggtgttccatgtcggcatgcgaacgcccaacagagcgagaccgctaaaaatggaatttcccacaaggcatgcggctcggcatgtgctcaaaatg

SEQ ID NO: 111058 - DNA, 368 bp, Heterodera glycines
  unsure (1)..(368): unsure at all n locations
cctggttcacattgggttgccgtgtattgcgagcatcaaaatncgggtggaatactacgattcgacaggaatttggccaccgctaagccctttcatccaaaaatttttaaagagttttgctcaaattcagtttcatcaactttcgctccaagcaccatactcacactcatgtgggaagcatgtgattttctttatatttggacggtgtatggggatgcactttgaagcaattttgcaactgctaaaacgcgcaaaaatatcaccagatttttttgtaaacaaatttatgcaaaaaaatgtgtttaaacaaatataaataactagaaaactcaatttaaaaagcgcaaaaaaaaaaagaaagaaaaatg

SEQ ID NO: 111059 - DNA, 293 bp, Heterodera glycines
ttgttttacatcaaaatgattgttgttaaacggattagaagcttttactccagaaaaattcacacttgaaaaattttttcaacctttttgttcgaattcgggtccggggttcggaattgggtaaatccgagttaagattcgtaatcagcacctcgaaaaccattaaaattggttttgagcacaaaataaaaaaaatgaggaccacaattctttaccattgccgatatctttcatttcattgcttaggacttcatgatttgatgggagcgcacgtcgaatggaaacgcgaaatg

SEQ ID NO: 111060 - DNA, 545 bp, Heterodera glycines
  unsure (1)..(545): unsure at all n locations
ttttttcttcatttacaannatatcagaatttgtttctaagttaaaatttgttttntaattattcttgcaatgattataccaagcttttaaaaattatcgattttaattntactactttttgccagccctactcattaattatcttatactttaaatgcccagcaggatctttgttgattctcataaaaaaccttttctatttttaagtctttctcccgaaaataatcaaacaattggtccgggagtttcgtgccatctgcaaaaaatttttagtacttttatctctatcttcgaattctctgaagatagtatataaaacttcttttagcaatattctcaaatctgttgtgcacgctttgaatatatattttttatcatttttagttgcatttgaaaaaagttacaataaaaaattggtgggtgaaagatttatttgtcaccctgctaatgaatttgcattgccatttattacggacaaaaaattgtaatgattttaaaaaagtcgataaatccttgtgtcaaaaatattgtcgaattcaaaatg

SEQ ID NO: 111061 - DNA, 403 bp, Heterodera glycines
tgccttttccactagggtacgcaactgtggtgcggtatgacataaacatctatcaagtattatctttttatttatgttggactcgctgggtcatcccagtgtgctactgcatgctttccaacaagacgcacgctacatacgagcgtatgtttagtattctcgttgctgtgtgaccagacttcaacccggacagcgccccccccaaatacgagacagcggcaatcactgcgctgaatgtagtcttcccattcactgaagtgcgcggatgtctgttccacctcgtccaaaattttcacaaaaaaatttctgaatttgggctgaaacaggttgaattcatgacaaaaaaaagtcgaattttcgaaaattttagcgctatcaaaatgacccgacattcgcagaaatg

SEQ ID NO: 111062 - DNA, 501 bp, Heterodera glycines
agtaaatgaccttatttgttagtgattgtcggacgacgattagtaattattctattttctgtaaatttggtaaagataattttgttttcaattttcattgatttatttactcttttctttagaaaattaattattattttaaatgatagttttattttttcattttatccaccttttattttttgttttgtttaaacctcattgctttaacaaataaataatgcactaatttgtaagaacagtaagacgcaatggtttggttcctagcagaaaattaattaattctaaaaaggtctaattagcaatttcccaaggtaaataatttaaaaaaaaattttccatcgattattttctttcattgatttttgacatattcttatgaaaattcaattattacataagcacatttttataaaattgagcattgttaaatagaaaaaaaatataatttcacttttaaaatacctttataaatgaaaaaaatatatttaaggcaaaatg

SEQ ID NO: 111063 - DNA, 55 bp, Heterodera glycines
atttttttttatatgacaaaatcccaaacagatcgccaaacggactgcggaaatg

SEQ ID NO: 111064 - DNA, 187 bp, Heterodera glycines
tcggttcccatcggtcattcttcttctcccatttcacactttgctgctgcggacaatgaacagattcgcctcattttatttttgttttcctcgtttgattacaaaaactaaaataaataaataatttttatttttaaaattattttagcatttattgcattagcattttttgtcggtcataaaaatg

SEQ ID NO: 111065 - DNA, 337 bp, Heterodera glycines
ccattcctccacaacagtttctttattcattgggaaatttaaaatggaatataaaacccaacaccactcattcaaatttttttccattttttaaatttgtcgcagtttgataagtggagaaaattatgcacgaaagcacataaattatggtcaaattttggggcgaacattttggtggggaatgaacgtgatggaattccgtccaaaagtttagcctcccaagaatttttgcacgctaatgaatatttggggggggggggagagagatattccttgtttagagaattttagagttcaaagtttccctcaatttgaagactgtcaatttcagcaaatg

SEQ ID NO: 111066 - DNA, 558 bp, Heterodera glycines
cggacgacaaaaggccaaaatttgacctaattaaaccaattaaggacctaattaatacaatttgtcgtttcattttaataaaatggctgtttgccctttcattgtttgcttttgctttttttaacaacaattgccaattcgcttttttttctcccatttttcaaatttcgcccccccggcgaatttcacaaattcatttccgtcttctgtctccttatatatgcattgcgcaatgccactatttcctataatttatttgctttttcgtgctctccccccccccccccaatttccaattttaaggcattcattgcctttctttttcattgattttataaaattaaatcaatttgccatctttattttaaaggtgtatgcttatgacatttgattcaaatattctcttaaaatgcaatattcgatatataattgccctttaataattattttcattataagacactgatcactcattcgttttcattctgttcggtttcatttgatcactgatcagtcccatgcccttaagccttaaattctctttgcctgcgggcaatg

SEQ ID NO: 111067 - DNA, 353 bp, Heterodera glycines
tttgctattttacattttatattttgtactgcatttctcctccgacataaattgtgtttattattttattgtgtgtccaaagtagagacacaacattggcgcagtcagcagccgtgcttcacccattcgaagacacaccgaactgcaacccaacctcaacaaaaccaatagtcccaagacgggtgaggtccgctaaatttagcggttaaattcgacaaaaaccaatagaccctaggcgggtgaggttccgcaagacgcggttttcttcaatttcgacatccaatagtccctaggcgggtgaggagccactctgcgtggttaattgctgatcatcggacgagtcaaagccaatg

SEQ ID NO: 111068 - DNA, 194 bp, Heterodera glycines
acggtcagtggctattttccttttcttccacaatttccccttccgcttcattcttccatattttactcttccgccttatcccccgattccttcggcttttaacaccctgccccttccccgccccgcttctcctccgctttcctcgccccttttcttccccatcccccgtttcagttccgctttcccccgctatg

SEQ ID NO: 111069 - DNA, 936 bp, Heterodera glycines
aatttttatacgaaaaacgatggacttggattgtttgatatttccaaatctctccgcaaaaaattgaggcaaatttttcaacaatgtaacaactttgtttctgaaatttacaataatcacgaattcgagaatcaaataataaaaatttatgccaaatttaatatcaatgaattgattatttttttaattttataaattttaagagcaataatacatatattttctaatttttttaaaaaaataaattaattttatttcaattaattttcttattttctcattataacttttatataacaagaatttttttttttgcaatttgacagaaaaactgatttaggcatttttaagaattaatttctgcattttatgttatttttgtacataatgccattcgcaataattagggttgcttttgagcaatgttaagacaaacctgtttttaaaatacgaaacttgaatagattacgggttgaaaaattaaagtttttaaatgaggcttttaattttttgacgataatttaaattgctcttttaaaaatttttaactttttaaaattatatcacatgaaaaaaaattttacattgtttaaattattatttttaaaaattttaactttttttttaattatatcacataaaaaaaaagttacattgctttaaaaaacattattcccaacgcttagcatcacacaaaaatggataatcgaatttattattgattagggataattataatataattattttattattttagtttaatattatattataatttttatttaataaatattataaagtcaaataaataagaatattttctgatccattaacaatcacaaaatataacacaaaataatttgattttcagtttaaaatttttaatttacttctcataacttattaattacagcgattctgtgtcaattaatg

SEQ ID NO: 111070 - DNA, 523 bp, Heterodera glycines
cctttggcagagggaggggtctgatggatggtcgagaatcgctacccctccgccccctcccgtcactcactgagtctctgtcaatttccacctccaattttatctccgttccgtcgtccatccaatccttcgctctcaaaaccttttgtcccttctgctgactctcttccgccacatttttcaacaattgtctcactgcttcgactgcgttccgttggatatgtttcatatacgctttgactatgggcagcgaatattcacggacgagttcatgcagaaggccaatgcccttttgattggccgcaatttgcgcatttaaatcggccaaattgtcgcgcagattccgagtgcctgaacagccggccactctttgtggtgccatcaattgttccaccagctcagactccttgaacacaccaccgtcgataattttgaaactgtgaaagacggccccctcctgggccaatgttgtggaatgtgggggcattgagccggggacaaggccaccaatgtccgaatgatg

SEQ ID NO: 111071 - DNA, 311 bp, Heterodera glycines
  unsure (1)..(311): unsure at all n locations
ttttncaattgatcaaagtttgcaacaaaaaacagctcaaacatcaatcacaaaaaatgtgattgattggcgatccgacagatggtttttgagggcggcggcgtacgtatgggggggccggtgcaaggaaaagcaacaatttctaatgtgttcattattcattcatttaatttctgtcattcttctgcggctaaattcaccattttgtctctgttttaaaaataaatacagtatttctttaaattttttttgaaatgcaaaaatttgttcaccgctcttcttgtttttttccttcaatatgtcttcgaatg

SEQ ID NO: 111072 - DNA, 119 bp, Heterodera glycines
actgaaaatttacggataaaaagtcaatggattgaccggaagaattcaccagaagaatttcaattcctccaaccaaatacatggaagttgcaactgtgttggccagatagaatagaatg

SEQ ID NO: 111073 - DNA, 481 bp, Heterodera glycines
ataattttttagatcgtttatcataaattaataatttgaaaaaaatcgcacatttaattgggcaattttttatctttatttaatcaatttttggttaaattttaggttggttttttcaaaaaataaacaaaattttgagatccattggaccatttgtttgcttgtccattttaggcttatataaaaaatttttacttaaaaaagctaaaagtggcaaattttgaaaaaaaaattggatgttcacttggacaatttgtctctgtttaatcaattttttggttaaaattttgggtggattttttcaaaaaatgccattttatttattttgcacaataataaaaatttgaaatcaatggaattttttttgtcgcgtttcgcataattttttgggtccattttaggtctttttaaaaaaaaaaaaaattataaaagccaaaaatttccgtccaaataaaaatcattaaaaaattaaggcctaatg

SEQ ID NO: 111074 - DNA, 243 bp, Heterodera glycines
ttttgcctttttattccatatttcggctatttttggcaaattttcacaagaaaaatgcaaaaaaagaagcgatttttgacgtttttagtccatatttcgggcatttttagtccatgttttatgtccatatttgacgttttttagtccatataatttcgagccctattaatatgggacgggtccgggtttttgactttggtttttggcaaggcttaaattggatggagagatgaattaattatg

SEQ ID NO: 111075 - DNA, 59 bp, Heterodera glycines
cgagaaggaggcacggacaggacaccaccgcccggccaccaccgtccggcgccgaaatg

SEQ ID NO: 111076 - DNA, 161 bp, Heterodera glycines
tggtcaaatgaccaggttagataaccatgcacccgtcgtggttgctcatttgctacgggtaaaccatgatggtagtggttattcaaccataaccaccttctttgactacggcccccgctcttctcaggtatttgttgccaccaccacccgcgcaacggatg

SEQ ID NO: 111077 - DNA, 369 bp, Heterodera glycines
atcaattaacattttgtgatttttcaaaaatgccacacaaatacctgtaaaaattctatacattcattatcccactgctgattgtgaactgtgatgaaacaattttatgatagatttttgattggcatttgtctttttaaaaatttgcttctttgacttggaactttctgtcattatccaccattagttcctaattatgtccaagaagcaataaattttttatgaatcaagctaattttgcataattaaaaagtcttggggcgcatgcgtctgtttgcctatgttttttcgatgggatttggttttataataccctttttttcctcggttttcatttaccataatttgcccatttttattaaaaggatg

SEQ ID NO: 111078 - DNA, 624 bp, Heterodera glycines
gctgaaatttatgaatgccaagattttgcaacaacaaaaaaaagaagctaaaaaattttaaaaatcatatagtaaaagaaaaattgaaaaattttaaaaattaattaatacaaaaaaaaaaaaatttttttttaaatgggtgccaaattttaagataataattgcctttttaatgtccttgcaaaaatcggtggccttgtaaaaaagacatattaagcaatgaattttttgaaaaatttgttaaagctaaacaatcattatcgttgggccggagcagttcatttcctccggaatattttttaattgcaaaattgaaacttttcgaaaaaaattgaaaatttttttaaaattcaagaaaaaaaaattaaaattttaaagcgatgtttttgaaaaagcatcatcaaatttttgaaaaatcgctagaaaatttttaaaattttttcgtaaaatttctataacgacaggggggggggggggcgtagtgcatcccgcgccgagatgcgggcccgcgccgatctttatttgtggatatctctcttaaggccatgcgcctattgtaccctgccgcatcgtgtgtattacatagtccgggctggtggacaggctcagtttggccaggtgatg

SEQ ID NO: 111079 - DNA, 72 bp, Heterodera glycines
atatttttaataattaaaaaaatttcgaaacactgtttatattttcgacaaaaaatccaaataaattaaatg

SEQ ID NO: 111080 - DNA, 88 bp, Heterodera glycines
  unsure (1)..(88): unsure at all n locations
aaagcatntttggaagaagaggtggaaaaaaaggaggccccccgaggggagagaatgtgccaaagaaaaaaggccaatgcttaaaatg

SEQ ID NO: 111081 - DNA, 87 bp, Heterodera glycines
aatatatagtaagggaatataaaatactgcattttcttttatttatcttagaataagtttattaaattccctttgcccttcaaaatg

SEQ ID NO: 111082 - DNA, 228 bp, Heterodera glycines
  unsure (1)..(228): unsure at all n locations
tcataaanagtcgattgggactcataaaagtcgattggacccttccagtgcattagagccattaatgttttattaagaaatattgttttttcatgattttgcttttgtggattgttattaatatttttttacatttggcctttttcgccaaagagatttttttattatcaattaacgttaaatttaaacattaaaaagaaacctaatttattctgtacctataaaatg

SEQ ID NO: 111083 - DNA, 1003 bp, Heterodera glycines
tctctcttttctctctctctctcttttctttcttctctctttctctctctctctctctctctctcttctctttggcccctttctgcactctttttcctgtttcttcacttttttagtccttttaaacatatctctgatctaaccaatcaatcaatcattacgatgttaatttttgtttcgttttaagcctgccctttcatatttccctctctctctctttctctctctcttttctctctctctctctccctctctctctccctaatccggttcacttttaaaatacgaattttgttttcttcttggctttatttcgattgaatgcatttttggatttttgccctttcccatttttatttcttttgtttcatttaatttttgttgttttcgtgaataaataattaataatacaacatattgatgaaaatatattttataataataataatttgttggtaaaatgagtcaaataatcgaatggaccaaaaagaaacagctgaccatcctcagaaaggggaaagcccgcctttccctgtccaaatgatcggaagaagccaacgggagcggcaaaggcagagaaagcgatcagaactagaaaaatgggggagagagagagagagaaaggggaaatgagggtaaaggaaaagagaaagaggaaaaagaatggaagagagataagagaaaaaagaaaaagagggggagagagagggaaacaacaaaataaagaaaaaagaatgtgaaatgaagtgagaaagaggccaaattggagaggaaggagaaaggagcagaagatgaacgaatatccgaaacagagaaagtgggggggggggggggtgactcagacaacggtgctctcgcctctctcattcaatcatttcaccaacggacggatcgacgagaagagaccgactgactcaatgctgccattcccctccccctaaacaaaggcaaaagccaaacagatcaacaaataaacacgtcagattagggtcgattcggaatg

SEQ ID NO: 111084 - DNA, 1003 bp, Heterodera glycines
agtaatgcagcagcaaaagccgccactttccaaaatgttgctgaataaaactgcaaaaagtgcccgtcctccattatttggtaatattccaaactaaaacaattaaaaaacaaaggcaaacttcgataaaaaggaaaattttaacagaattttatttgtttttcttcggcctcacaattatttcacaacactttctaacaccaattctcttcagctgctgcttcttctgggcttgtgtattttaattatttattgtcgtttattttgttatttttacagaaaaacttattttttaataaataataaattgagtttggctaaaatgaacaaaaaactttaatcgctttatgcattttacagcgttggtgggaccggaacggaaataacaggacaagaacccgttttccgcggcttttcgggtcctttaatccaaaaacgggacctggaccggaagtcccaataaaattcgtttggaccccagtcttagggctcgaataattaatattttattaattgggattccgctttacaaacgcatagaaaataaattaattaatccaattaataatcgagtcaaaaaaaatataaaaatattctctatattctttgttatttatattgtacaatttataacattcacatgtgtattgcaataatgtttcaatttttatattttttaaaaatttatacattaaatgtgagaagacaatgcaaaaaagaaattaaacatagaggaaaacaagaaataacacaattatataataataaaaatgaattaatttatgtttataattttctttgtgtctgttttcgaaaaaaatttaattgagtcaaaactttttggtcataaaaatgcatttttattagagaatgtgaacaataacaacactgtttggtaagctcaaatgaccctgagagaaggaaagagacatttatactttcgcatgacataattaaacagttaattgggtaattacaatagtaaataatttttagcggaatg

SEQ ID NO: 111085 - DNA, 1003 bp, Heterodera glycines
ttttcgccccctctgttttcgtttttcctttttttttgtgtgctcttccctgttaagtcatcaaattggtgtcatggcaactcgtacaaaaaaaatttctaagaattttcaactaaaaactagaatttttagattaaaaaaaatctaaatggattttttagcctagaaaaactttaaaaaagattctttaaagttttttactagtttttcagctgctttttttaatttcttaaattttttgaaaatttaagtgttttaaaaagtttttctaggctaaaaaatccagttagattatttatctaaaaattataaagttttagttgaaatttttagaaattttttttgtacgagttgcctttgtacgagtttgccattgacccatcaaattcttggataggttggtgggaaattttttaatttactattttttgatgaaaaattttattttatttttttctttttcccggtgatgacatcattctcatctattaattcagagagtgctctctgattctctcatttcctatgattagggcggggatttatatggacataaaatcgagaaatatggctaaaatatggaccaaaagtcgcgaaatatggacataaaatgccaaaaatatggacataattttttccaactttagggtataatttctcaaaatttcttcaaattcgctatacgcgaagtaaagctttcaaaaatggctacatattgtattaaaaatcattttagaagaaaaaacatgataaaactaaaatttactaatttttagcgcaaaatcaaccacaaaagcgaaattttcgcttttttgcttatttttgacataaatttattaatttttaagaaaatttaaatttattcaatattctcgagaaattttggcgaaaaaatgattttttgaaaaatttttcggtttttgggctcaaaaaggctaatttagctgctgggggccgttctaatagaggttttttgaaaaatgccaaaatatggataaaaatg

SEQ ID NO: 111086 - DNA, 129 bp, Heterodera glycines
  unsure (1)..(129): unsure at all n locations
aattaatttgaaaaggcaaaanaatgcttcgaccaaatttataatttttcgctcagtcatcgacagttatttaattattttggaatttgcattgacattccttcgacaattgtttacattttggaaatg

SEQ ID NO: 111087 - DNA, 432 bp, Heterodera glycines
ttctttggcgatgatgatttgaatttgcctccagggccacccaatcttcgtccacagccaaatgcccctccgtcacttaacagcgaccaacagaaggtctttgatgctgttttgttggcaatacagtcgaaccctagggatccgactgtcccccgccgtttcttcatatacggcgatggaggtacaggaaagacattcctgtttggccaaattattaggcgcttgcgaaaggccccatacacctacaaagtgcttgccacggcatccactgggtgtgcagccattttgctgccatatgggaaaacagcccattccacgtttcgtctgggtagagaagtgtcattagacaagctcccaagcattccgctggagagcttctttgcccgtcggattcgtgaggcccaactcatcatcattgatgagatcaccatg

SEQ ID NO: 111088 - DNA, 64 bp, Heterodera glycines
ggtttggcggggaattgcgacgcttttggcaatttgaagaatttttgaggatttccgcgcgatg

SEQ ID NO: 111089 - DNA, 382 bp, Heterodera glycines
tctgattaaattttcatttttcccatacttgtcctttaataaggacaccgagagatcataattatctctggagaagggcaaaagtccttgaatgacttttttggcttcacccccaacagggaatccaaataactcattttttgtacgtaatccaaatcggcatcagcatgtattgtcgattcgaataatggccaaaagtcatcccaattactgccatcgaactcctttaggcttaattttggcaaggcaatgtttcggcgtgccgttcctccgggcccatcttgaagaagacgatcaatgttccctttcagcgtgcgggtatcggccaatttatgatttgcccttcgcaaaaaattttgcagatcgtttgcattgaccgatg

SEQ ID NO: 111090 - DNA, 336 bp, Heterodera glycines
  unsure (1)..(336): unsure at all n locations
ctggcggtttttgaggatttttgccctcagatacacccaaaaacaatttagcaatgtgattattaactgctgaattgatcgatttctattatatatatgttatattgggtaaatattttctttaatattntaattttccattgctttaatgattcatcgctaaaatgtgatgttcttgcaaatgtccatttgataataaaatgttcgaatgcattcccagtaatttattcaatgttttttgaacgctaatgtttatattaatatttattcatttttcgatgttatttatttatatttttcatttcataatttttaacaaattgaataattaaaatg

SEQ ID NO: 111091 - DNA, 190 bp, Heterodera glycines
atgaacaacagcatcaacaactcatttctttcatcattgccatttttgaacactttaactgtttaatttaacatttgattttgccaattcttttttttaccaagatttgttctgtctgaaaatggaccaattacaaatttttctaatttatttgtgtgggatttgaaaatgttgtgtttaagagcaaatg

SEQ ID NO: 111092 - DNA, 488 bp, Heterodera glycines
tccctttttatagagaatttttacacggaattgacgggtaggaaaatgtttgtataaaagggacgatttaagcgcagaaacaatcattcttcatttgtcctttactgacataataagcgtctgtctccgggaaccggccactttggcgccagccattttggcgccaaacgctataacatttttatttctcattcaaattaaataagcttgatatcattttaaagcgcttgatagtccctaatagcctgcaaaatttcaaaaaatttaattgaaacacaaaaaagttatggccaaaaaacctcaaaaaactgactttttctggccattttggcgccgcacgctatatcttttgtcaaacagaatttattttttctaatattttacaagctaataaagaacacttaggtctatttaatggtatcaaaattattttatttggttggataagaaaaaagttataacactttaaagttcgcggcgccaaaatg

SEQ ID NO: 111093 - DNA, 101 bp, Heterodera glycines
ttggctcctccctgtgcggctcttgctccttcctcccccctcctccgccctatcggccacagcagtgttcgtccgggagcgaaggggccattccgagcatg

SEQ ID NO: 111094 - DNA, 298 bp, Heterodera glycines
cccccccccccccccaccgactgatccctccgtcagcccccccccccagcacatttatcggctgcttcggcccatcacccaccgccgatgagctctttcctcagtcctaacgatcgattggcggaagcaaaagacacaaacagaaaaaggacaaagggccaaaaggtgcggcgacggaggcggcggcggattgataggcggcgatcgacggataaacggcggaagaacgccgacccacacacaaaacagcagcagccaacaaattcacttcagctgatcactccgaacgccaaaaatg

SEQ ID NO: 111095 - DNA, 187 bp, Heterodera glycines
caacaaaagaagttgggggcaggacagccgagtcactttgagggatttgcaacaacagaaggtggagcaggacaatgcgaggactttccaaggagagcaacaacagcagcagaaacagaagttggagcagggcaacagcaggactttccaaggagagcaacaacaaaaactggagcaagacagcatg

SEQ ID NO: 111096 - DNA, 774 bp, Heterodera glycines
ttttggtgactttctcacagaccactgagacaggtatttaaatcttttttggtattggagctcatttctgggatggtggacagcaattttgaaacccggaaataccaaattttcaaaattcttttttcatatctatactgaatgaccatttttgttttgcaatggtttgtcactattgaaaattggaattttcgactttttgtagcaattcaggtccaggattcaaaatggatcaacaaaatgaatgccaggttcatgatcagcgatcctgaaaacccccataaacctgttttacgactttttaaaacagaaaaatttcttacaaagggcggggggggggccatcggcagtattaccgttaccgcgaactctcttatatttctcactaatttgttttaattggttttattttttgagttgtaatcaattttaatggcaccgccttccgagaaaaagcaaaaacttttgtccgccgttgaaaatcagcagcaatcgtcgtcgtcgggttcttttgtatgcgccctccctttttgaaaaaaaaaattcaaaaatttttttctcggaaagactcatttaggggtttttagggtcggaaaatcagattctgataactatttctacgcaattcgacccccaaatcttgattggaacaaaaaatcgaattttatggcagtggttactggcacggatagaattgagaaaaatccaaccaaacattataaaacactgcagaaaaataaattagggcaaataaatatcatacacttcaaaatg

SEQ ID NO: 111097 - DNA, 368 bp, Heterodera glycines
tcatcaataactcccattcaaagttacagaaccaaactaaaaaaactgtggagaccaagatcatatccaaatgtgtaagcggcttttgtccttcttttggattctttatttgaataaatttgatttgacttataaaaaaacttaaaaatacgtaactaatttcttttaaagaattctctaaataaattctcaaaaattttgaaatctacatatgtcgaaaacttattagtttttcaaaatttaacgaagaaatttaattttttccaatattacactgaatttatgcgtaattttcttaagcacaataaaatcacaatcaatttttttttaaaaacgccttactttaacttatttaaatctgagaaatg

SEQ ID NO: 111098 - DNA, 332 bp, Heterodera glycines
gatttgtcaccaaaatttttgcactcctcgcatgacaaaaatatatttttattattatttaatcattttcctttccctcacaatttattatcacatcatttatgggtctttggatttttcgttgatattttgaaaattttccatgttttcgcccaatttttcatttatttagcccagaaaaatttaaaaagttttaattaatacacaaaatcgattattcgatcatgtggagaaaaaaaataaatatattactgcatttttgatcattttataaatgaatttttcaacccattcaaaatattgttgaaattttggttttgaagaaaaaaatg

SEQ ID NO: 111099 - DNA, 103 bp, Heterodera glycines
  unsure (1)..(103): unsure at all n locations
agatgacanaatttcagtattncaatctcaagaatgtctaagcgcctaacatacagtatgacagtgccaaaaaagagtgaaatttggtgtacggtaagaaatg

SEQ ID NO: 111100 - DNA, 86 bp, Heterodera glycines
ggttggcgagcagttcgtctccccgtattaatctcgtaaaagtaatactttttcaccaacagactgatccgttaatgttccaaatg

SEQ ID NO: 111101 - DNA, 249 bp, Heterodera glycines
caacaaagacataacagatgctccatctgttgacagtttcaaaaaaacgtataaataaatggattgagttaaccaaaaatttagtctgtaaaagagctccttggactcgacattaatttactaaaatctaacgtgtaagtggtcaccccttcgttggatattttatttcttctgaataaataaataaatttttctgcttccacagtgagcgtgctctgcgcactgcgaccgccgcgttcatcgaaaatg

SEQ ID NO: 111102 - DNA, 1003 bp, Heterodera glycines
agcatgggattcgaccataccaaaacacaaatgtaaaacatctcgatcaaaactttgttaataattttctcgcattttaatgattaattggttcttaattaaattacccaaaaattgatttaacaactgtcactattaattaaaattctttgattttttcatacttcccacttataatatgttcaatgcttcatcattaaattcatcaattactacaccttctcatctaaaaacaatggtatatagatagtgattagttgtgaatcatatatcatgtcgttacaaactgacactaattagaccttatggttgtcgaggactcattattcacaagcatatactagaaaccattcttggtaatttgtcataattaatcacataagtttgaagagtctcacccaaacgataaacttcctatgtaaaatcatcccaataaaaaataattaattcataaatttcccaaatttaataattggatgttaggagctgatagttagttaaacttacaccaaaccgtttcaaggaagataattaaaaatgacagttggtcaatgagacaattagcccactacaccgctactcaccattattggtaatttgtcataaatcattaatattatttctcacccatgccataaaattcctccgtaaaatcattttgacaaaaaaatgttattaatttctcaccatttaatgattaattgcttcttaattaatattacccaataattaacaactcgtaatcattgattataatccttgattactttcagatttccctataatattaaatgtttcctcattaaattccatcaaatacccctgccttcttctcactgaagaaaaggccagatggctaagccaatagtagtaagtggcccgtgaccgacgccgcctgtcactcctaattaatgtcaaacacgccacctgtcacttctaattagttatttttttcaattagacattaatatacatcttctaggtagcgctaattgcaggcatg

SEQ ID NO: 111103 - DNA, 105 bp, Heterodera glycines
ttcaaatttccgtctgtccgttcacctttctgattttgatcagcctcctgataattctttctgacaaacctcaggtgatcagttttatggttgtgatcaaaaatg

SEQ ID NO: 111104 - DNA, 420 bp, Heterodera glycines
ggtgatccaaatacccagaaagaaattatgggaacaccttttaaataatttatctgaagattttttgactaaaaaacctgaacatatcgcttataaattagctctttcacgtataaatagaaatttaatacaagaaggtaaatcgttatctgattttaaaaagttgcctcaagacacggtcatagattatgacgacattaaaaatataaattttgatgaagaaaaaaaaattgctgatgatttatacaaattaatgaatagtgatcaaagattaatctatgaaacaataaaaaaggtagtaacaggagagataaaacaaaaattaatttatattgatggacctggcggaacaggtaaatcatttacactaaatgcgctttatcatttaattcgtggtaataaaaacaaataacaaacatg

SEQ ID NO: 111105 - DNA, 1003 bp, Heterodera glycines
atttggccattcccacaatattatcattaaaatgaaggcaattttaatagtaggcgggccctcaacatcattccattgcttcatttacaaaaatagtttccaattggattttgtgggtttttgggtcgtgccaacgaaaagtgccgccctcggttcgagaagtgaagacagacggacgattgatgggtcaaaatcacgctaggccacgtcgcataataattgcgcgagttaattaatgactgactgggcttgacgtgtcctcaggcaaatggcacttttttgggcgccaattgtttctttttggcgtctacatatgacaaactcacaaatcagtacagtcattatcgagaatctcgtttttggcattcagtgccaaatttaaaccctccttccccgcagtttctttctgttttccctcttaatttgtccaacaaatgaaattcttttctctccgtcagcccaaaagtcccctccatttaagcatctttcgtcccttccgatgcttattctgttccttgcgctgctcatgaagacaatgttcagcaacggctttgttgtccaacagcaacaacagaattttaaggtatttgttttataaagagcgagtgcttgcgtgtgtttgtttggctcagtgggttgtcactttggttctcacttctaccctttggatcggttcaattcctttgctttgttgaatattttcgttaatttattgtcgtgcgctgtgatgagataaacgagtgaacgtacgcagtttccattcgaactaatccatgtggacctttgtcatttctgagcgcacattttttacaatttaattattttttttgcccatttaaacaattaggaccttaatggatttgctgacaatgacaaacaattgccgcctttacccgctgttcaattggtccgttcgcctgccaattcactcgacgcttcccaccgattgctttttgaacgattgtcgtcggaggcaaaggatcgatttgcgcacaaacaaatg

SEQ ID NO: 111106 - DNA, 144 bp, Heterodera glycines
aaatttgagattttcagtgcccttccatttaaatttaaatctcctgaatgacttaaatttttctattccaattttccttcacagattcttcgctgatctgttcaaagccaatttgcgtcttttgcactctgtgccgggccaatg

SEQ ID NO: 111107 - DNA, 77 bp, Heterodera glycines
aaaaaatacagaatttatcagcgttcacctccacggctcccttccccacctcgcacgaaaccaaaaccaccaccatg

SEQ ID NO: 111108 - DNA, 795 bp, Heterodera glycines
ttttcgtattcagctattttgaagatattaaagatctttaaatactgaaactaaaaaatatcaaaatgtaggctattattacaaatgcgacaatctgagtaaactgccgagacaattttattccttttttcaacaaaaatttgactatatttagggctcggaacgggcaacatttttgaatttttctaaaaaaatacctatagtaaactgaattctcagccaaatttatgaagatatattttttagtggtacacacgacttatttttgactctatgttctatgtagaaacaggcgcaggataggatcatgcgcgcaattttgtgggatccaaagccgccgcaatctgcaggattctgcggggttaatccctcgggattccgtctcgaaacaaaaaaagttttttcaattatcagaacgccaaaattaaaagaaatattatttaaccttgtaaaagtgcaagagtcgatctcgaattatttcataaaataaaaagagttcgatcaaggttcaagggagtcaaattatgggcctttgtaaaatttcaagaaaatcggccgatgggaggtaaggtctggagtccccatgacttttattcaactaaagaaagaacagtaaaaaaaaaaatcatttttatacgtcgcaaacaaacaggaaaattcattcaagaaaattgcttagtttaataggaatttttttgtataaaagaaggaaatttagtcgatggcaatcattcacttactttattattctattgcgctattcttcttctgcaacacattaaacaacgacgcatg

SEQ ID NO: 111109 - DNA, 156 bp, Heterodera glycines
accataatgcgaagaaacttaaaaaaagtacataactttttgcgcagttacatcgacggcagtgtcatcgaatttctgcgccaaaatcggcaccttttcaaattggacatcattttgagcatttgtctgcttgaaggacaatgttgggaggtcatg

SEQ ID NO: 111110 - DNA, 89 bp, Heterodera glycines
ggtgttgtgagcggcgatggatcgaatggatgctttttccggatttccctgttataatttccctccccccatttcaggtggccgaaatg

SEQ ID NO: 111111 - DNA, 603 bp, Heterodera glycines
taaatttgtcagttcttagtactttcgcggtttttcaatttacaaaataaagggaattttaaggctccggcgttgccaatttttttaaaattatccattttgattaagaattattagggctattgaatgatatcaatcataaaaatttttcggttccaaaaatagttatgatgatttatcgaatttttgcaaaaaatcgaattatttagggggtccatttgagcgtttagacataccaaatagtggacataatatgaaatttaaaacccaccaaagaaaaatggtgattaaaaaaatatttaaaatgccgtataaaaacttttagcaaatttattcatataattcaaaataaacattgctaattgccactggtaaatgttgaacagcgacataattaaaaaagaaattaaatcgatgtccaatttatcatttatgtccaatttctacactgcaaaaaatttgattcaccatccaaattctaatgtttttgccagcagcgagcaaatttacttcggaaactgtaattatctttaaatttttgaaaatttaaatccaagtctttgaaaaattaaacttatgtttaacttcagaagaacagaaatg

SEQ ID NO: 111112 - DNA, 81 bp, Heterodera glycines
tattattatatgtactacaatatatttatatctagttcatttcatcgttaatggactccgtcgttcgacaagcatggaatg

SEQ ID NO: 111113 - DNA, 53 bp, Heterodera glycines
agtaaaacgcctgtttagctaaaacccggtaaattgatgtagcatggtcaatg

SEQ ID NO: 111114 - DNA, 246 bp, Heterodera glycines
caattactaattaaattaaatggaatttgggttgcttcacccggatgaaatcccctttatgggcgacctatactgactttcactactgatgctgatcatgccaaaatttataccccccccccccgccactgtgcgcatttcatccgacccaacgcagtttatggacaaattttagttcaagaaatcactaaatttatccttataactagggctgcaaaaaatatggatataaaatcgcgaaatatg

SEQ ID NO: 111115 - DNA, 293 bp, Heterodera glycines
ctttagaaaaaaatgcgatttttcttattagaccgagacttccggcctagaatttcgacaacggcaatttcgtctcttgaattttgtaattaaattaatttgaattttttatgatggaaaagtgatcaatcagcagaagaatttcgatcgcgcattaacacaaaggcataaacaatgtactaagtattaaaaaggaaaaacattaacgaatcggcggcggcgggaggcgagcggattattttgtcattttccattgtttatcgatccccaaatgagaaaaagggataaaaatg

SEQ ID NO: 111116 - DNA, 63 bp, Heterodera glycines
tgtatttattttattttaaacattattgtctaatgttctaactttttttttattttagtgatg

SEQ ID NO: 111117 - DNA, 758 bp, Heterodera glycines
tgtaaaggaatttattcaaatcagccttctcccgacaattggtaaaaaataataatttgcgcaaaaattattttgttaatttaattatgaaaagctggaaaggaagacgtcaaatacgccaaaaagtgaaaaactgcgtgttgtgtttaatgctttcaaaatccagtaaataacattttcattgaataaataaatcatttaatttaaaatacataattttttcaaaagctgcaatgaatcattataacgtttggacttttaattatgaagaatattttcgttttctaaaactccttaaaaaaggtaattgaaattttgaagtctttttttaaattttgatgattttagcttttatgcataacattttcccaaatcgtttaacaaattgcaaaataagccaaaattgttgtcctcgaatcgccggacaataaatttaatcaattcaaaaattggcatttttgaaaaaaaacataataaattatgtaaacattcaatatctttcggcattgtttaaaccctttgaaaatgaaattgaagatttaaaaaaaaaagttattcacgttttaaatcccactttaataataaatttcaagctaatttataaaaatagcacaccattaatttaaagttattacaatttttttaaaaacgaaaaaatcaatgaaaattgaaaataaaatcacattttttgacaaataagcgatgcggcacatttttcggagaatggtcaaaagttggcacgttttatcagcgacatg

SEQ ID NO: 111118 - DNA, 277 bp, Heterodera glycines
cagtgcggaaaaacggagagggggggcatttgcattggggtaccaaggtctgcggttgtttttttttaggaaaatcactgtcattttagggttccgattcactcgcagaaagggaaggtggttccgctgctccaaccgggactgtgaggcaactgcagcattgagtaaagaaggcggaactaatggtgtgctcggaagaaaagagcacaaccatctgccggacccagcgtgcttccacgcggaggtaaaacgcaacggaattaagacgacaacgatg

SEQ ID NO: 111119 - DNA, 469 bp, Heterodera glycines
ggattttcaacttccatttagatacaagtaatttttttttgtttatcggtgtcctataattggataattgctttattcaatggtaggaagataggaatgtagatgactgggacttttgcaaaatttttgggtcctctaaactgcaaagaaccgataaattaaattatgcttaaataagggagaaaatggcgaaatgttttaatgtaaataaaaagttctgaaattaaaattttacatagaaaataaattgaaagtgatgcaaacaactttattatttattcacttgttgcaaacaaagactttatatttgaagaatgaaatgctattttttttcttgggctaaaagttaatttttgagcaaaccgaaacgccaaaagctgaagataaattactacaacttccgttaagattgtttatttacatacattttttattgctgtttcctttctctttcaaattcgtcacaatg

SEQ ID NO: 111120 - DNA, 192 bp, Heterodera glycines
tctgaaaacaaacaaacaaatgttgacaatgtaatgaaaagtacaacaaataaaagatttgcggaatattgggatttttgtggcattatttttgttttactagtgtaataagagggtccgatgaaatttcaaatcgaaagggtccgtcttcgtgcggtttttcagttggacccactaaaataaaaaaaaatg

SEQ ID NO: 111121 - DNA, 242 bp, Heterodera glycines
ttataaaattatgtatagaaaaatggatttttgttttactttaggagaaaaaaacattcttgggaaaaaataaattaaagaaaataactataattttgggaaatatagccctgcccttatttgtaaaaaccgtttttgtaattagttattttaaccgtacttgtattcaaggaccattccagccaccttttgacttgcttgtgatgggacaaaaatttttggattcggtgacgcaaattatg

SEQ ID NO: 111122 - DNA, 502 bp, Heterodera glycines
aagcccagtttttgaaaaagaattgctagattgaaagctcggcgtaaatttgaagagaaaaaaaagtgtttttggtaattatccatattttggctgtgaccgcaaatgtccgaaaatagcccttaagaaatgggccgcaaaagtcggaccgcaaatgtcgagacacgaaaattttgggaggggcaaccgaagagttttttcaggccagaattgtttagatttcagcgccatagaaaaaaaacggaaaattatggccatttgagacctattttggaaaaatataaaatatgggaaaatttggacccgccgccggtgccgttaggtgccgccggggaaaatttagagtcaattttttcaagaaaattgactaaaatttaaacacgtatccgaatttttctctgattgtgagtacccgcctataaattattcagggcaatgcgttggttccgatgcttttttgaaattaatttttaggttcaacaatggctggttggtcaaaatg

SEQ ID NO: 111123 - DNA, 92 bp, Heterodera glycines
ttggccgagagggtggccgaaaaaatggcggtaattcggacgatggacggcattttgtgaccgcattttagaagtttttgagcagccaaatg

SEQ ID NO: 111124 - DNA, 65 bp, Heterodera glycines
agtcagtggacaaattcacagaaaaaacgattagttttgaaattttttaggtacgaaagcaaatg

SEQ ID NO: 111125 - DNA, 525 bp, Heterodera glycines
tcccggttttgaccgggaccgggaccagtcccggcccccccacgggttttcccagccaaaaattcccggtttttcaacttgaaaaggtcccggtcccggttaagcccaaaattcccggtcccgctctactctaatttatatgtataaaaagcttaaattaggtttatttttactttatttttttctttttctttccctattttatacgccacatttcacagttaattaagacaacaatttttattgttaaaattcttctgatttgcaatttttttttatcgttgagaaattcgatggatcggatgaaacatttgttgagcagcacgggtgagcattcggatgtgcactttttggtgggggacggagacgaaaaagaggcgagttaaattcttttttttttttaattttttttttaattttcaatttaaattttaaatttttaaattaccctttttatatttaatttcaattatgtaattttccacatttttaaagattttaccagcacataaacacattttgatg

SEQ ID NO: 111126 - DNA, 280 bp, Heterodera glycines
tttttttttaaatttctcttaaaacattgttttgtgttttcgggattgttaactttagacaaaagccgtttcaaaaccaaaaaatggtcattctgtaaagatacgaacaaaaaaagaattttgataattttgaattttcgattttttgttcgagttcggatccggtattcgaaattggtcaaaatgaatggcagattcgtgatcagcaatcccgaaaacactaaaaacaatgttttaagagaaactttaaaaaaatttaaaatttagatctcgaaaaatg

SEQ ID NO: 111127 - DNA, 237 bp, Heterodera glycines
ttcctttccctctctcttctctctctctctttcttgctcaccactccattcatccacttcaaatggactaagcgggggtgggggacagagtcatggcatggccctgtgccctccccccccccccccgggggattctccgctggccactgacccttccgtcgttttcatccgctcatatgaattcctggaatattattattatagtaaaacttctgaattcgtctaatttgcagcatg

SEQ ID NO: 111128 - DNA, 126 bp, Heterodera glycines
agtgactaaaagaggtaaacagtgattagaagaggtacaacagtgattagaagaggtacaacagtgatcagaagaggtacagctgagattaacagaggtccacctgtgcttaggagaggtacaatg

SEQ ID NO: 111129 - DNA, 1003 bp, Heterodera glycines
ttcataaaattttgttaaactcaaatttatttttaaaaaaattcttgaatttttgcttgggacggagttggccttttttgtattgggacggagttggcgggacggagttggctgggacggagttggctcgggacggagttggcctgggacggagttggctcgggacggagttggcctgggacggagttggcgggacggagttggctgggacggagttggcgggacggagttggcgggacggagttgacccgcttcgtgaaatagtgcacttgccaatgagctgctacatttcttttataaaatcctctttagcaaatattgacattttttaaatcaaacattttctcatgaaaaaaaaaaatttgggggaagaatttttgagaaaatttccaatgcttagtggtgtttttaaaaattttcggtcgattcttaggggtgtatttttctgaattttttagggccgattcttaggggtttccgttttattgattttttttaacaaattttccaaaaaatggcaaaatatgcaaaaaatctgaaaatatgtacaaaaaatgtcaaaatatgcatgaaatatgcaggaaaacccctaaatatgcaaatatgcacaaaaatcccgaaatatgcaaaaatatgcaaataaaagtcccgatttttatactcaaacataaaaaagaaagtgtttttctgctatttagagcatggagaagccaggaaaaaaatatgcatttgcatgttttttgcagccctgctaattataataaacttcggtctgctatcctccatttgtattttttcagctttctctgttagaaaaagcacgaattgagttggcttcattattttcaataaattcactttattgggttctcttgcgatgcaaaggtcttgacccaaatgaagatgccgatctgtcagcagaactggcaagttttctatattgtctttattattttcatgaagaaaattgaaagtactttagaagcgaattaaagaatatatg

SEQ ID NO: 111130 - DNA, 127 bp, Heterodera glycines
tgtgaacaaattatattaaaaaaaatgatcattaattcaacagcaaaaattaaaaaatccacaaaaaaaaattgtcaattaaattaaattaatatttggtttaattaattattgaattttggtaatg

SEQ ID NO: 111131 - DNA, 1003 bp, Heterodera glycines
ttttgattataatacatacgaaaaaaatctgatttgatttttgatatttgtttgaatgaaaaaaatgttttgtatagtaaaaagagaatgaacaagcctttaatggattgaaagaaagcaatgtaaatctacatctcaaattttcctgttcgggtggataattatatgcagttgggatatattacgtgccgcttgctgaatgaccgcttgctgaatgaaatttatatggaatattttaaattaacgtttacaggtcagtttttgttttgaatttgggggtgggtgcaataacgattctcttttatatgtttttttaaaaaaaacccctcccccatctgcaaactattaacttaattactgctttttttgagcgaaaaaagaaaaagttgaaatgcttcttttttttgtttttgtgtacattcttttattctcaaagtttgtttcaaggtttaaaatatctaccgctgatttttgtaatgaatttaagacctagaattggaattcagatttgattgtgtttgtaaatgctaatgaattgtttgtgaaaaaagtcacatttaatttttttaaatatgaatttaattgtttggttatcagcagaaatttttgtttatgttatgattaattgaaaacgaattgttagtaaatgaaagttttgttgtttgatatgtatcatgttgtgctgattcaagttgcaatttttttacaaatggatgttttacgatatcgaagccaatctacaaaatgtgatgtttttgaaaattttaaaaattaacgggataacaggtcagtttgattttttctctttttattgagagataatttgaccttgcattatttttgacccactcatttttatttttaatcattttattaaataaatattcacacttgcttgaatatgttgtttggttcacatttatatatttgttattttgtaaatgattttgttatgtaatgttctttcaggtttaaactttctactgcctcctttgttataatg

SEQ ID NO: 111132 - DNA, 174 bp, Heterodera glycines
tgccaaaaccgaatgtgtttattcaaattggcatttggcgcgttgggaagccacgcccatacaaaaaaagaaagaaaaaatccttttaatcactccgatttacccattcccttactttctccattctcaaagttctttgctgtttcgctttttgctctccaaccaacaaaaatg

SEQ ID NO: 111133 - DNA, 94 bp, Heterodera glycines; identical to SEQ ID NO: 97954

SEQ ID NO: 111134 - DNA, 214 bp, Heterodera glycines
ggtggaccagaaaatgcactaaaacggatcttccattttatcaaaaaaaagaaaattcaaatgtccgtaaaacggtttgggaacggcgataattttagtgttaattttttctgtttttattcaaaggctggtcattatcctccatattaacgagtgtttctatagtataagtttgggttgaatatgatttagagtttttgtttcgtaggcaatg

SEQ ID NO: 111135 - DNA, 189 bp, Heterodera glycines
ttgggagcccagccgcttcatcgaccaaaggaaacgacctttttttgttcacagagggatcggacaattcagtgctgtgctccatcctccaatggaaggccatgccattggagatcaactactcgacgcgtatattttaagtgcccacgtccctccgcaattaccacactaattagcggggaaattatg

SEQ ID NO: 111136 - DNA, 423 bp, Heterodera glycines
ggattgagcatctgatcgaaattttgtttaacacgcgaatatttaggtaacacatttaatttaattaatcatactaatagatggtatacggtatgaaagtaattaatattttttatacggtaaggaatttaataaagtattttcttttaacaaagaatacggtatcgagcggattggtgaattcgaatttaaattttaaattaattcatttaaatatttttgtttatcataacaatattgaggtagcaaatttaaatcatttactataataatagtttctatatatggttaggaatttaataaccgtatttagttttaacaaagaatacggtacagagttgagcaatgagctaaatgttaatttaatttttttttgttttacatgcgaacattgaggtagcaaatttaaatgaatttgccatg

SEQ ID NO: 111137 - DNA, 165 bp, Heterodera glycines
  unsure (1)..(165): unsure at all n locations
agacaatgagcgcaaaaagttcaaatttttgctcnaatnntaatttcttcaaaaattgctttccagtttttttggtctcnnggaaagaatttcatntgctaaattaccaggaatttgaataattaaattgggttttgctntaatgaatatccttttttaccgatg

SEQ ID NO: 111138 - DNA, 964 bp, Heterodera glycines
gttattttattttatcaatcatgaattttttttttttggatcgactcagcatggcttttgacaatcatttcctttgaaataatggaaattaacgccacaattttcggcgtttcctaaatatcaatctagacaaaaaaaaacaacaaaaattagtgttgaaatcattaagaatagggtaggacctcgacctttcagggtgcggagcttcggggtcggagttgggggtataccccgaaaaacaaattttcggagtccggttccctgcactaattagtattttgggagttttaattcagccttattttcaacctccttcgaaagggaggctttatttcagggggggaggagggtgtggtttatttttcaaccccctcgaaatgagagctttatttcaggggattttttttaaaaaatttaaaaattagggaagcaatctgaattgtccacatgttttgaatttcgtctggtgcctaacagttgcaataccatccatcagctggcgaaattcgaattttattttattcgaattttattttattctcgtttttatgtatacaatcaaatagcatatattttagataaagctaaatatttgcttattgattttttgattttataattgtatacaatgaaaaatttcttgcaaatttgtaaaattttctgaagaataaaataatgccctttttcatatgattattgttagtgtttgttatccacgcgaaaatcgttatccttttttttattaaacattaaatttatttgctaatgtcatttttttattaatattctttaaatgtgccctagacaggagtttggagccttgcaaaaggtggctaaaaatttttctagaaaaattatgaaatgcactctatataagagccaatgaaatttacatttatataatatgtttatttttttaaaaagcaaaataagttaaaataaatattatctttttgttactatg

SEQ ID NO: 111139 - DNA, 1003 bp, Heterodera glycines
  unsure (1)..(1003): unsure at all n locations
gctatcctctataccacagggatgcgattgaaaatttttctaaatcagaacagcaggctcaaaaaatcagattttagggtcgaaaatcagaacgtttgcgaaattgcgtcaaaacggttatttttacaatttattcgatcaaaaatgtattaatattatattttccacctcccataatcgattttaacaatttttggggagaaataagcaaattctaaatttcagtgcattcgggatcaaaaacgagatttataacaattttttgcggcgcatttttccaaaaaacttttggtgaatgagcgaggggagggggtccggcggtgtcgataggcgccgccgggaaaattttttaaatttttaatgcgatttgttaacagattttcatcaaaaaagcccaatttttggaattaaaagccaaatgacgactttttttcgctttaaaaaacgcttttttacggcgcgcttattccaaaaattttgggggcgccgatagggggaacgggtcgtttcggcgccgccgtttcggcgccagggtcgtttcggcgccaaaaatcagaaacgcagnaatagtaaaaaaaattttgttttgtttcaaaaaatgaagtcaataaaataatagtctatattaaatttaatttctccattttcacgttcattttttgtgatcttgcataattttgtcgttaatgtttaggtgaaatgaatcgccaaattgatactaaaaggcaaaagtctaaaatcacgcatgaagggcacctttacacttttgataaagcaagtgcggacgggatgacaaaattttggagatgcgaattcaaggacctgtgcaagggaagaatctggacgaatttggctgatcaattcatacgtttggcgactccgcatacgtgtcctgcaaatgcatcaagcgttgaggtgcaaaaagtcaagacggcaataaaacggcgtgcgctcgccacatatgaaccgccagcagtgatccgttccgaggcacttcaaaatg

SEQ ID NO: 111140 - DNA, 395 bp, Heterodera glycines
atcccttataatcttagacgtaaagttgtgttaaaacctaatccagtaaaacttcaaattcttttatcaacagaacggccttaatatggtctaaactcaacaaagatataacagatgctccatctgttgacagtttcaaaaaacgaataaataaatggattgagttaaacaaaaatttagtctgtaaaagagctccttggacttgatattactttactaaaatctaacgtgtaagtggtcaccccttcgttggatatttttatttcttctgaataaataaataaatatgtttataaatttattttaaaagttattgaaggcaaccatttcgaccgtctcagaacctcggatttttttgtcagattcggaccctgggtttggaattagtcggaatg

SEQ ID NO: 111141 - DNA, 1003 bp, Heterodera glycines
aatctcaaaatatggacataaaatggcaaaaatatggacataaatttttctaaattgaggggtaaattttcaaaaaaacccgaccaaaaaaccgaaattttccattttttgcttatctttcacataaattaaccaatttttaggaaaatttaaatttattcaatattctcgagaaattttggcgaaaaaatgattttttgaaaaatttttcgggttttgggctcaaaaaggctaatttagctgctgggggccgttctaatagaggttttttttgggaaaatgccaaaatatggacataaatcgcaaaatatggaaaatatggatatagaaatccatcttagcttcaaaccaagctaaaaacatgtttttcgtgcgtttcaggcctcccacattccaggaaaaaaatatggatttccatataattaccatccctaatcataacgtttgccaattttcaaaatttgaaaagggcggatttaacctttacaaatgaaaaattatccgtcaaattgatttatttgattgatttgttggtggagggtagggtaaaacgcccggcaaatggtcataattttgcaaaatattctcctgtttgatgggtcctcttatgttgcgttccctttttcttcctcttccaatcggtcattttatgccaaaatgtttccttcacttccgtttttgtcaatgatttttcgtttcccatttaaacattgtccaaccccatttaaggcaaaaaacttcaaaaattgttttaataaaatgtgattttcgtgtttctttcatcaagtacaatccgtaaaaaataggaaaaatctaaaaaaatcagagctctctctattcatatacaaaaaatattcaccaattcccttttcatgactataaaaatcttttgttttccgctttgactcattaaaaaaataaagtttccaacgaattattattctgttcttttgtttgacatcattcagaatttggccaaattgtgctaattgcctcaaaaatg

SEQ ID NO: 111142 - DNA, 399 bp, Heterodera glycines
aaagtgacaccaactccatttgttctcccaaatgaaccaaatgaagaaagtcccaccactgtcgttacaaaaagggaaatcccggatgacgaagagtcggaaaaactttggaaggaagaaaatcttgaccacgaaaattctcgtcttaattatttgggatggaagacacatcggacaaaaatccaaaatgcgcgagagaaatggatgagcgactgtcacgaacgaaataatgcactttccatcgcaaaggcattagcacgtcagatgccggaagatgcagcccgctctctttacaaaagggatgacataacggcattttggaccagatcatcacaacttgatcaaaaatggtcaattgctgtaatggctgatcgaaaatagctatgggagctgaaaatg

SEQ ID NO: 111143 - DNA, 195 bp, Heterodera glycines
acaaatttgttaaaatttacaacaacaaaaaaattcaccgccagactacaagattttttaaaaatttgacccaaaaatgcttaaaattgatcaatttatgtaaaaatctaaacagtgatttttttcaactctatgcctacgtttttgaaaattaacatttgctctaaaaagcataaaaaatgaccgttgacaatg

SEQ ID NO: 111144 - DNA, 214 bp, Heterodera glycines
attaattaattattgttcgattgtccaaagcctagctaatatatatgtaaatgtgttttgtttgttatttaccaaaattaagttccattatgtggttgttttattttcatgctttgtcgattaataataaatttttggtttctcatttatcgcattttatttttgtgaaatttttgcgaataaatttaaattttaaaatatttcaattcagatg

SEQ ID NO: 111145 - DNA, 138 bp, Heterodera glycines
tgcttcacaacacggtgatagaggtcattgaccgtgtgtgcaaagtttcaaaagtctccgttgtttggtcaattcaccacgattaaattgaccatcaaccagagactgggccaaggtcagcaagcgtacttgcaaatg

SEQ ID NO: 111146 - DNA, 590 bp, Heterodera glycines
  unsure (1)..(590): unsure at all n locations
ctcaattataaattaattttaaaaatttcgcccttattaatttcaattntaaatgaatttttaaataatgttatgacgcatntanaatatatntagattttaattcagagaaattaattnaaaaatatatntagccaagttcaagcaataaaagagccaaaaatgaacattatcaggaaaacgatgtaaaagcatattttgggctttcaatttttcaaacgatttaaaattttttaattttaattctattaaaaatattatatatatataaattaatttttattttaactaaaattaaatatttatgtatttgataaaagaagaattatattttgggcttttcttttttaaatgattaaagaataattatatttaaatttaactgaaaacgagtaaaaagattattttaaattttattcaattaaaaataaattatttaaaaatatgtctagccaacttcaagctataaaagatcaaaaaatcaccaaacatcaaaaaatgaatttattcaacaaattgattcgctgctggaagcaaaagaaaatcttacacaaatttacatggacaattggtacgttgtggacgacatg

SEQ ID NO: 111147 - DNA, 1003 bp, Heterodera glycines
aaaactaccagaatataagtttaaaacctccaaaaattctaaaatattaatatttattcaatatttgcttaaataaatttaaaaaaaaatttaaacttattttttggttgtccgatgtataaactcctccagggaattcgaattaaggcttaacacgattttgaaattttggcatttcagaagcgatttgtccaaatttgcaaaagttcgaaaaaaattctcatttcaaaaaaagataaaataacaaaaaatagttaaaatattgattaaaaagccaaaaaagacgcaagtttttcttgtttatgggggtgtgtttaaaaaaaattccataaggttgatccttcttgatgtattttttcgcttttttgcatttttattgtcaaaatttcctaaaatgaccgaaatatgggatttattcccctaacccccccccccccccccatattatggatttatatggaataaaaccaaaaatttaccttctgatgatgattgtaattaaaacgaaagttttttgagtaactgaacactattaattaataattaaataaattcgttttgggcatcatattcaaatatggaattatttattcgaacaatgagtaccattgtaacgaaattctcctaattattttatgagccaaaagtgtcattttcaaatgcatttttggccattgtcctgctgattagccgtggccgtttaaaaataatgaaattggacaaaaaataataaaattaatttagaattgatttcaatttaacaaaatcaaaacaattaaggcattatattttgccgtgtcattttacaaaaatttaaaaagatgaaaccgcggaaattaaacctactgttatgttaaatttttttgtcaagaattttttagtacaaaggattttaggcatatcaaaatgcgtcagcgcctcgaggattggcactcataataaacaatgagttgttcgacgactcgcagaaaaaccggcacggctccaatgcgatgccaggatg

SEQ ID NO: 111148 - DNA, 1003 bp, Heterodera glycines
aagatcaaattaatagtgacaatggaagacaaagacggaatgaaatgacgaaaatttaaagtgtcaaaatgctttttatgccgcccaatcaagcactcccaaaaaaaggtgcaggatatagtccgaaacttggctaaaattcaaaatcggtcccaaatttttttcgagcgacccggagtatgaaagtgcgaacttgacatttttgcatgccacccatttttattatatgtacgtctgacaatttcatagttgctctataaagtcaattttcgtggtccatttgcgctgacaaagctatcggcgccgccgaaccctaaaaatcttatgttttcttaaaaaataactcaaaaaaccacaaaattttgacagtttttctacaatgttatgggagttgaaaaatacaaaattgggtgtattttgaaaaacggtaatactggagaatctgggctccatcgcgtaaaaatttatgatcgtctcttaataaagttcaaaatgcataaaacaaggagagtattttattgagcattatacatacatacagagtacatataaaaaacacacattccattgtacaaatacataagcatatacagaaaacagccgaacaatgggatacaaatatgatcacaacaataaagaattttttataaatttgaaaaaatttttatttggggcccaaacgtggggggtccaatcgtgagggccgaactgacgtagaccgggacaaatcactatttatcctacggatcatgattcgggcgcccattcgccaaacttcttgaaagatctgatttaaaattgttgatttctttctttgccacctcggctaaaaagtgaccaattgtttgtttatttcatattatttctttattttcggcgtcaagcttttgcgtataaatgattgattcattaaatttataaacattatattattctgtttacatacataattcaattccgtgaaattgcatccaaatgccaacaatcaaaacatacaataatg

SEQ ID NO: 111149 - DNA, 99 bp, Heterodera glycines
  unsure (1)..(99): unsure at all n locations
taaaagaaaaaataataanaataattaatttttttagattaattaatcgccacgatacccaaaaataaaatacaagaaaaaaaaattgaaaatataatg

SEQ ID NO: 111150 - DNA, 400 bp, Heterodera glycines
actgggaatgggatgatttaaaaaattatttattttttatttttttcaacatttaaaacggatttaatttaattgaaattttggctaaaacaatttttaatcttaaaatattattataaattcgtttttttaaataaatttaaattaattatcaaaaaatttaaataaataaattaaataattttttattaaaaataattatttttgaacactaaatttattcttaaaataatgatttttcaaaaataatagaaaataatattttaaaaataaattattttcctttttgctttaaaatttaattaaaaataaattatttaaattaaaatttaatataataaataatttaataatttaattaaaaatattttttttcaaccctaaaattattcagaaaatg

SEQ ID NO: 111151 - DNA, 66 bp, Heterodera glycines
  unsure (1)..(66): unsure at all n locations
aaattaagattatttttataattaattttaaagcatttcnaattttatntagttaaataaaaaatg

SEQ ID NO: 111152 - DNA, 497 bp, Heterodera glycines
taaatcctattaaaaagaaaaaataatctaattttttaaatgttagcataattaataataaaatcagcattaaacggtgcagaatttttttctctatagatatgcaaagtttgaaaaggattgttttggtaattgtctaatcgtgaagcagtagcttagaaaaagcttctaaacatgttaagctttcgaatgtatcaaaaatgttggatttggatgacattgaaaaaagttatagaaagctttcgtggaaaaacatgctggcgcccaacgagcgcgcccaaacgcagtggacccgggcttgccccaaggggacccacgcgtttcggcgcccgcgtttcggcgctcgcgtttcggcgccgcgtttcggcgctcgcgtttcggcgccagctcgtttcggcgcccgcgtttcggcgccaaacaaaaatataaaaattcaaatatttggttaaaatcaacaaaaataaaacttttttagttaatcaatttcatcgaatatg

SEQ ID NO: 111153 - DNA, 773 bp, Heterodera glycines
aacgacgagacgtctcgaaggaggagagggattgcggtgtctgcatttcggtcttttttatttttgtttttggcatttttgcattgacccattttccaccaattctcatcgtaaacattttatccatccacatctctcaatccttaccaaatccttctctcaaaaaaattctctctccgctttgtgtaatgtggcctagaccattctcacccgcttggcttcgcttgactcctcccaaaattgtgccgtatttaagctctctttctgctttggatttcacccttcttactgccattctcccttcctacttactctccctttgcttactcttaaccaattttgctataaccaattttgcttattcttactcttaaacgattttgctttgctttaataactgttttgctttaataaaacctcaaaaaaaaagtcgaggaaaaaaagagattgaattgggtcaaatttggaaaggttgtcagaactgagaaaagtgcgtttgcctgaaactcgtggggacacaacaatttttggtgccacgacccgggaagaggagaagcacgggttaaaccaggcgctgaacaaaattcagcaggggtaaaggctcggtgccattaccaaaacaatctctgtgagctggtctagttgtgtactaccagccgggctgttgtgcaaaatacaaaaaataaattttgagctggtcaagtgtgttttccagccgagctgttgtgctaatttttaattttcaaaaaaaaaccaaaaagtgaatcaaaatg

SEQ ID NO: 111154 - DNA, 151 bp, Heterodera glycines
ggattcagacctggatttttcctggacctggattttcctggatttttgtccaggaaatccaggtcagtttggaaatccaggtccaggcatgaaaaacctggacatgttaatttaaaattctttattttattctttattttaggcactaatg

SEQ ID NO: 111155 - DNA, 748 bp, Heterodera glycines
ttgttttgataggatttagttatgttaaattgaaccttcagatagaaggtcttcaaatggctttgaaattacaccaaagtctttgcacaattttgccattgaacatatctggctgttacagctgttcaaccggagcacaatttaagtatgtgtgctcaacaaattttggcaatgcatttgctgaaattacatgcgacgatggaacacatttttccacaaaatgtgattccaacgccacaatttaccaaacaattttggctttcgataaagccagaattcaaactaagtgccaaacaaaatgtttggcaggaaaaacatcatttgaaattgctggaacattgcattatgtccagtatcaacaattggaagattttaattctaatctttccaaaaaacaaatcggccattcaaattggctgaattggaattttgattggaaggccacactttggtccttaattggcctccaatcatccttacattcttaatgattattggtgtaggcattatttgcctcatcattttcattaaaatttcacccttctataggctttggaaattaatttcctggtctctgatgagaagggactacggtacattaaatacagcaataatgatactgtatttggcggggggaggatcctttggatatgatgatgagtcacgtccgatcagtcctatccccgcccacattctgaaaaatcctataaataggatagaatttgactccaacacatcattcacaatg

SEQ ID NO: 111156 - DNA, 127 bp, Heterodera glycines
tcatcatttatgcaaagttcctttatacacgaattagtttattaagggacgggatttatacccaaattggcaatgttgacaaccagaattcgaggtcttcttgactccaaatgtgagggtctttatg

SEQ ID NO: 111157 - DNA, 101 bp, Heterodera glycines
aattatcccgtccaggtcgacttcattgtttcttttaacctttgcattttctactaattcagttgctctacgaaaagggcgccctctccgccccctcaatg

SEQ ID NO: 111158 - DNA, 296 bp, Heterodera glycines
agtgcgttcatttatttaaataatcttttagaatttttattgtacttatataatgattaatataaatattactttatttttaagtatttttttaaaattaatgccaaatgttgtctcaaaatgaatacaattttctgttaacattataaattcaaagctttaaaataataaaattctaatttttcattttaacagcataaattcatagttttcaattaaaaaaattttactttaattttttattttaattaattaattttacttaaatgatttattaattattttctcaggcaatg

SEQ ID NO: 111159 - DNA, 636 bp, Heterodera glycines
agatgtatgggataccattttttgacgatcctttttgttgttgatgtaatgcgttatcattaaaattttgttggaaccaattagaaaatccacaaaagtcatttccttaagaaatcatgaaaaacgccaaaaacatggatccgtaaaatggtaatgtaaaaccaggctaaagagggcaaaaaaaaaattgtttgaattaatttggctttatgtttatttgaaaataattaaggtaaacaaatttaatttcgtaattaggggtacctaattgaaatctcgatttggataaacatatggggaaacgaaagccacgtttaaattttaaacgtaatggtattctcacgcaaaaataaagccttgtgattcctttcttgttcgaacgttttattgctgatagaacttcgctttcaattgatgaaaaaattgattattcatcattttttataagcaacggtttgtgtttgtgtcatccatttattgccccatccatttgttatcaattcgtgggtattattccccatttaatttttgttgtttgcaatatttgaattttatctaaacaagattggttttttaaatttaattatggtatatgaatgattatttacagaaaaaaaaattaacttatgcgatatg

SEQ ID NO: 111160 - DNA, 689 bp, Heterodera glycines
  unsure (1)..(689): unsure at all n locations
tggtactgcttgcatttgctgcagttcatctactggccatcactgttgtcattgtgattcggtaattgaatggtagagcaaatttttttttataaatttcatagttaaaaaattcaaagtttattttttatgagaatccattcgaaaacatagccctttctattagaagagagtaaatttcttgaaatatctctaaagtctttaaaattaattaaaaaattttaaacataaatttataagaagtatagttatgtatgaatagggacgctacttttttcataaattcttaggacctgaaanctacagaactctgcaataaaatgttaaaagcacacctagaaatgattttttaattttcaaaaaaattttgccctctaaaaattggcaccttttcaaaaaaaaattattaatttaccaaataattttatacaattttattttgaaaatttttgattttattatcacttttcatcttagctattttgctgggtttcgggtctaaaaattccattcctatcgacaaaatcctaatgtccacacataaagaatttcaaattaaataaataaattttccggctgtcagacggcgaaaacagcgcttgaattgccaacagaacacgccgacgatccgcagcatgttcatcaatgccatgtcgttcggtgctgcggggagacaaatcccaagcatg

SEQ ID NO: 111161 - DNA, 1003 bp, Heterodera glycines
ataacgcctaatgacatgtttttggaagattttgggtgaaaaaatttttccactcaaaaatactggtcacccccctttggtcccgaatcccaaaatcacttttatttttatatctttttttaaaaatgtgataaaaaggtcaaataaaattctctttatagagaaaaaaattgcggattatatgaatatttaaatattctttagcgccttttttgaaatgagttataaatttatttctgaaaatttaaaatttttgagaaatccaggcctaagtttgtgaatttttaaaatatggaaactcaaaaaataacttaaaattctccatatttttctcgatttttattgctttaaatgagctgaattggacaattttgaggcgagttatgaatttttaaaatttaggttgaattttcaagggccaaaaattattgatttttcaaaatttttttaccaccctccaaaaaatccaaaacgcaatataaagcgtatatacgtattcagcacctcaaattatgccataaaaatgcattttggctaatttaggagtaaaaaaatttttcataaatgcaaaaccatggggtcccccctatggttttgagtttcaaaatcacaattaattttataactttttttaaactcatggtaaaaacatgagataaagcacattagatagagcttaaaattctctacaaaaatgctctaagacaaatttccgctaaaatcaacgcctgacgagttataagcctcaaacggaaatggggagctcaattccggaaaatttttctatttccggaaaattttgaaattttttcaaaaatgccaccaatcgatagagctcgaaaaacggttgcttgaaagtggtctccgttttcttgggaaaaatcggcaaaaaataataaaattcaaaaacgaaaaattttcgagggggcctagctcgaaaaattttcaaaattttcaaaatctgaaaacgccatcggatgcagctttaaaaactacacaaatg

SEQ ID NO: 111162 - DNA, 61 bp, Heterodera glycines
ccccccctttccattccggtttgattttttctatgctttcaaagcgcacaaatgcattatg

SEQ ID NO: 111163 - DNA, 251 bp, Heterodera glycines
tttgtcagttcggcacttttctcccctttcaaatttttattctcaaccattcgtcagccaatcacactttcatgtcactacttaacatttctctgcaatcacccttcgcctttgatttgttcaatttatccattaaatgtttaatttttaattgtgaggattaaaaatgcacgcaaattgttaataataaaattaacactcttttaaaattaatttagcaattgattttttctgcttattccattcaaatg

SEQ ID NO: 111164 - DNA, 190 bp, Heterodera glycines
tatcaacaattttgagaagtgagttagaaatgataaacttcacgattcaaaccagttttcggtgctctattacccgcgataaaaacattcgaatcaattaaatagcttctgagataataaggtttatcataaaatttcatttaaaaataaacccctcaattattggtatgaacgatactttccaaacatg

SEQ ID NO: 111165 - DNA, 370 bp, Heterodera glycines
aaattttttgcttttctagctttcttagatgttttttcttgaaaaaaatctctatcttttttttcacgagatgcgacgagttttgtttaaaagttgattttattaatcatgactcatcattatgtgccattaattcacataataaatttgaaaccatagtatattctcccgaagtgattaaatgtgattaataatgtaaatttaaatttgaacatttttttaacttttctaactttcttagagattatttccttaaaaaaactgaaaattttttttgaagaattctccaaataaatttaaaaatgtgaattttatttatcaaaattattaatcatttttcaagctaacttattaattacagcagcagatg

SEQ ID NO: 111166 - DNA, 683 bp, Heterodera glycines
tttctttcgatttgtgccaattttttcgctattttctctttatttttttccattcttttgctgaatattttcttcctttttgtttgatcctttctttaattttgttgaatttttgaacaatttctctttttttctgttcattttctttttcttcccatttttctccaaatatttcttcaaatgttttttgttccaattttttcttttccgctacaatttcaatttgagcaattaaaaaggcaattaaaattgaaaataggcataatttcattgttgacaatttttctttttattaaaaattaaaatttataatttattcgatatgaaaaaaagaaataaataataataaaaatatttctcaaaaatgaatttttctcttccttataaatttacattaatggtaaaatattgacaggatcactatatcaattaaattgtaaagtgaattttttctctctactgaatgatcgaaattaataattttataataataataataatataaataaaaactgtttcgccattaattaaaattctaattctaactgatcaaaaaattcagatatttatcataaaaattaaaccatatccgcgaatatactccttagtcagttaaaatcaatttcatcatgggctttgtcatttgctccaatttttaaagacaaaagtcgcttcaaaaaatg

SEQ ID NO: 111167 - DNA, 212 bp, Heterodera glycines
atcagaaaattttataaaataaaagaaaaaattatgcaagaaggaagaaaatattcaaaaaagaatggaataaaattgaaggaaaaatagcaaaaaaattggggacaaatcgccaatatatttataaatggattaaagaatttggcctatataaatacaaatcaaaaactaatgaaggaaaaatagaaattgttcaaaaatttattgaaatg

SEQ ID NO: 111168 - DNA, 326 bp, Heterodera glycines
tgggcactaaagaaattcaaacactattaaattaatgtttttagtgtaagttttgcattttgccaaaagcggaggcgttgacctgcttgcgtcagctgttggtgtccatgcgcggacctaaggtacagtccgataacacggaaatgttgctttattaagacccatctcaaagtcggcgattccatttattttgattaaaatcataattttctaccactgttgtattgtttcaattcccttcatttgtgcaggtcgacatgttgagtgtgttcgtcgaacattgtggcccttttctccaccggtcgccggatgcacacgcaaagatg

SEQ ID NO: 111169 - DNA, 87 bp, Heterodera glycines
actaaaatagacaaagagaaaaaccattattacacgcataatctaaaggttgcaagttttttttctaataaaaccttaataaacatg

SEQ ID NO: 111170 - DNA, 84 bp, Heterodera glycines
  unsure (1)..(84): unsure at all n locations
tattaatttattataaatttcgtcttcatttaaaaattaacaaataaatntaaaaaaataaaaaatanaacattattgagaatg

SEQ ID NO: 111171 - DNA, 334 bp, Heterodera glycines
acccgagcatcgaaagactaagaaaaagcagaaaagtggccttttcaattgtctaatgttattttaatttctataaattgccgaaaacgaaattaagaaaatttattgttaaacttatttgataatttgttactttcaattcttaatttgcaggaattagtttttattttgtgtattaattcgaatttttggttagtcttttagttttgtcaccgaatccactttttctcctcctcctctcctcgtgtttgctggtggtggtggtgactgtggcggaatcggccacgagtttggcacaacgctggcacgcgattgtggcaactgtgctaaaatg

SEQ ID NO: 111172 - DNA, 226 bp, Heterodera glycines
ttttgcagttgtacgtcaaaaaattggaagaatatttagcaataatactaaatagaaagaagcctaattgaaccattgtatccatttataaatcagttatttattattttccctagttttctaagcttttaagaaactgaaaaatatgaaaaatgtgtaaattatgcgataattaagcttctccttcatttaagctaagcgcaaaattattttaaaataaataatg

SEQ ID NO: 111173 - DNA, 1003 bp, Heterodera glycines
taataattccgccgcgttctgctctcggctctcgctcgccgattaactgcccgctcaactgactccttatcgagagaatgctcccgattaaatagttggacttatggaacggaataaagatggggaaaagcggggataaatggtgtgagaaagagattgaacggatgtgataaattgcgccttacacgtccacccttcctttaagtttgtccacaaactttgattgagctacttttgagttgaattaatttttaaaaaataagcatcaaaacgtgactgattgaccaaagtcatgggaataatgatcataaatgattagattttgactgaaaatattagaatcggtgtcaaacagacagtgattgggttaatttttttaatcacatggaatgaccagaacaaaacttttattttatatccgataggtgaataatgtcatgattatgaaatgttgagaaaaaaaaattggttttataggcacggattttaaggcgtttacttgctgaataagtgctggctaaaaatgtatatattagagtaaataaatcaaaaattaattattttttgtcaatagttttttaaataattcaaattatttttttgtaaacaagaaaaaataattgcaaaatgatttcgtgagactttgaaaatggggtctataatttcaaatttaagttttgatccattttggataaattacgctcaacaatcagttacggcttcgttataattgtcttgtcaaatgttcaataaaaacttaaattacaaaaacctcttaggttttaaggcattcattttaaaaggaacttgcatgactgatgtaccaaagtcctttctgctatgagtttgcctttttctcaatgcttcaccgctcttttcacattggaattctaacaacacatttcaaaacactgagtttataattttctaattctaagtccgtttgcttccgtcaaagtttaactcattaaaaaaaattatttattctaaacaatgacgaatg

SEQ ID NO: 111174 - DNA, 1003 bp, Heterodera glycines
aggtttgcaaaattacgggccatattgcgaaatagttggacccaaaaataatggagacatttaaataagaaaccaatcaatcacattttattgacagttgacctaatttaggggagatattgcgaaataatttgaacaaaaagtcacgtgcagattgagaaataagggaagaaaaataaaaaacccatcaatcaatttttagttgacaggtgacctacttttgaaaaagttttttaatttatttattcattctttgattttacttttaaattggatttaaatagtaattttattgtccaattcataatcaaaattatttgctgccaatatcaattaatttgcacttcttccaaattccgttatcgatttttttttgcgcgcgactcggcatcgcggcgcatcggcagggagtgagtggaaatgaaaaaacctcacgattttggctaattttcaaaaagaatttttaatttcaggatcaaaaaatcatcataaaaaaaatttcaggattgagaaaataaaacgctaaaaggttttgaaacaaaagattaaaatttgcaaaagttaaattgaatttcctccacctgtcactttggtgacaggtggatgattgatgaccttcccgcggcgctgcgcggcgcgggaaaaaaacacccgcaacaatttgggaaatcggatttggtcaggcggcaacttcaaagtggtccaataggttttggttttgaaacaccccccccccccccatcgtggatttttgatggggcggcaacttcaaagggctgcacccctcccataggcacgggctcgtgcgggaaacacccgcaaccaacccgcaacctttaggggtcctatactacttctataattaattgttttgtcttcaaatgattatattttttaattttgtcagattcctccccctccgtcgattgtgccagcggtgccgcaatccttgtcaacagtgcctcagcaggtcaggacttgtcagccgtccacgtcagcaatg

SEQ ID NO: 111175 - DNA, 375 bp, Heterodera glycines
ttgagacggctcagtaaaatctgacaaaagatttgactgaggaaatcaaaacagatttgctcgcagagagacaaaatctctgtagagcagtgtcattgttggagaaaaacaatgacaagtgggaggcagtcttccaccgagttaaaggtcctgctcttcaggaggaagagcagaactacaaggactacaaacctgaaggaaaagcctaaaggaaagaattcccttagagggaaagatttcctttccagtgattttttgtccattccgcgacaaaaattggagccccgttggggtcaagctccagtcgtagcttaccccctcaactgagagaagtccaagctttgaacaaagcttgtccaacattcgtaagagatg

SEQ ID NO: 111176 - DNA, 68 bp, Heterodera glycines
ggttggttggttgacttctttaatccatcaattaattgcttatttgggcaatttttaggttgcttatg

SEQ ID NO: 111177 - DNA, 1003 bp, Heterodera glycines
  unsure (1)..(1003): unsure at all n locations
ttcttttttattgttaatgtatctttgtctaatattttttatttgtgactaatgtgatgtttttacttattcattttacatttttaaccttaataaaattaatctaatgnattaaagtcttgaaaagtgttccaatttgtaaatgctttgcgcaaactgccagaaagttaattaatgtcgctagtaagttcttaattctatagacaaaaaaagataataggttaaatttcttgaatttcgctacatctaaactcttcatctgggccggtttttctctaaatttcagcttggccaaaacatgcggaatccaaaaattaaaaagaataattatatactgatgaaaaggttttaaaatgctttttaatttatttaaattcacataatttatagatccagtaatgaagttgggactgagttttaccgtttctctaatcgcctaaccaccgatttggcgatcagaacggcgatgccaacacatctgtccgtctgttcttttttgcccccgccccctccgcttccaaaggattgattgcccattccttccatcgaacggagctttttcatttttacttggcttagaacggcgccgatttcaaacaaaaagccgaccgacttcatttttgttcactttttccggcggagggctgttcaaaagctcatagccccgtcaaatgcttctcctccgtacgccccctcgttcactttttggccaaattgcttcacacttccgtctctcctgtgcttttgcttttcattttgagcagcatttccaatcgctttccaagttccattttgttaattgccttccaaatgttttgggatgggcttttatatttctaaaataatttctactaattattattatttttttactgtttttattcccttgtgtacgtattaattttaatgcttcattcattcctccatttatacactaatttatacattgattttgtccatctgatttagattttatttcatcgctaaacaacaacaaaaaatg

SEQ ID NO: 111178 - DNA, 344 bp, Heterodera glycines
atcagaacagcggaaatgaattgattgattggttattgatgcgattattatatgacccaaatgttgggcaaagatatttaaatattgttgtatttgattgttgctcataaattcataaaaacgagtttggtatttttgcgaattttcttcggattttgaaccggtacaaaaggcaatttttatttttagcaaaggatcttttaagtcattttgggtgcaaatgagtttgctgggaacaggatttagctgattttaacaatactttctcccagaacaataaagatttttaaatttacaataattttaaaaaaatatttttgtacaggcttttcttacataaaatg

SEQ ID NO: 111179 - DNA, 231 bp, Heterodera glycines
tagttggggggcatgccctccaatgtgatggctttgggccggaaggttaaaacctcgtgtagggggtgacctatgcgcgtttttggctctccaaaaatggcccaaatcatcgctcaggagaggggtcatgcccgatttttttgggtggccattttctttcattttcgatcaaatcttattgttttcagttttcataaaataaaataatcaaaatcaattttagaaaaaatg

SEQ ID NO: 111180 - DNA, 130 bp, Heterodera glycines
ttttcataccaaaaattttcgaaatttttcggcaaaatttcaaaaacagaaagggggttttcaacattttgatgtttctcgtaaattataagacaataatttttttgtttaagttatagattagaaaatg

SEQ ID NO: 111181 - DNA, 442 bp, Heterodera glycines
  unsure (1)..(442): unsure at all n locations
aaatatgttaatttattgatttaatttttaagccactgcggatcaattgtcaaaaattttggaaaaaccagagaattggagaagcagcgagaagaacagtcaaaaggcggcgagaaattaaaacaaaaataaaatttgtaaatntaataattgatntaatttttaagcttctgcggatcaattttcaaaaattatggaaaaaatcactgaattggagaagcaacacgaaaacatgcccaaaggcgaggaagttttaagcgaagaataaattatttcttttaaattatttttgtagaagaaattaattacatgagttaagaatattttaatttaattaaattttccatttttaattttaaaaattaatttcagcaacttcggaacaattctgaaaagtgcaaaatgattaaaggattttttttccgacaaaattattgggatg

SEQ ID NO: 111182 - DNA, 81 bp, Heterodera glycines
taccggcttttccatcgacaaatacatacaaagttttttaaatattaattaaataaaattaaataatactatttagccatg

SEQ ID NO: 111183 - DNA, 537 bp, Heterodera glycines
  unsure (1)..(537): unsure at all n locations
tttttaattcaactgacacgtaaacagattntgctccaaaatagtcattttcaataattttaatgaaaaatttgccaacaaagtgccaatagaaatttttcaaaaataacatccttaaaatcttaaaacccattatatagttggaaataatggcaaaaaaacggatagagtggcaaaaagatggtatgcaaaattgataattttcttaatcattaacctgacggagccagaagacacctccaggcccaaaatcgtataaatttttttgagaattttacaaaaaaaaaattataaaattttcattttattttatttttagtatagttgccatatttattaagaatatagttttttatattaaatgtttaattataataatattattttcttaattaaattgattttattgacaattggatttattgctacacatattccattgtaacattctgatttcctttccttcacatcctcatttacattttttaacatttttatatataataataaaataaaaaattccaaaattatccaatg

SEQ ID NO: 111184 - DNA, 95 bp, Heterodera glycines
ggtgggcgtatggatcagcgaaaaatactcccgccctgatcagttgaaatggtcgagactcgaattttgaaaatttctgagattggacaactatg

SEQ ID NO: 111185 - DNA, 964 bp, Heterodera glycines
aagggtccggaccaattggcggcacacttgttaaaccggatgaaatgcccattttgtcggacgggcatattaaatttttggcttttttctcttgagagaaaaagagtggttccggtggctcagtggttggaactgaacattacgaaatgggtggaggaggcgtgggttcaattcccacccggggccaaccaaataagtaacactttgtcacggtttgtttaaagggaaacctttccaagttgtcaaattccgctttcccattgctatgtgacgaagcgggccaaagacttgggaaattgtcatttgatttggtcggcatatggaatatggggaatacgcctttccttggcatttcccatcagatgcgccggcacattttgtcaatcgcattcctatgggcttaatcgaattaatttgccgtaaattctaaaacaaatactcccgaaattattgtttttttttttgcaattttagccgtaagtcaactattcctggggctttaactgagttcacttacctaattaggctaattagttaatagtttttttcagattgctctttcggccaactcggcattcgctgcggccattctgctgatgtgccattccgttgtgcgggaacgaccgcaattgctcaaagtgggaagggtcgcgggaccataaccaaattgggcgttggcaaaattgcctttttgtcaacatttactaacattttgtgccaaaaagatcatcctacacactcactatacatgaaaaaagggagaggaaaagacttgatttgcgattttgaaccaattttggttttttgaaaatataagattttagggtccagagatgccgataggtgtcgtcgtgaaagtttttatgttttttgaaaaatttaagcgaaatttttcaagaagatacccttaaattccaacaattggccaatttgcttttttcgccctaaagtttgttaaagcatg

SEQ ID NO: 111186 - DNA, 157 bp, Heterodera glycines
tctgaagcaaattcaaataaatctcgatttatctcttgaaaatataaccattggttgatgaatgaatggaactggcggcgggagagagaatggcatggaaagggtgctgatgagtgatgtcggtcactgaagcgaatggacggactttagagagatg

SEQ ID NO: 111187 - DNA, 536 bp, Heterodera glycines
gaaggaagtcacttttctgatgatgaggaatttcatttgggtcttcctttgtttctgtccttaccaattcacattttatttcatttattcgcatttggatgctcttttccagtatgagaagacgttaccaaaaaagattactctcattatctatttcaagcataacaatgtttgtcatttcaatctgttgaatggggggaaacaatgattgtgagatatgtgtggtgtgttcttcgctatttttctcagttgcataaattccttcatttcttcctattcagtcagtgtatcataaaatggtgatagtttaataggaaagtcaccggaagattggaaattgggtcaaaggtgtgcgagggaggagtaattgaaggggaggggatggaagatacgctggtggagatgatcagatcaattgggtaggggggaaagagtcgctcgggggtgtgcactttggcgattactcaaaccgcttattgaatgacggcgggctacggatccgcgcctgtgttaaaagcactccttccccggaaatg

SEQ ID NO: 111188 - DNA, 1003 bp, Heterodera glycines
aggacgcatttcaaagttaggggggggggagggaacgaatttgagaggagtgagtgagtgagtgagtgggcggattggagagggcaggaaaagaaaaaaagtaagggctgagcggggggggggggagacggcaaaacaactgctgaaaattgagaaaatgatggaaaatggggggcgggagggggtgaagggaatgaaatgaaaagatgccaggcaattaaaattaaatggcaattaaggcaaggggacaacacaataacgtagaatagcaaaaattgaaagaaaaattgagaattttcaaaaaccaataaatttcgtgggaaaacactgaccaaataattttatttctcaaaaatttagagagaacaatagaaatttcgtgaagaaaatcggcagacactcggttgatgtttttatttcaaatttgtttttgcttttaatttttaatggttttcgtaacacaaaataaaggcacaaaatgtaaacaaatgccaaaaaaaatcaaaaatctcacaaaattggacacttcttttggttattaacacatgagatagagaagaggaaaattaatagatattgaagcgaaattaatcctaatttgatcgagcaaagggtcggtggttcagctggtggaactctgatccggcagaaaatcagagacgccggttcaaagccgtcccgccccattgttttccctcaaaggctttgttcattcatagaaaatatattcacacataataaataatcacatcattttcaatgttttcttcttccctttttctcttttcattttgcaatttataaaaatgcaaaagaaataaatattcgaagaacaccgatcaatcaaagaaaaatgaatgcattgggcaataattgtcatttgctcaacaaaataaccctttcactgattaatttttgtgtgttaatacacaaatttaaatttaaatattattttaaaattattagtttgatttccctccattttttgccattcctcacaatg

SEQ ID NO: 111189 - DNA, 148 bp, Heterodera glycines
actttcttaatttacaatttagaaaaaaaatcggcggcgacattttgtcccgtccccctcacacaatgccatggattggcatgggcacaattcatgagtatcatggtactataacgtattcccctcttttttcagcgcttggccaatg

SEQ ID NO: 111190 - DNA, 255 bp, Heterodera glycines
taaaatcccattccaaatgagtaatttccattccttttttgcttttttaaaattccaccatttctagtgtcgcaatacgctcaccgccgagctgcaaattgttgagcaggaaatgctgccaatctgcgaccaaattcgcaccgctttcaaggagtgtttgcgcgtcgactcggagtcgcccccggccgacccgccctgttcatcttcgactccgtttcatcagggtatcgttaaaccgtttttgcattccctatg

SEQ ID NO: 111191 - DNA, 498 bp, Heterodera glycines
gttgccaagcaggtgttaagcaatattttaaaatcgaagattctccaataatttgagcgaatttttaagacggtttaaattaagaaaaatgcaaaaatttaatattttatgactaattttatccatcttatgaagaattttcaatccaaacgagtctatcctccctttggttttaatacataattttgtaataagtgtcactttaaaagcacataaattttttttttctaataattaagaaaattcggaattataaacattttttacaaaatttatggaaaaagcttatcagggacaaatttttgagaaaaaaacaacctagtattcatatattatatttacttatttcgtgttttagcacatataaatcccagccctggtcagaatttttcattggaggcgatcaatcggataaaggtgaatgaatgagacctgaataattcagcactgaattaagcaaaatgttaaatttgggtgtttaaggtccaaggccaaatg

SEQ ID NO: 111192 - DNA, 1003 bp, Heterodera glycines
atgagaacagaagaaaaataaacaaagggaggcgaaagtggcgaagacaaaaaatgacttatgaagcgattggagaagtgaaaacaaaaagagaagagaaagtgatcagagacaaaaccaaaccaaactgatcagaaaggaaataaagagtgaacagaaggaaaggatgaccagaagagagagagagaaattaaaccaaattaaattgatcagaatagaaagaaggactgatcagaagggaaggatgatagaaaatagtcgggaaaataattgaaaaaacaattctattttaaaaatagttcatgaaaataaaacttaattttggtcatttaaatgattattaaatattttatttattacattttaatggaattttttaggaagaaaaggtcaaacatagaaggcattaaaatcgtaaaaaaaacacaaaaaaatttaaccatacaaaatttatttaaaatttaacaaaaaattaaaataaaataaaagtttgtcattacagtagtcatggatagaaaaacattcctacgaattttactttgatttaaaaacaagtttttattgaagaaataagtaaagagaatgcgcagatgcaggcaagtgaccaataggaagatttaattggaagttgtgataatgagtattgtgcgcggttaccgtggaggggggaggggattgccgccgaaaggccatttaagatattgtaaacttttcattaatattgtgccgccaaagagaaaatgacactccgcgaatttgtgaatgataaataacaacacattcttttcttcaatattttattttaaatttgttttgaatcaaacaagaatttatatgggcgggcgtgaattcataacatcaattacgatactattttaatagcaaattgttaaacactcttatcatttcttagaatttatttattaatttaaatattatatttaatataaaaatatttttatatataattaaatagaaataattttttatattagagaaaatg

SEQ ID NO: 111193 - DNA, 138 bp, Heterodera glycines
atacaaagttaaatcatagtttgaaaatgttttaaatttcagttttgacccaatttttcgaagcgccccattttccgctctctcctaaaaagagaggggggggggggggggagggactcttatggccttggtgaaatg

SEQ ID NO: 111194 - DNA, 482 bp, Heterodera glycines
attaatgaatttttttaccaagttaatgttgagcctctatttgtgtacaaaggtgccaaacagtatgccctaaaaatggtggatgagagtaccggcgaatgcaaatatgtacaaaaaattcgcggaataacatttgatgtgcagaatagtcaagcgctccagtttgagcacttcaaacagaaagtgttaaactatggccgtcatggagagcgcccggcggtgtttagctatgacaaaatacaaccgaccaagagcagtcggatagtgacaagagagcagttgaagcgctatcttccagtctgccagaaggggataataaaagaaaatctgagcgttcttccttttggtttcgagtgattctgaatatgtaaatgtaaaaaatttttttttttttactggtatttgtggtggaaatgcctaggaaaatggcagatatttaatgcgttataatgataaactagtatattgaataaaagaaaatg

SEQ ID NO: 111195 - DNA, 175 bp, Heterodera glycines
ctatcctgtcgctcccttgccatgtttcgtgcattatacaactttctcccacactccattttcttcttctggcattacatttaccattaccataaaatgggaaatatgattaacaaatttcaaatttattataattttttggcattgagtcatcaaccaaccaattcaaaaaatg

SEQ ID NO: 111196 - DNA, 137 bp, Heterodera glycines
ttttgatgattttgttttaaaatgaaatctgagttttttggttagaattcccaaaaaaattgctttttcatttattagtgatcttggttttcctttaccttattcttattaattttcattagatttcacaacaaatg

SEQ ID NO: 111197 - DNA, 54 bp, Heterodera glycines
gcagtggtcgatgatgccaaagaacacattggggatgttaatgcagagccaatg

SEQ ID NO: 111198 - DNA, 1003 bp, Heterodera glycines
actcagcaccctatgaaggattttcgatattttatatattcaccaaatctttttaattattattttatttgcattaaaacgaaaaataaaaaattgttttctgtctctcacttattaaaaatgattttactttggcaaatcaattacatttagtaacattggtctgagcttctagaagatgcacttttataagcatttgctcatttcggcaccccaaagaccgattatttggaaataattctatgaattaaattttaattcatttgaataatttttcagatttaatgaatttgagagaatttttttaattttttcaatattttttttagtttttttttacgaaaaatgcattaaattttagaaaaaatatttaataacaaaatattcggcttttttacttgtacccattttcacaatttatttctaaataaaaaattttctcccctcgcgcaaattttccaacggacaaatcaattaataggcatcttttggcatcccattttctgtcctccatggcaaatttttttttcacgatacatttttctggtggatttgattagcgagcactttcatttgtacgcaaacattcaaaagatccgaatcactcccccccccaccaatggcactttcttttacccattcattcattcgcaaatataagcctatttattggaccttctcaatttattgagcattaaaaaattggcattgactgaaataaaaaatattgcgcttaatatttttaaggatttattttttctcctgggtaatttcgggcactttatccattgacaaattctgtaattgaccttttttaaaacggttaatttagggaatttaaagcagtttggaattccttcatacttttcgtcaattttcttctttatgatgcataattattttctgttacctcttttgcccctttaccaagacaatgggctcagaataatgcacgaaaaactgagaaacccaattttggacactttgacgcaactgcaaaatg

SEQ ID NO: 111199 - DNA, 702 bp, Heterodera glycines
agttaaatcaaattgcatatttaaaaaaggaaacttatgcgacctttgattttaattagtttcatttaaattcaaatcttccccccccttaatttgcaaaagcgttgtaacattcgcccattaaaaattgttttgtgagaaactggacacaaatttgcacattagtggaagtgatcaatctccaatgaaatatgctaaatggtgcgtgtttaatgggaaatttaaaaaaaagagagcacaaagacgagacgaaggactttgttagaaaatgaacaaattacctgcccataattcacttttgtcacagattactgaaaattgaccaaattgcctcactttttgccaattagcgtaaagagatcgatgagaggaagtaaaaatgaatttgtgatttaaaaagtacaccatgcgggattggagaatccgggaccgtttcaagttgtccagggtcgaatttaaagcattgcgaggcttgaaataaaaaagaaaataaatattacagaaaattttaaaaaatttctccatccaacaaatattatctttccccccttttcaatttgacttttgcgatttccctttaataaatacaaaatgaatgcttctctgaatgagaaggctcattaaaaagccactttaactttgtcgttttgtgatgccagcaaaaggaagcggagtgtgggagaaaatgggataaataatatg

SEQ ID NO: 111200 - DNA, 61 bp, Heterodera glycines
aaaagaaatcttaaaaatttaacatatttctcaatctcgcattgcaaacggaagaaaaatg

SEQ ID NO: 111201 - DNA, 267 bp, Heterodera glycines
tttcgtccatccctccaacctttccccgtccgtccctttatatgcacaaataaaaaaaagcttggaattcaatttcaatctttctttttatattttattaatatattaattagtttattgttgattgatttacgcccccccaacaattgtccctttgtcaattttttaccccttcgatttttagcaaatttttccttttgcaattaaccgccttttgccaacgaattcacgccaattgccccgaggcagagaaacacctgcgaaatg

SEQ ID NO: 111202 - DNA, 1003 bp, Heterodera glycines
  unsure (1)..(1003): unsure at all n locations
aagactnttgagtaaatattcttctttgtatttcactttttcggaagggaaattgagaatttataagaaaaattatttgcttagccatctccccccccccctccgctcaacaaatttgttttatatattctgcccgtccacctcgtaattggacgacggacggacaaacaaaaggccaaatggcgggacggtcagacaaattcaatcaatttgaccgttttgatgccgtatatctcgtccacatgtacatttttactttaccccaaaatcaattttctccatcgacggcggcggcggcggcggtgagggcgggcgacggcggcgatgacaaagacgaaaaacggcgcgtcggttaagagaaactcactcattcactctctcactggcctgcccattgcccgcgctaaattccaatttgactcacaataaaaatatttaaaacttcattaaatttcaaaatttttatcatctcttgaatttttcctttttaaagcctcaaaaagtgagcatattcggtgaaaatttataaaaattgaaatcatttgtttctctcgtggcctttatagtacctgtccccctagaaatcttcaaaatttaacccaaattttttgtatttatttttaaaaatttcgagaaaatttaatttttctcatgtgcgtctgtgatgatgactcactcattgattgggaatttatgtcatggaaaattaaggtcattacgaatcggcaaaaaaaaaaagacatttcacttaattcccagccctactcattaacggacattcccagattaattataattaccctcatcaggcatcaacctcttcaacctaaaaaaacattttaatgttccattttgtgcataaattaccattaaatattctttatttctttatacatacacagttttaaattattttcaaatttaccgaaaaaattatatgacgactcaaaagaaaaaacttttagagacactttttttattcgcaaaataatacctgaaaatg

SEQ ID NO: 111203 - DNA, 487 bp, Heterodera glycines
acagtgacaatagtttaggaggaaattctacaagagactcaaacagtaaaaaaaaattattaaaaaaaattattaaatttgtaaagtacagtccttaaaaaatcttgaatgctcaggaccaggttttttggtgaaatttcaaggacaattcattcttgttgataaaacgacaaataattatgaaaattaacaagaaatgattttatagtttagtatcatttttgaaattaattaaattttaattatttctgattaagggacatctaaaataaaattataaaaattaaatttgtaaagtacaatccttaaaaaatcttgaatgctcagaccaggttttttggtgagtgaactttcaaggacaattcatttctgttcgaaaattaaaaataaatgaataatttttggaatccttttttttttttgatggcaaattaaattatttttaatttatttttaaaaataattttttaaaattaagataaccatg

SEQ ID NO: 111204 - DNA, 850 bp, Heterodera glycines
  unsure (1)..(850): unsure at all n locations
attgtaccagacctcaaagcaatttcttcaaaaaatactaattcaattaaaaataatatttctactacatcaagcttttcttacgaaagttttcctttgctagaggtcttacttttcaacttttctaactttttggcacctattttcccatttttagcacctatttgggggttttttagaaccaaaaacctaccaattttggcagtttttagcacctaaatcgtatcactagttataattggtagatgtttaaagtcgtataaagtaattttaattgattttatattttaaaaactattatgcttttgtatttttaaatcagttttaattcgtcgaacatagcagctatgtattctaaatctcttgattctctttgaaattcaaaataaaaatgttcgagaataaattaattaatttaaaaaaataaatttatagtttttatctagaaacatttctttaagaaaaggcagaaataaatttatataaattcaaaagtttttatttaaacgacattacatttttataaaaatatataaatttaattcatttttataataataaaaatttatgcaataacaacattaaaatttttctagtaataattaaatcgaagatggtcgagaactttatttcaaattataaaaataatacccagaaggtttagaacataatcaaaattaaatataaatttcttctatcaattttttgcataagtccattaaagattttaattataaattaattctgtttaatatatatatatgtagaagaatagtgaaaaaattcgaatatttttaaatgataatagtattggcaattactattttattaattgattttanaagaaatg

SEQ ID NO: 111205 - DNA, 183 bp, Heterodera glycines
atatcattaaaaaaaacgtggctcttaaattctgtcccaaaatgaggtcaaggtcccgaaaatcctcacgcgcacacacacatttgtcataattcatgaggaacaattcacaaccaaacggaaagcattttcatgtatcgatatttatttaaaaaaaagaatgctttttaggctggcgaaatg

SEQ ID NO: 111206 - DNA, 582 bp, Heterodera glycines
atgatatcatgatacctttcttttattattattatgtgatttgccctcaactaataaaaaataatttaattcaatttgcgcaatggtggctggggatgggggggggaaggtagccatctgtcggcagctacatcgcatggttgttgttgttgttgtgttgttcggcaaatatcctcacacactctgccctcatccttttccttccttatttttgcattttatctcccaccctcttcacggttaataaaaatgagtgcaaattccgcatcggttgaaagtgaaattgcgtcactgaaacaaattattggcgcacagtccgtaaaattgatgcagatgcgtcatcattttgtgaactaccgcttcagacttgagcaacttgaggcttgggccggggaagtaaggtattcaatgttttttgtgatcacagtttttaacaaggtaaagacaaaaagtttgttcgttcaccaacacgcaacaaacgattttctgtggacgacgagccagcaacatcggccgcaacttccggtaagggtagtgtaatattactgggaacagtgcgctttttcagatgggatggcaatg

SEQ ID NO: 111207 - DNA, 259 bp, Heterodera glycines
ggtaggtacagtacagcacgaactctacatagtccttttaccggttattaaaccaattttcaatgtctgctggtcaattcatattgtatcaatttgtgttctgtttcgcggtagagcgcagacagtgaaaactggaatgatacagtatgcattggaatacagtactacgcacaatctaaatcgtctaatctatttaacgtaatcaagcatcttttctatcttacttcttgaaaaggtaacactttgcgccgttctgatg

SEQ ID NO: 111208 - DNA, 327 bp, Heterodera glycines
aatcacaatgaatcaatcaatggattttaatagcagggaaaccaaagcatttactaatttcaattattcctttcggcagatttaattttaaaaaacttcaaatatagtcaattataatgcaaatgttcacattctttttgtttttcatcgtttccattcctcaaatgttcttcgccattagcccaaatgattttgagtcaatggcccaacgacggataaattccgccgcaattacaatgggaaaatattcggagagagaagggttggtagagaaaaagagaaaacaaatggaaattacgaaatgaccaattgagtgaccgggacatg

SEQ ID NO: 111209 - DNA, 150 bp, Heterodera glycines
taattatacctttctattgttatttatcggtgtttaataccaaaaatctcagcttttataaaactgtgatatgcgactctctcaaactaatgaagagagctttcttacgccatccgccaataataccacaaaactataacgaagaaaatg

SEQ ID NO: 111210 - DNA, 339 bp, Heterodera glycines
  unsure (1)..(339): unsure at all n locations
tttgagcaaaattcgtaaagacgaattagcnnaagagcaaaaagcagtctttgcgaagctacaaaaacaagataagcatcacaaaaagcacatttgagaatgaatgacggttttatcaaaatcattgtaattatatttaactaaaatgattcaatgttctgaaaataccttctcccatttcacttccgtcgctaatgcgcgcgcttcaaaaacatttgacgatcaaaaacatgagaacacgcattagtgccttcactgttctctcgcaccttgtcaggtatttactgattgatcaatgagataatgattgcttgtttcagaactttcccaggaattatg

SEQ ID NO: 111211 - DNA, 395 bp, Heterodera glycines
tgactaagtttacgtgggggatggggaatggaatgttccgtttttaaattcgtacggtctttggcaaaataccgtaatgcttttttggatgttgcgtattacagtgtcccgctgtcccaatttttgttgaaatccctaaactttcagctcctccaccgcatcacctcccaatgagtaccgcttctccgtccccggcttcttcagcttctgcttcgtcttcccaccaaaaccgtcgtcctttttccatcagttcactccttaacccctcacaaaatgccacgcaaaaatgtcctccacttggctctgtcgccgcattttccgatgccctccagcaatgtctgccgatgcttttcgctgtgcggggaatgatcggcgaaggcgcaacgaacgcaatg

SEQ ID NO: 111212 - DNA, 69 bp, Heterodera glycines
cgtacgttttgtttttgggtgttatgattacgatttgccaagggtgatgtgccacgtgccgacgcaatg

SEQ ID NO: 111213 - DNA, 1003 bp, Heterodera glycines
ttaagttagttaattatccttctaaaaaatcataaaatcaagctaaagccttacccctttaaattccgataattattaattatatcaattaaaaaataaaaaaggcttaaactttccatttgcgaatttttgattatagcatatgttaacatcataattaaatcggattttcttttaatgttgtttattttttaaattcataatggttcgaactaagcaatcctttcctcctgcggagcaatgttcctcatcttcgttacaaaatattaatctatctacttctggaaatccgacggttattggattgttttgaggtagaacatattaatgaaagaaagaaaactaaaagaaatattgaatttgaaaatgtgatagatttggataaaattgatttggatgtaataaacgaaagcaatgaattcgaacagaccgtgaaacttttaccaatcggttatttgtttaaaaaaggagcggagtttactgacgtaaaattattttcattgctaggattaaatgttgaatgtaccttttgcaaagcaatgcattttttagaagaaaaacctacaaattcaaaaaaaaagaatggttttaattcatgttgcaattttggaaaagcaaaaaatttgttggaattatttgctgaatatccaactgaattaaaagatttattttcagaagataatgaaatttcgaaaacttttatgaaaaatataagagcttataataattcattcgcatgcgcttctttagcctgtaataaatttagttttacaactccgggtccaagttgttttaaaatatcaggacaggtttatcataaatataatccagtggcacaaccggtagacaaaaattttttgccaacaaatgggcaattatattttctcgatagtaacgaagcacaaaatcttagattagattctcataatttagatgttacattaacagaaaaaatagaatcatctctcagaaaaaattatccttttgcaaagcctataaaatg

SEQ ID NO: 111214 - DNA, 339 bp, Heterodera glycines
  unsure (1)..(339): unsure at all n locations
ttcgaaataaagatatccagacgatttttttgcagtttgaataaaatgtgacagttgtctacggaaatgattgattaccctcaaaaattaaggcaaacccagaccagtcacgtgactagacccctccccccttttgcctatttcgcacacncggcncaaatcgcaaatcattcaactaaatagttggatttcattaaactctcttcacgctctaattttatttctctccgctctatttttatttgcattaattaaatctattactatttacctacgtctttttcttttcaaatctctgctctctttaattcttctgtttcaatttcttgttttaaaatg

SEQ ID NO: 111215 - DNA, 527 bp, Heterodera glycines
ggtccgctataaaagccacaattgcgcaaaaaattttcttttttcgagaaaaaatattgctttggaaaatatttcgcaaattgaattttaattcaaatttaccaataaaatatttattttatatacaaaaaaaaagtccaataaaaaaacaaaaaatgtctcaggcgcaaaaaaaattcctgaccgtcccggctgaaaaaagaaaagaaagaaatataaaaaattttttcaaaaaaactatcgacgaaataaaattaaatgaaaataattatatcgaaatatcatcaaccgaaaaaagtatgcccgattacgggattgaagaaaatattacaagatttatatttaaaaaccctaaaaaagaaaaccgaaaagaaacatcagaaaattttaaaaaaataatagaaaatttaattaaaaaatcaatgatgaaaaaaagaattgggtggaaaattcagcgtatttctattgatttgttttgtgaaattttaaatgacccaatcattttaccggccagggacccgaagatg

SEQ ID NO: 111216 - DNA, 323 bp, Heterodera glycines
catgaacttggggcgttttgataacaatcatagagaataattaccgtaatcccattgggaagtaacaattgtcataatcccttggagcgtaggtaattaccgtaatcccatcggagagtgaataattaccctaacctattagcaaattgacaattatcgtaagcccatcggagagtggttgattacagtaatcccattgatggttgattacagtaatcccattgacgatttagtttctacattaatgccgtaattcatccccttttccttgttttgttgtgcagctgcaccaacgccagcagcagcaacagtccaacagtatg

SEQ ID NO: 111217 - DNA, 1003 bp, Heterodera glycines
gtttttttaccatgaaaaggtcattcaaaaaatcaacccaaaagacatttgcatttatttgtctaccagtttaaaaataaataaatgaattgattgttatggatggggtgcacttttcaaatgatattatattaaattgaaagcattttataacttatatgtacatattaggtacatttttttatttatccactttttattggtcccttccttctcacacttcttcctctgacttaacatatcactcttttcgccgtttccttctgccgatggatttggtcgcttcgtctctgcattatgttggcagtttttttgacgtggtatacaaatcaaatcattcaaattcatcgtcattttccctctcaaatttcgcgtttccttaggtcgatttggttgtgatcggtgcgctcgctgtctttgccattgcctattatgtcagaagtcagtcgctgtccgcgcacaacaaaatcaaattcccggagagcacgccgacgctgcgcaacggcggcacgctgcaggacagcggcaggacggaccgttcctttttgggccgcatgaaatcggaggaccggcaggtgcattcttttttgtttcatccttgaaaagacccctaatgggggtagtgaaaccctggttacagaatccatttcgtccacctcccccatttttgaaatttcccttaattctggcacatattttatgtcaaaaatggaagaatttaatttttgcttttgatattcgtttggcaaaaataaagtaacgcaaaacaatccactgaaaatgtttgccaaatttaatatatttcatcaatttaaaatgctccaaaaagatcgtttcggcacccttaaaatttttattcggctttttttgaaaccgattatgctaatatatttcttctcaaaagcatttgccttgtattttttacatccccccccataaaactcagattttgattttgttcggctcccaaacgggcaccgccgaggaattggcaggccgcatg

SEQ ID NO: 111218 - DNA, 605 bp, Heterodera glycines
  unsure (1)..(605): unsure at all n locations
tgtttaatattattttacagaatattantttgcgaaaaaattgaatatattaatgtgaatcattcattcagctgattgaccaaaaagaaaaaattaaacaaaatagtcaataataaaatgggaacgacataattgatcaaatggcttattatccggtttaaaaataagaaaaatacagcagaaaatgatcagaaactgagaatttatcaaaaattgaaacaattaaaaaaattatttaagaaaaaccttatccattcaattagtggatgttaattgtttttcttcacctgttcctttcccttggggcccgaattcggatggattgatccttttgctcaaacaaatatcttccaccctaaaatttagatgaccatcttgatattgtgctggttttgctggtcatcggccccgtgttcttcccaacttttcaactttgttcagtaggaaagaagcagaaaattttttcagattttttttttataaaatcaatttaaatatcttattttaaaactgagttttatttcgccacactaaagtcagtgttaattagcgataaaaaaaacaaattctattttaattctgcgccgcaagtctcattttgaatg

SEQ ID NO: 111219 - DNA, 898 bp, Heterodera glycines
aaatgttcaatactttttcagatgctggttaattgcaacaaaaagtaatgatgggcgccgcacaaaacattttttgtaagccaaaattggtcacatgcttttcaactgttcattgctttttgctttttcaggtgctgtattttgtcaccaaaaatttgatgatgaaaagagcacgcataattttattgaaagcaaaaataaacttactgtttctttaaatgccccaaataatttacaggcgctgcttttgttacaaagttattgatgcgccagagcaaaatttttttgtaaacaactaactttatttagtccgataattatttatttttttataggcgctgtgtattgaattttggtcccggattggactggagcgaaaaaactccaaaaaaactttttatttaaattctttaatacttgtgtttaaataattgtcacaagttttattggatttgaataaatttgtttataactattacaatatttatttctactaaattaaaaaatgatatcccatcacaatattatctgcctgaaattcatttcgtacgtccgcccgtccgaccatccttccttccttccttcctttctttgctcctacattccttccttgtcccttttcagttttcaaatgtttaataattactgttgcatcttcacaaaaaaatgcttcgcgcaaaacaatattaatagaaaaccaacatttacaacattcgttcacaaaaaatttcattaatacaatttagaatttaataataaaataataaccgcactttttttgaattttcttatttaaaactttttcaaagtgaatattggcgttcataaaccattcagataactcaaaaatctccacgatcaatttcctactgtttacctatcccctattgcaattatg

SEQ ID NO: 111220 - DNA, 179 bp, Heterodera glycines
ttttgttggaaattttttgatttttttttgcaaatgaatcgtgattttggacggatgaactttgcgaactgaaaagtgggcggagcctaaccgattgaaaagtataaaattggcccgcttttgaaattccaccccatttggcgaatcattctaaatttttctcgacacaaaaaaaaatg

SEQ ID NO: 111221 - DNA, 1003 bp, Heterodera glycines
actgagtttcgctggataaaagagaggggggggggggaatttctgaaaatctcaattcacaaaatgtgccataataaagccaagccaatagcaaggacaaaagagcactggcaaagtgcatttcgtttcttctgattttaattcattttacaaaattgcgttcatttgcggcgatggtaattgcagcggcaaatttgggcacgacgtctaacttttgtcctatttttattctcttttaaatccatcaatcctatttgggttcatttaagtcttttaaaccgaactttcgagaaatgccagcggtgcaaagtcgaacccgtaaaattaattattattcaaagcaaaatttaatataatttttaaaattctcggatttcatttttcgggatcgatcctctcggggttcagtctcattctcagggccaagaaaggcttttgaacatcaaatcgctttcctttcctcgtcttctctgtatctttctctccgttctctcctcctttccctcgtccctcgtccctcctcccctattcccctctcctcccgtttctctctctccctctttctctctctcccctttctctctctctctcctttctctctccccccctcctctcctctccctctttctctctctctctccctctttctctctctctcccccttctcttctctccactcttcgccccccccccatctttacgtttctttacaccgacttcctcgcttaactgaactcatttctctcatcagttccgctgctgttagccttgcttctcctatcccttcgttttcatcccattcactttcttcttcttctgctgcttcttctccccatggtccctcctcctccgatcactttttgacttctcccttcttactaattaattgtggccagttccatggatgttattcaattggccaccccctctcatttcgcctcaaagggccaaattgatcgggttggcctcaaccgtaacaaattgttcgttgccctgcgaaatg

SEQ ID NO: 111222 - DNA, 153 bp, Heterodera glycines
acttcctctcttcaccatttcaagccccggccacttacaattagcattagaacccacccccatctccataaatgccattccaattttttccaattactctatatatttgcctattccaattccctcccaggtgacaatttgctgacggcgatg

SEQ ID NO: 111223 - DNA, 539 bp, Heterodera glycines
gggggcaaaaagtcagcaaattattggaaaaataggggggctccccaaaaactgttcaatttgtgatccagcaacattatgatgttgttgatggccaaagaaaaggccagctaattatgccttaaaaagttgaaaatagatcaaagcgggtagagggggggggaggggattgggatcacttccattattttggccaggcaggggtttcccttcatctgtagtgaatgtgaccgggggttggtatgctaccatcccggtaactatcgtaaacccatcctctgtttacactccagtattaacaacctaaccgagtttttgagggagggcaagactgaaacgacatgtccaaccgagacaacagaaacgaccagcagcacaatcatctgtcctccgcctccaccaacgacaactcacagcattctactgttgttcatcacttctctcctccttttggtctttttcgcgcaggtccacccccctcccccgtctaatcattaattattttttaatcctttttcaatttacaggctttcaaaatg

SEQ ID NO: 111224 - DNA, 110 bp, Heterodera glycines
ttggctgatcgtttccagcggtggtgatccaatgacccaaaagcgatgttcggcactttgtttggtcgtgccggaagtgattgaagcaaaattggcatttttacgaaatg

SEQ ID NO: 111225 - DNA, 437 bp, Heterodera glycines
ttttttttgaatctttttattgtatacctcgcattaataaatggtgttattatttttaaacaaatatattttcacctgattttttcttgttttaagctctatggtaaaataattcgctccttttccgcaaatatcactgtgttcatttgctgtcgatgcaccgccagcaccgtttgttgtttcgtgtactgcttgccgacgcggccgttgccgcgtgaactgctgattttccgctacgcgtaaacatcgcttcccaaaactgttccgcgccgcccgcacctctgaacggcgttgcactgttgccttacgtcgcgccgccgccgctgccgcgacaccgccgtcgtttcaacgacgacattccgcagcagaaactgttcagcgattttggccataccgcggccgccttcgttcgtcgccgagtgcagcagcaaaaaatg

SEQ ID NO: 111226 - DNA, 66 bp, Heterodera glycines
ttttacttttttatgtaattttctttttatttatagttttggataaacaccgcttatcccgaaatg

SEQ ID NO: 111227 - DNA, 299 bp, Heterodera glycines
acttttaaagaatatattaatatattttttaaattttttcctttaactccaatttccatctctaattttcactcagacccccattcttaccagtgcttgttttcccggttcccggttgccctaccgggaccgggacctgagattttcaaaacccgtggcgaggaatttttcgggtcatcaaaattgagggcatttatgttactgtgattagttgcacttcgccaaattcgaacccaaaaagacttcacttaaaccaaattaaaaagtgttacgaaattttgggccctccctgcactatg

SEQ ID NO: 111228 - DNA, 109 bp, Heterodera glycines
aagtcaattggcatttcgggaaggattcagctgcttagaattgagcttgaaagtttcgaaattgatctgtcttttgtgccagtgccagaaaaatatttggaacaaaatg

SEQ ID NO: 111229 - DNA, 164 bp, Heterodera glycines
tggtttgggatgcgtttggcagccacaagagcgagagaacgacgaaggtggtgaagggattgggagtggaaacagtttttatccctggcggctgcaccaaattcatccaggtaccaaagcatccttctcaatgaaattcacttttcttccctaggctcccgatg

SEQ ID NO: 111230 - DNA, 443 bp, Heterodera glycines
tattaaatatttataaatctcttttcgttgcgccttagtcattatgtttgcgcaaatatgccaaaaaattcgcctctccacgattagcaattgcccttccccgttatttgaattacgctttcccttcaacactgagaatgtttatattagttgcgctgttgggttaatcgtcggtagccaaaaagggatttacggtcagcagttcaagcactatggcaaaaaatgaagatgagagcggagaagaaatctgagacgtcagaattgtcggcaaattgggttgactgtggatgggcgggatcaaaacgataaatcgagaattgactgtggttttgatcattcatcgccttttgtgtctccaaaatttttttatattttcgtttggacgatttgcttataatagaatacaattattgttttccagctaacaactgatcaacaaaatg

SEQ ID NO: 111231 - DNA, 1003 bp, Heterodera glycines
accgaaaagcgacggagaaaaagacaaaaaacagttgttgaaaatatgcaaaaggtagcgaattctaaaaaactgtgctcacaatcggcagcgaaatatgatacagcgggcgaagaactgaagaaaatggcaaaaaataaaataaaatgataaaattaggaaatgcaaaaaaaattattttttattgaaaaaatacaatttttaaagagggataaatcaaaataattaccgaaaatggcaataaattgggaaaatgaaaaggaaggaaataaaaaaggacaaattaaggaagattaaatgagaaagtgtaacacggacagacagataataattaattttttatgaagtgaatacacattaattattagggctgcaaaaaaatgtacaaaaagtgatccaaatatgtacataaatatgtaagaaaaattccaaaatatgtacaaaaaaccccaaatatgtaaataaaatttttttaatggtattttttgggaaagaaattccccgtaaagtatgaaatagccacaaaatgacataaaaattactttttggtatttttaggcaacattttcaaacttattttttctttataaattttcaaaatatgtaaaaaaatgaaaatatgtacaaaaatatttgccgaaattttggattttttttttgaggatttccaaaaatttccataaaaaatactcaaaatatgtaaaaaaatgaaaatatatatgaaaaaaatccaaaatatgtacaaatatgtaagaaaatcccgaaatatgtaaatatgtataaaaaccccgaaatatgtaaaaatatgtaaataaaagtcccggtttttgttcgcaaacacaaaaaagaaactgtttttcctgctatttagagcaaggagaagccaggaaaaaatatatgtatttacataaaattggcagccctaataataactaattaaattaaaaaagaaaatttgatgtgccgttcgtgtcggttggacaaatgtttgttagtcggcatg

SEQ ID NO: 111232 - DNA, 749 bp, Heterodera glycines
tttgttgtatgactttcgtgtgacacaataatgtgggtcatctttttgataaaaaattagtgtttgttgtatgactttcgtgtgacacaataatgtgggtcatgtttttgataaaacattagtgtttgttgtatgactttcgtgtgacacaataatgtgggtcatgtttttgataaaaaattagtgtttgttgtatgactttcgtgtgacacaataatgtgcgtcatgtttttgataaaacattagtgtttgttgtatgactttcgtgtgacacaataatgtgcgtcatgtttttgataaaacattagtgtttgttgtatgactttcgtgtgacacaataatgtgcgtcatgtttttgataaaacattagggtttgttgtatgactttcgtgtgacacaataatgtgcgtcatgtttttgataaaacattagtgtttgttgtatgactttcgtgtgacacaataatgtgcgtcatgtttttgataaaacattagtgtttgttgtatgactttcgtgtgagacactaatgcgtgtcatgcttttgataaaacattagtgtttgttgtatgactttcgtgtgacacaataatgtgcgtcatgtttttgataaaacattagtgtttgttgtatgactttcgtgtgacacaataatgtgcgtcatgtttttgataaaacattagtggtttgttctgtgacttttgtgtgagagataaataaatgtttttgacttttaattttttaaagcaatg

SEQ ID NO: 111233 - DNA, 88 bp, Heterodera glycines
tcatttatatacctgagaattaggactccgcccactttaagcagattaaatttacccgctcaagccccaaaatcatttttacaaaatg

SEQ ID NO: 111234 - DNA, 496 bp, Heterodera glycines
aattggcactgatttcgccccgtttcgatgttttagtggacaaacatttcgatgggcaaacgcgaattttttcaaatttcggtaagtcttttgtttttgctttttttgtaagtgattggtttttttttgtttacttaattgaagtcgtaagtttcattttttcaaattggccatgaaaatattttctatctaaaattttgattggattcggtgcttaaaaaggaatttgtaaatattttttaagaaatttgcgattttacttatgtttcagcatattttatctatgttttaaattattttatttgataattaaaaacggtaacaccttaagggaaacttttttctcttaaaattaaaattttttttggaaatttgatatttttaatttagttttatggccctttttactcaattaagactaaaaatggattttctatgaacaaattttctcatttaactaacatattttttcaaattttcagctgggtttgcaatg

SEQ ID NO: 111235 - DNA, 195 bp, Heterodera glycines
ttttgagaggtaaattattgagaattgccaattgaacagtttgttattttatgaaacttgcactttaataaatgaaaaataatattttttgtatattttcttaattaaaatttcgatgaacgaattaaatttaatgaaacaaaagaaacaaatttatgctaataaaatttttaaaaaacaaaaattgtaaaaatg

SEQ ID NO: 111236 - DNA, 219 bp, Heterodera glycines
aaatttcattttaaataattcacagagtcaaaaatttaaatattaaatttaaatctcaaaaaataaaagatgccaccgttcaaattgacaattggatgcccaatgatcttttgcccaccgttatgaacacttttttccgctacaacggctctctgaccacggggggctgccacgaagcggtgatttggtcagtgtacgaagtgccgagattcaacaatg

SEQ ID NO: 111237 - DNA, 544 bp, Heterodera glycines
ttcgaacaaaaaattttaattgggctatccctagttgaaaaaaaaaaaaaaaaaaaaaaaaaaaaaaaaaaaaaaaaaatttggaacgcttcacgaatttgcgtgtcatccttgcgcaggggccatgctaatcttctttttactaaatttagcttgacatgatcaattaaggaacaaaaatgagaattttagaaaatttgtatttttcaattttttcgagttcgggtccgggttttgattgattgattgccctgttttgacgttgatttgacctttccctcccccgcccctcattgccaactccttagcctttttgctgccctttcctaattatctaattgatcattacactttcttatcgtccttttgctgttgtgttctgctgactttttccttctttcatttccctttcctcccaaccctaagaaatgaacaaaacaaccataagaattaataatacatattatttgcacgattattagttttatattgttaaataaattaaggatttttaggaaaaggtacacttactttctaccaaatg

SEQ ID NO: 111238 - DNA, 1001 bp, Heterodera glycines
gtcactagaaatcactattttggcgctttgtcactaaaatagtgaaaattcattattttggcgttttgtcactattttttcactttttcgacattttttggaaaatccttaacaaaaatgcaataaaaacaaaaaaatacacccctaagaatcgccctaattttttttaaatacacccctaagaatcgacctaaaaatttttcaaaaaataccagttagaattggaaaattttcataaaaatttttcccccaaatttttttcttacaaaatttttggtttaaaaatttcaatatttgctaaaaaatgtaagaaagggatgcacctcatttgtaactgcaatcagtgaataaatattttttttgctcaatttttggctgaaaattatgtcactattcgtcactattttggacttttttcactattttgtcactattttggcactttttcgtcactattttagttaactatttcgggatttttcgtcactaaaagtcggttccttatttattagcccctcttactgttgaattgagtttaatttttttttggaaaatgtgccaaataaattattaaataattctatttccccccccccctggcacataaatggagactggtagattatttttcaaccttctcagaagggggtatataattggagaccggcagattaatggagactggcatataaaaagagtatatacggtaactggcgtaatttaaatcgattattttgactgtctctgaatatattgagtttatttcatggtgtttcatatgtattcgcaaaaaataacatcaaaaaatataaatccgaacaggtaaatatatatgaaaaatcatgaaatacactaatgtttttagcttgattttatttgcatattgtacaatatatggctcagaaaaagattaattttcgaaaaaattattaaaaagttaaaaaactcttttaattcgtcgtgaaaatttcaaccgttaattatttgtttttttgaatatg

SEQ ID NO: 111239 - DNA, 853 bp, Heterodera glycines
  unsure (1)..(853): unsure at all n locations
caagcagctcaattcattaatcgatacaattgtgaagatttgaattaaagaccagacttttttttgctgaaaggctaccaaatatattaaggacaaacaaaanttcaagctgagaaacttgaatctcttttagctacccaaagatggaccatttcaagcgtttaatttggtagttcaatggctttgagtgaatgaggcttcaatgcaattgaatgttatttttttacaggcaataattattattttttagttcttttttgtgaggcaatttaattcatatcagcaaaagcctagacatttaaggaacgtcgctccttcgggagttctgtcatgttgaatggcgaaattgaaaatttatgtgccaaagagccttaagaatccaaactaaggcagaattgttaaacgggcgatttaaaattttgaaatttaatcgccaaaaaaaagccttataagagaaaaaaaatccgcttttgatgttttttgtttggacataatattggagacattttgctgagctttaccctgcgtgcacgcactaaaacagactgctccggaagttattaggccactcaaattattaaaaaaaaatattattttatatgcttccaaatttaaacagaaaattaaaaccgctcacggccaattttttttttttcaattttttacattgaggaactttcagaccgccctaacattgttatgatcagcagaagtacaattttttttttgtgatgatccattttttgcataaggcaaaatntagttgaaaaaaggccaaaaattctgattctgctctctcggctctctgaataaaaaaaatattcacggcttttgtgccttttgtcaaaatatg

SEQ ID NO: 111240 - DNA, 155 bp, Heterodera glycines
ttggctttacattctttgaaaatgatattgaaaaggcaaaaaggaaaagcttcatatctcggccagaagcttcatttagcaaaaataaaaaaaaatttataatacaaagggggggtaatctacctaccctgaaagtttcattcggaagtcccatg

SEQ ID NO: 111241 - DNA, 1003 bp, Heterodera glycines
cgaccgatggtggcgggcaattatcgaataatatgtgtgtagtccaccagcagcagcagaagagcactcttagcctctccgattttgtgtgcccccaccaaaaatgtttgtgtttgtttagtgggtacgttctctccggcggaccctccgcgccgttgcctgcccatatcagtttccactcaccatgtcgcccccccccgctccccacctaaaaaaataaaagtcaaacaggaattttcgaattttctttgaaaatatttttttaatttttgaaaaatagggatggaaaggatacgggtgagggagctaatccgggggggggggggggggtagggaacgagtggctccccagcgacactgatttgaaacgatcaattttcttccttttttttctcttccctcctcctccccctgtggtctctttcttttgcttaatcttttgacaatgaatgagaagaatgatgattaaatggagcggaggaaagaggaaaagctcacgcatttgtcaacagagaagcagcaagaagcttaaggggagacaaacaaacaaacaaaaaaccgaatagagggaggaaaaatggaaagaaaaagaaatatgagatttttgaatgcgattttgcaaaaaaaaaaaaaaagcctttggaagtgggttttctggatttagtgttttagtgtctgacttaattttgcatattctgatcaaaaattcagaaaacctaggtgcccaggcgcctaggtcaggtttggtacatgatttgaaaaaacgaaaatggatcccgaagagaccgaaacagcccagaaaatggggctagtgtaacttctaagatcttgacaagtaagggatttcttgtttcttggcattaaatgtttaaccccgctttggctttttcttttaccattatttgtctccattttcatttaccttttcaaatgccaattcatcggtgagttttcattttaattgtttatttaaatccattttcattagatttaagatgatatg

SEQ ID NO: 111242 - DNA, 896 bp, Heterodera glycines
gtctttttttgataaatcatttctataaattgaaagttccagcagagaacttcgaaatccaaatgacgaattaatgaattcgagatttcattagtttctacaatcgaagaaaaaattttttaatttgaaaattatgttaataattaggaaaaaagtcgatttttagggggtgtatttttcaattttcttgtatttttattgcaatttttctcaaaaatgccaaaatatgtgcaaaatatgtgccaaactccaaaatatgtgctaacatattttatgtgacaaaacgccaaaatatgtgtttttatgtttttataagtcgctctaaatcaaaaattgttcggagataatgctatttttgggcttctctcgccataactaagccgcaaaaaaaatatgtaaaaacataaaaatccgggccctattgatcaccattatcaatgtgttatgtctctgtgttatcatttcaaatgacttgtgatcaattgtttcgcctaatatgtattaactgtgatgaaacgtgaattttattaaagacctatagacctttttgattgcgaaaaaatgtttccgataataaatcgatgaaaattcattcatggattttcggggttgctcgcatcagcaactggcaattgtctaaatttgttgtcccgataaaaaatagccagaattttggttttcctttgcagcgattttagggaaaaagttctgattaagaatatttcgttaaatgatttatcgaatccaaatttttcacattcattttttcaatggcggcgagaaagccataaaacaaaggtgcggcgagttgggcggtgccctccacaaaatttagaaaaccacagccaatttaaaaatgcacattacagttttattgtccgaataacctatttatg

SEQ ID NO: 111243 - DNA, 388 bp, Heterodera glycines
tttcttattcatataaacttgctaatgcgatctaaaatataaatagaaagaaaatgtcaactgcgcagcataaacatcattgactttcatttttaagaaggaaaacaaaaaaaggtaaggttacatcctatgtacatacaatacaatacatacacacatcgcaagtctcaaaagtcatttcttgaaaattaaaaatttaaatttgttttttaaatagtggcgttatgttcagcagcgtaaatcttcaattagcatcgattatgcttacgattacgtatcctatcaagcaattgatgtaggcttttcctttatcctttatttatatcaatttaatgtcattttttaaatgtaaatttcatttttagttaatgatttctttttagatatg

SEQ ID NO: 111244 - DNA, 586 bp, Heterodera glycines
  unsure (1)..(586): unsure at all n locations
aaaacgnaattttgaaataataaaattcattcaaaaaagttntaattagcaataattttgctcaaaaacaactaaaatttaattattgaaatcatttgtatcactaatttttttttttgcaaaattcaagaaatttcattaattttcaaaaaagttttattggtcgccatgcttttaaggttttttatttgtctgaatcaactttatcgatgaaaaaacttttaattagaaggaatattaaaatgaattaagagattttattttgaaaaatgcgaattaaaaatttcttttgtttgggtgaaaattgtcgtgtggcattatcagcctagaggtattggcataatctttgctaaaatgacacgtcagatgatcaatacaattcgatgaatggcaaaaaaaaaatgaaaattagcatttgcatttgtaaaaattgtttcgaataattgtaaatatgaaattactaaggcactcttcactaacttttattttaattgccactaattgggcagttaattttgggcgcgcgcaaacttatgaatgggaagagcaaaatttggccaataatatcaacacattggccaaaatg

SEQ ID NO: 111245 - DNA, 51 bp, Heterodera glycines
ggtgaaggaaatgtaggggtagtctaaaaaggtgggaaagagaagtaaatg

SEQ ID NO: 111246 - DNA, 88 bp, Heterodera glycines
ataagggaacttagattttttatatttttaaagttttctcgggcgaaatggcatgttacataattgttaaggtaatttgactcctatg

SEQ ID NO: 111247 - DNA, 140 bp, Heterodera glycines
taacttcgtctttccgtagcgcgcagcacagtaccttttcgctatataaaagcacgcaaatatgatgcaaaacttcattttaatcagacgattttttgcaaaataaaatgaatacttttaataatgttcagcaaaacatg

SEQ ID NO: 111248 - DNA, 51 bp, Heterodera glycines
taattattttcgatttatttgcctaattaacttttagctgatctttgaatg

SEQ ID NO: 111249 - DNA, 601 bp, Heterodera glycines
atcgcaaaacttcaataggaattaagacttaaaaatttactacgacaattttttagtaactgaaaaattctctgtattttttttttttgtaattttagataaattttcgtcgacgttttttacttttttcatttcgtatttacctaaaatatgtttaatctaatatagatatgtttatttgtaataattaggtattaatttgaatctgtatcatttcatttaatcatggatattttaattattaattgctcaaatacaaattttattaattctaaaaacttaataaaaaatctattaaatattacgcattttaattgattaattaacaatcattgctttttcctttcctctagactcagccggctcctcaaccaccgcttccgcttcgtcagtgcgcgaccgcatcgcgcattttgaagcacttaaacggggtgaagcggaggcggcgccaactgcgattcctcgtcccacagccgctgctgcggccagtcctgtggcggatcgtccaccgtcgcgcgagcggcctccgtctcgggaggaggacgaggcggcacgtcgccgcttcggctggcgaccatcgaccgccgaacggcgcacaatg

SEQ ID NO: 111250 - DNA, 101 bp, Heterodera glycines
  unsure (1)..(101): unsure at all n locations
ggttagttcattaaaatntaattttggattttttgcacctaaatcttttcacgattcctttttgttatttttctattccagcttcttgttctgctgatatg

SEQ ID NO: 111251 - DNA, 60 bp, Heterodera glycines
taaacaattcaaaagttatttggccaaaataaaaaagttgaaaaagagcagaaaccaatg

SEQ ID NO: 111252 - DNA, 510 bp, Heterodera glycines
gctgggaattcatcgccctctttcgttcccccgggggattattaagtgccttttttatcttttgccgcatttgttctctctttccacctcaacgaacacaaagatcaaaagtgtcttttttaatgattgaaattagcaatttagcaaaagtaattgcaaatccatcaatgaatttcgaacgaaacaatttgtcggccatttttcctgaagatggcacttttgacgattcggcactgagcctatcgtttgaagaattaagccaagaattagacttccaccaaataaatcccaaaaacattgtgctcgtttggaatctgccgcccgttttgaatttggatttgctgcgcgtggagtttttggcggaatgcattcagaaagtaaacaatttttggtacttttttttctcgcgggacccaaaagccaaatttacacattttcattctcaatttttttaacgttttaaattaaaaatttatttgtttcctttaggtgcccggcctgtcgattatg

SEQ ID NO: 111253 - DNA, 104 bp, Heterodera glycines
gctgaattgtcttattaacaaaagaagaattttacatttttttaccattcaaattccttctttgatccgtgcatcggttggtgtcttgtgtacgcgatgacatg

SEQ ID NO: 111254 - DNA, 74 bp, Heterodera glycines
ggtaaaccccagtcggagttgcgttacctacgtcaaagactgtttcgatttttttagacgacgcgtccggcatg

SEQ ID NO: 111255 - DNA, 153 bp, Heterodera glycines
atattttgccattttttttacatattttcagattttttgaatattttgccattttttgtacatattttcagattttttttttttgcatattttgccatttttcgtcaaatattttccgatttgattatctcttaggaaaaaattttgaaaatg

SEQ ID NO: 111256 - DNA, 160 bp, Heterodera glycines
tgctcaacttagacaaaaaggacatcgtttcggttatttttctttttttaattttttgaggaagttcagttgggttttcatttaggttatctttacagtaatagttagcattaatctgtatatttagcggtttttctcaaatccttatgcaacgacaatg

SEQ ID NO: 111257 - DNA, 518 bp, Heterodera glycines
taatattattaaataataataattattattaataaatatttaaattaattttccctttttatttctaaagactaaaaagttaaaataaatgaaacaattaaacatgaaatgaataaattattattttttgttgaaaagggactcttttttgatttgttcagctttttcaaatgaaacattttcttgcgaatgaatgcgactttttgtttatcccttctcttctctttcccaccaatgaaatgataaaatgcgacgacaaaacaaaacactttttatttttatcttttaaacgccgcctaaacaaatgaaaaattcggagataatttgagtttattgagaaattttgtattaatattaaaaattttaatgggacattttaagtgagtcatccattaattaattggttaattaattaattaagcgattttcttttggaaattcatcgacaaaagcattggacaaagcatttggcctcctccgtccgtttcttttcgttgttcgaaccgccgccaaaaatg

SEQ ID NO: 111258 - DNA, 192 bp, Heterodera glycines
aaaatttatttttcatcaaaattcacccaaaatcgaaaaagaaccaacggcagcagaatctgaacaggagagccaatgacgactaaccaacggtctttcatgcatttcaatcgattttggggtaataaatgtgaattttggtgaaaaatgaattcgactttttattcgaattcaggtccggggttagaaatg

SEQ ID NO: 111259 - DNA, 193 bp, Heterodera glycines
aaagcactttttgatggtaaaataagaaaacacaaggagtataggaagcaagaaataaacgtaaaatggaacaaaagattcttgattagcgccatcgataacctccgaatgcaaacattgttaagatcacctttttcacactttttatgggaccggtaaaggcaataatatcaaatgttttgaatacacaatg

SEQ ID NO: 111260 - DNA, 237 bp, Heterodera glycines
ttttcccttataaaagtgcaacagcaagacgaattaaaagcatttctttataaacaaatcattatctgataggggaggtaaaatattgggctatacaaaatttaaaatcctcattttgacgcactatttccatgtctctaacatataaaataataaaaatcaaaggttggcattaaatcgtcatattacactactaaaaggctcatcattttgcttttaatttacgcgtataaaatg

SEQ ID NO: 111261 - DNA, 1003 bp, Heterodera glycines
cctcttttctctccctctctctctcctcttctctctctctcttctctgtctctctttctctctctgtttttttttcaatccattaatttcataaacattattatttgttaataaattttctttctgccattttctattttttttgtttgttttgtaatagagggaactcatttggcatgcaaataaacctcattttgggtcaaaaagcctcatttttacaaaatttattcaaaacacgtttaaaatgatcaaatgttatatcttcgatggtccatgacaatttgagcaatttttttgttcgaaataagcatcttgtgagattctgagcatgaaaaatcgaagttgatttttttgcggcgctttttccaaaaaaacttggagattgaggggcgggcggtgccgataggcgccgccggtgggggaaaaattgagaattttgaccatatttttagcagattttcatttaaaaaaattcataattttgtggatttcgaaaaaattgtaattttctggctaaatttgggtgagatttccgtttgatactctattaaaacccaaaaaattaaataattgtcaaacattatgtcaatttatcaaaatttaaaagattctgacgatttttcccaaaagcctcaaaaatcctcaaaatttctcaaaaagccacaaaaatcctcaaatcacatttcaaacaaaaaaattctcattgattttatattcaatatttgcttaagtaaacttaagaaatacaatagacaaccaaaaaaaatggatttaaaatttaaaaatgcaaaatttttattgtcgtccgttgtataaaaaacacctccaagtttttaaaaaaagagaagttcgcaaaaaaatggtgaaaatattaattaaaaatgccaaaatgacaacaaaaactcattgggggtgtatttgtaaaaatttccaaaaagtcgatctttaggggtgtatttttcgcttttttttgcatttttcttgtgaaattttgccaaaaatg

SEQ ID NO: 111262 - DNA, 131 bp, Heterodera glycines
gttcaagaattatcgactattttttaaaattattattgttttttgtcaacctaccaacaatgagcacggcacaagccaaatcacgcctgtacaaattcatcagcaattgcaaacgctgcgaatggcaaatg

SEQ ID NO: 111263 - DNA, 213 bp, Heterodera glycines
attaaattatttggtaatctataccatttcaattaaataaaataatagagagttcagatatgtgaggatttatatcccgattttatggtttttttgatagaaaatgaggattttttgagtttttttgtttgtttgagatttttggataaaaacgtagccaaaaaaaaatttttttttttcaaatatacttaagatcattttgccaatataatg

SEQ ID NO: 111264 - DNA, 165 bp, Heterodera glycines
taatcattttattgtttcagcttcatctctgctgactgttggcttaaggtgttcgatttgcttccgccctctcaacttggccttggcattgcgttgatcagtcgccgctttgactattacgtcgacgaacactttaaaactcgcaaatggacattggacaaaatg

SEQ ID NO: 111265 - DNA, 220 bp, Heterodera glycines
  unsure (1)..(220): unsure at all n locations
atcanncggtcactgattcacggtaccannattcacggttccttcacttgaaaaatttacactggataaaaccgaaaaattttaccaattacatattgttttcatatagaaatttaaagccttttttggcatgatgatattttttcattctattttaatattttttcatttttttagtggatttttgaacctggaatttaattacacttttagaaatatg

SEQ ID NO: 111266 - DNA, 267 bp, Heterodera glycines
tgcggcacatatttcatcactgtggactcacattctatattttttgaaaatttgacaccccaaaattgcaaaatgaatatttaaagctcatgctttttctctcagcgcttgaaaattttgaaatagcactgatgaaaacaaataatgttgtttttgtttgcttctccgtctaattgtaagcattgagttttaacaaagactatgtatactgtatttttgctgtatttatattttatttttatactagacgagcaaatgcttaaaatg

SEQ ID NO: 111267 - DNA, 69 bp, Heterodera glycines
ccccccccttttcatgtatgctctccacaagaaaatttagactaattttgggcgctagagacgaatatg

SEQ ID NO: 111268 - DNA, 539 bp, Heterodera glycines
caaattgtagtaattatttgacccgggagccgcgcaagatttttgtcttgggctctcgtacttacaattcaatgacattgaaatggttttacggcaaaatcaaattgttactgagattctgacctcatatgctttggtgccataaaagccccccccccccccttgaaacccaaaaaataaaattttccagtacggatgattttctgatgattttgccaataatttgtaaaaataatgaatgaataaattacttttgtcatttatcggtgtccacaatctctgctacaaaatgtgtggtcgtttgtccgctttttcttctgctggtggcttttcccccacttttttacacgtcgacacagaaaattcagtgatttgtccaacgacggaatttactgcaccaaccaattccatcccaccattttcatccattcatttcatttgatcatttgggaataaatattttattcgtaaaataaaataaaaatattttttaatagtaaataaattaaatataattaatattaattaactagcaaatg

SEQ ID NO: 111269 - DNA, 67 bp, Heterodera glycines
aaaaattttattggacgcataaaaattgatgggactcataaactggacttgagccggatttggcatg

SEQ ID NO: 111270 - DNA, 620 bp, Heterodera glycines
ggctgggtcctttccaatcatgaaatgggctggggattaaatcggattaacaatttaacatcaactgcatacatagattaatattgagtgtttgtagtgggcaatttatgttgttgatgcattcgcatcatcgtttaattgctttgaacgggcacgggtatttccggacccaaaaagccgggtacgggtccgggtccaagcatctgggtccaaccgggtattaaaaaatccaattttttttaaattagtcttttttttattaaacgaggggaggccggcggtgccgtcaagcgccgcctcgttaattttttttttttgttgaaattttgtaggatttgataacagcacagaaattaaccatttttgtttatttcgacaagttttaagcaaaaaatcgaaaatggagaaatagtaagtaattatattgttatgaagaaatatttaaaaaagaaattatttttattcaaaaatttttatttctttcaatttcataaatatttttgaccaaagccccgcccccatttcactaataatgattctatctcgactaattattatttatttaatttgcattttaaaataaaaactttaaaaatgaaaaaaaaattcacagaaaaatg

SEQ ID NO: 111271 - DNA, 147 bp, Heterodera glycines
ttgaattgttttgcagaaagtaaattggtaattagcttatctcaaatcatcacgagtaaaaaaaccattaaacggcttgttaaaattacgaataatatatattaacaataattaggccttaaaattattaatgtccaattaaaaatg

SEQ ID NO: 111272 - DNA, 1003 bp, Heterodera glycines
aaaaaaattgcgcccttgcaacaacgtttcaaattcgttgtcattcattttgcgtacagccattaatattatttctctttaaaaaaatatagtcaaaattatttaaaaataaaagtagttgaaaaaggaacaagaagtcaaaaaaagggaattttaaatccaaagaattttttaaaaactaccgctatttttaaaaacgaatatttcctttttaataaaaattgctctttttaacaaaattttttttaataaatttaaaaaacggaaaagatgcaacccatgctgttttaatataatacattgggatcaaaattgatatttatgaacaaatgattttaaatttaaattcatttatatattaattctgtctcacatctttcttaacgaattggattatctttaagttctaactcaaaaacgtcagtcaatagaattgctcagggcaatgtgaaactactttttttttaaaataatgcatttttttaatgtacatatctaatgtacatattctgattataaataatctgagaaagaatgcttctctttcatcagttttttatatgaaaagacaattcaaaattaatttgcaaaaaatgttcagtatgaaagagcgaaaagagcatgaaagacaaaatttaaaatcattcgttcataagactcattttgattccaacgtattatatttgcaagagcattggttacatctttccctctacttaaatttattccaataaattcatttttaattaaggaaaaataatttttcattaaactgaaatgttcctatttttgaaaaaatagcggtattttctaaaataaaattcatatttaaatattcactttttatttcttttcttttttcggctatcttatataactataaaaatatgccaattttttttgtagtccaacatttttactttgtatataaaatttctaccatcgttacaacgatataattttttatcagcttaattttaatttgaaaaaagtttaaaaaatg

SEQ ID NO: 111273 - DNA, 640 bp, Heterodera glycines
cgaaacgaggtggaccctgtagcagtgccctagtttttttcaaaattggtaacaagggaacattccgaaatgtcactgctcagatcgctttaaaaccacttttatcgtgtagagcatagtcgatttgctattgccaattttcggcttttttggccctgaccccaaaaatgatcagaaaaagtcgatcaaagtcccgaaaaatcgataaaagttagcaattttttaaaaattcataaaaattttagaatggtgctagtcaaaaactttttttttaaaatgatcagcaaacaattctctatcaaatagcatcttaaaagaaattaacataactgaacaaaaatatgctaggtcgaataataaatagttttaaaaaaattcaaaataatccatcatctgtcgagcgggtccgaacccttgcaaatggccattaatgtgtaagaggaaaaaatgaatcaaaatatcaattttttgctgggtttttcatttgatcacttttttctgatcatttttggtgactgcaccaaaaaagcagaaaatttacaatagcaaatcgactttgctctctacacgataaaagtcgttttatgcattttttgaaaaaaaccgactctgttcgaattcgggtccgggttcggaaatg

SEQ ID NO: 111274 - DNA, 184 bp, Heterodera glycines
tccgttgcgttcccgcgctgtctgtcgcgtggattccccggctcgccaactccgaactttcgacggggctcagttggacgtgcacttttccccctgttggactgtgctggccaaagattgttcggccgagggacgcgcgcaatttgcggtgctggtcaaagcgaaagcgaacagtgaacaaatg

SEQ ID NO: 111275 - DNA, 1003 bp, Heterodera glycines
caaagcattgactaaatgaaaaacttattttcattaattttctcaatttgtcccctcattaaaatttacgattttatgcaaaaaaatgttcgctctctgtgccgcgtggcatgcaaaagcgaccgcgcaattttgtccgccgtctcttggccttcgtccgccgattgttccacggcatctttcgcagcggaagtaattgcgtggatttgaaagccgaaaatgaaataaaatattattaaaaaaattaataatattgacaggaaaaacaattgccattgcgcaccggtaaaccaattgaaagagcgccacaaaaagaggggaatgtgaaaagagcaggcctggagggccaaaaggaaaggcacccactgaaaaagggaagcgaacggagggaaacgaattaattgtgattaattcattttcttttataaatattctacaatttcacttttattttctttcactttccttccccacttaattatgtaattactcacaacaaaaaatggaaatgggaaagtgagtttgataaaagggccaaaaggggggggcggcgatttatcgtttattttcgatcgcgcaattttgtgggacgaaaggaaatgtgggagaggggatgataaatgaacaaaaaattaaaattgacaaatacaacgaccgatgagagaaggggagggaggggagagaattggcgagcattttgggcattaaattcccttctgttggagacaaccaccaaagaatgaatgaatgaaatggatgaaaaatgaatgatacaaataaatggggggaaacgaacgaacgattggtggccaattagagaaaaggcacacaaaatatcagtttcatatattatttttccttttgaagggatattttaattaaaaattaaaaggcaccaaatttatttgtaaaaatgcaaaataacacacaaaattttcatttttataatttcccatattttaaggtggttataatcttttaattaaaacaattacgcaaaatg

SEQ ID NO: 111276 - DNA, 290 bp, Heterodera glycines
tctgaaaatgtatgtaaaaagtaccctgtaaactgtataagtgtacccctgtttttgcctttaaatcctttacacggagttggtattcagaatttagcacccgtctcacggactgaaattccgaatgatgttttagccatttttcgaatcttccgcttctctgttgtccctattttaaagcatatcccgatatttgtttttggccccattctctgttaaatttcactttcgtcaatttacggaattgtatcattcgggaaacgccgtgtttgagggcgcgtacaacgatg

SEQ ID NO: 111277 - DNA, 51 bp, Heterodera glycines
ataaaagccccagcaatttgtcagctatgtctcatttgttctgctacaatg

SEQ ID NO: 111278 - DNA, 113 bp, Heterodera glycines
ttccgttgcggacaatttgacgacactcaaacagaaaaacaatagactggagagagaagtgaaaatgtaaaacaataaataatttaaaaaatagttaatttttatttaaaatg

SEQ ID NO: 111279 - DNA, 91 bp, Heterodera glycines
tctgaattaatattaattaattgcctttaattgtgcaggtttttctgttctgccgtccttactcgcccctcttccgcgtcccattggaatg

SEQ ID NO: 111280 - DNA, 358 bp, Heterodera glycines
ttttcattaagaaaattttcaaaaaaatactgaaaaaggcatgaacaaggcatcaaaggtcaaaaaagattacaaaattacgtgcccagcattaggcatcaaaatcgcaaaaagcgcaccaataagttaaagctagaagcttcaaaccatgttaaaaactcgtttttcgtctgtattaggccgtagcaagttcgcaaaaaaggcataggtatgcttcaaaatccggtcgctattgataacctaacaaatattctgataaaataactgcgttgttttcgcaaatcccactagcatatacatatatatatttattgtataatcttttgctaaactttagatcaaaaaataataatttatg

SEQ ID NO: 111281 - DNA, 1003 bp, Heterodera glycines
aaaatttccccttccaatcggcgccggtacgggtcaactccgtccctgacaacttaagaagccataactgtttttctcactcacaaaaaaattgtcagttgaaaaccgcaaaaatccaaaatttttgaagtttataatttctcatttttttttacagttctacctatatactctgtaatttttagtaggctaatagagcctgtgaagagctttcgaattatgtcaagattgttggattcggtcaataaggtaaaaagttatgatgctcaaaacatggctgagacggagttgtcccgttccgctcggcgctgcccgcgtagacagacagtgcgctattacaccttactctcgcttcttttctgttgccatttaccctccttttttcccactccctccccacacgcacgcgtctgcttactatctgccccttccacccgcggcgccccgcgtagacagacaagcaggcactgcactatttactccttcccgtagtggttagtcggaggaaatagtccattgtctatctactcggagcagctacaaaaaatttaaatttttggacttttgcgtaatacctaatagcagtttcctgctttttgattacaggtttctgtcattgattttttgcaacagttgccttacttttatttcgcttctctgccgcactacaggaacctgttataaataacaggtttttttccatcatattcctacctaaagcattgcttactgctaccaattgcttagccggttttgctctttatatgctgcacaatcaaaatgattttttgtttgttttaatgtttttcgattccctgaaaaatttgtcgtgtgcaaactgctcacaatcagaatattgcttaattgaacacacaataactaacaataatgaccgctagaaaagattgctcgaaaataaaatgcttttcatagaattggtcacctaatccgctttatattaattttatttttcctcagctttagtgtaatcaatatatcaatg

SEQ ID NO: 111282 - DNA, 996 bp, Heterodera glycines
tttgtagcagggatgtgcctaggtttcgcttttcgcatttttcctttcgcattattcgcattttttggcatttcgctttttggcgcgaaacgcgacttttacacccctaagaattggattaaattcccataaaatttttcaaaattttacctataaattggctaattttcagtgaaaaactgtttataaatgatcaaaatttccaatttttttcccctgcggcgcctatcggcaccgccgcgcccccaaaactcctattttttcttagaaaatggcccaaaatcgcaaaatttggtaatttgatgaaaaactgttctcagcggcgcgccaaaactcttatttctcattagaaaaatgataaaaatcacaaaatttgatcattttttagtgaaaatctgtcaacaaattttaatcaaattttcaaaaattttcccggcggcgcctgccccctcttcccagtttttttttggaaaaagcgcgcctcaaaaaagcgttttattgatttttaaatttggaataaaattttaaaaaatgatttttgctttatgattttaactattaaaaagttgtagaaaaaatttcgctttcgcatttcgcctttcgcattttcgcatattttagcttttcgcatttcgcttttttttcatttcacatttttcagtttcgcaaatttcgcttttcgcatttcgctttttatttttcaatttggcccatcccctgctttgtgcctttttacaaaaatgacttccgagcttttagagctcgctgtttacaaacgtaagctccaaagcagaattcgaacaaaaagtcggaaattaaaaattggaaaaaatgaaaatattaattttctaaccttaatttgtttgaaaacttggatttttgcaaatatttctttaaatatataaaaaaataggaattattcgttgaaagaaattttttgaaaaatctgaatattaaaattatttttaactttgtattggtagaaaattaaaaatg

SEQ ID NO: 111283 - DNA, 100 bp, Heterodera glycines
cgaaaacccccggaaactgattttaagcctaaaataaaaagttaaattagggaccctcattctttacgattgccgctttgtcattgtgtatgtacatatg

SEQ ID NO: 111284 - DNA, 155 bp, Heterodera glycines
tctgaacattaaaagcattaagaaaaataagtgagtgccaaggaaattcggactttgtaaacggcggggaaacactcggagtcgagcctggcaattttgcacaacgccacgaaggcaatgcaacggatttcttccgttttgcgactccaaaaatg

SEQ ID NO: 111285 - DNA, 704 bp, Heterodera glycines
  unsure (1)..(704): unsure at all n locations
ttttttactatttatccatttaatgtnngagtaaagggggagggcccgaaggtgcccgtaagccctccacgaaaatgatcataggcgccgtcgggaattttaaaaaaatgttgagaattttaaaatattcagcataatggatcaattttcttagaataaatagaaaattctgggggctggcggtatacacagaaagagagaaagaaggtgggtgggtcaaccaaggtttttcgaaaaatccgggagtcgtaaagaggtcggcagtcaaatttgtaaatttaatataaatctgaaatttggtggttttttacgccactttttctgcgcgtttatttcaacaaacttttgaggatggaggcgtacggcaaacagggtggcggaggtgccgaccccgggaaaatttgaaaattttattgtgtatgatttgttaagaaaattcaagaaaaattattatttttttagtaaaattttcgaaaaaactttgccaacgaaagaattgattctcttttccctttcattccattcacatatatgtatatttcgcctaagcaaaaattaataaattaatgtacttgcacattcgcgggcgggcaaaaattgattttccccctctcatacttttaaataaaaagttaattaataattataattaaaattttctagatttaaaaaaatatcaatttattagcaaaatttcgccaatg

SEQ ID NO: 111286 - DNA, 1003 bp, Heterodera glycines
atggacagaaaataaatggcgaaacattttataaaaatggcagagataagtgaatttttgtggctttcttggaaaacgacgaaagattggataaatacatatatttgttgctttttaatgattagtgcacggagttgtagacaaacttaaaaatgaaccatttttaatacaattatttagagaccggacgggcccgggggcccggcgggcttttgccgggcccccgggcccggtcccgtttttttttggaaaaaaacgggcccgggacgcccggtaaaacgggctttttttgaacgggcggcccgccccggtcaattttcgaagcccggtcccgggcccggtcaatttgaccgggctaaaacgggcttaaatttcaccagcgaaactgcccaaaacttgaaaaaattaattatttatttatggcgaaatgtctttaattcaaaatttcaagataaaactttggatttttgaaaaattaatgattatcgacgttcgagattaaagccgaaaaccgcagaaatgttgatatttttgaacaaggccatcccaatgttggactacaaatactgatttaattttgttggatgataaaaagttcataaaattttccataaaattttggtttagaacaaagaaaaggaattacgcaatttttttatatttataaatgcatttttaaaatttgaaaaaagcccggtcccgtacgggcgcccggtcaaaattttggaccgggcccgggacgcccggtaaaacgggctttttttgaacgggcggcccgccccggtcaattttcgaagcccggtcccgggcccggtcccggtactttcaaaattccggtctctagtaattatacgtggataattgaatatgaatgagagaaacgacagatggaggggaggggtgaaaaagagggagagaacaaaagtgagacgagagagagagagagaaacaaaaatgaggcgagagagacaaagtgaagtagagtaggtggagaagcgtaatg

SEQ ID NO: 111287 - DNA, 1003 bp, Heterodera glycines
attattttcttctatttggaaattttgaagcctaattaatacaaaagtacacattaatattgtatattttaaaatgaattttttgataaaattttatacaatgaaatttctaataatttaatttattttcagcttttaagtcttttgtcttattagtgtgacttttattagttaaatattattattagtattattgtataaaattataaaagaacaaaaggttgaacgttattcgaaccaatgtgcgtttccgaaaaagcaaggaccatttggataggctaatttagccttgaaatatttaattcaatcatttatgtaacaatattatgtagtttttattccacaactttcggtctgcaaatgtcgcactaattgtagaagttaattaattgagaccgattatttttaatttttcactgcgatatcatcttagtccataccattaactatgccttgaatatcttaaattatgctttcgattttgactaatttttgcttaaaaatacattctattctgttttgatcaaaccaaatacatgcattaaaatgtggataataggggtgctagatcgtttcataaaatccgccaaataaataaataaaaatacaatacctaaacactaatattaaatcattttcataattcaaattttttaataaaatcaattttattttaaagttttcaaataaaacataaaaaaactcggatctgtttatatttattttcttcatgatcagttgactcattcaaaataaatgattcgaaaaataattcatacaaacaatttttggatttttctttgggtttttaaacctatgttttattggtccataataattattcttaaaattttaatttaaaaatttttttctaaaggcggttataaacataaaaaaattgaattttcttatttctttttaaatatagaaaacctattaaaaagtataaattctgtatatttttctcttttatagcttttcgcattataattgatccacaatg

SEQ ID NO: 111288 - DNA, 597 bp, Heterodera glycines
tttttcaaattcctgggtttaatgggtggaattgttgcactttgtgttaaatttagatgaactgcgagattttagaaagcccattcaaatatttgaaaagatctttcatttcattttatccgtataaaaaatcctcattttaaaaggctctagtaaatccgatactaaataaaaaatttttaaaaagaactcatgagaatttcgaaattaatttttaacttattggtaaaataaaattgggaaaattgaatataaatctataattttaatttaataagttctaaattgattttaaaatagcttggagcaataaaaaatcattttgctgaattttatttaattcgaattctcaaaaattatttttaaacatttaaatttaatgtcagattttccggctcccttttaaaatgttccgggtcggcttggtctaattcccagaataccttatctatattcggatatgataagaaaactgaaaaaaatctgggagagagagaaatcttttcggctgcactttttctctctctacgaaaaagcgattaaaaaaatatttcattcatttcggaagaaaatattacacacactttcagcagcatg

SEQ ID NO: 111289 - DNA, 56 bp, Heterodera glycines
ttcgtattgcctttaaattcttgtcaccactcaacatcaagtttatgggtgcaatg

SEQ ID NO: 111290 - DNA, 148 bp, Heterodera glycines
aaaataaagcttcaaatcccctttttaataaattataatcattataataattaatttaattaaatcattttaaataaacaaaataattattggagggaattaagtgaattattaaaaaaaaacaaaaatatctttttttctagaaatg

SEQ ID NO: 111291 - DNA, 144 bp, Heterodera glycines
aacaacgaaggaatcgccgaaccgctcctggaggaagataaagcattaattggaatgataaaattactgacagcggaagaagttgaagcgtcaattgaggagaaaagagaaaagtggagtcgagcatccgaataaagtgaaatg

SEQ ID NO: 111292 - DNA, 421 bp, Heterodera glycines
gggggaatggggaatgcagcgcgagttatcgcaatgcgcgaaaacaatggaaatgaatgagggggagtgcgctgggtggcggcggtgacatctggcaacttgtcgtcgctcaacggaattttgacaggatgcggggggggagagagatgtcagagaaaggatgaaagggtataatatgcagtggattttgctgaggggggggggaattcaatggaaaatttggagaaggaaatattattaatgtgaagctggcggcaccgtcttttgtatatggcggccattgttcggacacttctgttgatcgttgacagaattataagtatctttgggagaaatgggtcgcttggacatcactttctttccccaataaacatttttgtacttttttttcgcttttccaataaattcctaaagagaaatg

SEQ ID NO: 111293 - DNA, 406 bp, Heterodera glycines
gatgttgactggcgccgatccgaagacaatccatatcaccttggccattctcaaagtgttcgttattccaccgcgccgaattgacgttccagtattgccagtcaaagtggatgatcggctttgctttccgctttgtatgaaatgttgcaaaaaatttccaaatgggggtgtaagggagacgtacaactgtacacacattgatcgtcaaagaggatggattagtacatgcacgtctttagaggttaaaagcaaaactgttttttgttggtatatttgttaaatttagctaaatgtcgcattggatgaggggtacagagtaaccgagttattgcgtgttctcgaatacagcaagagtgacaaccagctatttcggccttatatgagcgaattcatagccgaaaaaatg

SEQ ID NO: 111294 - DNA, 795 bp, Heterodera glycines
tgcgtcgttgtttaatgtgttgcagaagaagaatagcgcaatagaataataaagtaagtgaatgattgccatcgactaaatttccttcttttatacaaaaaaattcctattaaactaagcaattttcttgaatgaattttcctgtttgtttgcgacgtataaaaatgatttttttttttactgttctttctttagttgaataaaagtcatggggactccagaccttacctcccatcggccgattttcttgaaattttacaaaggcccataatttgactcccttgaaccttgatcgaactctttttattttatgaaataattcgagatcgactcttgcacttttacaaggttaaataatatttcttttaattttggcgttctgataattgaaaaaactttttttgtttcgagacggaatcccgagggattaaccccgcagaatcctgcagattgcggcggctttggatcccacaaaattgcgcgcatgatcctatcctgcgcctgtttctacatagaacatagagtcaaaaataagtcgtgtgtaccactaaaaaatatatcttcataaatttggctgagaattcagtttactataggtatttttttagaaaaattcaaaaatgttgcccgttccgagccctaaatatagtcaaatttttgttgaaaaaaggaataaaattgtctcggcagtttactcagattgtcgcatttgtaataatagcctacattttgatattttttagtttcagtatttaaagatctttaatatcttcaaaatagctgaatacgaaaatg

SEQ ID NO: 111295 - DNA, 362 bp, Heterodera glycines
cgtgttgggtcgaaggacaaaaagtgcaaatttggcgaagtacaaaaagtgcaaaatttgctgtttttgactaaatccactcataacttttctcagacgcaacctaattggacaataagagttctctattagcctgccaaatttcaaaaaattatattaagtttttcaaaagttatgacaattttttggctagaacttttgataaacttaataaaattttttgaaatttggcaagctaatagcgcattcaagggctatcgtatgacaccaagattgtgcaattaaattttttttctttatacattttttcactatctaattatcccccagtctctgaggaggttgaaaaataatcccccatg

SEQ ID NO: 111296 - DNA, 60 bp, Heterodera glycines
ttgctgaagaacgggctcggcacgttggtcaacgtgcagtggaagcaactggccttgatg

SEQ ID NO: 111297 - DNA, 549 bp, Heterodera glycines
aaggcccacagcatttttgcatacaaagaacaaaaaccttcctacctaaagcaacaccagcgctatttgctgctgaaaagcatagcatcattttacaaaattggcacatcggtgagtgatgattggcatattatgggttacggattttaaattagtcaaaatcttatcattgattagggattactcctaatcaaattcgaatgctcttcaaaaaatcgaggtcccggtcccggcttctcaggtcccggctagtcccggtcccggttttgcccaaaattcccggccccgctcaactctactaaaaatgctcgataagattcgtataatgggtcaaatttcgttcaaatcttgggttaagctttgttcttgattctcgatataaggcttcgttccagaatctctgggtcaattctatttccttgttcctgctgtaccacaaaattttcggagggcggaatccaaagagaccattttccctttggtacattacaagagtatcatgaaaagccctccttaaaagttaagcagttgtcactttgtttcctcatg

SEQ ID NO: 111298 - DNA, 543 bp, Heterodera glycines
atttaattatacatttgtatgagattgaaaccttatttaaacatgctgaaatcggatggacattaaaagaaattcgaaattcataataattgttatttataataaaaataattttaaaatgcaatatacaaaaatatttttatgctttaaagcttccagcaaattaaaagtataaaatattaatctctcataaattaaggaaaatgagaatttctcacattaatttattattatttaccaacataatttttctttcaaacctttatttttcagcagcacaatgtaagccttttttttaatttcaatgattaataagaccaattatttgcctaattacccatttaccattgctaatgttgcttaatttggtgttgttcagcttcttcccccgccctttccgcctccctttcgcgcattggtctctacgaaatcccgccgttggggccgctgctgcgcacgcgcgacaatgcgacgaccgacgcgcggaaaagcgaacgctgtgacaatttttacgcgagtgtttgtgcgccggtccacgaaatg

SEQ ID NO: 111299 - DNA, 76 bp, Heterodera glycines
tcattatgaaaaatatgaaaaattggtcaaatttaaaagaattaagctaaaataataatattttagataaatgatg

SEQ ID NO: 111300 - DNA, 385 bp, Heterodera glycines
  unsure (1)..(385): unsure at all n locations
aaaaaatgaaaaaaagcaacaaaaaaaccgaaanaataaattaaaaatattaaaaaatataattntaatgagccaaaaaataaataaaaattaaatttttaaaataaaataaataaataaaaaataaaataaaataaaataaattaattaaataataattaaagtaaagaaaaaaagaaataattatttttaattaagcaaagcagcaaaaaaaaaaacagaaaaaaaattttaaaaaataaattaaataataaagaaaaaataaatggaaataataataattttattaaggattacaaatgcggataaattttgtttgttttatgctttggtggcgtcaaagctttatttggaagtgcatcgaaacatttttaatcgatttatg

SEQ ID NO: 111301 - DNA, 1003 bp, Heterodera glycines
ttgatattatttgctgccaatatcaattaatttgcacttcttccaaattccgttatcgatttttttttcgcggcggcggcatcgcggcgcggggcgagcggggaggaaatgcaaaaaaaaacccgcactgttttggcacattttcaaaaatgaaatttcaggatccgaaaacccatcataaaaatctcaggatttgtgaaaataaaatgctaaaaggtttggggtcaaaattttaaattttcaaagaaaaattgaatttccttcacctgccactttggtgacaggtggatgattgatgaccttccgcggcgctgcgcggcgcggagagggggagtgaaaaaaaaatcgccagtgcggatttgaggaaattaaatctacaaggcggcagacttcaaagaaacaacccctcacatagggttcggttggcacgcacccctcctataggcttgggattgtgcgggaaaatgtccccgggcggtaatatcaaagggctgcgcccctcccataggcacgggtttgtgcggtaaacacccgtgcgcaaccgtgcgcttttgacgtcttatactactcccgatcatcttttcgttaacctcagcaccgatgacgtgccaattggggagccgggaattgagcgccgactttcacgtggacaaacattaactattcatggcccgatcaccttgcgtgtctaccctgcccttctcctcgtttgccttttgcattttttggcgacattcgtcgcatctaccaatcaactgccacacgacctttgcaaacgacaatttggttccctccaaccaattcacttcgactcaattttttcttattcacccactgcccttctacacaatccaatgttcctcgagttggtgtgattcatttgccgctgccttccgatctactacttaaatactgccagccagcacttatcaccatcatttgccaaattcctttttcccccaattctgtcatcgccctaacgccttgccttgccaacaacatg

SEQ ID NO: 111302 - DNA, 172 bp, Heterodera glycines
tgaaaacaaaaagatggggtagaataattaaattcatagcttgtctcaaagtcaacctaattaatatttcgtggtatcattcaatagctataattgttgtctctcagaatataattttcataacttcataacttaagtatataagaagagataaagcattgaacaggctatg

SEQ ID NO: 111303 - DNA, 157 bp, Heterodera glycines
  unsure (1)..(157): unsure at all n locations
ttgtttttagatttnagcgcaaaaaataaattctctttcttcttttgaccaatttgtctaacactgaaaggaattcaaaacttttcttaggcatagtttttccaatcattttattttttgaatattatttagaaaaagtaatcctttataaaaaatg

SEQ ID NO: 111304 - DNA, 313 bp, Heterodera glycines
aataattttgaaatttgatgcaattaaagaaaagttgaaggaaaaaataaaatacaaaaagaaagattatgacaaaattgaaagaaaaattgcaaaattattaggagcaaatctgcaattaatacaaaaatggaaaaatgaattaaatttaaataaaaacaaaattaaaaaacaattatatgatgagaaaaagagtgaattcattgaacgatttgatgaatttaaaagtttatatgcccatggcaaacagaaagaatttgcgaaggaattgggcatttctgaagtgacattttggaaatggaaaaaacaaatg

SEQ ID NO: 111305 - DNA, 1003 bp, Heterodera glycines
aaaaaactatttgattatccgctgatcaacagtgattactcatcacatcaactgggaaagtggtgggatgggatggaatgtgacggcaaaagcggcggatcggacggacggacatttgacgattaacaaaacataaacataattatgtaaattaggttagtaaatgaaattgtgtgaacagcaaaaaagtggttgaaaaataatcgtaaaactgggagccgggacaattgagtacgggctgactgagtttggagcaaaattgggtggtggtgcaggtggtggaaagtaatgtcctgctgctgtggaatgtccgtcattgaaccaagaaagtctcgggttcgcaatgttcgagaatctcggcgccgagtctttaagcgcgaaagtttcggattttcgcaaccctcgtaaacataaatgaatgatgcaatagcaatgtatgttttgtgccaatttgtgctgccgttgcttctacttctgctgcgtaaaaatttaaaataatgaaaaactcagaattatgaaaattttttgtgccttattaacgtgtacattttggtgcgattttatgaattatagaaagggataagttcgataaaacttgtaaaattaagcctaaaaataggcataattaaaaatttcataaaaattttctaaaataaaattcatgagccattttaatatatgtgcattagagtgccttaataacgtgtaaataaatctggtgcgattttataaataatagaaagagttaagttcaaaattaattaattaattaattaccaaaatttgatcatccacaactcatttaattaattgatcagaagctcaccaaactttgcaaaggaacagttcaaaatgtttacaaatttcttagaattttttactccaagaaaattttttgcattaacaacatatgcatttttttaattttttgaaaaaaccagggccccaaggggctctgtgaaagcgccggggccgctttcaatcattcgatttgcaatgtatg

SEQ ID NO: 111306 - DNA, 113 bp, Heterodera glycines
caattaatgggacaattggcctaataattatttatttatttttatatcattttaaatatctcttccccctttttgatgagtgtgcccacagcctcggcttcgtccgtgccatg

SEQ ID NO: 111307 - DNA, 365 bp, Heterodera glycines
tcattaatatcaaataagatattacattgtgattgaatcagttcttttgtaaaatttatgtgggctaattagtcttccgccagattagggatcattttgatcaaaaagggttactcattaaaaaataataattagaaagaaatgacgcaatataactttaggactattatttgataggttggttatataagggtttgaatatcatattagttgtagtttaagattaatttgcgacatcaataaggaaaagatcaatttaatgaaatgaattgaattaattaaaatcagagttagttttaatccctgatcactgataagtacagtaattacttcatttcgtccatcacaacagattcggtaaaatg

SEQ ID NO: 111308 - DNA, 357 bp, Heterodera glycines
aagaggaagaggcggcggaaggctcggaaagctggaaaggaagggaaaatgagaaaaaatattgccattttgtaggcaaaaaaaaaatgtcggggaaacggacggtcatccggggaaataggagaaatccgtcggaaaagatttacaccaaattctcaacaaaaaaatagcatggacaaatgtcactgggaatcggaaccaaaaaaaacttggaaaaataggggaattttgctcgggcggtgtctgtcacccgaacccttcaatttcttcaaaaaaaggattcagaaacaacgaattccgttgtttcaaagataatctgtaacaaatcctctcaaattacccaatcccaccataatg

SEQ ID NO: 111309 - DNA, 371 bp, Heterodera glycines
tcggattttttgtaatccgaggcgtctttttccttgctcatttggcccctcgggtttttcgtaacccgaggcgtgttcctttctccagtgaccgacccctcgggttttttgtaacccaaggcgtcccccattgtgagcaggtcgctcctagggtttttcgtgacccaaggcgccacccgcttacacggtcggacccatcgagtttttcgtaactcgtagcgtccttcttcatacactgtaagactcttggtgggtctgaagtcaaactcactttgtccactgtttgttcaacttactgctattttgtgaccccgaaccccacacaatttgttcggaagtcgggtagcagaacctaaaagtgagcaaaaatg

SEQ ID NO: 111310 - DNA, 237 bp, Heterodera glycines
tagtaaaaaaaattattaaaaatttgtaaaaaaaatttatttgtttagccctctgaatatgtaattggaaaaaagcttaaattttattttcgggaaggcgggggaagctttgacgggtttttaccggattttaagcccatgagccaatcttttgagtgtttttttgcgatggcattccatcaaaagtaacaaatcaaacaattagaatttgttttgcagaggcgcaaagtgacgatg

SEQ ID NO: 111311 - DNA, 282 bp, Heterodera glycines
acaaaaaaaatagggagccaggctcgaataatatttataatgtttaattggttgataaaaaaaagttataggccaaaacaatttgggaccgaccgctaatggtcgatccgctaattttctctaccaaaaaaatcacctttttctggtccgggaatatttgggaaattgtataaattaataaaacagtttttttcacaataggaagccgaattcgcttcgctattgttagtgaacaggccagcaatactcctcaattcgctcgtagtcgtcctcccaaaaatg

SEQ ID NO: 111312 - DNA, 720 bp, Heterodera glycines
taatattcccaatcaaattatcgattgattttcgatcccttatgagagtgtgtcgactttttttctctgacatccccttccacaaacccaaacctattggatggggtcgagagagagaaaatacagcatttgctctaattatcccccagtctccaattatccccagtctatgaggaggctaaaaaataatcccccatgggttgataattagatcaaatacggtagttagataaagagagaaaatagtgagggaggagagtgtgcgatatgaaaaatagaaaagtgagagagagagagagagaaaaaatgaaaagaattgtgttagagaaatagagaaaaatcggtagccattaaaaataaattaattgtgctattttttgcccggctaaaaaatatcaatactatgattaataaatttgtagaattgtttttatttttaaatgtttataccatattttaaaatatgtttaatttatttatattttcaggtattaaccataatttttggaaaaaaaatttaagcgcataaacaagcgcaactttgccaattcgtttgtggcgcgaggcgccgtgtttgccaacgcgttggtttataaggtttgcaataattatcattaatttatgtcacaataattttcctgaattaattgtcaggaggttttttgcgcactaaacaattgtgaagcgggggcgaagccaagtgaagtgagacagcaaatg

SEQ ID NO: 111313 - DNA, 759 bp, Heterodera glycines
ccccccccccccccccgaagccaagggtctggctaagcccttgaataagagataatttaaggtcgttttttaactaaaattgctaaatttgaaagcttggacttttgagttttttgttcaagttagggttccgagcttcggaattgcctaaatggatgccggattcgtgatcagcgacctcgaaacccccagggaacttaatattttttcactgacgcattttccgggagctaaaagtttacatgtcatcaaagaaaacaagtttcctccaaacttcttgacactggccagctttaaattgattttttgggaaatagttgcaaaaactttcaaattttggggtgttaaatcgttaaattttatccaaaaaggttacaacaaacttaagccaaatcaacattgagataaaataatttttaaaatgaaaattgtcaagaaaataaattaattaattttaaaggataatgaaaactaatctttacaatacttgtattataaatttttaatttgttatttgagaaggaaaaattatatttaaatgtaatgattattttatttattttttccaatatttgttcagtagaataaaatttaataaaatcttaaacattaattatttccgattaagtaggtttttatgatttctatgaaatcaatagagttgcgtttttgttatgtaaaaaaaaaacatattaattttaaaattattattatttttaaataaatacaatttttttatgagaatttttaaataaaatg

SEQ ID NO: 111314 - DNA, 576 bp, Heterodera glycines
  unsure (1)..(576): unsure at all n locations
aaatggtacgcctttcaatgtttttgggaattagaaacgaaaattgctcagaaagtcgctgacaaaatgttgaaatntagtgattttccatttaatttgaataaaccgagcaaatcttctgcaaccttaaatttttaaaatttgctcttcaaaattagaatagttcattttaacataaaatttctccttttttcatttttacgtactctgcaaaaatttcgggggagaaacaaaaattaaatccgttagaaagaggtgtgattttccacaaaattgtcttgtgaatggtctgtcgatctatggcttttctttaagaagtcaaaattggtaacattttggtgataaattagtgtaaatatctttggcatggaaattatgagggcattctgtgcattggttgatgctcaaatagtgcttctcgtggcattttcaataagaaaatttgttttgtttggccaaatttggtggtcgccagtcagattaatacatttaaaaacaatttggggtcacattggttaatatttgttgccttaaaagtgtccaacattatttactcattgtcagatcaaagacatg

SEQ ID NO: 111315 - DNA, 301 bp, Heterodera glycines
agtgccaacaaatgaggaaaaattcaaaaaaaaatcgaatcatgattaactagtaaaggaaattcacggggaatttttgatcagaaacagagggcgagcgtcgcctggtaagattttatgacgtaaatggacaactcttgtataaaaaaaaaataataatacctttacaatatatatatttttttttttttttttttttacatggcttgccaattcctcaattaaggcctgaccgacaggttttctcatgccccatttgaatcacatttgttttagaatttaattcgccacttttcagatg

SEQ ID NO: 111316 - DNA, 482 bp, Heterodera glycines
tttttaaaaaccgaggacgaacaaaagtcgtgggaacagtcccagcattttggcttactttgggtaaactgcaggaccggcggaatctcattttcataaatcgggcaggggtctggagaccggacaaaattaactgtgggatttccctgtcgaaataccgacccgtggcactgacaaatgagcgtggatttaacagaatttaccattttcggttgtctacgaatgttccaccaatcacattaacactgtcgacgtgtccaccggggcaaagtcaatttgatcattttggcactgtttttgtgagttttgccgctctttagggctcttccgaccgttttgtgttgggctccgaattcgtccgttttactcgtcggggacaacaaaggcaatttcattctgctcaattaccgactttcacggtgccatttaaaaaagcattaattttgaagcaagatctctttaaaaggaaagtgccagtgatg

SEQ ID NO: 111317 - DNA, 209 bp, Heterodera glycines
tattgtccaacccctcgggcccatttgcaacaatttaaggcaaacaaaattcaaaagttgtttggataaaatgtgattttcgttagaatttttggttttacgcttttctcattatataaaaataaagtttccaacgcaattaattcttctgctatttgtgtgacatcattcggaactcgtccaaattgtgctaattgctgccaaaaatg

SEQ ID NO: 111318 - DNA, 448 bp, Heterodera glycines
tggcgcgaatattcggagaaatgaccagcggaatatggcccgatcgctaaaccccccccccttccccatccactttagttctccaaaaatttgtttcttttgtcaatttgtcgtcttttcattgtcagaatggccatacaacagatgttatcttcctttgtttggctcggggcgatcagcaaagattagtgctaggaatattgtgcacaaaagaataagcaactttaggcgccccactgacatgatttggtggcggaaaaaatttgaatttaatgtgcgttataaaaactggtgaaattatgattaaacgaggggacgatcggggaaattttatgtattaagagtcattctaaaagtaatttataattctgcaacataggtaaaaccgataatctgaatccaaatattccgataattttgcgtgaaaaatgggacagatcaattcatg

SEQ ID NO: 111319 - DNA, 313 bp, Heterodera glycines
cactgttatctgatcattgccattgttgtaacgtttgtgtgcctgctgaatgtgcaagcggaatacaagaagggcaaaaggggtgattagctttataacactgggattaatttggtgccaaaaatctgtcaaaaataataaattggatgaatgaattttatttattatttaaattttagagcggtataaaaagcattgtttctgagatttatacccgaggcagatgaacataggggttttttaaaattttttaggcgaattttggggcttttggcgtggcggacgtacccgacgctcaatccgtcgtctgatg

SEQ ID NO: 111320 - DNA, 1003 bp, Heterodera glycines
tcacactgagcccaatgttccacagctcaccccatttttgcaatcaattcgtaattaattaaaagttgattcataaacaaccatttttgcaataaaaaacatattttccgtatattgtaagcaccgccggcattaaaattacttacatatttttaaatttaaacaaaaaattccattgatcactgtataatttcaattcatttattgtcaaacaaataaattaagttttattttggttacagccctacgtatttaatattaattatggtttcataattattttaaaataaacttactacccatttctattcttggattttgttttatgctctaaataaaatcctgtgttttggcttgagctttccggataaatttcttttttgctgttagtttttccggaaacattttgctgtttttggttttgtataaacaaaaacaaaattcacatttctgatttatatttccaaagattgtttttaacatttttatttgtgctttacacaaaactcaaatgttttttttaaaaattttccgcaaaaaattcctgatttggttgagattttccggacaactatttatgttttggtttgtattatcaggaaaataatttctgaattggcttgtgtttttccggaaaactatttctatttttcgcatgattcttcttggttctggcaattttttttaaattttattagctttttttttaaaaattcgcccaaatgttttattgttagctgtcggaataccgatttcgattgcctattttttaacaagcatgcttttccaattgtattgatcgtgccctttctacattttgtattgatcgctatttacaattcacagatctattaaaaacgagatgccggaggacagcaaaaacaaataatctcaaaatttctgccgtcacaaaatagacaaatttgaacatcaaaaacaaaaaaatgacggttccaaatattggggagaggagcggcacgctgacgcggcttatgccgtcatg

SEQ ID NO: 111321 - DNA, 181 bp, Heterodera glycines
atgtttttggatataacttttttctttggcatcccttaccaatattgttggtatcattcgagagcttaacatctttctaagctattactaagctatcgcttcgcgatcagacaattaccaaaaccaacaagtacccaaaaaacactagttcgtatttatttcagtagaattgtttattatg

SEQ ID NO: 111322 - DNA, 742 bp, Heterodera glycines
tctttttaaaaaaacataagaaaccttctaaggctgtattttttacttttttaactttctcgaaccgagcaaattataatgtgacagaaaaaattcatttctttatcaatttttgttaataaatagaatttttatttttttgaaaaataatttctttttctatttaataaaaattaattaattctaaattgaaatccgtttaaatgttttaataaacatgaaaaaagaatatagaaaaatcgtttacttcccccggatccggaaataactctccccccccccccctcagaatgattcttcaattctatagccttaaaatacccctaaagacctattttagaagattttggtgaaaaaaattttccattcgaaaatatgtgcacctccctttgttcccgaatcgcaatgaatttcatttttaaactttcttcaaaaaagtgataaaaaaataaaataaaatacctcttgtaatcaaaatttcggattttctagtatttacattgtgaaaattccttttcaaaacggcgttctgaattttttctgaaaaatcgcaaattttcagaatttctggaaataaaattctcccaaatttatttatttaggctttattcggtaatactttagatggtagatttttcgagtttctcatttttggttctaaatcggcttaaaataaggaaacaatctaaaagtcatcaaagcttcaattaaaaaatgtttaaacaattttagactaaaaatg

SEQ ID NO: 111323 - DNA, 615 bp, Heterodera glycines
tttctatttgggaataacgacaacaacaacaacaacaaggtgagaaagctgattatcagggcttcttttttatgtaagaaaaatcgcgaaatatgtacataaaatgcgtaaaaaaaatcccgaatatgtaagaaatatgtacaaaaaaccaaaatatgtaaataaaattttttaataatttttttttggaaaaaaattctttgtaaagcgttaaataggtacaaaaatggcataaaactgacctaaatagatttataattcatattttatattttaaaaagttttggaccattcccgtatttgccctcaaaatcacaaccctgctgtcctaaaaaatctccatttcagcagcaattccatgtggatgtcactgatgttatatggaaaagaaaatttgacccaatttaaaataatttttattaccacgactgttttctactgatttcgcaattcactcccaaaatccattcattctctcttttcattctgagtaacgtcatcatcattcattattccaaagtgttcatttgaacagttttacacaatttatacatttttgctaagctaatttaaaaaagaacgaaatctttcttatttaatttgcctcaacaaatg

SEQ ID NO: 111324 - DNA, 244 bp, Heterodera glycines
atgtgcgaaaacgtgaaaagagctgaataaataaaaagagaaatcgacagaataaagaggtaaggtaagaggacaaaaatatgagaccaccaagctgctggccagcttaagctccctataaaagcaattgctcaggcagaaattttcaagaaaaatattgaagacttaaaaatatttaagaaattaagaacatttttaaaattcaacttttaaaggaaatataatgaaaaattttctagaaatg

SEQ ID NO: 111325 - DNA, 269 bp, Heterodera glycines
aatactaaatttcattaatttgactaagtttatgctaagttatgattaattttagcaaattaaattaaaataattaaatttaattattacgaacattgatacttttgtcacttcggctcaccacgatttcgacagtaaaaatttttcaatcgtgagctgaacatttgaaaaaaaaaaaaatttcggcccgaagacaaaaaaaggaagatcttcggcgattctgccctccgccgaaacgtgatgattagagatcgacattttgaaaaatg

SEQ ID NO: 111326 - DNA, 392 bp, Heterodera glycines
aataaacaaacattagcattttaatcattaatctaattgtaaatcatttaaacagtgtacaagccaaggataacaaaaatcgtagtcaaaagaaagtggacaaaaaacggccagatcaattgaagaacaaagaaaaagggaaattggcacaaaatgaggccgaaaattcatcacaaaagcaatttaagaaaagtcattctcaaaatttatcaaaaaatctgctaaacattttaaatgaagaaaatcaaaagcaaaatttaatgaaaaagcaacaaaacactttaataaatttggaacaaacgcaaaaagaaaagcggccaataaattcggcggggcagcaaaacgaatccgaaaatttgtcgacattaagccaagattttgccattactatg

SEQ ID NO: 111327 - DNA, 468 bp, Heterodera glycines
agtaaagtgccaattgtcggtattgctttcacaaaaagggcattttgaggggcgagtgaatcaattgggcggagtgtttatcaatggacggccattgccacacgaaaagcgcgttcaaattgtggagatggcacgcaggggcataaagttggccaattgacggaatccattcttaattttgtgccttacagaccctgcaaaatcagtcgcgaactcaaagtttcccatggagcagtgtcgaaaattctcaatcggtgccaaaaaaacaacaattagtgattgtgaatgaatttctttttttaggtttcatgagacgggctcaatttctccaggacaggtaaaaggggagacaaagctatgagaacgagagacttaagactttgctattatttggaaaaagtgacagttattttttgaatatatacagtattcctttttgacacacacttacagtaccaccatgcgatg

SEQ ID NO: 111328 - DNA, 346 bp, Heterodera glycines
attaaaaatactaaaaatttgcatataatattttgttttcttatatgatgatataaaaaagtaaataaatccatgactatgtttttaattttcaggaaatttaaaaaaataaataagtaaattgaaattttcataaaatttgttacaagaattttaattgaaatcatccatttctttaaaaattgaattgaaatagctgttttcacagattgacctgctcgaggagctcaaccgccggctgaaccgcggctttcgtctgggcttctccgacggtgtctatttgcaatatgtgaaccactacagtgccaacccggacctgtgccgaagcgctgcggcgcgcaaaatg

SEQ ID NO: 111329 - DNA, 317 bp, Heterodera glycines
gtctcaactttttttggcacttaataaatggcatgtcgatcccacacccttccaaccacaaattcttattgttttgactaatccccaattaacgggtctcattaacaaatcgaggacaatcagtaacccgaccccaaaattcgagtagacgtccccagtgacttccctaagccccactttattggtacttcgctgggttatggcatgccgtctcccgacattgccaacaattttcctctaagatcgagccgcttgtcacctaattatttttctttccctttagccgcttaatcttaatcaaatccgattaaaaaatg

SEQ ID NO: 111330 - DNA, 769 bp, Heterodera glycines
aatttaatgcaaataaatcgcttgagactgctcttgtcaaaaatcttatctccataatttgttgaatcgtttattttcgtcgtgctttctgtctaaatttgctactgcccattcactgcagttggcaagatgaacggagtccgttttctgcagcgtttcgtcaacaacaatccgcgcaatttggaaagagcgcgcctccagcggaagcccagcgggtgggaatttgagaagaatcgagcgcaacataacttcatttacaggtgaatttgatggcatactgtcgatgtgttttccgggttttttttttgcattacaacaaacgagtaacacagggtcgacttttgtccgacaaaaaatgcaattgctgcccgagtcgtccattacgaagatggaattgtgatcgaagcgtcaactcgtgagaagactgtccaaagtcaactatacaggtcattcattgtcaaggggtccgatgacacttgaaattggatggcacggaattgttccaaggacggtctcagaattttggcttggcttctatttgccttaaaatgcggaagagtgggcgaggggggaccttgggatcgttcctccgttgttttcccgtgtcatttcacaaagtaaccactcgaaaaccccttaacgagttacgatgccggttaaatacccaatttttgtttgttgtcaattaaaatgtgtgtcccctgtcagtcagacggatgtctccgccgcttataacattggtcggctgttggctcatcgatgcaaaatg

SEQ ID NO: 111331 - DNA, 132 bp, Heterodera glycines
  unsure (1)..(132): unsure at all n locations
aaaatattatnaattttgaannttaattttgaaagaatttntantaaatttattttanaaaattataattaagtgactaaaaatttttaataaattaaaaaaaacttttaggttgccgcacagttcaaaatg

SEQ ID NO: 111332 - DNA, 440 bp, Heterodera glycines
atgcttttgttttttttttgggtaaactgtttaatgtgtctctcagtaaatttattgcagtttacaccgaccgtaaaataattttgcaaatttaactataatttcttctagaagcataaaattcaatatttttgataaaagaaaattccaaaaaattttattttttagaaaattaattttttgaagttttcttctcgtatttggcgttctgttttgttcattatcttggcggttttttaatttttaataacctattttttggttgtatacgcctttgacctacataaaatcgggtatagtacagttttacttgagcgcttgaacaaatcttgaaagtattggtatgaaatacttaatactgaattgcaacaaacattttcggtgtcactactcagtctttggttcttgacaggttattgccgacaaaacagccaaaaatg

SEQ ID NO: 111333 - DNA, 493 bp, Heterodera glycines
ttgctatcaaataaaaaatatttaaaatttatttaaaaatattgagtgcctcaggggttggtcgcaaaaatgcgtccaccacacgctgaaccagctccgtgaaatagcgttgatgacgcacaattgtcgacgcgtcagagggcgggtcgaatagacgcacgacggcagggcaggcaccttaaaatcatcgagaaaagatgtttaattacattttaaaaaagtaattaaatttgtgcacctatcatatgttcgaagacggctttgccgaaagccgccttcggtattttgagccacgattttctggaaatgaaaaaaaaattgtgaaacgcgatttcttttgtaaaactggacgatggcaaactgggcgacagcccggtttttggagtataactcctttcatattgtccgaatttaaccaatttgttatcgttcggtaaacctaaaaattctctctgcaaattttaaaaattcgttatatttcaaagaaattatg

SEQ ID NO: 111334 - DNA, 200 bp, Heterodera glycines
aaattttttttattgcatttggagccgaaataactcccgacccgccaaaatgttgcctaaaatgatcaaaaaattagcattttattatctgaaacaactcaacttcctcttttgtttagaaccgtcagtgcgaagctgtaagcatatttgggaatcaattttgaatggataattttcaaaatttcttactgtaaggtatg

SEQ ID NO: 111335 - DNA, 802 bp, Heterodera glycines
attttgcaaaatcattgattttgtctgtgatttttcatcaggtacttgatttttttttgaaaattgtttttttctatattttttctttatttctttttaaataaaagtttgccacaccgttttgtctcggcggcgtttcagcagagacgttttgtcctgctcccttccaaactaacaaatgagtgccatcccctccgggaaaaataaagagaaaaaattgacaaattccagaaaatggccccaaaatttgctaccgcctgactccaaattgcttgggttttttaattaacccagaaccctaaaaatgctctttttttgagttaataaattccactcaaatttttaaaaatttctctgcttcgcctttcggtgccgcccgactccttctttccaagaaactgtgcttcatttaggaccaactaattatttggttgtttttacaaatcagtggcaaaacgtggagtgtgtccatgtgattttgtaatgcctcattaagtgacttaccccaatcaattatcgaccacttagcttttcgtagtgagttgggttggttttgataaaaattttcatttattcggtggcattggctataattgcatgaaattgtgccatttcttagggctgattttttccttaactaaattgttccctttccttaattctaattacaatcaattaagacatttggtttattaagctcattattatgcatctttttttggcattttctcctttctttttgccgctgctcggccaaaattgggtccacagtaatgagaacgaattgacgctgaaaataatg

SEQ ID NO: 111336 - DNA, 251 bp, Heterodera glycines
aataaagtgcgaaatttttcggtatatcaacgactacattttatactacacactgaggcaactgagtgaacaactcccacacacgggcaagaatattttattgtttaaatgcgaattttgattaatttctaaaaattgtcgtccgattgccaaccttccatcggtataaattcaaattttaaattggacaagaaaatgccgagaacgacacaatcaccatacaattaacggcctctgttgtttcagacatg

SEQ ID NO: 111337 - DNA, 60 bp, Heterodera glycines
cgtaagttgaatttacaaatcgatatttaaattgtgcgcgagtttttttttagcccgatg

SEQ ID NO: 111338 - DNA, 283 bp, Heterodera glycines
tctgataaaaattaatacaaataataaaaaattattaatttagatattttggtacacattttagggtttgtatattcttatatatttcgaatttaatttttttatgtatttcgcatacctatatttacgaattaatgtttttctatattgaacttcaaataaaatattcctgtttagaatttattttcaaacaaataataaaatataaaagaaaaaatgcgtttaaacaattataaataaatttctagtaagtattaagataatttttatagaattgaccatg

SEQ ID NO: 111339 - DNA, 423 bp, Heterodera glycines
tcatcaataagggacaattccaattggcatagtgatccctatgtgtgaccaattaagactaattaaccaatcgtaacgggataattagctcaccgtaattatatatttaggagtaattagccaacatcggaaaaccgtttgattagctgacaaattggaaataatcaaatattttcaatttagcaacgacagaggaggaaagtgctcatcaaaacggggataacagcagccgggcgccctccgttgcgcaaccgccgtcacaatttgccggtgtggcggcgatgccattccaatttttgcttcaaaatggggaggagaatcagcggcaacaattcgactcaatatttccaaagtccatccatttgatccaaatttccattcaaattttccaattttcacttttcagaattgaacttgccaatg

SEQ ID NO: 111340 - DNA, 146 bp, Heterodera glycines
cagaagaaggggatattgatgttgactataatgtgttttcttttggatatcattaaaataattttgtgtttgtgtttattctttagtttgtttatttcattcaatatttacgaaaacttttttatgctaattattttttaagaatg

SEQ ID NO: 111341 - DNA, 923 bp, Heterodera glycines
ttagcttctaaacatgttacgctttcgaatgttcctttgatttaacatgtttttttcggaaaatgcccaaattggtcaaccaagatttcgaatatgtaagcactgtttttgataatcaaatgcagaattggcgcaattgaatgacattaaattttgaattttagcccagcataatttttcgggtttcccggtttcgctcccggaaaattttggactctcgcgcttccgccaattttctcactaaaagcggaagtaaaaaattcaatgctaattgtaagaatgttggtaaagaaattgacctcagaacgcaaaatttacctatttttatgacaaaattcatttaaaaaaaggccactcaattttctatttccccgccgcgacgccctataaaaggaggcattttccaccgaccgacccacaaatttctctcatttgtcacaagtacatttattgtgcctaattttatttgtgtcgtcggcatttgtacatattacgacagttcgtcgtcattatttgtgtcttcaccacacactcgtcaagctgctggttgagcgcaatgtccaagagacggcttcgacaggtgtcactcatttggggatgacgttgtttttcaatttgaaaaagtcattcttggcggcatctcatgaatccaatcaaaatttgcgaatccgatcaaatccaatcaaaatttatgagtctgatcgcattttgagtcaaaaattaatgaacagttccgaattcattgaacatttctttccaaatgcaaattttttcggagtttaggcaactgccaaaaagcgaaatttttcggaaattgtaattccgatgtccaaaaattccctggaaatctgttcttccagggcaggactgtttgtcatcaaatgctgatttcttttttccttttccaggaactcaaggacatg

SEQ ID NO: 111342 - DNA, 572 bp, Heterodera glycines
ctgccaaatcattaattaagtttttttatatttaaaaaataataaatttttcaacatttttcgttttttcatcgcttttagccagacagacagacgacagaagacacctgttgtgctttttcttttgaattttttttttttcaaatttaattccattttcattgtattttgtgcagtacaatatttttgttacaacaatgttttcatcctattttgatttgatttttcaaactatagaaaaccttagaaaatgacggcggagaaagagcatttataaagaaaaaactaccatttaattaaatagcttttttaaattttattaaaaaaataatctattgcctctacgggttttgattttcagtcaatttaaaccattttttttttttttttgcttagagcgtttaataattcggcaccaaaataattaaccgagaatagaagaccgcaaaatctcgagatttttttcgagtcgaacaaattcatgctaattaattatcaaattgtattttttcgtttaaatatttctaaggccaacagtacaatactactgtatcatccatcccctcgacatg

SEQ ID NO: 111343 - DNA, 884 bp, Heterodera glycines
  unsure (1)..(884): unsure at all n locations
tttgaattcactgtttttgggttttcataaataggaaaaaacaaaattttttacagcatttttttttcaaactttttcatgtttttctatattttgctttcgaaatattgtaacaataaatttcaataaatttgaaaacttaattcaattaaatctcttaaaatttattaattcaatttagttttttatcaatgcattttttgttgattttttgattaaagtacataattgaactctctgaatgctttttcttttaaatttataaaaattgtgaaattagttctaagtttttagaattaacataaatttcgaaaaaattttccataaataaatttgttggatatttaaattcaatgcatattattttgtttttcccgaaattcatcactcaatcagcagaaaacgtcatagactgcatttcgtaaaaaccgcctcccatgcgcgtttcgtaaatccgccaatgggttcaaaaaattcttagggctattgaaaatataaattaattttgnctcaattacattttatanactttaaataataaatgtttatatncatnaccnttgcaaaaaacatagccatgttcaaagctttataactttatttatacttaaggaaaaaactttagaaaattatattctgaaagagaacaattaaagctattgaattatcaagaagtattaatttggtttaattttagccaattttaacggttttattaataagcatttaatttttttcttggtattttggttttttctgtttttaaaagtaattgattttctattcttttatttaatgaaaaaaattaataacaaaataaatgttatgaatcatcaattatttattcccataaaatattaattaatattattcaatcaaaaatg

SEQ ID NO: 111344 - DNA, 309 bp, Heterodera glycines
tatttttcatttcctttcgatttgccttccgccgatcaattcattccccgtcgtatgaattacgttttctctttctcagtttcattttctgcccgcccgaccaatcatttccccccttttcccaaccatcggcaggggatcttacagatctttccatctcatcctaaattatgctacaaaagtgttatttctttcattccgttgattgagtgagcctttcttccgactcatttgcggtttctcctcctttttcttcttcatttgctgctttttcttcgtcaccgccgtattttcatcttcatcaaaatg

SEQ ID NO: 111345 - DNA, 147 bp, Heterodera glycines
actagagttgagcgggaccgggaccggcgggaaatcccggttttttcaggtcccggtccctatcccggtttttggaaaaacagaaatcccggtcccggtttagccagtcccggtcccggtgggactaaataagcactggtaagaatg

SEQ ID NO: 111346 - DNA, 119 bp, Heterodera glycines
attaacagaacagacactgtgtaatatttagcaacgaagcagcaccatccattccatcccccaaaacggcggaagaacgtttttacgcgccggccctccccccgaaacgcaacgaaatg

SEQ ID NO: 111347 - DNA, 869 bp, Heterodera glycines
  unsure (1)..(869): unsure at all n locations
aatgttgaatgacaattcaaaatatnttttgagaaaccatcggaaagaaattggaaatttatttggaaaatgaggaggaattaaattatgaaattaatgaggacaaaaattggatcaacgaaaatactgaaaaagtaaaacaaaaaattgaaattgaagcttttcgaagagaattagagcaaaaaatggaaaaaatgagtgaaaatgaaatgcaaaaatggccaagcttaaaatttacaatgcgtatttagtgctgctcgaaacagaaatttcccgagaccgagacttgatcccgagactcgagaccgagacccaaaaaatccgagacttttctcgagtcgagaccgaaactctcgagcagcactagtatttaattgtcaacatttttatttaaaaaacgcattttccatggtaatccatcggcttctgtaagtgttttttcttattcttttttcattgatattccttctgtctcccctactgatgaatgatcaatccctattttttaaatattgcctcattatttaatataataaataaattatattaagtaaaatatagattttaataatcctactgatgattattacttaaaagctttttaatataatagacaaattagattaaataaataagatttgttggttttgctccctttataaggcttttgtgcttttccattttttcattttcataattactttaaggtattgaaaaatagaaataaattattttatttatttatttattttagttacatagatattagctaatttcttaataaaaaattttaatttattttgaaataaattttaataatattaatgagcatttaatttattttaagaaaaaataatgaaaaaataatg

SEQ ID NO: 111348 - DNA, 173 bp, Heterodera glycines
ttttttgttcaacgtttgaagagggaaccggaaattacaaaatacttatttaatttacaacagggtaaaggaaagaagagaagaactaaaagaaaactagtccttgtccaggttaaccctataaaaacccaaggattaaatagagaaaaaccgctatttaaaccagtgttatg

SEQ ID NO: 111349 - DNA, 95 bp, Heterodera glycines
ctcagctgtctctcgtccatccgaaggaagaacaagccgaagtcatcgacccagccaaaatccgcaaatcacaagctgattatgcgcgaaaaatg

SEQ ID NO: 111350 - DNA, 499 bp, Heterodera glycines
ttttattgatttttttactaaaatattaaacaaaacattttttgattataataaaattgacaaaaacctattttaaaaagagtaaattggaaaaataattctttatttttatttttaagtaaaatatattttattgaatttacttaaaacataaaaaacaaaatttttcatttttcttccctcaatgatcagcagtttttcaatttaccagccaatttttatgaattgcagcaataaaaacaacaaaaaaacaatgcaacaaacaatacataaaaatggcattttatcaggcccataatcaggggggggggggtagaaaaattcgcacatttcgttggcgcccaaacttttttggaaatttgcaccggaaaaaacattttaaagcatcttttttcagttttcccactttgaaacttttttttctggtaatatgggcctgagactaaataaatactgcgagcagcagagctaatatgttcataacttttgcttaatgatg

SEQ ID NO: 111351 - DNA, 1003 bp, Heterodera glycines
tgaatttttggaccatttcttttttctttctcaaccaaattaaacattcttgctgttattcgaaagaatttgaaaaacgctattaaattgcaaattttcaaaaattttattcatacgggtaaaatttgattgacaatgaacaaagtattggttcaataagtctgcaccgttcacggggtgggggtgagaccaaaaatcctgtcctgcccacgttcccctggacgggggcgggggagatttcgaaccctagtcctaacaactacgaaattattgacaattttcaagaaagaatttattgaacgaagattattatgcttccgtgaaagatgatgctgaggctatttaatatctgagtgtaatctgtttttatcaattattttatttattgcttttgtttgatattttttatgttttaagcttctcattactcaaaaccaaaacacttgcgaaatcaaatgatttcttttgtattcgtatttagttttctttattggagctccagttaactgtttcggtcctccggtttaaatttgtttataagtttaataattaaaaataaatgtttttatatgtataatatagaattatttttaataatttttctgccatcattcatttatttaaattaacttattttcatgtgcggattaaagcattgccaattccgataaattaattacatggtgattaatttcgaagccattattattttagggatttttttcagaaaaagtgttttcttttaaatatcatattcattaaacaatgaattaagttaagatttatatttatatcaatttgtcttataattacttttaagcatttcttttttcttgtcaatttcatttcattagttgttttgtttcaattttcgattttaccatttaataaattttgaatattttaaaacactattttatttttacaatttttatattataaattttatatgcctttttgaattatttataaacatctttttaatttcagtatcgtgaggatg

SEQ ID NO: 111352 - DNA, 144 bp, Heterodera glycines
tagtaaaaaaaagtgctaaaaatgccttttcgtcttttgcacatttcgcttgcctttttcctgtattttacattggcgtttcttttaattttcagcgaacaaacgaccaacgtcctaatttctgaaaccaccattctccacatg

SEQ ID NO: 111353 - DNA, 286 bp, Heterodera glycines
tactttggagtgtcgggcaaggtgttattattgcaacagagtgggcggagtaccgtgtggaaaggagagtggagtgaagattgaatgcccgaagtgtcgccgttacttttacaattgggagtgttataactatcatcaaggacatcaaacttgtaaattatggaaacgttgtgtgatttgtgataagacttatttatttaatccgaagaaggaccatgaatgtggtgagacttattgccaactttgtagtgtgagccacgaccccaagcggggttgttatattatg

SEQ ID NO: 111354 - DNA, 250 bp, Heterodera glycines
aacattttatgtgtttgtgattgcactttctttagggtttctcagaattttgactcgtttaaatttttttcgagttttttgataaaaaaaattttctaaatttttttttttgtaattttcttatatggaaaattttctaagattttttcttgaaaaattttctgtttaaaaattttaaaaaatcctgtcggggtccacctttctctctcccaatttgtaatattttccccccgtttagcccgcagcaatg

SEQ ID NO: 111355 - DNA, 1003 bp, Heterodera glycines
tttaaatgcgcctacaacaaaaaatcaaattatcaattttcataattggatgatgtgtagtttttgctcgctattaacggggtttttacttattttttctgcggctttaactcgacgagaaatgcacaaaaaagatatttttgttcgaaattttgcgttttatcgcccttatagaattcaatcggaaaatttaaaataagttttgaaagtatttataataattaaattgcatgaaaaaaattgaaaaaatttttcaaaaactgccactttttcacaagcgccaaaaatattatgtcctattttttgctaacaactgaaaaactttttgaaatttacaggcgattggagaaattttgagtcatagaatttaatcaaaaagtgaagcgttgaattttgtcgtgtcattttattgtcgtataaaattaacaaaaatatcaaatggagaaaaaaataatagtagaaaattaagtggaatgagggaagggaggaggaacgatcaattggattgggggcaatgccaagccaaatgatgtgctgagagcagtgccaaaggtgtgacggaacagcgtcaatttgtattggttttataacaaggcatacagagaaaaaaaagatgaatgagagagacagagagataacaaaggttatgactttttatttaaataattttctttgtattttacatagaatgtgcttttaagaatttatcgaaatttagtatattttaaatgaaatttatttgaaaaatgaactctaaaagacgattccttcggaaaagggaaacaaagaattaatttttaaaatttataaattatattctaagcctaatgaagtaactttgtggtagttttgtttttcaaccccggcctgaaaagccgagtctacactttctaatttgttgtttctttctttaaattactaaaccatttattcgtaaacttaaaaatattttttagttaatttttaaaagtaaaatttttatctttattttacttgtgatatg

SEQ ID NO: 111356 - DNA, 100 bp, Heterodera glycines
gtttccatcctcaaattccccaattttttttagcgcgggatgcaaattcacggcactgctcaaattcccggcttcgtacccgcattatccgccaacaatg

SEQ ID NO: 111357 - DNA, 263 bp, Heterodera glycines
aacaacatatccatcctgtgtttttgtttcttcttaatacttaatacccttttttattttgcgtattaattgccaaagaaatttgagtcatttccctaattaataaatatatagtttattttacagtaaaccatcagtccagtaaatgtgaaatgtacaaacgctcatttataagtcccatttgttagtgcacattctttaaccctttaattaacacactttgtcactttaaacgacgactaaaaacggcaaattgaaaaatg

SEQ ID NO: 111358 - DNA, 444 bp, Heterodera glycines
  unsure (1)..(444): unsure at all n locations
tgttttgaaacgtgctgttaccaaaggcggttgctcaacctactgagctccgttatcctggcagcaattttaattgcctttnagagctgagggtagtgcgttaaacatttctaaattttccgtgtcgtttaggtgccctgtcgtcttgtgcttcatgggtggcagtgcgctgctcttcgggtcatagttggttacgaattttacaaattttatgctaatttgtttgataatgcatgtccatgtccatgcgtgtgctataaaaatgaatattttcggctcacctaatcattcacaacgtcatttccctcccatttaagatttttgaaaaaaatgcaaaatcagcctcccaaacgtccctccaatttttctattgaatacctgctgtctatccctaataaaaagccgcggcgcggcttcctcatcaaccaattgttgggagaaatg

SEQ ID NO: 111359 - DNA, 1003 bp, Heterodera glycines
gaaaaattttgtaattttaatgcgatttataaaatttctaagagcatcgaatgatatcaagataacttacttttgttggttctaagaaagtcttgaccagaatttttgatgatcaatcttattttatgtcgaatgaaaattgtttaggttttttattttcttgataacaatcaatagcaatagtgtttcggattagtttgcaaaatttcaaaaatttttgttaaggtttcaaaaaagttatgactatagtatgtcagtcgaatcgttctacaaaattgaatgtttagcgaaaacggaacaataaaataatttttgtttatcaattttgagaaaatttttcaatacttagtggagtgtattttttgaaattttttcaagtgattttttagggagtgtattttcccgattttattgcattttaaatctttcgaaaaaaatgctaaaaaaggaaccaaaacggcaaaatgccaaaaagaattaaacgcttaaattatttttgtgtttaaaaaataaattaaatagttgattaattacaaaatcaaaaatcaacaacaaaatttctgtaccaacacagtttttcatatgggataattttgaaatgtttaagaaatgcaccaaacatcgtgaaggcattaaaattaagatttttaaaaatcatttaatttttatcaaatttgaacaaattaacaaatttatggccaaaacagctatttaatgatactaacaatgttggatttggatgacaaagaaaaaaagttatagccaaaaacttgccgggcccaaacgttggggcccaattgagctgctccgtattaattaaatggaaaattcgaataaaattatggtcgccatttagagaacaggaaaacacaaattcaataaaacagaaaattttttaaattaaaattaggaaaaattaaataaaatattttgattccttttaaatgtgctattcatccgaaagttcttcactgaactggtcaaatttattccaaaagcgatg

SEQ ID NO: 111360 - DNA, 722 bp, Heterodera glycines
ttgctgtcctccttcgtcgctcgtcggttgtgcgccggccgttcccatctgtcaaatgaagtaaacactccgtcatgctttaccttctgttaaatataaatccctatttttcggcatttcccacttttcctttcgttggcacttttttctccgtccattaagttacggctacggaagttacggcggaggcggaagttatgcggcaccgctaattgtgaattacccacgcccattcggctatcaacaacagacgcagttttatgactgcggggggagcgaatgcggcggagaatgccaacagagcggggagacagggggaggcggcagagaatgctttagcggtgcggaattttgtgcctgcagttgtaggggcgggggaggagcagttcaagcggacgcgggagggtgccaaggaggagaatgccagcagggaagtgggtgtcaacagcagcaggtggccacacattgccaaggatgcgtatgccaagggggaggatgccagcaggatcgaggtgctggaggagggtgccagggaggaggagggtgccaaggaaggatatgccaaggatgtggagggtgcaacgggtgcctgagaagcggaggatgccagggaggaggaaataagcagggcggagaatgccaaggagcagggtgccaacgagaaggagcaacccaggaaatagggggattacaaggaagcggatgccaaggaagcaaaaatg

SEQ ID NO: 111361 - DNA, 1003 bp, Heterodera glycines
ggacgaattgctcgccatcgattggacacattgatgatggagtcgaaatgagaattttatcgaaatgagaatttaaatgttaaaaaatgcttttataaaattttaatgctttattgtataataataaattatcggcttcaacattttaatataaaaataaattcattttttaaatttgttaagaaaaatgcaatgaaacagaaaatttatctgcgacggactaaccccaaaattacataaatttcaaaaattctaaccaaaattgaaaaaaatagtaattttaaaaagactgattaaaatattggcacaagacggatcagagagataatctctggactgaaatagtttcaaaacacgaagaaatcaagacaaaaatagaattaatattttcattataaattgaaaattaaataaaaaatttaatagatttaaaaaatttcttccatttacctttgctttttcgttaaaaatttacatatttaaaataatcacttaaatatttcatcaaaaaagctcattagtgacccaattcaaagctttaaccaactaaaataggcaaaaaatatatattacaacgttgagacagacaaaaacatatgtttttatactttacaaacaacaattggatttaaattggacaacggaaatcctgtgtattactcagaacaaaaagaatgaattaaaaacggaaatgtgcctgccctttggcagtcacagttactaattgctgcagttgtctgagaattgaaaaatgaaaaataaagccacgggggctctattttgggaaacacagtatgttatttaatttagaattttgtgccaataatcattttttattttctgaatttaaatatatattttttctgtcttggaattctaaaaaatgtgtagtaattcaggtttttgccaataaattagtatgagtatttttgggcttgaaattggcgtggagccggtcggcctactgatgggcgtgttcgagccgcaaaagtacacccaaatg

SEQ ID NO: 111362 - DNA, 235 bp, Heterodera glycines
aaaatttggtctttttagagcaaagttataagcaaaaaaattttattttgatggttttttaaataacgcacataataatggtttttaaataatgacatagcaccaaccgccgtccgacgtttaataaggcacgaaaactgggcttaaattattgtaaaaaagaaagaagcatcttttctaatcgcattttaccatttacaggactttaaaaatagtttttatttaatctcaaatg

SEQ ID NO: 111363 - DNA, 120 bp, Heterodera glycines
ggtcagtatctcatcacaattaacccgttaattaccccctttgatttttaattacactttcctctcattagcgctttaattactcctccctttgagttttaattattaattaactaaatg

SEQ ID NO: 111364 - DNA, 393 bp, Heterodera glycines
accattcatgcgtttttacctgttggacggttcagtcccaagggtatttgccacttcagtctcgggtctgcaacttagcagcaggacttttaggcattaaaaaatcgaaaaataagcacctaatgaaactaaaaaaagttaaaaataattgtgcgattaaaaatttttgcatttctcttctcaataattacaaaaaaaaattttaatgtgagcagataaagccaaaaatgctaataataagtaataatattatgttttgcactaaatccatttccttctgcttctgccgttccaaccgatttatttgatgaattgtgtgtcaacaaattttggttcccgtccaccagcatggagaagcggcacaaaaaaatgccatcgaaaagcaccaaaatg

SEQ ID NO: 111365 - DNA, 114 bp, Heterodera glycines
ggtggcgaaatgacaactctctgatcagccaatgcttaaaacgttttgatcaacttgcaggaactggcggagctggagcaggaaccgatcacgggttgcaccgcgacaccgatg

SEQ ID NO: 111366 - DNA, 399 bp, Heterodera glycines
atcaataattaattagttaatttaattgaaataatttttaaatgcctcgagtttatgtgcattaaataaagctaaaatatttacgaattaatgatcagaaaattgaaaacttcgttctttttaaagagaaaataagagaataagggctttattgctaaaaatatttttaaaaaattctaaaaaattgaaaattttgaataataaagttgtgaaaaagtcattcataaattgatctattttaaaatccactaattttttcatccctataatattattggcctaaatttactaataattttaaaataataattaatttttttatttaattgccaaaattattgtcattagcatccgaaagtcacctttctgaacaaaactccgcgcgcttacattccgatg

SEQ ID NO: 111367 - DNA, 561 bp, Heterodera glycines
gccgttaaaagaagaaattgaaattaacacacaacatagggaggacttgaacctgggaccccccttttggtgactaactcacagaccactaagacgaaaaaaccaacttaccgtatttgctctttttatataccatggtatattatttttcaaccttctcagaagggggtatataattggagactggcagactaatggagactggcatataaaaagagcaaatacggtaattgtacttggagcccaaaattgaatcgccgtgtggaacaaagtcaccaatttgcgcttgactgttccgtttgcaacagcagatgagcagccagtttggggtgttattatgcgtgaaatttggccaattttttcggcaaacattcgccacttgggcgtttgcaatggcatcctttttgacaaattgcgtcgtctcacttcgccttcaattctcaccgatctcgaccaattgaattcaatctattccggtgatttgttgcccgatgcgactgttgatgatgattttgatgggccaaatgcaacaatttctgctggccaaatgttgtcaaaatg

SEQ ID NO: 111368 - DNA, 1003 bp, Heterodera glycines
caaaaatgctctcaccaacgtctaaaaagctttatttgtataaaatggtatttattattttggtgttaaaaaattagatgtaaccttttagttttttaattcctttttggaacttttagttttttaattcctttttggcaatcttttatttcggtatatatctttttttgtttgttttttcgcttatttaattaattttttaaacattgtgttttttaagcgtgaaattttctttgtgctaaaatggttcgacataaacagaatttaaaagttgatgattcttcgccaaccacatcatcatacctgaatacagggttcaaagctcccgtaaaaaaagcagtaaagtgaacggttccaagctccgttcaaaagcggattgaatttttacaagaaagtgatgaaaattttatccaaaaacatgcgataaaaagaaaggcatatataaaagaagttattgatttagacaatctccctgatgagttcttatctattaatatgaacaaagaaaaaaatgaaagaaaccgagagtatgataaaaatagaaaaataccgcgcatccaaatgagtgaggaacagagaaatgaactaagagcgatggatgctaaggttgttaaagcacgtagagatagaattaaagaaggtgacttatatttaaaagcagccgaatccgatgtcctacatataggtgtttatggtcttggagaattgaatataaagtgtaatcattgtccggccattcattttccagaagaacaaaacaaaaccaaaggtttaaacgaattttttgaatgttgcaattatggaaaattaagtaatttggaggatttgctgcaagaatatcctatagatttaagggtattatttcaacctgaaatcgacgaaaataattacacaaaaataaaggatttacacaaaagttttataaaaaatataagaactttaaattcttctttttcatgtgcttcgttgggttgtatgaggtttaaatttcctgataaaaatg

SEQ ID NO: 111369 - DNA, 157 bp, Heterodera glycines; identical to SEQ ID NO: 103018

SEQ ID NO: 111370 - DNA, 381 bp, Heterodera glycines
  unsure (1)..(381): unsure at all n locations
agagaatacggaatgccatggaaagagcnaatcagcggataaagagagaatgaaagagagagtgtgggtgaggaaaggacgagagagaggcgagagagaggggagggagagagagagagaaagagaggaaaagtcatgatcagaaaatgattgataaatttgaaaatgacaaataagtaaagaagtgtccctttattcaactctgccattgttttctttgctgatcactctcccaaatcactgattgatcaaaacccgttcattttgcctttctcatctcccaatttgtcttcgttcagttccgatctgtccgtcctttactctctgctcactttgggcgactatctttgtgatcagctgcagctgaccagcgacgaaatg

SEQ ID NO: 111371 - DNA, 447 bp, Heterodera glycines
ggtgaacctatattttttacaaaatgaaaaatttttttatagtagttttcttatagttcatacagaagttattttttatataattgctatagataatttttttatttgtattttaaagagatttttttgccaaatatacatgtatattgtataatattattcaacttttattcccgtacaatctcccatatatttttctgcgtactgttttttacatacaaatatatttttgttttaatttagcataggtctaaaatatatattacatttataaaaatttttttaaaccattatgatagaatttgtttttaattgctttaatattatcttactgtaaaaatttgtgctgaaaatttatcgtactccaacgtttaaattagcaatttgttaattaaacatcttttttcatttttaatatagaaatttataggaataaaattaaaaatg

SEQ ID NO: 111372 - DNA, 98 bp, Heterodera glycines
cccaatcggggattaagaccagttttatggcgtcatgctctggaatatatttcagtttcgtattcgtattgatggaaatagcaatgggaagggaaatg

SEQ ID NO: 111373 - DNA, 1003 bp, Heterodera glycines
atttattaatgaatttttatgccgtgaggaaaacgaaatcggaaaaaatttttcaaaattgggaaaaaaatattttatatgaaaaatcagaaaaaatgcgaaaagatttttgtgaggaattgaagaagggaaaaagcattgaaaaagcaacgcaaaaagtgggaaaaacggcaaaattctcctattatatttcattgcctttgtgttatttggcaatgaattcatcaaagaatgcaccggctgccttcgcaacaataataaccaaattcactcaatcgaattggcagagaatggtcccgctgctgctggtgctaatgggcaataaattggtgtcaattagggaaagaaaactgacgatgtgtgatactgtgttccttatatatcatagctctgtggtgaagtcaatattagtgatatttttttcaaaccttttcttattctattaaatgtttgttgactttttgtttgtttgggaattaattattattccatcaaatttaaaatgcgaaattttaagttttactcaatgtatttttttattctattaaatgttacttgacctttttttgttcggaagttattattatttcaacaatattaaaatacgaaactaaacaatatcaattaccgaatcccgacaataaaggaaatcgagttcctaatgctgctggagaacattcactgagtcaccaacatcattaatacgggcgtacgccgattaaagtgttcaattgatgtatgtgttttttgcatcaatcaattatattttaattacgaagctaacaagagaacatatctaactgtcagtatccaaatcttatggatatttctctcttacatgttagcccattgtcatgagttcggatccgcctgacagatggtgaattattttgatttttttctaagtatcattccacctagcatttttccccattatacaattttattttttgatactattggatagaggaattcttgttgaatattataaaagaaaattatg

SEQ ID NO: 111374 - DNA, 348 bp, Heterodera glycines
tatacgcttcatcatcgtcgtagatcaagcttctttaaaggaacaagtggtgcatacagtatgccgcaaagaatgacagtacgtctattacagtacgattaccttctggccctatgccttagcaaactgtaacgccgactgtacacccttttgagcagtgatccgcttctcacaacttcgccatttctaatttgatcgtcattttgtgaattattgttaagtgttgtggtagggagagcgagagaatttcgcggtttggagcttaaaaatgaaattttaaaattccaaaaaagggaaatgccttgtcgaatgtttgtgcggattgcgtcggcttagcctttcccgatg

SEQ ID NO: 111375 - DNA, 301 bp, Heterodera glycines
ctcataatacggattcagaaagaaattacggtaaattttgtgattataattttgatacaatttatttaggtaaattactcccgacccttccccctatggatgattattgtcctgaaagcatgaaagatgacgaatttgaaaaattcaaagaatggtaccaaaaaaacaaaaaaaaaaccctttttgttaggtactataaaaatgagcgaccttttaaaaaaattttaatttagaggaggaacaattacaaatttattgtggacaggatacagaaattttattaaaatcgatactgagtatg

SEQ ID NO: 111376 - DNA, 213 bp, Heterodera glycines
aattaattaggccttgttttcattttaaggtgtggtggcagagagatataagcgtcagtctctttcacagacactttccaactcggaccaattgttctttgttagcgatttaatttcgttttcataattctgtttgggttccagaaaccattggtaaagctgcggacgttcgatcgcacttaccaaagcagcaatagcgaagtacaaaaaatg

SEQ ID NO: 111377 - DNA, 1003 bp, Heterodera glycines
  unsure (1)..(1003): unsure at all n locations
atttatttggctggcttttaaggggtccccttttttccgtttccctcctccctcattttcaatcgttctccctaaattttttctctcattttgttgctgcacttttctgctgttggtcgattgtgacatcattcttttgttattttttgnccatgtcaaaaaacgacgacgcnccaccaaaaaagaaatgtaaattcacaaannaattttaaatattcttcaaatttttcagctttatctgcgccgattgttggcttttggtgttgattnttcttacgccttcccaatttggcnccgaaattgcattgatcaaccgctgctttgacatttacgtggacgaacatttcaagacacgcaaatggaaattgggcgaaattcgaatttgctacaaaattttcttaaaattgataaatttatgtcaaaaataagcaaaaaagcgaaaatttcgcttttcgggttgatttttcggtaaaaattttgagaaagtatacccttaattttgaaaaatttatgtccatatttttgccattttatgtccatattttgccattttatgtccatattttgcgatttgttgtccatattttatggccatatttcgtgattttatatccatataattttacgccctactaatcattatccgtctccaaatcgtcaatttgctttttatcattttttaaaatcacgaagctttaaaatgctgattttcttcttcagatcgtggttgtcagaagagtgactttgaaattttgcaggaaaatacctctttagcacagagggaggggctatctgcttgaaaaattaaaaaaatttcatgcattcacaaaaattctgtacaaacatttgttcgtgttttgttttattaaatttgaactattgatggcattttcgtgattttggccccgagttggcagaatttttagtataaaacggcccaatgtttcttccattctctcattcaatctccttataatttccggtcactttgttgctacaaatg

SEQ ID NO: 111378 - DNA, 317 bp, Heterodera glycines
tgacgacgacaagcgctcgtaggtgaccgcctacacgcacgtcgagctcaacaaagcgctccagcttggctatgtggtcaccgatctgtttgaggtaaagtcactcattaaaaaattttgtgtacgaaaacacaaattaggtctgggactacgaagagtgggacggtacgctgttcagcagctacgtcaacaccttcgtcgggctcaaagtgcaggcgacgggctggccagaaggatgtgtgacggatgagctgcaaaaggcatttgtagacgattttgagcggacggaaggcatccgattggactccaccaaaatg

SEQ ID NO: 111379 - DNA, 89 bp, Heterodera glycines
agaaagatgagaaggacaacaaccatttttctgtgttcggaatttgctgtctttttctggcacaatatttacaaaaagcgaatgcgatg

SEQ ID NO: 111380 - DNA, 529 bp, Heterodera glycines
ctttttgaattttttctgcaaaaaatactttaatacaatatttagcaaaaagggttttttaattaaccaaattgagtaagttttgagaaatttatcatcctcggaaaattatgcacaattttggaactttatattatatttcgaagtttttccacatttttacaattttcgatttttacacatattttaccgataaacgtgactttattaaaatccagttttcagctgaatagtgcgatcgtccgtttttgttttttggcttgttagcatatcgtcagtttttgctgatttggctggctaatctgtgaatcacaaaattttatattataaattttgtgatcagcaaaatatttttctccgtaaagagaggcactgtttttgatgattcatgttttatgtggacaaaaacagatttattcagtcaaatcatttttcatttatatttgtttattaattatattttctgaatctaatatttttcttcatttcgaaatattattattattatttggtgtatcttccaaatatg

SEQ ID NO: 111381 - DNA, 462 bp, Heterodera glycines
atttaccaattgtgcccctccttccctttcgagaaatttttctcaaaaaattctttaggatagattatgtatatattggggtgttcggaaagttctttcatagcggtcgttttatgtaaattagaatttttttcgcacccaaccgcaacctttggccaaattctttctgttctatgggaaggagcacattttgctgcatatgttacgagccatttcattttcctttctttgtaaattgattttttaaaattatcccaatggagcacccaaaatcccaaatccgatcacttttattgtacgggtcaaaactttgctttgatcagttggaaatttattaaaagcagtttttgtggccaaatcaagtccggagaatccaaatctggcctcagatttgatctctgaattgtctctggcattgtactgctccatgtcgttgacaatttgtttttcctctttaggatg

SEQ ID NO: 111382 - DNA, 302 bp, Heterodera glycines
cctaaaaagaaattatgtataatggacagtataattgcgattctttttggaaaattagtattttatggtgctagggcttattgtcggatagaaatccgggcttttcgaaaaatgaaaaatagacaaatttttaaaatttgctaaaaatccaagtaaagtgctagtgcccggcgtcggaccggaccctgtacggaatttttaagggtacggaatcaggtttagtttttagtagtttaatacataggtaatttaattttaatatttgcttgaaaattaaaaaaaaatatttttttttagaaatg

SEQ ID NO: 111383 - DNA, 265 bp, Heterodera glycines
  unsure (1)..(265): unsure at all n locations
caaaaattggggagttggttcattttttcaccaccttagattattataaataaaaaagattcattatgattctgatcatgtctaggtccgatctctttcaattgaactgaacccccttttaccaactaaaaaatatgcataaatttcattgattttatngtacgtatagtttggtatatcaatgatttaaatttttgatgatgattatttgataacaaataaaattgatttgaatatataaattataatttgaatttcatcaatg

SEQ ID NO: 111384 - DNA, 79 bp, Heterodera glycines
tgttgagaaaacaatctttggcattccataatattacaaaaacctattccaaatgcttaccatttttatccagacaatg

SEQ ID NO: 111385 - DNA, 127 bp, Heterodera glycines
tctggaaatttctcggtttaacaaaatgaatttttaaaaataagtttttgcctgcgtccaattgttttttcctttcctgaagttgagacgccatattttggaatttgcagagtaaaaattgaaaatg

SEQ ID NO: 111386 - DNA, 413 bp, Heterodera glycines
cgaaaaattataaacgtaaacttataaaacaaatcggcaaaaaatgccgaagaaagagataattgaattttgctgacaaatgaggtaagcgaaaaaagcaatgtaaaacaatgaattttgttgcatatatttctttgttactcgctaaaaataaaatttctttcattgtattaaacaataaattttttgtcattctttattccactgcacattttagttggaaaaattaaaagaacataaaaaaaaatttcttttgcaaatttattaaaatttaaataataaattaaagttttaatttttgcacaatcaataaaatattggataatgaatgattattaataattatccataaaaccattgaggtagaattattttagctattttcctataattctcttctttttcacgcaatg

SEQ ID NO: 111387 - DNA, 1003 bp, Heterodera glycines
gcaaaacgcatgattttgattatatggtctggttgccgactaaaaactgacaaaaagtgccaaattttggcaagaaattgtaaaaatttgggcataatttcaatttggacaaaatttattaaaattaaaaactctaaatatattatattacattttagaaggaaagactcaaaattaagctaacattttttattttgaaattcggtatttagctttttttcaacataaatttaccaatttttagaaatgtagaatttttttattcccgagaaaattcctcttaaaatagattttttttttttttagaaaatgcccaaatatagaaataagaactggaaaatatggatgaacagtcctaattagaaaaaactgaaactaaagctaacttttttgtgcgtccaaatacaaatgccaattttatctgtttcgttaaaatttcaaattgtgccctcacctgcacacatccgggcgcaatgccaatggcatggcttggcatttgtgccgcacctctgcccccgccgccttcgcccatcgccactgctgaacgggcgtacacttagcaaaacgggggaaggggggggggggtaattaaaatttaaaaatatctgaaattttttacgaggcccatgactctgcgaagcttttgacggattggcggaggtataaaatgcggcatttgaggcggaaattgtccgattttcgcaccctttgctcacatatttgccagccactaaaaaatgtcgatgatcgcacagaaaattatgaagtcgcaaaatgatcagttcggagcctaattccccgaaagtctttagagtccggacatgattgatcaatatatcctgttaagattttccctggcttctgaaatacggcaaggacaggatcccgactaaatcgggatttgagtcccggatatttaccgatattttttagaaaagtcaagtctttttgtatatgtttatttttcataaatcagtgattttgagtcatttttcagaaaatg

SEQ ID NO: 111388 - DNA, 92 bp, Heterodera glycines
ggaagaagaattgttgaccaaatcagaaacaaatgtttctaatgcaaaagatataacgcaaaaccatatcagcaaccaaaaatgccgcaatg

SEQ ID NO: 111389 - DNA, 65 bp, Heterodera glycines
tcttaattcgattttaatgatattttcaaattatcatttttattatttaaaattcaccgaaaatg

SEQ ID NO: 111390 - DNA, 571 bp, Heterodera glycines
aagaagacaactgccgtcgatgtgtctgtctgtcgtcgttcgcctttgtttctcttgcgtctctgctcaacatttctcactctttcgctagtgcctttgccttctctctcatttcctctccatcttttctcatccacatttactgcactcttttcacacaatgtttcctttctctatctctgctcccccattttgttgcattaggctcaaccaaaccaaagataaagcattcgaaagtgcttaaaagcgcaaaggctgatttggcgaatccaatttgagtgattgttaatatttcacatatttgactcatttttgatgttttgcccagtagatgatattgacctctcaaaataaacaaaaattgaatttatattgacaaatatggttggattgtgttcacaacagttggagggaccttcaaattgagaaaggagtggaaagaaatccgtttttgccccaattcttttatgatttttatattgtgagctgtcttacctatcttctcgctgtctgcactctcacataaatataaacgcttttttaagaattaaagcattttaattgttcaatg

SEQ ID NO: 111391 - DNA, 646 bp, Heterodera glycines
  unsure (1)..(646): unsure at all n locations
aaaaagaatgttataaaaaatattttcacccattaaagcttctgtgagatttgcttaaaaaaatacagnctctaatcaaccttttaccatacctaagacttgtcttcagggcaaagagaaaaaaacataaaaaattaattgctaattattaaatgatatttagtcgttgaatctcaatagagaaaaaccaaaaagtagaataattttatattataaacaccagataaaaaaccagaaaataataattgtcttttgtttaactttcactaataattttccaaaagtttattatgaaaaataaatctttcaaagacgaaaataacgaaactttgcatataaattatgggattataaatataaacatgagctttagaaaaataaataattaaaaaactagaaaacgaaatcatagacataaattaacagtaataaatatgggacaaaacaaataaaaataaactaataaaagtttatatatggaatacacatttttcccagattttattgagtaataaagtatgaatattgaaaaaacaacaaatttaaaataatattgtaaaactaaaataaacaaagagaaaaaccattattacacgcataatctaaaggttgcaagtttttttctaataaaaccttaataaacatg

SEQ ID NO: 111392 - DNA, 51 bp, Heterodera glycines
ggtgaggaaaaccagcggtctcacaatttttattctttttctttcagtatg

SEQ ID NO: 111393 - DNA, 1003 bp, Heterodera glycines
tttatatttcggtataaaaaaatttattatcaaaatggatggcaaaatgagtaaaacataaaaaagcgtgaggttttaattaatttaacctatacaaaaataaatgaatttacctaattggaaaaattttatgtgtgattaagacaaatttagaaatgaaaattttctatgatgcaaaagaatgacaatttacacacagtgagtgattggttggccaacaaatccctgttcaaaaatccgaattttcccggtactttttttgtcgcttttcctcgctgtctgtcaccgcgcactgtacaaagtttttagaggagtactgtaggcgagacagtactccatgtacctccgccgctcataaaaataccttaaaatataatttctttccttgtgtatcttataggaatttatttaaaaggtgttgcgagaattccataaaaatttttcctcgaaaaaatttttaataaaaaatgttattcttaaaaagttcgttagaattcccaaaaattttcgccggaggtgcaaattggcttaaattttttaaacttggcctgaaaaatgtacaaatgatgatttcttggtgagctatgaatttaaaaattttcctatcaaaactatcccttcatgttgtgaaaaagcgccagaaaaactaagtgaaaccaaagagcaaaaaaatccatcgaagctaagaatctggcgacgtctttggtttttttgcgcggcgccaaaataaaaaaagaggtgccaaccagggctgcacgcaattgcggattgcggattgcggattacggaaattgcggggtttttggacccccgtaattgcggattgcgggttgcggatttttgggatttatccgcaattttgatccgtaatttgactattggattatttttcgagacgatttcttgtaagattattttttataaaatgaatttttttctatttttatttaaagaaaatatgtacatttgtttaaattcttatttctttagcaatttaaaaatg

SEQ ID NO: 111394 - DNA, 186 bp, Heterodera glycines; identical to SEQ ID NO: 109872

SEQ ID NO: 111395 - DNA, 351 bp, Heterodera glycines
tatttgtcaaactaaaaatgtgtcgtgtgttataaaatgagtattaaaaaaacatttggtattaaacagccgttattgatttctccaaagtttgtgacacatttcattttaaaattgattttgttcgtgacatatttctcgcaattaaaatgatggattctgtcaagcgcaaattttaaattgtctaccaatcattgtatcaataattattagttcattaaacgatgattacttttcgtgcgtcatgaaaagaaatgcgggagtttcaaaagcgttaacttcggtattaaaaacagttgttgattttaaaacttaaaataaaataacgattctttttgacccttaattatg

SEQ ID NO: 111396 - DNA, 1003 bp, Heterodera glycines
cggaacgttcgctgcttgcggagtgtttgagcctttgtttaagacggtttcttaagcggcggttaaatctgacaaacagccgcgggcggaagtttggaaagagcaggtgatgccaaaggcatcgaggaacctgctgtgtcaaatgctgggctaactcatgggctaagaggcgaatggcaagggaaggacaacggtacaatacttgaaaaaatcgaatttttatttcatgcttaccccgcggcacccggcacggtccaccaaaaaaataaatgcccaaaataatgttaaatccataaaatgtacgcctctctaatcgggcgattatgcttaattagcgaaattgaagagacactaattaaccaatgacaaatggacattagtgtatgacaaggctcccttccattgaccatactgaatttcaaagtacgggtaagccgttttgcaagtaaatatcttaattttcaattccaagtacacatcggagtttttattttatacaaataaattatcggcatggaatttattcgacattttctttttttggtgcgaataaggtgggcggggggggggagagcggcaatgtcatcattcgctgccgagaattttgagttttttgatgattttttttgacagataatagcccaaaaataccgaattttatttctgaaggcacacgcggactctgtaattaaggccgaatttggcactcaattaattccacccttcccctgccccaacatttcgttatcattccagaaaatgcagtgaaagtaacaaatttaaatttataaaagaaataaactcgaaacggaaattccaagaaattatgccctgtattaagcttaaagcaattttacaggaaactgtggcaaaactcaaaagcttagtaaaatattgcaaatattgcatcatttcaaatatataataaaagcttcaaaaaaaattattatttataaaaaaaaattcccattaaaaattctgaacataaataaacttttaaatg

SEQ ID NO: 111397 - DNA, 242 bp, Heterodera glycines
ttttggtattaaaaaattggctaaaaaccctaaaatttggtcattttttgaataaaatctgtgaacaaattgcattaaaaactacaaaattttcccaacagcgcctatcggcgccgtctgaccctcactgtcctccaaaagttttttttggaagaaagagccgaaaaagcggttggaaaataaaaaaatggtcgttgccaattggctcaaaatcccaaaaatcggcctttgggttcaaaatg

SEQ ID NO: 111398 - DNA, 137 bp, Heterodera glycines
acaaagcatttgatcgtgcctatcaaatccggatttgtcttgtcccttgaaatggcacgccgaccgggggatgtgcttcgatgagtttgtcgcattggctgcccgtgcggagtcaattcaaaaggcaacaaacaatg

SEQ ID NO: 111399 - DNA, 729 bp, Heterodera glycines
ttttacaatgcgttttaatatgacaagtttggaaaattgtaatcgaaattaatagtttttgcaaatgctattctataattgtttcaataatggtattcttttttacattttcctaatttttcacgacttttttacatttttttcgagatttttgatgttttttatgactttttcgtgattggcgatttttattcccagccctactaataaataaaaatttacaaatttaaaaagtttttcggaaaaataaatttattatttttattattttttttaattgcttaacattacctttacattattgccatgtaaaatgccctttttggccaaaaaataaaatcgaaaatttgctatatttatcatttttaaaaaataatttcattcccacctgctattaacatttgctttacatcattgccatgaaaatgcccttttattaaaaaaaaatcgaaattcactatattttattttttctgcatttatttctagcaatagaaatagtaataattcacagaaatagtaataattcatctttattttatggaaataatgcttaaataatattttccaatcaatgaatgatcagctaattacgtcaataagaggatttcttcacatcattaagtagaaaattctgcataaaaggctatcactgctcaattaattcactcagaaattttcttttatcataatttaaaataataattttgtttttacctttagaaaatg

SEQ ID NO: 111400 - DNA, 1003 bp, Heterodera glycines
ctatcggcaccgtcgtactctctactcaacaaaattgttgtaaaaaatgtgccaggaaatagaactcatcaaaagtaaggaatttaattgaaataaaattttcaattattttaattttatttcattaacacccaaaaaatcattaaagataaagacgcaataatttaatttaaaagatacacacctttctgttaaagatataattttatctaatatttttattgaatatcttatatgttaaaatggtaaaaaaatttagttcataaaaaacatatttgattatttacttttgcataaaaaggcaaaaataaaattaaaaaatgagtttgcatgtcagggatccgaacctgtgggcttaaaaaacgaggactagctcactaccgctgcgccattagagacctgatgaaggcgcaaataaattttaatttatttattcactaaaaaactttggcacgtcataactcggcactcgagttcattccgcaaaaaataaaatcacttttcttaagaacctgtgggtgctctatccacccaccaaattttattcggaaatcaaacggacacctggggaccttcctttttttagccgagcttcgcccagccctggtgccgataggtgcagccgggatatgcaataatactgattgcaaattacaattttggaaaaaattacctaatatgtactttttattgggatttttgttttaatagaaaataaaaattatccttttggtcgttgcctttttttggatttttgaggttttttgaaattttctatcaaaatttctaaaaactaataagattagtcaaaacttattaaacatttttgttttaaacaatttatatccgagccataaattttaacttctttaaaatgttttattgttgaacatgaaaaaacaacgcgagggtttttctctaatcaataaattcttaaaaatttatattaatttcaaataaatattttattctctattttagctttacatttattttcgtaatg

SEQ ID NO: 111401 - DNA, 1003 bp, Heterodera glycines
tacaatttaaatatgacccgtcctaacaatagacaacaaacaccacactaattcaaacacggacatatacaaacacaaaactttaatatgtgatgacaaaaataaaattcaattgttattttatcaattttatcagagtttgattcttttctataaaatttgacttatgcagcttatttttaattttaaatttgtgttttttctattttattattttaaactattcctttttatttttttaattcttatgctaaatattttatatagaatcacataattctttaaaacttgtttacccatgttttctagcttccataatcggtggatgtaattgtgtacgcagattattatttttaaatttgttaagttaatctttgaacttaattaacttcagataataaacaattaattgttttctatttcaccaaattccaaattctattaggatttatataagttctgagagaattttaatagatttttacaaagggtgtgtttctggcatttagcatatttccaattgtcttaatattttttataatttaacccaattaatttaccaaatttaatctgaacttttagaatttcttaaaatttttttgtaatttgcattttggtctcaattaaaatatttaaatgaaaatgttgcgttttattatttttgatcaaataaggcgaaattattgttcagcatatttcttcatttttatatctttatatcttatattatttttgacctaacattgaggattatttttattcattttaaaacaaaaatatatatgtgacgataaaaattgaattcgtaaatgttttttttatttaacattatgagacggtccaatcctcttttattaactaaaaaaaattttttttatgcatattgaaaaatttatattattcgcaaaattgtcaaaaaacttctagaggaattacaaggtttcatgaaagattactgatcctcaaaataaataaagctaaggaaacaataaagaaaataatg

SEQ ID NO: 111402 - DNA, 232 bp, Heterodera glycines
tggtggtgatctggaaatttgattctccgcacttcgccgacaattctctccgatctcaacattatttcaatccattccgctgatttgttgcccgatttgattgctgatgatgagccaaattcaactgctggccaagcgctgtcaaaatggttgcaaattccggcaaaagatggacagccaaagcaattgagttgttgtgctgctacgtcaagaaccactaaatttgtcaatg

SEQ ID NO: 111403 - DNA, 1003 bp, Heterodera glycines
ctttttgagaaataaaaagtcaacatattatgctgaaatgactaaataataatgggtaataaaatatatttttactattaatcgaaaataaataaataaatatttatatttaaatataaataattatattaatataatgcatgatatatgaatattttattactacgtgtaaaataatttggcatattttaaaagacattaaataagaattttattttaattatttacctgtaagaaaaaaaacaaatttgtggatgtctttgaggaatagaaaaaattttaaacaatttttaaattaccgttaccgatatagacatttattaatttattgaaaaaaacctattattataaattctataaaattttcatcacagtcgtaatttcattaattttttaaattaaatatcaggcgagaaactgacagtcaaagcagcaacgaatcgccaagccggccttcgtcgagtagaaaaatgtttgtttttgagatgcccaattattatacgctattttttttaaatgcacaggtccaaattgccgtaccgttcttcgacacgccaaaaaaagtatgtttgttgtttccccagcaaaatattaataaggctgtgcaccgggtcttagtttggctaaaacaatatggaaaaattcaatctaatattttttccttcattcacctaaattaaatattcttggcatctttgacagctataaaaatgctttattagtcacaaagtttaacaaaattcacttattcccaaaaaggtttgaaaaagcgaatttaattttggttaataatttgcatgtggttttttttaattcgtgggttttgaataagaatccatcgctagagatgtggcctaaaattttcggattttatttattttttcattttatgtttcttttgttccattccactttctaaatttttgaagaacagcttaaaattttaattaaaaacaaaaatttccattgaaacattagcaaagtgccgagcaatgccaacatg

SEQ ID NO: 111404 - DNA, 728 bp, Heterodera glycines
tcttacacacaccatcccagaaatgagctcctgtgccagaaaagatttgcatgtgtggctcagtggttttttaagatagtaaagggacaaagggtggtggttcgagtccgttgtgcaacatgaatattttcatttatttatgtccaaaatattaaaaaatgacgatttttgggaattgtttttgaagctttttcccaaccaaattggacaatcttggtatcattcgaaagctcttgatggggagaagctttttctaagcaaatgctaagcaatttgatgagttagaaaaaagatatgatgctttgaaattttgttttttgaataaattctcgaatcgacctattttcaaattaacctgacctatcattagatgcagaatatttttctctatcgatatgcaaaattaaaagaaattctgcctgaggaaaaaaaagttatgctgttcgaagtaaatgttgcttttcctaataataaaaatattagatagtacgccaaaaggagacaaaaaattagagaaaaaaagataatgtttttctctggcattctctatttattggtacacatctcgttttttgggatggtgtgtacagaggtcccagtggcctaaaacgcacgaaaaattgttttttggtggttgttaagctactttttgatagagatcggctacgggtcggacccgtatacggacttttacgggtccgtagtccgtattttttcggaccaatatg

SEQ ID NO: 111405 - DNA, 293 bp, Heterodera glycines
tcttttttttgttcttggatttttttaaacttacctcccccccctccccgccccctccaataattttccttaatttcctcaatttaaagtaacattttatagtaaaaatggcattatataatttcatttttgcttttcttgcacattgtgagaattttgcacaaatttttcaactaaaaactggaaacccagtgcacttaaatttgttttgtaaatcggaaatgagaaaatctatgacttttttctttttagtttacatatacctccgaatagtcaaaaaaatttcaaggatg

SEQ ID NO: 111406 - DNA, 64 bp, Heterodera glycines
ataatcaatgtgcatttatgtttcattaaatcattcaatttatttaatttaagaaaacataatg

SEQ ID NO: 111407 - DNA, 317 bp, Heterodera glycines
  unsure (1)..(317): unsure at all n locations
agcaggatacgtagaaataataagtattattgtatgagagtaggagancctgtgtaggcagtcagtatcgtatcgtaaatctcgtctactgtattcaaaagtcaaccagtggcacagttaaatgaaagtcattcattacgtatgagaccataaaatttaaatgccacatcacagatacgcacgctgttttgcaacttcgaaatgccggaggataaagtatactattattactgtaacatgcattcattacagtaccactcactatttgtccccagattcttaagtggatgatcatccaatttgccgggtaaattatg

SEQ ID NO: 111408 - DNA, 106 bp, Heterodera glycines
aggtggtcgtggagcgttcaacacatacgcaagtcgtcaataccaacatgggactcaggccgttcatttgcttacaagagccggtgtttctgttgacaaacacatg

SEQ ID NO: 111409 - DNA, 224 bp, Heterodera glycines
ttttaagagttggattccgattccccaaaattgaggcttcgaaactttctgactctgatatgtgccatcttcgttattgtccgtttgtccgcctttcccccctcctctttttgtccgttctcacattctccgtccgttcacttcgaattctgcaaattgtgcccggtttcaccaattcccatgtgctgttcaattatcggttggcccaaacgctggcggacatg

SEQ ID NO: 111410 - DNA, 1001 bp, Heterodera glycines
ggtcttgaataatccctaaaacttgtaataaatagaccaaattaatactgccaaatatttgaggctttattgaaaataatttataattggggttatgcatgcaattttgatggcacaatgtttaagaaatgctgagaaatgcaaaagaactgtatgttctacttataaaaaggttggcatctgtccatttacttttgaaattataattataattttaaaaataaattaaaatgtgaaattattttaagaaattcttattttctttccttttttttgattggaaaacaaatatgttaatcctaaattgtgtatctttttacggatgaaatgcgtgttttttgggcaattaaatgctagaattgcgaatgatcatttttttagggtaagctgacaattaatccgccatttcatctctcgtcaccaaaaagcgtgagttttttttgctgaaaaacagacatataatccgtcaaattgcgattttacttaaaaaaaatattttaaaaataaattaaaagtgaaagcattttaagatattcttattttctttacactcataaaaaactaaacttttttggctggaaaacaaatatcttaatcctaaattgtgtatcttttagcggaagaaatgtggtttttttttgggggcaatcaaatgttagaattgcgaatgatcattttttagggtaagctgacaattaatccaccatttcatcgctccccacaaaaaaagcgggagttttttttgctgaaaaaacagacatataatccgtcaaattgcgattttccttaaattcaactgaaaaaacgtctggcttttttgggcagatttggcgaccaggcacataaatggggctatttaaaggtatccaattcaagttgaaatcatttaacaaatgagggctaatcgacctgaaaaaaaagcggaaattcgtcgctgcgcctcctcaccccaaattggcgcagcaattcctgaaagggctgaacgtctttttaacagaatg

SEQ ID NO: 111411 - DNA, 451 bp, Heterodera glycines
  unsure (1)..(451): unsure at all n locations
atgttatcaatatgattaactcgtttttaagacacgcttgttgtattttggcncagttcgttccgctcaaatgggccgagtaccgtagtgtcgtggtgtgtgcgtttccacaatgtccatggcctggttactgtatgcaatggtgcactttgactcgctctttgccgattacattctttacattgtgctttatatgttttacaatacgctcaatgccatttccaggtcactatggcgccaaaaattttcggcaatttgaaattcgatgattcaaaaaatttcggaaattctacccccaaaaatgccgggcaatcctataaataaaaaacccgcatcttttattgactatattttaggttattttgaacaaaattaaaaaaatcttaggtggattattaccaaattctaaaagaattaagccgggagattgagttttaaacaattaaaaatg

SEQ ID NO: 111412 - DNA, 902 bp, Heterodera glycines
atggaaatgatgtcattttgtccgcaattttctttttattcatttgtttccatttattacgtatttatcaataatggttttctactcgcttctccacccccataagcataagtgtgcctcggcattttacgtaattccgacatgcttcttcttttttacatattggtcaaaccgttaatttcaatttcttgttttgtgatgtgtttttgtctgaatttgtccgtaatatttgcgaattcaatgcgtgtgttagacacggtgtgtcatcgctctctgtcatttttagtgcgcctttaaggcaacaacaaataatcgatagtcttctgtttctcttctgtgctttgtgttggttctattaggtcattttctgtctgctctgctctgacccctcctcctttgttcagaatctgtccgccctcactcattcattcacttcatttgttagtcattcattcatttatccgtccaatttttctcatttcttttctgcaaatttctttcgaactgttgaagcaaaaaccacatcaagcaatgatttgagaattcgttctaaatccgaaaatatattgttttttcgaatcactcactttcaatgatcccttcatattaaatatctaacgaatactttttgcgactgttttacgattgtgtcatgccaactcgtacaattgcttaggccgaatctttggctacgtctaggcttggtcttgcttcggcctaggcttaagcttaggctttgttttgtaaaaatacgagttgacttttgacccgaatagtaataacattcattgttctaaatcaacatttttttgttaactttgttctgctggtcgatctgattttttcactttagccatcactatttttaatacactttaaacatcaccaatttgttccaaatg

SEQ ID NO: 111413 - DNA, 55 bp, Heterodera glycines
ggttgggcaaaggccctttcgtccgccacccttttgatcatttccccaaggaatg

SEQ ID NO: 111414 - DNA, 589 bp, Heterodera glycines
tctaatcaaaaaaaaaaatttcaaaaaatgtattacgcatttttcaaattaattttaaatgataaaaaggcgttacgaaattaaaaatttaatttttttttgttacttaattacaatttttaattttttggaacaaaaagatgaaaaaatcatttaacaaccttagtggtaaacaaaaatttttttattagttttttagactgtaacattcatagttaatttcaaaaaattccaacattgatcaaatcttgatgacaatgaaaataattctgaaaaatacgctttttttattttttgagcaaaagtcttttttttgtaaaatttcagctcaattagacaattattttaaatggctttaaaatgtacacctcgtattttttatttttaattcaatgtttttttttataaaaaaaaacatttttaattgaaaacgaacttttattaaatttcgtaaattattttttgaaaaaaaatattaaagaaatttgcctgcagacggccttgcctgacggtgggaccgtcaattagccgtaattctggcaatttgctatcgtacaccagctgctcttggtacggtagcatttgaatg

SEQ ID NO: 111415 - DNA, 452 bp, Heterodera glycines
ttacacttaaaaataaatgtttaaatgtgactctcaaaaaaaaaaaattgttccccgggatttttcgggctcactgatcagtgatcacgaatttagggaaaggaatcaattgatgttagagaaaatccagaaaaataggtaagtcaatcttaaagagtggcaccgaaatttcctataccatcgggactgaaatggcagactgaaaaataataataataaaaatctggtggcgaattactgaaatgtgactttagaggttttttacgaatttttttgttgacttttcaactccaaacaaatttgaataattttccgatggaccaatgtctaaccctaggctttttagccatattatatgggaaattgttgggcttttttacgacatcgttctgataatgacgacttcactcgacttgagaacttagccaacgaactggggagggcgccgaatg

SEQ ID NO: 111416 - DNA, 517 bp, Heterodera glycines
gtctctcccccttcattctctcccctcctctctagccatctctcccccccttttccccccaattccccgcccccggggggttaagatgaaatggtcgagaatgactgagcaaattgtgcatgcattttttggccgtttgattgtttatttttgtttgttattttctgttgtcgttgcgttgccctttccctttttgggagagaaaacgcgcaaagggaccaaacaccgaagaaaaggccccccagggcagaaaagttaattgccaaatcgctctcccatgcccccccccctccccccattttcgcattccctgcgcattttccaattttatttggtctcgtcccaatcgatttgattccccaacattttgccatgacaaataaataaataaaataatcaaacaataatttggcattggacacaaaaatattaggctaataggattatcataaaataatataataattttcattagtccaatagattaaacacaaaactctctcttccgttttcaatg

SEQ ID NO: 111417 - DNA, 111 bp, Heterodera glycines
ttggccgacgcgccggtgcgaaatgaatttgccctcgctgttcgaggtgttcggcaacaacatttggatgcgccgcaaaattttcttccgaaaagaaatgctgttgaaatg

SEQ ID NO: 111418 - DNA, 401 bp, Heterodera glycines
attttcaaacctagaaatttttataaaaaaaattcttaggaactttcttagtacgaaaattccaagaaaaaaatttttgagaaatttttcaaggattttttagaaaattttgaaaaaacttagtagttcattataaaatttctaaaaaatcgctgaaaaatatctcaaaaaatttttttccttgattcgaactaagtaagttcctacgaattttttttataaaaaatttctaggtttgaaaattttttttttaaaaaatgtttcggggggggggggaaatgaagtccacccatgatagggatatcattcaattttgttttaaaatatttatatttgcccctcttcagaaggccgctgccgtactttggcgtcgttttgccgacgacgacggcaccggaatg

SEQ ID NO: 111419 - DNA, 622 bp, Heterodera glycines
ttatttcattttctactgatttggtgatgatttgttttattctttggcattctgttttgtattttattctatgatttgtgaagaatatttcagagtatcaaaaactgtattatttagaaaaatttttattttcaaaaatagttttattattatttttttcttataatattttcttatctcttttttctttcttttatttctatcacagagaatacaatgattggaaattctttgtggtaaaataaattttgaatttaatgcaattgaaaataaaaaagttttcagatcacaaaatcatcgttaatttgatcatttgacaaaattacccaataaaatatgtacatagtttgttttttttctgtccttgttttgtattttatatttttctgcctttttaaggcgagttaacggagaatgattttgccattaattttattcattcaccattttcgtaaaatgaatttcaataaaaataaattttatttaaaaaaaaataattattttattctttttcataaaaatggttttaataaaatttattttattttcaattaactaattattttttttaatttaggaaattactttattttaccacagaaaaaaagcaaacaaagaaatg

SEQ ID NO: 111420 - DNA, 316 bp, Heterodera glycines
taataaaagtcaacgtagaagcttcaaaccaagtggaaaatgtgttatttatatttataatatgtcgaaactagtgcgcaaaaaaggcatatgccgcaaaatccggtcttctctagttatcagggaatgaaaaaatgtaagtttaaatccgattttggacttaggtgcaaatgtccgaggcgtatacactttggagggcatctgtctgctgcatggcgttagtgtcagataactccctttttattttacagaaaatttccactttttatgtgcattgtcaaaattttcaccaacactgtttgaagtgttcaaaatg

SEQ ID NO: 111421 - DNA, 78 bp, Heterodera glycines
ccattaattcagtcatcccgctcaccgctgctcggcgaggcgctcgtggtcggcttccaatttttgcgtgaccaaatg

SEQ ID NO: 111422 - DNA, 96 bp, Heterodera glycines; identical to SEQ ID NO: 100709

SEQ ID NO: 111423 - DNA, 173 bp, Heterodera glycines
aagaataattatgtttaatttgctttttatgtgtaacatacagagaaagctaaaacaacaagcaaatagcgttttctttatttgctcatttgtcagcaaaacatcccacaatatatatcaaattgtttattgcttttcgattctttttagaataaatttttcgtttgaaaatg

SEQ ID NO: 111424 - DNA, 105 bp, Heterodera glycines
ttttttatgatggacggaacccacccttgcgtatgttcagttcgtaaatttcaatcttatccacatattacagtaacaggcagtatattatcaccctcaaaaatg

SEQ ID NO: 111425 - DNA, 396 bp, Heterodera glycines
aaccgagatggcacaccacgatataaggacgatctcattttgaagaatttatacttgttgatcaaatgacaaactctttctttgtaattttgccgagcaatacgccaggctttgttggaaataaaacaaacaaattcaaagtgcacttgccaaagaagttggtgtttgatggggccgggtggatggttggactgtcaggcataatttacccaaacaggtgggcaaaaatcatggctattgggtccgatttttggcttaagttgggcaaagctgggtacatcagaccgacaatatgtgattgttcacctgcacgacggccgaaaataccgtttccgtgtgccaaagggaagttttctctcgccacagcagcttgagaggggcattcatcatggcatg

SEQ ID NO: 111426 - DNA, 1003 bp, Heterodera glycines
ttaacgcagaaatgcgttttttgagctcctttcttcaaaacaattgagcaaaaaaaaaagttttttcactagaaatcggttccctagttataagttacatattttttctgcgcacatgcaaagaatttttgtgtttttagtccatattttggccatttttggcaaattatcacaagaaactgcaaaaaaagtgaaaaatacatccctaaaactgggtatttttggaaatttttttaaaatacacctctaaaaaagaatttttccgaaatttctgaatttttttttatgtattttgtccatccgaaaattttcgcggagatattatttattataaacatttttagatgcatttgttttgcaattgtgaagctaaatttaataaaaattggcattttttaaatgttaatccattttttggcagtttttcgcgtattttaagtctattttagcaaatattgaatataaatatatttttggaattttatggtttaaaatatttattttgtcagtttttagtccatatttgaccatttttagctttttagcatttggctaagtgttttgtatttaaatttgaatttgaagagaaaaaaagcaaatgaaaactaccaaaactttttcaacgatatatgtatactaggaattaatcattcatcgaatgtagctcaatttttataatgctgaaaagtttcaaggatctaatttttctgggtttgggatttactggccaaacggcctctcaaatgccaaccattttaaatttaaataaaattcagtttccataaaacaatggaaggaggctttttgaggtttttttccaaaaaagcagttggtatcactgggttttttatgcaaaattttcatactcctaagaaaattgcagactcaaaggagtcccctacagaaatttttctaatgttaaggtataattgaaaatttataaccattacaacaaaatgtgttctttttaattaattgcattcgattttttaagttgagaatg

SEQ ID NO: 111427 - DNA, 135 bp, Heterodera glycines
agtgaaccaaaaccttttactctgctttcgattttggaaaaacaaccaaaaaaaaagtctgacgataaattggaaaaagaaaaaggcaaaaacctcattattataaattataaaattaggtttccttcagaaatg

SEQ ID NO: 111428 - DNA, 702 bp, Heterodera glycines
attatgactcatcttttcttttctccatattttcgctatgagtcatcatttttgagggaattttttccctttgcttgtgtgcatttcttcacgtgcctggccccgcccccatcgattgtgagggtataaaagcccggcccattctccattttcttcactctgatcaatttttgattaagtcacccggacagttttctgtccaagcaatttgcattaaattgtaattgtgtaaattgaataaagattaagaaagagtcttagtcttttctctatctgtaaaagggacgctcaggagccctttcatacagatcattaagccattgacccccgttgggtcaaagaaaaggcttacaaaaggaaaggagaagcattttcctcctttcaaattgtcccttcagtaaaggagaggaatttcctcctttaatttgtccctttggacattcagtgaatttctgtcttttggacagaaattcgctttgcttaaaagactccccccttctgccgggagagtctgcttccccttctgccgggaagtgcaaatttttgtggccttttgcccacaaaattggagccccgtaggggtcggcttccagtcgtaagcctaccctccaaccaaaccaatccaaagcgcggccttagcgcttggatcaaacgcacaacccaaaggggtttattgcgttttcatcaagcgtaagagcaatg

SEQ ID NO: 111429 - DNA, 714 bp, Heterodera glycines
gtttcaattgcatgattttgaattaagacgtgggattgaatttctcaaaacatattaaattcattttcccacggtgataactagggatgcgatttttaggcacaaaaaatcgcgaaataggcacctaaaaaggcagaaaaaaatcgcaaaataggcactaaataggcacaaaaaagcccgaataggcacaaaaataggcaaataaaattttttataacgctttttaggtaacaaaacacgttaaaactttaaatatttcaattgtaaatgaaattattaaatgttttaaagtttttttcgaatatgaacaaattaaaccaaaaaatttttattaagaaaaaaatattaaatttagggaaaatttttttgaaaaattttacaattcttagcggtgtattttctgaaattttttttgggtcatttcttaggggtgtattttttgtttttattgcatttttgttaaggattttttcaaaaaccctaaaataggcactttaggcacaaaaaccccgaaataggcaaaaataggcattataaatgtcatcgtagacaccccaaaccatgcggaaagggcttttttcgtgcttatctgtgcgtattaagtgcgcaaaaattttaggcatttgcctaaaaatcgcatccctaataataacatcaattatttaataatttttgaaattttcttatacataaatatgatttatttcagggatg

SEQ ID NO: 111430 - DNA, 839 bp, Heterodera glycines
ccccgagaaattttttttttgaaaatttctgtttgcaatttttttttttaattttggagatggggcgaaacggggcaactgattggaactgatacggggagatctaccgtctgtaaaacttttatgtgacgggctttttccgcctttgttgaatttccactttcaaccccccccccccgccagcttatccattcattaaaaatccggtttcaatttacaaacacatccctccttcattccctcccccattcaattaatccgccgtcatccgcctcaatcctggaaaatcaatccgcaaatgatttctctctgtgtctatgccctcttctagcgccggaggcggcacgaattagtcatcaccggtcggatcggcgccggacggcgccgctggatttgtgaaaattttcatttctaaaatagggttagaccccaatttcccccgggttttttttggcatttttcggggaattccccgacccgacatgtccccgacagtagcttccctaaaaatttccatccccccgatttcgggatgtgtaaatttttaaattactcataatttagggaggcccatgggtttaaattctctcccaccattaaaaaaaatcaaattttcaaaaattaaataaaaattttcttcgtctcttctaattggcacattcagcctgtattttgtacaagaaattttgagaaaaatacgctgaaaattgactttgattagcatttttttcttgaaaataaaaatcacaaaaaaactaaaccaaaaaatcaataaaaaaatttttaacatttaattaaaaattcaggctatttattatcaggcatttgtctaaataatg

SEQ ID NO: 111431 - DNA, 125 bp, Heterodera glycines
ttttggcattttgatttcaaatttggaaaaagaaaaattttaaaaagcaattttatttcgactttgctccattattcccttaaaatcaaaaaagcatttaatgccaaacaacaacaggagaaatg

SEQ ID NO: 111432 - DNA, 552 bp, Heterodera glycines
aaaatttgagtgtaatatattaacagaacttgtcaaaaaatgatcaaagttttggttaaatttgcagttttaggctgtttaaaaaaagaaaaaataataatttttaaattgaaatattttttattaattaaaatttcaattgaaaaataatttaaagaaattatttaaaaaattctgtaccgttggggaattgaacccacgagaaaaataatgaaaggcagaaggtttagccagcagaccatatttgaattggagctatccaaaaatagagaaaacattaaggaaggaaagaaagagatttaagatttttttttcgcgtaaatttgaaaatttttctggctgctcaaaagttcaatccttaggggtgtattatcaactctcgcctctcgtcccaaaaaacgagaggcgagagacgagaggcgagagtaccaaaaatggcgagagttggcgagaggcgagagacgagaggcgagagttgtcccacccctggtgcgcagctgcattacttgccaattgcgtcattccccaacacctgcatattgagctgaaatg

SEQ ID NO: 111433 - DNA, 475 bp, Heterodera glycines
cttagaaaaagcttctaagcatattaaactttcgaatgatttaactatattggatttggttggcaaagaaaaaagttatagtcaaaaaatcggctggggccgaaccatacggggccgaactgaggtagaccggtaattttggttctaatacacaacgtccatttcaaattgtaaaagaaaaacaggaaattccggttttcaactctgtataatcctatcactatgtagaccatttaacaaaaatttttatttggtccattttctctaaacttaccattcataaaaaagtagaatctcttaattgcaattaaaaagttcaattttcagaaaatatacctattttgctttttatctattcattgcattatgtattcgatgccaaaaaagcgtcgggatccgggtgacgaaactatgatggatggtatttatcctaaataaattccatcaaaattcccataaattttgcatagaaatg

SEQ ID NO: 111434 - DNA, 1003 bp, Heterodera glycines
ggcaattcatttcatgacaccaaaagtccttttcctctattctttcattcgcaatttcgaattctcttcgttttcctttttgctgtttaaaaatgttaccattttggtgtttttgcccaatttatgattttacattatttattttccctttttggccatttcaattaaaatcctttcacacttttgccatttcaatttgaggacacgacaatgccaataaatgtgtacaaattgacccgacttattatacgattaaatattgtttattctgataattattaatttttaccatttgatatttcccttttcattttctaaatttggcaccgattgaattcctttattttaatttattgaatttaatgttttttattataaaaatcggtatcatttcacttttttaatattgaatctgctaccaattgtgccccccccccccggggatgcacggaatttcgttttcgttttgtcctacattttcggcactttttgagtttcgttttcgttcgtcaaaaaattttcgttttcgagtttaaaattttatttttcgttttcgtatcgaaatgccctttttcgttttcgtatacgaaattttttttaaagttttcgtgcagtcctgccccccacccctctcttccctttttggccctaaatgcttttcccgttttattccattttaaaaataaaattaattttcttccttgattgtccaataaaattatttgaaagtgttcaaagaatgcatttccttcccctaaacttaccttaatttccgattccttttttggggtgccaattctccgccgtctttgagttgttttttggttttgtttgttttttgttcctccccaaatcaggccgaaacgagtgcaatattacaaattgtgccgcttttcaaatatggcaaacgtcacagcctgactgagaggaggaagcactttggaggagtgaataaagagaataaaataataataacaataaatatgattaaaaggaaataatg

SEQ ID NO: 111435 - DNA, 80 bp, Heterodera glycines
aacaataccttacttaacaaaattattattatttataatataaaaggataaataaaatatttatttgctaagggaaaatg

SEQ ID NO: 111436 - DNA, 52 bp, Heterodera glycines
tatggaaaactcaacgagggcaaaattggatttgaacgctttgaaaaaaatg
